United States Patent Application Publication US 2008/0034453 A1 - sequence listing, part 3

SEQ ID NO: 16158 - DNA, 311 bp, Zea mays
gaccgcagctctcgcgccgtcgccctcctcggtgtacgaactcatgtcacggctgttgatcaagccattgtaaaaggtgatacaaagttggaaggtcctgtggttgttgttactggtgcttccagggggattggaaaagccactgcattggctcttggaaaagcaggctgcaaggtcttggtgaattatgctcgatcttcaaaggaggctgaagaagtctccaaggagattgaagcatctggaggccaggccattacctttggaggagatgtttccaaagaggctgatgttgaatctatgataaaagtggc

SEQ ID NO: 16159 - DNA, 308 bp, Zea mays
gggaagcagtgttagctacatttctgcccgaggagcacggaagcttcaaaaaattcacagaattggttggcaggatgaatattactgaatttaaatacagatatgattttaatgcaaaggatgcccttgttctttacagtgttggcatttacactgacaatgagcttggagcaatggtggatcgcatggaattggcgaaactgaagactgttaatctaactgataatgatttagcaaaggaccaccttagatactttaaaggcctggtgcccttatgaaatttttggatgcattcagccctcgttgga

SEQ ID NO: 16160 - DNA, 303 bp, Zea mays
cacacactcgggtaaagctatctcgagctagctagctgctgtaaccgttgccatggccaaaatggtgttgctctgcgtgctcgtctccttcctcctgatgcccttggcctccctagccctgacgcaggacttctgcgtcgccgacctgacctgcagcgacacgccggcggggtacccgtgcaagtccagcgtcaccgccaacgacttctacttccacggcctggccggccagggcaaaataaacccactcatcaaggccgccgtgaccccggccttcgtgggccagttcccgggcgtcaacgg

SEQ ID NO: 16161 - DNA, 131 bp, Zea mays
cttgatcctctggtccgtggccatggcgtcgtccatgctctccgctaccaccgtgccactccagcaggggggcggcctgtccgagttctccgggctcaggagctccgcgtcgctgcccatgcgccggaatg

SEQ ID NO: 16162 - DNA, 307 bp, Zea mays
caccgaaccacccacctcggcggcggcggcggcggcttttctgcctgcgaagagagaaaccaaggagaggggcaactcggaagagggcgaggatgcctcggccggagttccaggcgccgccggatgtgttctacaacgagtcggaggcccgcaagtacaccacctcctcccgtatcatcgaaatccagtctaggatttccgagagggcgctggagttgcttgctctccccaacgatggcgtccccaagctacttctcgacataggatgtggttctggacttagtggtgagacattgacggagcatgg

SEQ ID NO: 16163 - DNA, 301 bp, Zea mays
ggaccgtggctcctggcgctcgccatggcgactctcctcaacgtgcagctgccaggattcaagtatctccctaccaagaacaacaggctaaagtgggcgcatataaaagaagatgaagacaacgctcatggcgatcatacagttgcgggtggcatccaatggaaggagtagtggatacggaaacgacctgctcggcctgatgctcgaggcctggctcacagcggaacgaggaggggaacgggacgagttgagcctgaccatggacgatatcatagacgagtgcaagacattcttcttcgca

SEQ ID NO: 16164 - DNA, 301 bp, Zea mays
gctgaccaaagccgggctgatcaacgcgccgcagtggtacgacgccggcaagtcggagtacttcgcgtcgtcgtccacgctgttcgtggtcgagttcatcctgttccactacgtagagatccggcggtggcaggacatcaagaaccccggcagcgtcaaccaggaccccatcttcaagagctacagcctgccgccgcacgagtgccgatacccgggcagcgtcttcaacccgctcaacttcgcgcccacgctcgaggacaaggagaaggagctcgccaactggaggctggcgatgctggcg

SEQ ID NO: 16165 - DNA, 308 bp, Zea mays
cggaggtttcaacctgtgaaagtgccagaaccaacagtagatgaaaccattgaaatcctcagaggactgagggaacgatatgagatccaccataaacttcgttacactgatgaagctctgattgcagctgcaaagctgtcatatcaatatatcagtgatcggtttctcccagataaggcaattgacttgattgatgaagcaggttcccgtgttaggctacagcatgcacaggtccccgaggaagcaagagagcttgacaaggagttcaaacaagtcacgaaacagaagaatgaagctgttcgaagcca

SEQ ID NO: 16166 - DNA, 284 bp, Zea mays
cccgtggcatcgcctcctccacgcccaggaaggcattccatgtgagggcatcagctcgggttgacaaattctcaaagagtgacatcatcgtgtccccttcgattctgtctgcaaactttgcgaagcttggtgatcaggtaaaagctgtggaggtggcaggatgcgactggattcatgtcgatgtcatggacgggcgctttgtgccaaacatcacaattggacccttggttgttgatgctctgcgtccagtgactgatcttccgttggatgtacatctgatgatt

SEQ ID NO: 16167 - DNA, 281 bp, Zea mays
agatcgtactggaccaatctgccaccacactttgatcacacacaggaagttgagatcagaaaaatgcaggctgccgctactgccgccgggttctcggccgtgctgcccgccaagggcaggccggcggcgaggagcagggtggtggcccgtgtccccgccacaaggaggagcgtccgtgtagctgccgtcgtcgcgaccgaggccgcgcagatcgactacagctcaagcgtctcggtgttcccgatggaggcctgcgacctgcttggtggcgacgcgtgcaa

SEQ ID NO: 16168 - DNA, 285 bp, Zea mays
ctcgcttgccgccggcctcgccgtccgcttcctcgtgccgcggccggccgaggtaaccccagaggcctggcagctcctctccatcttcctctccaccatcgcggggctcgtcctcggcccgctccccgtcggtgcgtgggcgttccttggcctcacagccaccgtcgccacccgcacgctccccttcaccgccgcgttcggggcgttcactaacgaagtcatctggctcatcgtcatatccttcttcttcgcgcgcggctttgtcaaaaccggactcggcgaccg

SEQ ID NO: 16169 - DNA, 283 bp, Zea mays
gcctcgaaattcctcatcagctaccagcactggaccttctacccggtaatgtgcatcgccaggataaatcttctggcgcagtccgctgtcttcgtcctgaccgagaagagggtgccgcagcggctgcttgagatcgccggtgtcgccgcgttctgggcttggtacccgttgctggtggcgtgcctgccgaattggtgggagagggtggcgttcgtgcttctcagctttaccatctgcgggatccagcacgtccaattctgcctgaaccacttctcgtccgatg

SEQ ID NO: 16170 - DNA, 287 bp, Zea mays
cggacgcgtggcgtgacgcgtggggggccgactcctacacgctcttcgtcttcaacatggcgctcatgggcttcgccgagcaccgagctctccaggaagctgtacaacccgggctccatgggcaagcagtacttcctcggcctcgagaagttcctcgccggctccggcgacccgtcctaccccggcgggcccctcttcaacccgctcggcttcggcaagaccgagaaggagatgaatgagctcaagctcaaggagatcaagaacggcaggctcgccatgctcgccat

SEQ ID NO: 16171 - DNA, 260 bp, Zea mays
ggaaacggcgagaggcttttcctgaaggttcatcatagctatataccgctgcaaaggggtctggtactgccgcaggtgttcatgaacttcttaatttggagttcctgagatagtactgccggaggaagcagtccacgcaagtagtgtccatccctttcctcctctgtgaaagcaagacccttgttgtggtgtggatccctcaaaagggtgtaaccgcttgcgacggaggtggcccagggcatgacgggcagctcctcgct

SEQ ID NO: 16172 - DNA, 195 bp, Zea mays
ccagctgccattgccatctactgacctgtgacctccgcattcccaaacagcccgagcgagcgagctagcagagcgacggcaggcacctccctcctcaaggaacatggcccgcacgcagcagttggcagtagtggcgaccgccgtggtggccttggtgctgctggctgcggcgacctcggaggcggccatcagctg

SEQ ID NO: 16173 - DNA, 286 bp, Zea mays
cccacgcgtccgcccacgcgtccgcccacgcgtccgggcccacgcaccttgccatcctgtcccagccgccggacaccatcaacgggtccatccgtgtgacggtgcagggcgaggtcatcgagttctgcttcggggaggagcacctgtgcttccagactctgcagcgcttcacggccgccacgctggagcacggcatgcacccgccggtctctcccaagcccgagtggcgcaagctcatggacgagatggcggtcgtggccacggaggagtaccgctccgtcgtcgt

SEQ ID NO: 16174 - DNA, 257 bp, Zea mays
cttcaaaattatcattaatttatgatgttcatgtaactatagtcgtaggataatgcagggccggtttggtttcatcacgcggatgggagcaccttcttgacgatctcatcactgagcgaggcgatctgggcgtcgagcgccttaacagcctcctccttctgcgcctcgaggtttgcgagcgcctctacaatctcggcctccacacggctgcgccctcgtccagcttggcctccagctccgcggtggtctccttcttc

SEQ ID NO: 16175 - DNA, 277 bp, Zea mays
ggcatttctagtgatggaaatgcatatttgcaagagagccagttttggaaactttacaaggaagatcctgcagcatgtgcaatcgtgatgaaaacttcagttggccttgtttacctgcttgcctgtctgctggagcctttcatgccctctttttctgatgaagtgttacgtcaactaaatttatctccagaagaaaatctgtcattaagtgaagaaaagggagaaattgcgaaggcaaaaactccttggaattttgtaccagcaggtcacagaatag

SEQ ID NO: 16176 - DNA, 279 bp, Zea mays
aaccggtccagcactttcacgctcagctccagcaatggctgcctccaccatggcgatctcctccacggcgatggccggcacccccatcaaggtgggctccttcggcgagggccgcatcaccatgcgcaagaccgtgggcaagcccaaggtggcggcgtccggcagcccctggtacggccccgaccgcgtcaagtacctcggccccttctccggcgagcccccgagctacctcaccggcgagttccccggcgactacggctgggacaccgccgggctgtc

SEQ ID NO: 16177 - DNA, 277 bp, Zea mays
ggctggagtctgctcatatggtgttgtcatccattggtagcaatgcctaaacatgcacttggcagatttttgcattgtactattaattatttgttccttctgtaaaggtctgggatagagcagatgagttcattccagagaggtttgatttagagggacctgttccaaatgagtcaaacacagatttcaggtttattccattcagtgggggtcctcggaaatgtgctggagatcaattcgctctcctagaagcaatagtggcacttgcagttgtgtt

SEQ ID NO: 16178 - DNA, 277 bp, Zea mays
gcaaaaggcaacaccgcccgcgacgaccacgatggcagcctcgctccaagtccaagccgcggccaccttgatgcaaccggccaagatcggcggccgggcgccgtccgcctcgctgccgtcgtcccgcccgtcgtcgcaactcgccagggcgttcggcgtcgacgccggcgccgccaggatcacgtgctccctccagtccgacgtcagggacgtcgccagcaagtgcgtcgacgccgccaagctcgccggcttcgcgctcgccacctcggctctcctc

SEQ ID NO: 16179 - DNA, 279 bp, Zea mays
gaagaagacgagtgtcaagtgaacctgaaacttgcggtgtcactggctggtagcctgagtgtgagtgagtgatcgagctagctgagctccgatcctcgctagctaggataccgccataccacaagtcttcttcacaagtttaggagtgacagcaacaagagatcgatggcctctgccaccgtgctcaagtcctccttccttcccaagaagtccgaatggggcgccaccaggcaggccgccgcgcccaggccgcccaccgtctccatggtcgtccgcgcc

SEQ ID NO: 16180 - DNA, 278 bp, Zea mays
atgcgagtgtccatgctcatttggggtgcactggtagtaggagggatgatttagagtcactggcatacacccttattttcctgataagaggaagattaccttggcaaggctaccagggagataccaagagtttccttgtttgcaagaagaaaatggctacttctccggagatgctttgttgttattgtccagctccattcaaacagtttcttgagattgtcacaaatatgaaatttgacgaagagccaaattatgccaagcttatctctctttttgat

SEQ ID NO: 16181 - DNA, 273 bp, Zea mays
atcgcgagcgcacgcacgtaagcacgttgtcggaagctcaagttagaagaagcaccagtgcctgatcgatggcggcccaggctctcctctccggccggcagctgctgggccgccccgtgcagtcggccgtctctaggtcgtcggcgaggaaggcgcccttcgtcgtcagggccagctccagccctccagccaagcaaggtgccgacaggatgctgtggttcgcgtccaagcagtccctctcctacctcgatggcacgctgcccggcgactatg

SEQ ID NO: 16182 - DNA, 269 bp, Zea mays
  unsure (1)..(269): unsure at all n locations
ccacgcgtccgcgacggtgcnatgacgcgtggaagtgaacctgaaacttgcggtgtcactggctggtagcctgagtgtgagtgagtgatcgagctagctgagctccgatcctcgctagctaggataccgccataccacaagtcttcttcacaagtttaggagtgacagcaacaagagatcgatggcctctgccaccgtgctcaagtcctccttccttcccaagaagtccgaatggggcgccaccaggcaggccgccgcgcccaggccgc

SEQ ID NO: 16183 - DNA, 252 bp, Zea mays
cttgctctgatagcttgctccaggacgtacgtacgtacgtagatcgatccatcgatcgctagctagctgacgaccatggcgtccctctcctctgccgccatcaccgccccttccttcacggccgcgcccgctcgcgcagtggtcagcaggaggtccttcaccgtgcgtgcctctctccgcaaggccactgccaccgccgccgtggccgttgccgccagcgtcctgcttgccggcggcggcgccatggcccag

SEQ ID NO: 16184 - DNA, 309 bp, Zea mays
ggaccagaagaagctcgatgtcgtctccaacgaggtgttctccaactgcctcaagtcgagcgggcgcaccggcgtgatcgcctcggaggaggaggacgtgcccgtagcggtggagcagagctactccggcaactacatcgtcgtgttcgaccctctcgacggctcctccaacatcgacgccgccgtctccactggctccatcttcggcatctacaaccccaacgacgagtgcctcgccgacgtcgacgacaatgacacccttgattcggtggagcagaggtgcatcgtgaacgtgtgccagccggggag

SEQ ID NO: 16185 - DNA, 310 bp, Zea mays
ctccctctcctctgccgccgtcaccgccccttccttcgccgcaccagcgccacccgcgccgtggtcagaaggaggtccttcaccgtgcgcgcctctctccgcaaggccaccggcaccgccgccgtggcaatggctgccagcgccctgcttgccggcggtgccatggcccaggaggtgctgctgggcgcaggcgacggcgggctcgtcttcgagcccagccagttcaccgtcaaggccggcgacaccatcacattcaagaacaacgccggcttcccgcacaacgtcgtcttcgacgaagacgaggtgccga

SEQ ID NO: 16186 - DNA, 310 bp, Zea mays
agatatttgatgctataagctataggaaaggagcttctgtcattcggatgctgcaaaactatcttggggctgaggtctttcagaattctttggctgcatacatcaaaagatttgcgtattcaaatgcaaagactgaggacttatgggctgcccttgaagaggggtctggtgaaccagttagaacattaatgcattcatggaccaaacagcaaggttatcctgtcattactgtgaaactcaaggatggaaagttccaactggagcagacacaatttctttcaagtggatctacaggagttgggcaatgggt

SEQ ID NO: 16187 - DNA, 314 bp, Zea mays
ggcaggcgtaccgcacgctgctggtcacggcgccgggcctgggccagtacatctccggcgccatcctcttcgaggagacgctgtaccagtccgccgtcgacggccgcaagatcgtggacatcctggcggacagggcatcgtgccggggatcaaggtggacaagggccttgtcccgctcgccggctccaacaacgagtcgtggtgccagggcctggacggcctggcgtcccgcgaggccgcctactaccagcagggcgcgcggttcgccaagtggcgcaccgtcgtcagcatccctaacggcccctccgagctcg

SEQ ID NO: 16188 - DNA, 314 bp, Zea mays
cccacgcgtccgcccacgcgtccggcttcagtgggtgggaatgttttcaaaaataaaacttgatggtgaatctgtcaaaggccttgatggattcaacatttggaaaagatgtacctctgctaggtaccaaaatttgggttgtaataattaagctgagaccaggcagttgacttgcacgagaaaggagtctcggtgtagtgtctccgtctgagtcgattaaggaccgtgtcgatgtagacttgatgatcgaggaccttttaactggtcacatacctcgtcatgggtaagctttgtctcgagcagactaataccag

SEQ ID NO: 16189 - DNA, 317 bp, Zea mays
cccacgcgtccgggccgccacaccaccccgaccggaccctccacaacaatggccaccgtcctgggcagcccccgcgcgccggccttcttcttttcgtcgtcctccctccgcgccgcgccggcgcctaccgccgtggcgctgcctgcggccaaggtgggcatcatgggccgtagcgccagcagcaggcgcaggctgcgcgcgcaggccacctacaacgtgaagctgatcacgccggatggggaggtggagctgcaggtgcccgacgacgtgtacatcctggaccaggccgaggaggacggcatcgacctgccctactc

SEQ ID NO: 16190 - DNA, 311 bp, Zea mays
gaccttcaggatgaacgcgctggcgtacttcacgctcctgtcggggttctacatggcgtggaacatcggggcgaacgatgtcgcgaacgccatggggacgtcggttgggtccggagctctgacgctccggcaggcggtgctgaccgccgcggtgctcgagttctccggcgcattcctcatggggacccatgtcaccagcaccatgcagaagggaatcctggttgcgtctgcgttccaagggaaggactctctgctcttcgctggactcatatcctcccttgctgctgccggtacatggctgcaggttgctt

SEQ ID NO: 16191 - DNA, 322 bp, Zea mays
cccacgcgtccgcggaggtggccgtcgagaacggcaccctcgagcagacggtctccgacctggagaagctggagaaggtcttcgcggacgaggccgtcgcagagttcttcgacaaccccaccgtcccgcgcgaggagaaggccgagctcatcgacgagatcgccaggtcgtccgagctgcagccgcacgtcgtcaacttcctcaacgtcgtcgtcgacaacttccgcgcggccatcgtgccgcagatcgtcgccgagttcgagaacgtctacaactcgctcacgggcaccgaggtcgccaccgtcacctccgtcgtgcagct

SEQ ID NO: 16192 - DNA, 306 bp, Zea mays
cccacgcgtccgcccacgcgtccgggcgacaacatgattgagaggtccaccaaccttgactggtacaaaggcccgaccctgcttgaggctcttgaccagatcaccgagcccaagagaccttcggacaagcccctgcgtctccccctgcaggatgtgtacaagattggtggtattggaactgtaccggttggtcgtgtggagactggtgtcatcaagcctggtatggttgtcaccttcggtccaactggcctgactactgaggtgaagtctgttgagatgcaccacgaggctcttcaggaggccctt

SEQ ID NO: 16193 - DNA, 306 bp, Zea mays
atgcaacggcagtaaagcatggcttagatgcaaatgtttttgtgggcagttcactcatcaacctgtatgtgaaacatggctgcatctctgatgcaaagaaggtgtttgacttctccactgaaaagaacattgtgatgtggaatgctatcctttatgggtttgttcaaaatgagctccaagaagagaccattcagatgtttcagtatatgaggagagctgatcttgaggctgatgattttacatttgtgagtgtccttggcgcgtgcattaacttgtattcacttgatttaggtaggcaggtacact

SEQ ID NO: 16194 - DNA, 306 bp, Zea mays
caaacatctggtttcgctgccccgattcgccacgaagccgcactgtgagagagggacgcggcccgttgtcctcggcttgtacgcaatccttccgtcgctgcgaactgatccctcgtgttcgccatggcccccagcgtcgccgtggaaaacctcaaccccaaggtcttgaaatgtgagtatgcagtccgtggcgagattgtcatccatgctcagcgcttgcagcaacaactacaaacacaaccagggtctcttccttttgatgagatcctgttctgcaacattgggaatcctcaatcccttggtcag

SEQ ID NO: 16195 - DNA, 309 bp, Zea mays
cccacgcgtccggttcttcgagacgttcgcggctccgttcaccaagagaggtctgctgctcaagttcctgctgctgggcggcggctcacttctggcctacgtcagcgcgtcggcgtcaccggacctcctgccgatcaagaagggacctcaggagccgccgcagccgggcccgcgcggcaagatctaagctcagcttctccatttgcatggtctagtagcttgctttgtactgctagcgccggtcgatccgtcgcaatcgtcatggatcatctctctatcttgttgttacgctgttcataatttggtata

SEQ ID NO: 16196 - DNA, 307 bp, Zea mays
atttggcacaatggttgtcatgtttgtactttgggctttcatctcctttcccttggtgcttttgggaactgtcgttggtaggaactggagtggagctcctaacaatccctgccgagtaaagactattccacggcctattcctgagaagaagtggtaccttacaccttctgtcatctcattgatgggtggcctgcttcccttcggtagcatcttcattgagatgtactttgtgttcacatcattctggaactataaggtgtattatgtctatggcttcatgttgctggtctttgtcatccttcttata

SEQ ID NO: 16197 - DNA, 310 bp, Zea mays
ggctgtggtggcagcgttggctgatcctctcaaggtcatgatatcaggagctccggcgtccggcaagggcacacagtgcgagctcatcaagaccaaatatcaactggcgcacatctccgccggagatttgttgcgggcggagatcgctgctggctctgagaatgggaagcgggccaaggaattcatggagaagggccagctcgtgcctgatgagattgtcgttaatatggtgaaggaacgccttcggcaaccagacgctcaagaaaatggttggcttttggacgggtacccaagaagctattcacaggcc

SEQ ID NO: 16198 - DNA, 312 bp, Zea mays
tggattaaccacccactaggaaagaacttgattggggcattctaccagccacaatgtgttctaattgacacaaatacacctaacacattgcctgacagggagctagcttcaggcattgccgaggtagtaaagtatgggctcataagggatgcaccattctttgagtggcaagagaagaacatgccgaaattgttagcaagagaaccaaatgctttggcatatgctatcaagagatcatgtgaaaacaaagctgaagtggtggcacaagatgagaaggaaagtggccttcgagcaacactaaacctgggtcac

SEQ ID NO: 16199 - DNA, 313 bp, Zea mays
cccacgcgtccggtcttcacactcctcgccatcacataaaaccagtgcaagcagaagcagcgcaatggcgagcagcaccatggccctctcctccacagccttcgccggcaaggcagtgaacgtgccgtcgtctctcttcggcgaggcccgcgtgacgatgcgcaagacggcggcgaaggcaaagccggcggcgagctccggcagcccgtggtacggccccgaccgcgtgctctacctgggcccgctgtccggcgcgcccccgagctacctgacgggcgagttcccgggcgactacggctgggacaccgcgggg

SEQ ID NO: 16200 - DNA, 311 bp, Zea mays
cgccgtcagtccatgtgaactacacaaagctcctcattaatgggaactttgttgattccgcatccggcaagaccttcccaactctggaccctcgtacaggggaggtgattgctcatgtggctgagggtgacgcagaggacattaaccgtgcagtagctgcggctcgcaaggcttttgatgaagggccatggccgaagatgactgcctatgagaggtcccgtatcctactgcggtttgctgatttgatagagaagcacaatgacgagcttgctgctttggagacatgggacaacgggaagccatatgagcaa

SEQ ID NO: 16201 - DNA, 310 bp, Zea mays
gcgacgctctcgagagatccatggatcggcgcaagggcggcaaccgcgacaccaacggcagcctggtcgaggccacggcgtcgcggctgagggtcgaatccgacgaggaggcggaagaggtggggatggaggtggaagagagcttcgacgcgggggtggaagacgagcaggcggcggcggaggtgattggaagcgaaaagaccagcgccgactactacttcgactcctactcccacttcggtattcatgaagaaatgctaaaagatgtcgttcggacaaaaacatatcaaaatgttatcacccagagtag

SEQ ID NO: 16202 - DNA, 315 bp, Zea mays
cccacgcgtccgaatgttttgtttttacaaaagatgatgtggcaaaagtgggtaggatgttttcgaaaataaaatttgatggtggatccatcaaggccttgatgggttcaacatcggaaaagatgtacctctgccaggtaccaagctttgggttttaaatgattaagctgagaccgggcgggtgacttgcacgagaaaggagtctcggtgtagtgtctccgtctgagtcgattaaggaccgtctcgatgtaggcttgctgaccgaggaccctttaactggtcacatgcctcgtcatgggtaagccttgcctcggg

SEQ ID NO: 16203 - DNA, 304 bp, Zea mays
gcagaatctcagcttgctgcagttaccacaaggataatgcaggccctacagaataacctagatgggaaatctaaacaatataaggatcctgcattgacacacttgtttcttatgaacaacatccactatatggttagatctgttcgcagatcagaagcaaaagatatacttggtgatgactggattcagaggcatcgcaggattgtgcagcaaaatgccaatcaatataaacgtgttgcttgggcaaagattcttcagacactttctgttcaaggtgcgggcagcggtggtgaccttaccagca

SEQ ID NO: 16204 - DNA, 300 bp, Zea mays
cccggttcgggttcgggttgggcggcaaggcgaactagctccgaagaaggtggcgaagacatcgacctcctctgaccggccgctgtggttccccggcgccgtggcgccgactacctggacggctcgctggtcggcgactacgggttcgacccgttcggtctcgggaagcccgtggagtacctgcagttcgagttggactcgctggaccagaacctggccaagaatgaggccggcggcatcatcggcacccggttcgagtcctccgaagtcaagtccaccccgttgcagccctacagcgag

SEQ ID NO: 16205 - DNA, 303 bp, Zea mays
gacctcacggcctctgacctcaaagagctcgtgggtcagtacaaggaggtctacctctcagccaagggagagccattcccctcagaccccaagaagcagctggagctagcagtgctggctgtgttcaactcgtgggagagccccagggccaagaagtacaggagcatcaaccagatcactggcctcaggggcaccgccgtgaacgtgcagtgcatggtgttcggcaacatggggaacacttctggcaccggcgtgctcttcactaggaaccccaacaccggagagaagaagctgtatggcgag

SEQ ID NO: 16206 - DNA, 305 bp, Zea mays
cccacgcgtccggttctactgggcgcccacccgcgaggaccgcatcggcgtctgcaagggcatcttccgcaccgacggcgtcgacgaggagcacgtcgtccagctggtcgacaccttccctggccagtccatcgacttcttcggcgcgctgcgtgcccgggtctacgacgacgaggtccgacggtgggtgagcgagaccggcgtcgagaacatcgccaggaagctcgtcaactccaaggagggcccgcccacgttcgagcagcccaagataacgatcgagaagctcttggagtacggacacatgc

SEQ ID NO: 16207 - DNA, 301 bp, Zea mays
cagctgtggatgttgcagtgcaggacagggaaacgtacgggcaaaagtgccgtgaagatcgccgtggacatggttaacgagggccttgttgagccccgctcagcgatcaagatggtagagccaggccacctggaccagcttctccatcctcagtttgagaacccgtcggcgtacaaggatcaagtcattgccactggtctgccagcctcacctggggctgctgtgggccaggttgtgttcactgctgaggatgctgaagcatggcattcccaagggaaagctgctattctggtaagggcag

SEQ ID NO: 16208 - DNA, 304 bp, Zea mays
cttcagatagagtgaagacgcgagtgcattttccagggatggaaagaaggcatgatttattttcctccgacatataaatactcattcaactcggatcgttactctggtgtgcggcccaaataaaatcggaggacacatgcttggtgcgatcacattccgtggcctcttgcagtcgtcctacatccgcggagagtctcgcttctttgaccacggaccagtgtacaatcttttcatggctaaggttgggagtgtccaccacagaagatcgaacttaaccttgatcatgatctctagcgctgaggga

SEQ ID NO: 16209 - DNA, 305 bp, Zea mays
atcgtgcgtcaccactaccttatggttttgacaaccaattttatcagataaatagggaccacggtttccctattgagaacagggttcaatatcttccattcaagatgctccctcaaggtcacccccatgatgcacagcttcaggaatttcagtattttgtggttattgactttgaagcaacctgtgacaaggtgaacaatccatttccacaagaaatcatcgagtttccatctgtcttggttaacagtgcaactggaaaactcgaagaatgcttccaaacatatgttcggccgacgtatcatcaa

SEQ ID NO: 16210 - DNA, 310 bp, Zea mays
gattgtcgatgatggtagcactgatggcacctctaaagtcgctttcagttttgtaaagcaacacaagattgataatgttagagttcttctacttggaagaaatcatgggaaaggtgaagcagtccgaaaaggaatgcttcattcacgtggtgaactattactcatgcttgatgctgatggtgcaactaaagtgaccgatttggaaaagcttgaagctcaggttcatgcattggctaagaaagctaagtctagcccagggacatctactagttcatctcagaatctatctgatgttgaagttgctgttttt

SEQ ID NO: 16211 - DNA, 145 bp, Zea mays
gatggaggcctgcgacctgcttggtggcgacgcgtgcacgggcccatgttcccggaagccaagcccgcctcggcggcggcggcggcgagcaggagtgtggtcggggtggacagggactacctgtcctacgacgagccaaagacgg

SEQ ID NO: 16212 - DNA, 123 bp, Zea mays
gggccagttccgggcggcgctgcagggcaacgaccgcgacgagctggagatcaccctcgagagcggggacaaggcggtgcagactgcgtcagggacctgcatgctgtacgtgcacgccgggac

SEQ ID NO: 16213 - DNA, 186 bp, Zea mays
cccacgcgtccgcccacgcgtccgcccacgcgtccgatcggtgcgtccctctccatcgcgcagacatcccgtggctacgctggctggccccggtcgacgagcaggccttcaaagcccacggcgaacggcgcgaccgcctcaccgtgaagatcatggaggagcacgccagggccctcaagcagcgcg

SEQ ID NO: 16214 - DNA, 181 bp, Zea mays
gcagacaagcgtcccgaggacctcatgctcagttttgtcagtggggagaaaggaaaggaccgatcagataaagaggttgtaactccatggtttaagttcctctgggagacatacaggactgttctagagatactaaggaacaattcaaagcttgaagcgttatatgctatgactgctcata

SEQ ID NO: 16215 - DNA, 161 bp, Zea mays
aattatggtgctagactctgcaaagacaggggagaggatgttgcgactgagaagtttgcaaaggaggtcaaggagaagcgagacgccattgacaccaagaaccaagtcgagtctgtcatctaccagaccgtgaagcaactgactgaactaggggacaaggg

SEQ ID NO: 16216 - DNA, 186 bp, Zea mays
cttcaaccgtgaaggattgcctctgttcatcctggctaactggagaggcttttctgggggacagagagatctctttgaaggtattcttcaggctgggtcagcaattgttgagaaccttaggacatataatcagcctgcgtttgtctacaatcctatggctggagagcttcgtggaagagcttgggt

SEQ ID NO: 16217 - DNA, 299 bp, Zea mays
aaagccactggaatactacgctatgaacgtatctttggagatggctacgtgagtactggtggagctgagactacaaaagaatttgtggagaaactgaatcttaagcctgggcagaaagtgcttgatgttggatgtggaattgggggaggtgacttttatatggctgagaagtatggtacacatgttgttggtattgacctttccattaacatgataatgtttgcccttgagcgttccattgggtgtaagtgcttagttgagtttgaagttgctgattgcaccacaaagacatacccaga

SEQ ID NO: 16218 - DNA, 309 bp, Zea mays
cgatttgtttactgctctctccgacgcgcggcggcggactccctacgacaactgaaccatgtgcggcggcgcgatccttgccaaccttcgcgagccggcgccgcgccgctcacagagcgggacatctggcagcagcagaagaagctcaagaggggcggcggcggcgggaggcgctcgttcgcggcggaggacgatgaggacttcgaggccgactttgaggtcttcgaggcagactccagtgattcagatttggagctcagggaggggactgacgacgacgtcgtcagatcaagcccttcactgccaaga

SEQ ID NO: 16219 - DNA, 124 bp, Zea mays
aaaaaaagcagccgcaatggcgagcagcaccatggccctctcgtccacggccttcgccggcaaggccgtgaacgtgccgtcgtcgtccggcttcggcgaggcccggctgacgatgcgcaagacg

SEQ ID NO: 16220 - DNA, 137 bp, Zea mays
gtctcgctacgtagcagtgcaataaaaagagcagccgcaatggcgagcagcaccatggccctctcctccacggccttcgccggcaaggccgtgaacgtgccgtcgtcgtccgccttcggcaggcccgcgtgacgatg

SEQ ID NO: 16221 - DNA, 163 bp, Zea mays
ccaacttaacgccgaccggaggccggagagaccggctcagcctcgctccgccgccgctggcgaacatgtccatggcggctatcttcgtcttcctcatcgtgtccgcgctgcagctgctcgatcgctacctcgacctcgccagaaagagcggaggacttaatga

SEQ ID NO: 16222 - DNA, 181 bp, Zea mays
caccaaggagagtacgtggaggagcagccatggcttcatcggtggccgccgcggcgagcacattcctgggcacccgcctggcggacccggcgccacagaacgggcgcatcgtggcccggttcgggttcgggttgggcggcaaggcgaagctgctccgaagaaggtggcggagacatcgacc

SEQ ID NO: 16223 - DNA, 169 bp, Zea mays
ggcttctggagtttctgaaatttcagcggaatcgtcatttaccagtatcgaagagttccttgagccacttgagctgtgctacaaatcactgtgtgactgcggcgacaaggccatcgcggacgggagcctcctggacctcctgcgccaggtgttcacgttcgggctctcc

SEQ ID NO: 16224 - DNA, 183 bp, Zea mays
cgttgctggagacgatgataaaaaattgtggggacgttgtgcatatggttgttgctgagagagacatacttcatgagatggtcaagatagtaaagaaaaggcatgattatcatgttaaagagaagattctcacgctgatagatacttggcaagaagtttttggtggtgcacgtgcaagatatc

SEQ ID NO: 16225 - DNA, 301 bp, Zea mays
ggacggcagcggggactacacgacggtggcggcggccgtggcagccgccccaccaactcgaagaagcggcacgtgatctacattaaggccggcgcgtacatggagaacgtggaggtcgggaagaagcacgtcaacctcatgttcgtcggcgacggcatcggccagaccgtcatcaaggccagccgcaacgtcgtcgacggctacaccaccttccgctcggccacagtcgctgtggtgggcaacaacttcttggcccgcgacctgacgatcgagaactcggccgggccgtcgaagcaccagg

SEQ ID NO: 16226 - DNA, 141 bp, Zea mays
gaagaacgacaccgacctcacggcctctgacctcaaagagctcgtgggtcagtacaaggaggtctagctctcagccagaggagagccatctccctcagacgccaagaagcagctggagctcagactgctggctgtgttcaa

SEQ ID NO: 16227 - DNA, 177 bp, Zea mays
gcttttgagacatgggacaacgggaagccatatgagcaagcagcccagattgaagtacccatggtggcccgtcttatgcgttactatgctggttgggctgataagatccatgggctcattgtgccggctgatggcccacaccatgtacagatcttgcatgagccaattggtgttgca

SEQ ID NO: 16228 - DNA, 214 bp, Zea mays
gtcatattcagctttggcactatactgctggacctcctaagtggaaaacgtatacctccatcccgtgctcttgatatgataaaaggcaacaatatccaagtactgatggattcacatctggagggaaactactcaacagaagaggcaaccacattggttgaccttgcctctcagtgcccacagtacgaacccagggaacggccccacacccaaa

SEQ ID NO: 16229 - DNA, 178 bp, Zea mays
gcgacggcagctacgcgaggggggccgtacccagcggcgcatccactggaatatatgaggccttggagttgagggatggaggatctgattatcttggcaagggtgttcattaaggctgtcagcaacgtaaacaacattattggaccagcgattgttggaaagggccccaccgagcagg

SEQ ID NO: 16230 - DNA, 171 bp, Zea mays
ccacattgacggattatgacatccgctactacatatatgagctactcaaggctctagattactgccattctcaaggcatcatgcatcgagatgtcaagccccataatgtcatgatagatcacgagcttcgcaaacttcggttgatagactggggcttagctgagttttacc

SEQ ID NO: 16231 - DNA, 178 bp, Zea mays
gccatggcctccctctcctctgccgccgtcaccgccccttccttcgccgcaccagcgccacccgcgccgtggtcagaaggaggtccttcaccgtgcgcgcctctctccgcaaggccaccggcaccgccgccgtggcaatggctgccagcgccctgcttgccggcggtgccatggccca

SEQ ID NO: 16232 - DNA, 297 bp, Zea mays
aagaagacgagtgtcaagtgaacctgaaacttgcggtgtcactggctggtatagcctgagtgtgagtgagtgatcgagctagctgagctccgatcctcgctagctagctaggataccgccataccacaagtcttcttcacaagtttaggagtgacagcaacaagagatctcgatggcctctgccaccgtgctcaagtcctccttccttcccaagaagtccgaatggggcgccaccaggcaggccgccgcgcccaggccgcccaccgtctccatggtcgtccgcgcctccgcctacgc

SEQ ID NO: 16233 - DNA, 274 bp, Zea mays
gcagagcagaggaattacatttatacacggtgctgatcaccgctggagtgaaatgaaacaagaaccacaccacctacataccatgcagctagagaggaggatcggccggagctatgtatacgcatcttcgatgatatctacttgaagaagtaggggaggtcgagcacgtagaggagaaagtaggcccagagcacgccggagatgccgccgaagaagaatcccccggtgaacttggcccagccgtcggaggtctgcagcttgtcggcctccttct

SEQ ID NO: 16234 - DNA, 298 bp, Zea mays
gcaaccggtccagcactttcacgctcagctccagcaatggctgcctccaccatggcgatctcctccacggcgatggccggcacccccatcaaggtgggctccttcggcgagggccgcatcaccatgcgcaagaccgtgggcaagcccaaggtggcggcgtccggcagcccctggtacggccccgaccgcgtcaagtacctcggccccttctccggcgagcccccgagctacctcaccggcgagttccccggcgactacggctgggacaccgccgggctgtccgccgaccccgagacct

SEQ ID NO: 16235 - DNA, 308 bp, Zea mays
cccacgcgtccgcgacggagcacgacgcacgcagagccgcagagatccgtcacactgcaagttttgaaaactgaactgtaagatggcatcagcagagctttcccgtgaggacaatgtgtacatggcgaactcgccgagcaggcagagaggtacgaggaaatggttgagttcatggagaaggtagcgaaaactgttgactcggaggagctcactgtggaggagcgcaacctcctgtctgttgcatacaagaacgtcattggagcccgccgtgcctcatggcgcatcatctcctccatcgagcagaagga

SEQ ID NO: 16236 - DNA, 153 bp, Zea mays
cacacattttggaaggagagagagagatgcagagggagagattggagggaggcccctgcccaaggcaagagaaaccgcggcgcgcggagatggaggaagggcagacgcagacgcagacgggcgaacaagatgagggggatcatcagcatccac

SEQ ID NO: 16237 - DNA, 317 bp, Zea mays
accgcgtgcgaaccaagcagaccacagcaagaagcgtagtcgtcgccggaaggaaaggcgcggacaagatgtcgtggcaggcgtacgtcgatgagcacctgatgtgcgagatcgaaggacaacatctcagcgccgccgccatcgtcggtcacgacggcagcgcttgggcgcagtccgagagcttccccgagttaaagcctgaggaggttgctggtatcataaaggactttgatgaacctggtactcttgcaccaactggtcttttcgttggaggtacaaagtacatggtgatccaaggtgaacctggagttgtcatc

SEQ ID NO: 16238 - DNA, 318 bp, Zea mays
ggagaatgcatcatcacttgctggttttgatatccagactgttgggcgccacttgcctatattctccgcggcgaggcaaaaatcaagaacatcaagaagaacaagaccacaaggaggcttctcggtaactttcctgggtgacattgtggcaactggactgaaggtcgaggaccagctctcccttgggaagaggctgtcgctagttgccagcactggcgcgatgcgagcccaaggggaaactgcatatggagctaacttggaggcacgcctgaaggacaaagactatccgattggccagtccctctcaacgctgggtct

SEQ ID NO: 16239 - DNA, 320 bp, Zea mays
cggacgcgtgggcgcgcacagggacagaaacagagacagagccagccatgtcgaccaccagcctgcagctggttccgtggccgccggagccggcgcgcgccgccgttgcgtcttgttgcggcggtcgtctgcctgtgggtgcttctgtcacgcaggcgggccgccggagggagcaaggacaaggagcgggcggcccggctcccgcccggcagcttcgggtggccgctggtgggcgagacgctggacttcgtgtcctgcgcctagtcctcccgcccggaggccttcgtcgacaagcgccgcctgctgcacgggagcgcggt

SEQ ID NO: 16240 - DNA, 317 bp, Zea mays
gggtgttcccgatgactacgaatgtgaggtgattgaagacgacaccccaattcctaagcatgttcctcagcaccggcctgttgctcttcctgaggagttcttcaaggcactagatgctgtcaaatctgatcctgctcttcaaggcgatgctcctcctcaagtgaaggcgtaaggatggctgttcctggctaacgtcatttcacattttgccgcggtgggtagggactggtttcttgtgtcatttgccagcaatgcgcttgctctgagcagaataaatttctggtgagtaccatcaaagtgtgaatttgaacttagtg

SEQ ID NO: 16241 - DNA, 292 bp, Zea mays
gtcggcgtcaacgagggcgactacgaccacagcgtcgcggacatcatcagcaacgcgtcctgcacgaccaactgcctcgcgccattcgtcaagatcttggacgaggagttcggaattgtcaaggggaccatgacgacgacgcactcgtacaccggcgaccagaggctgctggacgcgtcccaccgcgacctccggcgggcccgcgcagcggcgctgaacatcgtgccgacgagcacgggcgcctccaaggccgtggcgcaggtgctggcgcagctgaatgggaagctgaacg

SEQ ID NO: 16242 - DNA, 312 bp, Zea mays
atcgatctacacacatacatagtttcttctactacacgacgacaaacatggggaagcctgcgaagatcggagagtggggtggatacgccggcgatcgtcgggatctgagggctactccggaccggctgatcgaggtgaaggtcacggcggacaacagcagctgcatccgctccatctccttcatctacatcggagccgatggcaaaccgtacgaggaggggccatggggtttcggccatgctggcacggagtacaagattgatctgtgcaggttcgacgagagcttgacggagatctccgggaccacgggcc

SEQ ID NO: 16243 - DNA, 308 bp, Zea mays
aggacattgtaagtgaattatgtgctgagacgggagccaaccaggaggatgccctcgcgcgaattgaaaagctttcagaagtaaacccgatgcttggcttccgtgggtgcaggcttggtatatcgtaccctgaattgacagagatgcaagcccgggccatttttgaagctgctatagcaatgaccaaccagggtgttcaagtgttcccagagataatggttcctcttgttggaacaccacaggaactggggcatcaagtgactcttatccgccaagttgctgagaaagtgttcgccaatgtgggcaag

SEQ ID NO: 16244 - DNA, 310 bp, Zea mays
ggccatggcgtcgtccatgctctccgctaccaccgtgccactccagcaggggggcggcctgtccgagttctccgggctcaggagctccgcgtcgctgcccatgcgccggaatgccacctccgacgacttcatgtccgccgtctccttcaggacccacgcggtcggcacgagcggcgggccgcggcgggcgccgacggaggcgaactgtaaggtggccatcaatgggttcggccgcatcgggcgcaacttcctgcggtgctggcacgggcgcggcgacgcctcggccctcgacgtcatcgccatcaacgaa

SEQ ID NO: 16245 - DNA, 310 bp, Zea mays
cctgtcccagccgccggacaccatcaacgggtccatccgtgtgacggtgcagggcgaggtcatcgagttctgcttcggggaggagcacctgtgcttccagactctgcagcgcttcacggccgccacgctggagcacggcatgcacccgccggtctctcccaagcccgagtggcgcaagtcatggacgagatggcggtcgtggccacggaggagtaccgctccgtcgtcgtcaaggagccgcgcttcgtcgagtacttcagatcggctacaccggagaccgagtacgggaggatgaacatcggcagccggc

SEQ ID NO: 16246 - DNA, 300 bp, Zea mays
ggataccttctctggctggtcctacaacaattgctgctcgacaaaacggccaggggatatcatggctttttccttttactgatggccatccacctcttggctggtcagatactttggcatacattgtgttaccagttcttcttgtcatttcacagtacatatctactcaagtaatgcagccaccacagagcaatgatcctaaccaacaaggtgctcaggctgtaacaaagttcttaccattgctaattggttattttgctctttccgtgccttcaggactaagtctgtactggcttacaa

SEQ ID NO: 16247 - DNA, 309 bp, Zea mays
cccacgcgtccggatcgggaaggtgcggtcgacgatcgggctggacaagtcggacccgagcgtggccgacgcggtggcggagtccgggacctgtccaactcgtgggtggccaagtaccggcgggagaagtcgctgctggggcgtccgtcgttccgggagatgtactcggcgctcaacaccgtgtcgggccactacatcagcttcggccccacggcgcccatcccggccaagcgccgcgcccgcatcctcgaggagatggacaccgccgagaaggcgctccaacggggcaggtaggccaaatcccagcga

SEQ ID NO: 16248 - DNA, 309 bp, Zea mays
ggagaggagaaagggcaaaaggcaacaccgcccgcgacgaccacgatggcagcctcgctccaagtccaagccgcggccaccttgatgcaaccggccaagatcggcggccgggcgccgtccgcatcgctgccgtcgtcccgcccgtcgtcgcaactcgccagggcgttcggcgtcgacgccggcgccgccaggatcacgtggtgcctccagtccgacgtcagggacgtcgccagcaagtgcgtcgacgccgccaagctcgccggcttcgcggtcgccacctcggctgtcgtcatgatgggcgcgaggcgg

SEQ ID NO: 16249 - DNA, 314 bp, Zea mays
cgccgtcgtctgctccgggctgctgttctgcgcctccacaaggctttgggctctgttgtaagttttaagcttcacctccagccatgggtaaggagaagtcccacatcaacattgtggttattggccatgtcgactctggcaagtcaaccaccaccgggcaactgatctacaagcttggaggcattgacaagcgtgtgattgataggttcgagaaggaagccgctgaaatgaacaaacggtccttcaagtacgcttgggtgcttgacaagctcaaggctgagccgtagagaggtatcaccattgatatcgctctg

SEQ ID NO: 16250 - DNA, 305 bp, Zea mays
accaaggagagtacgtggaggagcagccatggcttcatcggtggccgccgcggcgagcacattcctgggcacccgcctggcggacccggcgccacagaacgggcgcatcgtggcccggttcgggttcgggttgggcggcaaggcgaacatgctccgaagaaggtggcgaagacatcgacctcctctgaccggccgctgtggttccccggcgccgtggcgcacgactacctggacggctcgctggtcggcgactacgggttcgacccgttcggtctcgggaagcccgtggagtacctgcagttcga

SEQ ID NO: 16251 - DNA, 305 bp, Zea mays
accggattcaatctcgcagatgatttccgtagcgtccagcccagagctagaaaacagtgcagaagttgtggaggatacggtgacagctatccttaatctctctatccacgagagcaacaagaagatcattggagacgacccactggcagtcccgttcctgatcaaggccttacagtcaggaaccatggaggcccggagcaacgccgccgccgccatcttcagcctatccgcgctggacggcaacaaggcgaggatcggcgagctcggcgcgatgaggccgctggtggagctcctcgagcacggca

SEQ ID NO: 16252 - DNA, 305 bp, Zea mays
ggcaggtgctgatattgttagtgtccactgtgaacagacatcgaccatccatttgcaccgaacagtcaatcagattaaaagtctaggagcaaaggcaggagttgtttgaatccagcgactccactcactgcaattgattatgttcttgatgttgttgacctggtgctgattatgtctgtgaatcctgggtttggtggccagagctttatcgagagtcaagtaaagaaaattgcagaactgagaaggttatgtgcagagaagggagtgaacccctggattgaggttgatggtggtgttggtccgaa

SEQ ID NO: 16253 - DNA, 306 bp, Zea mays
atccgtgtgacggtgcagggcgaggtcatcgagttctgcttcggggaggagcacctgtgcttccagactctgcagcgcttcacggccgccacgctggagcacggcatgcacccgccggtctctcccaagcccgagtggcgcaagctcatggacgagatggcggtcgtggccacggaggagtaccgctcggtcgtcgtcaaggagccgcgcttcgtcgagtacttcagatcggctacaccggagaccgagtacgggaggatgaacatcggcagccggccagccaagaggaggcccggcggcggcatc

SEQ ID NO: 16254 - DNA, 324 bp, Zea mays
ggacgcgtggcggccatggcgacacccccagctctcctattcccttcgccctcttcggcatcttctccgccgtcatccgcgcaggtagaggcggtggtcaccttcaacgtctgcgacagctacgtgcggcgaccggaccaggcagaccgtgtcatcggcaccctccttggatccctcctccccgatggcaccgtccacgtccgcaactcctacgtggtcccccacagcgagtcggccgaccaggtcgccatcgacatcgactaccaccataacatgtacgcctcgcaccagaaggtgaaccccaaggaagtcatcgtcggatgg

SEQ ID NO: 16255 - DNA, 322 bp, Zea mays
gttctagatcgcgaccgccgtcgttgatatcctcaaggagcaatggagccctgcactgaccatatcaaaggtcctcctctccatcagctcgctcctcaccgaccccaacccggacgacccccttgtccctgagatcgcccacatgtacaaaaaccagaggcagcgctacgaggaaactgcacgggcctggacccagaagtacgcaatgggctgattctgtcccactggacagtacttcccctgcaaagatcgtcacggtgttgtaagaatcaagttgcaccgttttcctgtcgtgtgatggtattaagagcccagatggctg

SEQ ID NO: 16256 - DNA, 300 bp, Zea mays
cgtccacggcgtcctgggccagacctaccgccctggctacgtcagcaagctcgacatcggcgccaagatgcccgtcatgggcggcgcgcccaagtacctgtccgccggtctcttctccacggactgcgccgtctcccggttccactctttcgcctccgcctaatactaagtcccaagcgcgaccgatcctattcctatccacggcgtgaaataagatttctgtatgtaggctcttatctcatctcatcgtatgaaaatgtacacgtgtgttgcattggaagtacgtattgttgcacgatc

SEQ ID NO: 16257 - DNA, 321 bp, Zea mays
ctcctgggcccgtacatggggccggtcatgtacgaggcccagctgctgatggacatgctcatgatggtcaacaccaagggcaggcagcgcggcgaagacgactggcgccacatctttaccaaggctggcttctccgactacaaggctgtcaagaaaatcggagctcgtggtgtcatcgaggtctacccgtaagctgctgcatgatcgatgtgatgtgactgtgagaggacgatactgtaaaattaaataaacggggtatctacctactcagcttttgtagtacctcgagatccatgcatgttaattacttgcttccatctg

SEQ ID NO: 16258 - DNA, 320 bp, Zea mays
cgaacccgaatcccgagcacaggccgccgctcgctcgctcgctgcagctacgcacgcacgcgcctgctcctccccttagcttccacaaggctcgactcggccggcggcgatggcgcggaagaagatccgggagtacgactccaagcgcctcctccgggagcacctcaagcgcctcgccggcatcgacctccagatcctctccgcgcaggtcacacagtcaacggatttcactgagcttgcaaaccaggagccgtggctctcatctatgaagttggttgtgaaacctgacatgctctttgggaaacgtgggaagagtgggc

SEQ ID NO: 16259 - DNA, 313 bp, Zea mays
agcgctcaagttctcgcgcccacagccaaatttttctccactcaatcgcggcataagctgcactgcagccatggacgccagcggaccggtagcaaggcgaagaagggggcggctgggcgcaaggctggcggccccaggaagaagtcggtgtcgcggtccgtcaaggccgggctgcagttccccgtcggccggatcgggcgctacctcaagaaggggcggtacggcacgcgtgggcaccggcgcccccgtctatctcgccgccgtgcttgagtacctcgccgccgaggtgctggagctggccgggaacgcggcg

SEQ ID NO: 16260 - DNA, 317 bp, Zea mays
ctctccaccacaaaaggttatagcttttaatttgatcaataatcctaagttcctaacctaacttctcccgtaactaaaacattttagtttctcctgctcaatatttggttataatcttcaatttatgaattttttactgactcctggtgaactttaattttagattagtggttgctccatcgacaatcccgtcaatggatcattttttgaatcctatgaaagtgcacactccatgcatgacttgactggctctattgcagagaaacttggtgtccaagctcctccagttagaatcgacagccaagcagaatatggtg

SEQ ID NO: 16261 - DNA, 314 bp, Zea mays
atcaccgcggccgacgcgccggcgactgtcgactacggcacggcctccggccagtacccattctccgcgacggggaacactacgtcctactcctacgtgctctaccactcgggcagcatccacgacgccgtcatcgggccgctgcagcccagcacaacctactactaccgctgcagcggcacgcctcgcgggacctctccttccggacgccaccggccgtgctgcccttccgcttcgtcgtcgtcggggacctaggccagaccgggtggacggagtcaccctcaagcacgtcgccgccgccgactacgacgcgc

SEQ ID NO: 16262 - DNA, 250 bp, Zea mays
ccggataaaagataaggagtgtctctcctttgccatcctcctctctttcagctaagtcccttccccctctctttttcttacattcaggtcctcgcagctcctctcttttttcttgtttctttcgatctgcgagccgtccaagtccagtactcttctttccctcaaggaactcttgcagccggcccctctggtttcctcgaattcttgtgtcccggtccctcctcctgtcgccgcgtagatccgtccgtcc

SEQ ID NO: 16263 - DNA, 316 bp, Zea mays
caacgagagtgaacaagctcacatgtggagtcagatatatagtgaagagacaaagaagcagtccattcctgtcataacagcttggcaattgaatgaacggatgtatggtgagcttcaaggccttaacaaacgagaaaccgccgatcgatttggtaaagaacaagttcatgaatggcgtcgcagttatgatattcctcccccaaatggcgagagccttgagatgtgcgcagagagagcagttgcttatttcaaagaccaaattatacctaaacttgtggatggacagcatgtaatgatcgcggcccatgggaattca

SEQ ID NO: 16264 - DNA, 310 bp, Zea mays
caggtgcatttgatccgtcccggccgcctacacgatgtccaagtcgggagcgctggatcttgcttctggcctcggagggaagatcaacaaggtggaagtcaagtcggccgtcgatgagtatgagaaatatcatggatactatggagggaaggaggaagcaaggaagtccaactatactgatatggttaataaatactatgatcttgccactagcttctatgagtatggttggggtgaatccttccactttgctcacagatggaatggagaatccttacgtgaaagcatcaagcgacatgagcattttctt

SEQ ID NO: 16265 - DNA, 312 bp, Zea mays
cccacgcgtccgccataccccacccccccgcaggagcggcgcggcggcggcggcggcaaagccaaaggcaagatgttcgggcgcgcgccgaagaagagcgacaacaccaagtactacgagatcctcggggtgcccaagtcggcgtcccaggacgacctcaagaaggcctaccgcaaggcagctattaagaaccaccccgacaagggcggtgaccccgagaagttcaaggagctcgcacaagcctatgaggttttgagtgatccagagaaacgtgagacttatgatcagtatggtgaagatgcccttaaggaa

SEQ ID NO: 16266 - DNA, 308 bp, Zea mays
gcaagctgttgaagcatttagacaagcactactcttggatgagctgttgcctgcaagacacgatgactatcatatgatgctgagatttctaaaagcaaggaaatttgatatcgacaaagcaaagcaaatgtggatggatatgcttcattggcggagggagtatggcactgatacgattttggaggacttcgaatacactgagttggacgctgttttgcaatattatcctcatggttatcatggagttgacaaagaggggagacccgtttatattgaaaggcttggaaaggttgaccctagcaaactta

SEQ ID NO: 16267 - DNA, 309 bp, Zea mays
  unsure (1)..(309): unsure at all n locations
gagcatctgtgtttataaaaatgaagaaaccagctgctgccattcgtgatgccaatgctgctctagagatcaacccagactctgcaaaaggctataaaactcgtggaatggcatatgccatgcttggcaaatgggaggaagctgctcatgatctgcacacagcatctaacatggattacgacgaggagatcaatgctgtgctcaagaaggtggagcctaatgctcacaagatagtggaacatcgcaggaagtatgagaggttgagaaaagagagggaggaaaagagagcgcactnagatcggcttcgtc

SEQ ID NO: 16268 - DNA, 306 bp, Zea mays
accacgcgtccgcggacgcgtggggcagtataataatgaacaaccctcaaatgcgcgactcattgatcgcaatccggatcttgctcatgtcctcaatgatccaagcatcatgcgccagacttttgaaccagttcggaatcctgaactcatgagggagatgatgcggaacacagacagagccatgagcaacattgaatcttctccagagggattcaacatgctccgtcgcatgtatgaaactgttcaagagccttttctgaatgcgacaacaatgggtagcgagggtgatcgaaattcgaatccatt

SEQ ID NO: 16269 - DNA, 308 bp, Zea mays
cccacgcgtccgacacggagcacttcggaggccggacccggcgagaagcgaccgaccgcagccagctcacgtctccctcttcatccaccatgctgagggtcgcgggcaggcgcctctcgtccgctctcgcctggcgccccgccgccgccgcctcaggctcccggggccctctcgccggtacactacccggccgcgacgacgacgacacacgcgactgcagggcgcgtttcgccatcgaatctcccttcttcgccgctgccagagggttttcagcagagactcttgctccaagaaaccaggatgtgggc

SEQ ID NO: 16270 - DNA, 307 bp, Zea mays
ctttcttctcctgcacctgatgatcctcaggatgctgttgttgcacaacagtacctgcgtgactatccaacatttgccgctacggctcgctactggacagaggccttcgcgaagagtgcatcaacgggcatggaagagaaggtgcagaagctggttgagatgggcttcccagaggatcaggtgagacgtgccctgaagagcgtggatggcgacgagaacatggctctcgaaaagctctgctctggctctgggtgaaccattctcttggcgccaatacatgagcagctgtacatttcacagtgcctgc

SEQ ID NO: 16271 - DNA, 301 bp, Zea mays
cacctacatcgtcgcgctgtgccaggccgtcgacctgcgccacctggaggagaacatcaagacctccgtcaagaacacggtgacccaggtggccaagaaggtgctgaccatgaacccctcgggggacctctccagcgcgcgcttcagcgagaaggagctcatcaccgccatcgaccgcgaggccgtgttcacgtacgcggaggacgcggccagcgccagcctgccgctgatgcagaagctgcgcgccgtgctggtggaccacgccctcagcagcggcgacgcggagcgcgagccctccgtc

SEQ ID NO: 16272 - DNA, 322 bp, Zea mays
gtcctgctttaactatctcaaaggttctcctgtcaatctgctcactgctcacggacccaaaccctgatgatcctcttgtccctgagattgctcacatgtacaagaccgacagggccaagtatgagtccaccgcacggctcctggacacagaagtatgccatgggctagaagcaaggctaaaagctggccaaactggtgaatgtgccggaccccaaatcgttatcacctaaataaccagtcaagtcgcaagtatgaatggacttttgaggaccattgtgccctgttgaactcatgtattaccttgtgaagtccgttgtgtctg

SEQ ID NO: 16273 - DNA, 319 bp, Zea mays
cggacggtgggcggacgcgtgggcgtacgcgtgggcggacgcgtgggccgggacctggtggcgtcgctgggccggagctggccgacgctgtcgtgcaagaaccggcgcagcttccagttctggagccacgagtggaagcagcacggcacctgctccaacctggacccgcacgactacttcgcgcgcgcgctgcagctcagggagcggcacgacctcgcggcggtcctcgcggacgccgggatcgtgccgtccgacaccgacacgtacccggtggaccgcgtcagggacgccatcgcgcaggggaccggcttcgtggcca

SEQ ID NO: 16274 - DNA, 321 bp, Zea mays
  unsure (1)..(321): unsure at all n locations
tgctaaaccagcggaaacctaaccagctagcagcattagcttttcaacaagcctcgctcgcgcgccgtgaccgatagatggccatcacccacgacgactacgtctccctgtgcctcatggcgctcgcagccgctgnaggaggagggcacgctgcggcagccagtgnnnnnnnnnnnnnnnnnnnnnnnnnncaagantgcgagctccgcttccggtgctccgtctgcngcaaggccttcgcgtcgcaccaggcgctgggcgggcacaaggccagcnaccggaagcngccgccgccgctcgcacaggcgccgtcgtcgtcgt

SEQ ID NO: 16275 - DNA, 317 bp, Zea mays
gcttcccagagacccagccatggcgatctcccagatctcacgcatattcctggccatccttctcctggccgccgccttcgccgccgccccagctgcgcttgcggacggcgacgacgtggtggcccttaccgaatccacgttcgagaaggaggtcggaaaggaccgcgagcgcctcgtcgagttctacgccccctggtgtggtcactgcaagaagcttgctcctgagtatgaaagacttggtgcaagttttaagaaagctaaatctgtcctgattgctaaggctgattgtgatgagcacaagagtttgtgcagcaagt

SEQ ID NO: 16276 - DNA, 320 bp, Zea mays
cgacgatacaaacaaggaacctgttgagaaatcagctgttccaccgcccaagaaaaggatcgatgtaaatgagctgaggacatgtaaaaataaaggatgtggtaaatcctacaaggagaaggataaccatgattctgcatgtgactaccatccaggtcctgccgttttccatgacaggatgagagggtggaaatgctgtgatgttcatgtcaaggagtttgacgagtttatggagatacctacatgcacaaagggttggcataatgctgatgcggtgtgaattcacgccatgcttaaggctgttttcatgttgtatcgtc

SEQ ID NO: 16277 - DNA, 323 bp, Zea mays
cccttaccacagcgacaaggccgcggatatcctggtcaacttctttgacaaatgcaaggcagatccgagctactgggacaagatctcacagggcggcctgcagagaatttatgagaagtacacctggaagctctactccgagaggctgatgaccctgaccggcgtgtacgggttctggaagtacgtgagcaacctggagaggcgcgagacccgccgctacatcgagatgttctacgccctgaagtaccgtagcctggcaagccaggttccgctgtccttcgattagtacggggaaagaagaagaagaagaagcccaggccgga

SEQ ID NO: 16278 - DNA, 312 bp, Zea mays
aacttccatccaagaagactactgtaaagcgcacaatctcaatccagagtgggatgaagaatttaagtttgttgtgactgatccagaaagccagtctcttgaagttaatgtcttcgactgggaacaggttgggaaacatgaaaagatgggaatgaacatggtcccactgaaagacctcccgccagaggagactaaatttactacccttaacttgctcaagaccatggatccaaatgatgtacaaaatgagaagtctcgtggccagcttactctagaggtcacatacaagcctttcaaggaagcagatgtgga

SEQ ID NO: 16279 - DNA, 312 bp, Zea mays
cggacggtgggcggacgcgtgggcaagtgttctttggtacttctcaaaggaagagaaagaggagatcactgaaagctacaaatccaagctcaagtctattgattacaagtacttcgactttgggactggctcatgccccttcggaacaagttgtttctataagcatgcctacagagatggccgcttggaagaggtaatactgcggcatcttgatgctgatgatggaagtacagtaattgcaaaaagtatcaggttatcagacttccttggtaggatggatctttagggaccagcagctgtattgatatcaaa

SEQ ID NO: 16280 - DNA, 312 bp, Zea mays
cgcagatttccacgacatggcgagcgaggccttggacgcccacgacaacttcggcatcgagatagctatgcgggagttcagggacttgttcgaggggatccagtccatgacctactgctgcggtaacttcggtgatgacaagggtgccagggccattgtcaaagccttcccacacataaaatgcactgtgctggcccctcccaagatcattgccaccaaaccggccgatggagcgaagataaactatgtcgaaggtgacatgttcagtttcattccacctgctcaaactgtcgtgctaaagcttgtgctgca

SEQ ID NO: 16281 - DNA, 312 bp, Zea mays
cccacgcgtccgcccacgcgtccgcccacgcgtccgggcgaatctacctcctgaactcatccgtgatatcatacggagactggaggctgatgagagcacctggccagcgcggaagcacgtcgtttgcatcgcagctgtttgtaggacatggagagaaatgtgtaaagagattgtgttgagcccggagttttgtggcaagctcaccttccctgtgtctctaaaacagcctggtcctcgagatggaaatacaatggtccagtgttttataaagaggaataagtcaaaatccacttaccatctctacctgtgcct

SEQ ID NO: 16282 - DNA, 301 bp, Zea mays
tcctccctgcagacagaggcaggcaccaaccaccacctccaccacatgcaacccttcctcacgctgcagaggatgcaggtgagctgtgggagtacttcccttgccccttttgctacatcgaggtggaggtgcccttcatctgcaaccaccttcaggaggaacattgctttgacaccaggaatgctgtttgccccatctgcgccaacaatctagggaaagacatggctgcacatttcagactgcagcacacgcatcttctcaagaggaggaagccctacaggcccagctcatgccctgcggc

SEQ ID NO: 16283 - DNA, 307 bp, Zea mays
cccacgcgtccggtgcgtggaatcaaaagagaaacagaaggcatttgatattggccagaaatacgtggagcatgcaaattctattgatgatctttctccatatgcaccactatataaagttatggaagggaatgagccatgcttcttcaagacatatttctcttgggataacacaaaatctttggttcatggaaattccttccagaagaaactctcactgctttttggattgcgttctgagggtgcatctaggagctctggtaatggtggaccaactcaaagggcatctgcattagcagctctatca

SEQ ID NO: 16284 - DNA, 305 bp, Zea mays
gacagttttccacaaaatcagacgtgttcagttttgggatccttgttatagagatcataacagggcggagaaacattgggcactacttctttgatgagcaaaatgaagatattataagcctcgtatggagacactggactgagggaacaattgtagagatgatagatgattctcttgggagaaattactcggagagcgaggtgctaaaatgcgttaacattggtttgttgtgccttcaacatagtccaatggatcgacctacgatgtccgatgtcatggtgatgcttaatggtgatgatactagt

SEQ ID NO: 16285 - DNA, 96 bp, Zea mays
ctttagggttttgtagaggagcgatggcggcggctgatgtggagtaccgttgcttcgtctgctggcttgcctggaccaccagcaacgagtcgctgg

SEQ ID NO: 16286 - DNA, 308 bp, Zea mays
agcactaacgatcaaaccacaccccgcaacctcaatgccatgaacaagctcagcaccaagaagccgtggtccctgtctttctccttcggccgtgccctccaggcgagcaccctcaaggcctgggctggcaaggtggagaacctggagaaggctagagctgccttcctcgccaggtgcaaggccaactctgaggctaccctcggcacctacaagggtgatgctgccgccgacaccgagagcctccacgtcaaggactacaagtactgagttgcttctctttgcgtgcccgttttggaactcctgcctac

SEQ ID NO: 16287 - DNA, 305 bp, Zea mays
cccacgcgtccgctccctactttccagtggattccgcggcggggcaagagcgtgggccgtcgcccatggtgatggagcggttccagagcgtcgtcagtcagcttttacatcacaggattatccggtgcggtggtcctgttgaggatgatatggccaacatcattgtagcacagctgctctacctggacgctattgatcccactaaggatatcattatgtatgtgaattcaccaggagggtcagtgacagctggaatggctatatttgatacaatgaagcacatcaggcctgatgtatccactgtt

SEQ ID NO: 16288 - DNA, 307 bp, Zea mays
tgtattagtacttgctgcaactaacaggccatttgatcttgatgaggctgttgttaggcggcttccaaggaggttgatggtgaatttgccagatgcatcaaataggagaaaaattcttagtgtaatactagccaaggaagatttggcagacgacgttgatctagaaactatagctaacctgacagaagggtactcaggcagtgatctcaagaatctgtgtgttactgctgcacaccgtcctattagggagattcttgaaaaggaaaagaaggagagagcttcagcagaagcagaaaatagatcattg

SEQ ID NO: 16289 - DNA, 327 bp, Zea mays
gttctagatcgcgagcggccgctcgctatgatatcctcaaggagcaatggagccctgcactgaccatatcaaaggtcctcctctccatcagctcgctcctcaccgaccccaacccggacgacccccttgtccctgagatcgcccacatgtacaaaaaccagaggcagcgctacgaggaaactgcacgggcctggacccagaagtacgcaatgggctgattctgtcccactggacagtacttcccctgcaaagatcgtcacggtgttgtaagaatcaagttgcaccgttttcctgtcgtgtgatggtattaagagcccagatggctgt

SEQ ID NO: 16290 - DNA, 321 bp, Zea mays
  unsure (1)..(321): unsure at all n locations
ggaggagctcactgtggaggagcgaaacctcttgtctgttgcatacaagaacgtcattggagcccgccgcgcctcatggcgcatcatctcctccatcgagcagaaggaggagggccgaggcaatgaggaccgagtaacactcatcaaggattatcgtggcaagattgagactgagctgaccaagatctgtgatggcatcctcaagctgcttgagacccatcttgtgccgtcttccactgcccccgaagtcaaggtcttctatctcaagatgaagggtgattactacagatnacttgctgagttcaagactggagctgagag

SEQ ID NO: 16291 - DNA, 328 bp, Zea mays
agccattatgcctgtgcagtggcatgctttagccctaggtttatttgcgtcaataatagcaccattcggaggattttttgcgagtggcttcaagagggctttcaaaataaaggattttggtgacagcatacctgggcatggtggaattactgatagaatggattgccaaatggttatggcagtgtttgcatacatataccaccagtcattcattgcacctcagaacttctctgttgagataatcttggatcagattctaagaaacctgacctatgaggagcaaaaatacctatatgaacaacttggggaaatgttccatgagaggcaa

SEQ ID NO: 16292 - DNA, 331 bp, Zea mays
cctctccttcccggtctcctccgcccgttgccttcgtcccctccatctccggctgcgtcgccggcgagcccgacaccgcgaatcggatccgccgacaaggcgagagggaaaagatggggcttacgttcaccaagctgttcagccggctgttcgccaagaaggagatgcggatcctgatggtgggactcgacgccgccggaaagaccaccatcctctacaagctgaagctaggcgagatcgtcaccaccatccccaccatcggattcaatgttgaaactgtggagtacaagaacatcagcttcactgtctgggatgtcggggagcaggacaa

SEQ ID NO: 16293 - DNA, 326 bp, Zea mays
atttatggtgcagcagatgtagtttgttctttggttgctggacgattgacctccggacttcgctcagcagcatttatagtgtcggttggagctattcttcaggccatagtcctgttctggctgcttcttttttacagtccaatggatggactgcttggcgcacgtataccattagtcataggtgccttgtggggtgttggtgacggtgtcttgaatacacagttaagtgcattacttgggctgctgttcgaagatgtcaaggaggctgcctttgcacagctgaaggtgtggcagtcgggcgccatcgcagtcatcttcttcctgag

SEQ ID NO: 16294 - DNA, 321 bp, Zea mays
tggaaagtatgttgagcatcacctcaaattcccaccttctgtcccatacgacaagctctctcatgtctacacagctatcttgaagccagacaatgaggtcagaattttgatcgatggggaagaaaagaagaaggcgaacttcctttctgctgatgactttgagccagcacttatcccatccaagaccattcctgaccctgatgacaagaagccggaagactgggatgagagagctaaaatccctgatccagatgcagtgaagcatgatgattgggatgaggatgccccatggaaattgtggatgaggaagctacaagcctg

SEQ ID NO: 16295 - DNA, 317 bp, Zea mays
catggttgcaacattcaagcagtgtgcacggtatctcagcccgctgtttgagttctgcagaaagaaggtacttcctgatgatatccgtcgagcgttgcttgttattgtcgagtgttgcatgaagcgagattatttagcagcaatggaccaatatatcaagttggcaatcgggaatgcaccttggcccattggagtgactatggttggcatccaggagcgttctgcccgagagaagatctacacaaacagcgtcgcccacatcatgaatgacgagaccactcgcaagtaccttcagtcaatcaagaggctcatgacgc

SEQ ID NO: 16296 - DNA, 329 bp, Zea mays
caccgccgagcggaacgaaactcggcgagtgagagcggaagcgacgccgagcaaccaacccctctcctcgtccgtcgccgtctccccggaccatggccatggccgcctcctcctcccggctgctctgggcgtcccgcgccgccgcctacctcaggatctccacattcccgaggggcttcttcaacggtaataagggttctgagttatgatgactctcatgaatgggtgaaagttgagggtgattcaacaaccgtggggattagttaccatgcccagcgtgctttgggtgagcttgttgttgtggagctaccagaagttggcatcagtgt

SEQ ID NO: 16297 - DNA, 315 bp, Zea mays
gccaccgtgtacaagttcgcgcggcagtcggggcggcgcaccccctactcgctccggcagccggacatcgagtactactacaactccaccagctactgggacgagtacatgtggagcgcggggtggatgtactacgccactggcaacagcagctacatcaccttcgccaccgacccgcggctgcccaggaacgccagggccttcttcagcatcctcgacttctccgtgttcagctgggacaacaaagctccgggggccagctgctgctgtcgcgcctgcgcatgttcctcaaccccgctacccgtacgaggagtc

SEQ ID NO: 16298 - DNA, 261 bp, Zea mays
cgcgttccggttgtaacccatccgcctcatgccggcggagatctcctcccagaggggccccttgggcccaacctcctggtaccgggtgtgaaggttgctccgcagctgtatcagcgcgtgaacctccgccttgggccaccgggaggacgccgcgccgccactggacccctcgtgcaccgggatgtgggcgtgcggcgtcgtctcggccggcagcatgacaatgtccatgctttgctgttgcggcatttgcggcttctgctg

SEQ ID NO: 16299 - DNA, 319 bp, Zea mays
cgttgccggcaagaagatcgccgtcctcggcttcgccttcaagaaggacaccggcgacaccagggagaccccggccatcgatgtctgcaagggcctgctgggtgacaaggcccagatcagcatctacgacccccaggtgacggaggaccagatccagcgggacctagccatgaacaagttcgactgggaccacccgatgcacctgcagccgacgagcccgacggccgtgaagcaggtgagctgcgtgtgggacgcgtacgaggccaccaagggcgctcacgggctgtgcatcctgaccgagtgggacgagttcaagacc

SEQ ID NO: 16300 - DNA, 317 bp, Zea mays
gtttgaaagtggcaaggatcttgttgtgactgtccagtctgctatccgggaggagcagatctgcgcgctgaaggatgttggccccaagtaacttccctgccttggaatactgtatctcaaaacctaaatcgaaaaaagaagtgtatcaaggattgctacagagacatccatctggcttgagctggcttttgctatgtcaaacacaagtgcagggatcgctgggtgttgcaccgtgtctgcattatctgtggttacattctggaccctgtattttctatgcttttatgcccctactgtttagtattaattatcaataa

SEQ ID NO: 16301 - DNA, 317 bp, Zea mays
gctcatcgtgttgcacaacattatggcttagagactatagtggcagatagtttagtagaaggctcagttagcaggatcgttgcaagcaaaacaccagagagcaggtgtcctgcaatttcattagcagaagttcctagcaaacaagcaagaaatgatcatgaggcagcagagaagcttaagtttgtcatttatcaaaggcccaaagcattccaaaatggaagcactgatttgggaaacaagaatggtgcaccaaaaactgttgaagagagaatagaggaatataataaagcacgagcacgcatcttcaatggttctgt

SEQ ID NO: 16302 - DNA, 316 bp, Zea mays
ccctttgcaagtatagtctctctgctaagcgaacgttacttcaagctagtctcggcggctctagaagacgatgggcaaggacgacgtgatcgagagcggcgctggcggcggcgagttcgctgccaaggactacacggaccctcccccggcgccgctgatcgacgcggcggagctggggtcctggtcgctgtaccgcgccgtgatcgccgagttcatcgccacgctgctgttcctgtacatcacggtggccaccgtgatcgggtacaagcaccagacggacgcgtcggcgtcgggcgccgagcggcgtgcggcggcg

SEQ ID NO: 16303 - DNA, 318 bp, Zea mays
cacaccagcacctgccctcctcgccgtcgccgcctccctccgcgcgaccgatctaccctccgccgccaccatgtcgctgatcgccggggaggacttccagcatatcctgcgtttgctgaacaccaacgtggatgggaagcagaagatcatgttcgccatgacctcaatcaagggtgtcgggcgccgcttctccaacatcgtctgcaagaaggccgacatcgacatgaacaagagggccggcgagctgacgcctgatgagctggagcgcctgatgacggtcgtggccaaccctaggcagttcaaggtgccggactggtt

SEQ ID NO: 16304 - DNA, 321 bp, Zea mays
cttctccatcccacgcgcgcgcaggccaaggccggatcggcggcctctcagatctcgccggccgccgtgagacagagaccgaagggagggttgaccggtgctcgggaggaagatgtctagcgggacgcagcagaagtgcaaggtgtgcaccaagacggtgtacccgatggaccagctctccaccgacggcgtcgtcttccaccgctcctgcttcaagtgccagcactgcaagtctaccctctcactgagcaactattcctcgttcgaaggagtgccgtactgcaagacccatttcgagcagctgttcaaggagaccgggag

SEQ ID NO: 16305 - DNA, 319 bp, Zea mays
gtcgagttctggctctgcctcttgctcaccttcctcgcctatcttccggggatcatctacgcgatctacgccatcaccaaggactagcgcggttccagttgggtgagagctgcaagctcctccttctcttctcagctgtgaagctactactactagtctactaccgattggtgaacctgaacctgtcgcttcgttcgtgtccttcgatcgctctctggttatattggtcgtggatcttgttaccgatttatttatcgtacagtaacttgtaccatgtgctgttctgtatttattcagtggtccgcgtaaaatctgcctc

SEQ ID NO: 16306 - DNA, 315 bp, Zea mays
cggacgcagtgtgcatgcatataagagcaacaagatactggcgcagaggagcaatgcccggcatggatgccttcgctgctgtgtcactactcgccacactctttctggttcgtgcggcagctgcccatcctccggcggcggctgcggacgccatgacgccgacggactattggcgagcggtgcttcctgagaccccattgccgagacctactcgggcctatttccccatctataagttaggaaagctccacgaacggtcacacgtcaaatgggtacaaggccatgacttaaggacggtcagcacatcatatgcat

SEQ ID NO: 16307 - DNA, 287 bp, Zea mays
attggaagcaactatttatctgggcgtcttggaatgagtgtgattttaataagtcaaaacacttgatattgtgtgcaaatcttggggttgagaacaatgtcactagctgtgatttacttctgtgacttgcattttttttcttgttaaattatgaataagcgaagtccatacgtctactgtgtggcttcttgctgggttcatcgtctacccatgttcctcaagcttgggaacatggggcctttccccatttccgtgtcttccatgcgaagtaaaatttatttgtatac

SEQ ID NO: 16308 - DNA, 310 bp, Zea mays
gatatattttgtgatagagtatgtcaagggaggagagttgttcaaaaaggttcaacgtggaaggttaaaagaagatgttgctcgtacatatttccaacaattgatcagtgctgttgacttctgccatactagacaagtttatcatagagatctaaagcccgaaaatcttcttcttgacggaagtcacaacttaaagatttcagactttggtttgagtgcacttccaaactgcaagagaaaagatgggttactccacacaatttgtgggactcctgcatatgttgctccagaagtaattagtcaaaaagga

SEQ ID NO: 16309 - DNA, 311 bp, Zea mays
  unsure (1)..(311): unsure at all n locations
cggacggtgggcggacgcgtgggatttctctcatggtcttaaggagatcaagtgctaggcttgcggcgagattagttacccatgttgggtactatctatgtacatctgttatatcctacaactatagttgtcctggttgaattgaactcaaaagggtttgtttgagaaaaatagaggaatgtcggattagtggcaccatccttgtaataggcgaataccacggacgcatcatccttcatgctctcaccaacaaaaaattgaaggtcctgggcaactggagactccagtcgtcanggatcagaagatactgc

SEQ ID NO: 16310 - DNA, 314 bp, Zea mays
ctcgtgctaactgggccatcattggccacctcggcatacagtccaattgctttcttcctctacctccatgatggcagcccgcaagccggagaagccaccgaggacgacgaggacatcgggaggatactctgcgactgcatcggcgacgacttctccaactacaacagggccatagtcgagactgtccaaacgggctatggccccgctgaagtgatctatgccgtcctgagcaacggcgtccaaggccgggtcgccgtcaaacttgctcgcccgccggtgtccaaagctggagaagaagacgccaccaccattct

SEQ ID NO: 16311 - DNA, 311 bp, Zea mays
cggctccgtcgtcgcgtgccatcctagggtttctttccccgtcggcgcctccccagatttggccgccgccgccgctgacccaggttgtcttgatggcgcccgctgtagaagccgtgaaggagacaggcaccttccagaaggttcctgccttgaacgaaaggatactgtcatccatgtccaggaggtctgttgctgcacacccttggcatgatctggagataggtcctggtgctccaaccatattcaactgcgtcattgagataccaaggggcagcaaggttaaatatgaacttgacaagaaaactggactg

SEQ ID NO: 16312 - DNA, 314 bp, Zea mays
cttgtctatgcggcagtgacaccatttttgctcccttttgtattgatattctttgggtttgcgtacgttgtataccgccaccagataataaatgtgtataatcaagaatacgagagtgcagcagcattttggccaagtgttcatggacgcataatcacagcggtgaatgtatcacaagctgcttctccttgggtaattagcacaaaaggcgctggccagtcaacacctgtgctccttgttcttcctgtagtgaccttctatttccacaagtactgcaacaaccgctacaaaccgacttttgtgaaatgcccatt

SEQ ID NO: 16313 - DNA, 152 bp, Zea mays
tgatgtgcttgtgcatggcgagcctgagagaaacgatatggttgagtacttcggtgagcagctctccggttttgcgttcactgccaatggctgggtgcagtcttatgggtcaaggtgcgtcaagcctccgatcatctacggtgacgtgagcc

SEQ ID NO: 16314 - DNA, 314 bp, Zea mays
cgctgcgggactcgtccccgaactggagcaatcgcccgcccaaggagacgatcctcctcgacggctgcgacttcgagcactggctcgttatcatggagccgccgcctggtgacgcctccaaccccgacatcacacgcgacgagatcatcgatagctatatcaagactctcgcccaagtcgtcgggagtgaggaagaagctaggcaaaagatatactctgtatcgactcgtcattactttggctttggtgctcttgtatctgaggaactttcttacaaactgaaagaaattcccaaggtccgctgggttcttcct

SEQ ID NO: 16315 - DNA, 312 bp, Zea mays
gccctcttagatgtcggccttattaggactactactggaaaccgtgtctttggtgccctcaagggagctttggatggtggtctagatattcctcacagcgataagaggtttgctggcttcaagaaggatgataagcagctggatgctgatatccaccgcaagtacatctatggtctccatgttgctgagtatatgaagaatctggctgatgaggagcccgagaagtaccaggctcacttcagcgagtacatcaagaaggggattgaggccgatgacatggaagctctgtacaagaaggtccatgctgccatc

SEQ ID NO: 16316 - DNA, 311 bp, Zea mays
agcagctcgatcgagcacacacacacttgatcactactagacagtaaacacattgcgcaaaggccgccatggcttaccgcgcctttgctacgctgcttgcagtgctagcatttgtcggcttcgcttcagttccccgtggtctggcaactgacccgacccagctccaggacttctgcgttgctgataacaagaaccctgtgctggtgaacggggtggtgtgcaagaacccgaacatggtgaaggcaaccgacttcttctccacgatagtgccggtggcgccaaacgggcagggctccgctgtgacgccggtg

SEQ ID NO: 16317 - DNA, 314 bp, Zea mays
gccaaggccagtgccgcctgaattgacacctccacccgcagctgagcctgttgaggccaaggttaagccgagggcagggaatgtgaggatgcggaagcccaaggccagggagcctaacaagagggagatgagcctggaggagaagaacatgctcagggtggggctggagagtttgcccgaagagaagatgcataatgtgctacagattgtgcgcaagaggaacaacaatccggagatgctgggggatgagatcgagcttgatattgatgagatggatgttgagacacagtgggagcttgatcgtttcgtagcta

SEQ ID NO: 16318 - DNA, 106 bp, Zea mays
cctcagccgcgtcgcgtcgcatcctacgatccaaagctctctctgctcgcagccatggcgaagaactacccgaccgtgagcgccgagtacagcgaggctgtggaga

SEQ ID NO: 16319 - DNA, 311 bp, Zea mays
cccacgcgtccggttgctgcctacttgcttgctgtcctcgctgggaacgccagcccctccgctgaggatttgactgccattctggagtcagttggctgtgaagttgacaatgaaaggatggaactcctgctgtcccaactgagcggtaaggacatcaccgagctcattgccgcgggcagggagaagtttgcttcagtcccatgtggtggcggtggtgtcgctgttgcggcagcttcacctgctgctggcggactgctcctacagctgaggcaaagaaagaagagaaggtggaagagaaggaagaaagcgat

SEQ ID NO: 16320 - DNA, 310 bp, Zea mays
tgcaagtattgatgaaactgatggtgcggggatgaacttgatggatatcaagcaaaggacctggtcaaagtctgctttagaggcaactgctcctggacttgaagcaaagcttggaaatctagcaccagcatattcagctgctggccgaattgctccttattttgtagaaaggtttcagtttgataagaactgtttggtcattcagtggtctggagataatcctaatagccttgcaggtttaactctgaatacccctggtgatcttgccattagccttggtactagtgatacagtattcgggataacaaca

SEQ ID NO: 16321 - DNA, 110 bp, Zea mays
agcagatcaagagggagatcgcgacgctgaagctgctcaagcaccccaacgtcgtccgcctgtacgaggtttcagctagcaagaccaagatatacatggtcctcgagtaa

SEQ ID NO: 16322 - DNA, 306 bp, Zea mays
ggcgggttggcttctcctcccccaccggttcgtgttcaggttctggttcgtgggcgagagggaagagatggcggcgtcggacgtacagtaccgttgcttcgttggcggcctcgcctgggccaccgacgaccactccctcaacaacgacttccccattcccgccccgcaacccgcaggctctgggctcggaggaaccgagggcgagggacctccgaccgggaccgggccgggcgacatgttgggcgacctcctctccaggatcctcctgctcctgttcggctacgccatgccggcgttcgagtgctt

SEQ ID NO: 16323 - DNA, 335 bp, Zea mays
  unsure (1)..(335): unsure at all n locations
nncgggttcgacaccactagcctcacgacccgaccgacgtccgcgtgacgcgtgggcgcacgcgtggacgtgacgcgtgggtaaggaatgagcaaagagccttaactcttgtatttgcttgacatctgatctttggacctcaaatcagaagttgggttatctttgcnttgacgcccactacattgatgcaaactttatcttgaaaaagaagactattgcattcaaagatgtcaaatatccacacacgggcctagcaatcgaagaagtaattacgaagtgtctcatagagtgggggataaaagagaaggtgtttactatcacattggataatgcct

SEQ ID NO: 16324 - DNA, 308 bp, Zea mays
cgcttaaaaagctggacacgtccagtacttttgctgtgtcgggtattatcgaccagttttcacagaggccattagtgaaagatagcagctctttaaataggatggaaaccatcaacaaatgcttctccaaaaggacagttgaagaaatcatagatgctcttgaacaagaaatctcaaatgtttcagacaaatgggttgctgcaacaatcaagtccctgaaaaaggcttcccccaccagcctaaaaatttctctgagatcgataagagaagggagaacacaaactcttggggagtgcctgcgtcgggaa

SEQ ID NO: 16325 - DNA, 307 bp, Zea mays
gagtcagctgtcacatccaaacattgttcagtactatggcagtgatttgtgcaatgagacactctcggtctatctcgagtatgtttctgggggctctatccataagctgcttcaagaatatggtccgtttggggaggcagtgcttcggaattacacagcacaaatcctttctggccttgcatacttgcatgggcggaatacagtgcatagggatatcaaaggggcaaacatacttgtagatcctaatggtgacatcaagcttgctgattttggtatggcgaaacatatatcagcatatacatctatc

SEQ ID NO: 16326 - DNA, 306 bp, Zea mays
gctactatagatcatatgaaacagacttgtacaaaactgaggcctgctgaagatgaggagcttccatcagcttacattgaagagtttaggtgtgctttagatgttgaattgtcaaagtatgtttctgaagcttatcctaaaggggcctgtgccgtttattgtactagtggaaaggatatagagggaccaggagcagatttcagttttgcagcagttatttctgctgctaagcgtacctcacagaacttttgcaatggcagctggtgttcagtttggactattgaattcaattatgagttgcagttt

SEQ ID NO: 16327 - DNA, 301 bp, Zea mays
tccacgcgtccgggtgggctggcttctcctctccctcttaccaagtcctcctcgggttagggttccttatggttttgtggaggtgcgatggcggctgctgatgtggagtaccgttgcttcgtcggctggctttcctggtccaccagcaacgagtcgctggagaattccttctcctcctacggcgagatcctcgactccaaggtcatcaccgaccggtagatggggatgtctcgcggcttcggcttcgttaccttctcctccgataactccatgctcgatgctatcgagaacatgaacggca

SEQ ID NO: 16328 - DNA, 300 bp, Zea mays
cgatggcgcagatcatcgatggcaaggccatcgccgccgacgtccgccgcgaggtcgccgccgatgtggccgcgctctcgtcggcccacggactcgtgccggggctggccgtggtcatcgtggggagcaggaaggactcgcagacgtacgtgaacatgaagcgcaaggcgtgcgccgaggtcggcatctgctccatcgacgtcgacctcccggaggacatctccgagaccgcgctcgtcgccgaggttcatcgcctcaacgctgaccccgccgtgcacgggatccttgtccagcttccac

SEQ ID NO: 16329 - DNA, 302 bp, Zea mays
caacaccactccactccctccatttccctcacctcccgcagcagctagccgccagccaacaaccgaaccaaccaaccaacccacaggccacagcgagcgagtaaagcgtccaatggtagcgatggctgccgtgcagcagcagcagcagcagcagcgccgcgacgcggaggcggagctcaacctgcccccgggcttccggttccacccgacggacgaggagctggtggcgcactacctctgcgcgcgctccgctgggcgccgcccgccggtgtccatcatcgccgaggtcgacctgtaccgct

SEQ ID NO: 16330 - DNA, 299 bp, Zea mays
ctcgtgattgggttggtcgcttggttcttccctgccggaagatacctttcgttcggtgtcgccaactcgccattcttgggaggtcttggtcgggaccggtgctgatggaggagaggtacgaggcgctgaaggagctgggggccggcaacttcggcgtggcgaggctggtcagggacaagcggaccaaggagctggtagccgtcaagtacatcgagaggggcaagaagattgatgagaacgtgcagagggagatcatcaatcaccagtcgctccggcaccctaacatcgtacggttcaag

SEQ ID NO: 16331 - DNA, 299 bp, Zea mays
gtcatttacctgttgatggagccataatgataacagcaagccatctcccctacaatcggaatggtctcaagttttttacaagtgatggtgggctaaataaagctgatatcaaagatatcctggagcgtgcttccaaaatatatgaggaatctgcacataataacctgaaagaacagggggaagcttcgaagggagttgtcactaatgtggactacatgtcaatttatgcttctgatcttgtacaagcagttcgtaaatctgctggagacaaagaaaaaccattggaggaactgcatata

SEQ ID NO: 16332 - DNA, 298 bp, Zea mays
cagactccaccaccccgcttcgatcttctgttgcagctgaaatctgtcagattctgcagttcattccaaatggctgctgcagcagagcacggcaactgcgatgcttgggcggccagagacccttctggggttctctcaccatacaagtttaaccgcagggcagtgcaaagcagcgacgtttcgctgaagatcatatactgcggggtgtgttacggtgacgttatctggatacagaacaagcacaacgactcagtttatcctctggatcctgggcatgagatagctggggttgtgactg

SEQ ID NO: 16333 - DNA, 301 bp, Zea mays
gagaaacgtgagatttatgatcagtatggtgaagatgcccttaaggaaggaatgggtggtggtgggtcccatgctgatccatttgacattttctcatcattctttggaccctcttttggaggaggtggtggaagcagcaggggaagaaggcaaaggaggggagaagatgtagtccactcacttaaagtttctctggaagatctttacaatggaatctcaaagaagctctctctttcgcgcaatgtcatctgctccaagtgcaagggcaagggctcgaagtctggtgcttcaatgaggtgcc

SEQ ID NO: 16334 - DNA, 289 bp, Zea mays
agcacaagcgcactctagcaatggcttctgaggttgtccgccctagcgacgccgagctactaaaggcacaagccgacatatggcggctcagcctctcctacctcacgcccctgtcactgaggtgcgccgtggagcttggcatccccacggcgatctaccgccatggtcggggctgcctcagccgctgagctggtcacggcgctgtctctcccctccactaagctgccgttcctccgccgcctgctgcagctcctcgccgcgtcgggcgtgttcaccgtcgacaagcaga

SEQ ID NO: 16335 - DNA, 289 bp, Zea mays
ctatgtcgagtaccacaggtgtttgaatgccaaaggggatgatgctggtgtttgcgaaaaatttgccaagtactacaggtccctttgccctggagaatgggttgagaaatggaacgagcagagggagaacgggacgtttccaggacctctctgaatgtaccgcccgagacctccagttggaccagtcaacaagttggccaggcagtcctactgttccattctgcattcctacttcccgaatcgtaaatgccttttgtcccttgctcttcaaccagtcaccacaaaactg

SEQ ID NO: 16336 - DNA, 289 bp, Zea mays
atttgtctcttacattaaaaaatacatcaagaatctcactgctgtgttggagccagagaaagcggatgagttcaaaaagggtgtcgagggtgcaaccaagtttctccttagcaagctgaaggaccttcaattttttgttggtgagagcatgaaggatgatgcgtccgtggtattcgcctattacaaggatggtgccactaatccgacattcctctatttctctcatggtcttaaggagatcaagtgctaggcttgcggcgagattagttacccatgttgggtactatct

SEQ ID NO: 16337 - DNA, 290 bp, Zea mays
atcctggggccccgggaacaacagcttcatcgtctggaacacgcccgagttcgcccgggacctcctgcccaagtacttcaagcacagcaacttctactccttcgtcaggcagctcaacacctacgggtttagaaaggttgatccagacagatgggaatttgcaaatgagggttttctgagaggacagaagcatctgctgaagactatcaacagaaggaaaccatccttgcaggggaacagccaaccacagcaacctcagtcgcagaacgctcctgtgccttcctgtgtag

SEQ ID NO: 16338 - DNA, 286 bp, Zea mays
  unsure (1)..(286): unsure at all n locations
cacgctaaggtccgggacctgggggcggcntagtccaattcagtggtatcgtgtaatttctggaggcactagagaactcatatcaggagcaacaaaatttatgtatgccccagaagcgtttgatgttggccgattgttgcaagcagagatagttttgaatgcagacaaaattatagttcagacagatggccctgtagataacgctgcaggacttgaacgttatgtggactcactaatgaaaaggacggatattgagttcaatgtagtagtaacccaaatgaatggg

SEQ ID NO: 16339 - DNA, 299 bp, Zea mays
gtcgggaaggtcaacaaaaaccttgtttccctcatcaacatcgcgggaggcaccgccattggtctgtgcggcaaggacgcgcgccttatcaccgctcgcccgtctccaaatgcagcggcgctgggattcgtcggcgaggtttcgcgcgtggacgccaccgtcctccatcccatcatcgccgcgggccatatcccggttatcgccaccgttgccgccgacgagactgggcaagcctataacatcaatgctgatacggcggctggcgagattgccgctgccgtgggcgccgagaagctgct

SEQ ID NO: 16340 - DNA, 297 bp, Zea mays
gcagcggctgcctcaagcctaacatcatcgcgcacggggccgaccagttccggcggggcagcggcacgacgccgcccgccggctgtcgagctacttcaatgcagcctacttgagcttctgcgtgggcgagctggtggcgctcaccgtgctcgtctgggtgcagacccgctccgggatggacgtcggatttggggtctcggccgccgccatggccgtcggcatgctcagcctcgtcgctggcgtcgccttctaccgcaacaagccgccacagggcagcatcttcactcccatagctaa

SEQ ID NO: 16341 - DNA, 278 bp, Zea mays
aaacaagcacagagagagagagaaccccagcgggcaaacgcctccctccccctgcctccaggccccagatccggccatccgggtagctccagaccttctccaatggcggtcaaggtctacgtcgtgttttactccacctacgggcacgttgccaagcttgctgaggagatgaagaaaggcgccgcttcagttgaaggcgtggaggtcaaagtatggcaggtcccggagattctgtccgaggaggtgctcggcaagatgggcgcggcacccaagaccga

SEQ ID NO: 16342 - DNA, 279 bp, Zea mays
cgtccgcccacgcgtccgcccacgcgtccgcccacgcgtccgcttaaggaaaaattttcctctgctgacaacaaagagggtgttttggcgtggtgatgtcgaagaactcctttggttcatcagtggctcaacaaatgcaaaggttttgcaagaaaagggtattcatatctgggatggcaatgcttcaagagagtatcttgaccgtattggcttggcacacagggaggaaggtgatctaggtccagtttatggatttcaatggcgacactttggtgccga

SEQ ID NO: 16343 - DNA, 287 bp, Zea mays
cccacgcgtccgataggtaataggagtataatagttgaaagaattgtacagcaaaacagcatctttaatgtgaccatttggagcctgatcagtagtggctagggctggacgaaatacttgtggctcgataactcgctcgactcggctcgttttgattctgtagcgagccaagctagcattttagctcggttctctaatgagccagctcggattagctcgtgagctagctcacgagccaaacgagccaagccacaacacaagtttgtctagtcgtaagtgtcgtctca

SEQ ID NO: 16344 - DNA, 294 bp, Zea mays
ctaacatatgcccacctgcatgaggctaccaatggcttcagctcggaagctcttgttggcacaggaggattcggtgaggtttacaaggctaggctcatggatggcagcgttgtggctgtcaagaagctgatgcatttcacaggccagggcgaccgggagttcactgcagagatggagaccattggcaagatcaaacatcgcaaccttgtgccgttgctaggctactgcaaagttggcgacgaacgtctgcttgtgtacgagtacatgaataatggaagcctggatgtcttgctc

SEQ ID NO: 16345 - DNA, 295 bp, Zea mays
cggacgcgtggctcgctgccaacgcgttcctggcacagaggatctcctctgtgaacgccatctccgccctctgcgaggccaccggcgcgaatgtgactgacgtggcttacgccgtgggcaaggacacgaagattggccccaagttcctgaacgccagtgttgggttcggtgggtcttgcttccagaaggacatcctgaacctggtgtacatctgcgagtgcaatggcctgcccgaggtggccaactactggaagcaggtgatcaagatcaacgactaccagaagagccggttcgt

SEQ ID NO: 16346 - DNA, 279 bp, Zea mays
atgtccttcacctactccgccatcggcttgtccctcggcatcgcgcagactgttgcaaacggtgggttcaagggaagcctcaccggcatcagcatcggcgccgacgtcacctccacgcagaaagtgtggcacagcctgcaggccttcggcgacatcgcgttcgcctactccttctccaacatcctcatcgagatccaagacacgatcaaggcaccgccgccgtcggagtcgaaggtgatgcagaaggcgacgcggctgagcgtggcgacgacgaccatc

SEQ ID NO: 16347 - DNA, 278 bp, Zea mays
gtcaaggccgaggaggagtacgagaagaccggcaagatccccgacccggagtccaccgacaacgctgagttcaagatcgtgctcaccatcatccgcgacgggctcaaggctgaccccaagaagtaccgcaagatgaaggagaggcttgtcggcgtctctgaggagaccaccacgggtgtcaagaggctctaccagatgcaggagaccggcgccctcctcttccctgccattaacgtcaacgattccgtcaccaagagcaagtttgacaacctgtatgg

SEQ ID NO: 16348 - DNA, 190 bp, Zea mays
tgcaccgcagcaacgaacacgaaccttggcagaacgaagctgaagtagttcgctgtgaacccagtatggcaaacgctccgaggatcctggccctcagcctgctagctctcctgtacgctgccgcctgcccggccgccgcgcagaactgctgcttccaggcaaacttctgctgcagcaagttcggctactg

SEQ ID NO: 16349 - DNA, 276 bp, Zea mays
  unsure (1)..(276): unsure at all n locations
cctaagatcaggccgggacctggggactggtngagggatgttgatggtgtcaagattagaatcattgatacacctggccttcgtcccaacgttatggaccaaggatcaaactagaaagattcatgctgctgtcaagaaatataccaagaaatgtccgccagatattgttctatatgtggatcgtctggatagtctgagccgtgatctcaatgatttgcctcttctgaagacaattacctctgttcttggctcatccatatggttcaatgccattgt

SEQ ID NO: 16350 - DNA, 287 bp, Zea mays
acgcaccccaccaacccatacccataccagaggctctctgattttacttctcagcggtagatcggctgagcgagcgagcgagcgaggcacacggagctagctaaacagagcacacggatagaaaagcaagatgtcggacggcacggcgacctgcatcgacatcatcctcgccattatcctgccgccgctcggggtcttcttcaagttcggctgcggggttgagttctggatctgccttatcctcaccttcttcggctacctccccggcatcatctacgccgtctggg

SEQ ID NO: 16351 - DNA, 287 bp, Zea mays
ctctctccatctccctgctcctccgccttcttcttgatccagccaagccagggatcgccatgtcggactcggaggagcaccacttcgaatcgaaggccgacgccggagcgtccaagacctacccgcagcaggctggcaccgtccgtaagaacggcttcatcgtcatcaagaaccgcccctgcaaggttgtggaggtttctacctcaaagactggtaagcatggtcatgccaaatgccactttgttgccatagatatattcaacgggaaaaagctcgaagatattgtt

SEQ ID NO: 16352 - DNA, 301 bp, Zea mays
gatcttttcaaggtatggcaagatcccgaaaaggggactgtctctggtggcatgatcagggagcttctcatatctatctggagggcaactggacagaaaccaaagaggatcatattctacagggatggcgtcagtgagggacaattctaccaagttctgttgtatgaacttgatgccattagaaaggcctgtgcgtcattggagtctgactaccagcctccagttacttttgtcgtggtccagaagcgtcatcacaccaggttgtttgctaataatcacaatgataatcgtgctgtcgata

SEQ ID NO: 16353 - DNA, 292 bp, Zea mays
gcgcacctggcggcgatggacggcgccgcggaccggctgcgcctgttcagggccgaattgctcgactacggcagcgtggcggcggccatcgccggctgcgacggcgtcttccacgtcgcgtccccagtccccatgacctatccaatcggtgaccccgaggtagagctgctcgctccggccgtgacgggcaccaagaacgtcctgaaggcgtgctccgaggccaaggtgaagagggtcgtcgtggtgtcgtcggtggccgccgtgatggtgaaccctggctggccccagaacg

SEQ ID NO: 16354 - DNA, 293 bp, Zea mays
acgaagcagacggcgcgcaagtccacgggcggcaaggccccgaggaagcagctggcgaccaaggcggcgcgcaagtcggcccctgcgaccggcggcgtgaagaagccgcaccgcttccgcccgggcaccgtggcgctgcgcgagatccgcaagtaccagaagagcacggagctgctcatccgcaagctgcccttccagcgcctggtccgcgagatcgcgcaggacttcaagaccgacctccgcttccagtcctccgccgtcgccgcgctgcaggaggctgccgaggcctacct

SEQ ID NO: 16355 - DNA, 109 bp, Zea mays
gttggcttctcctccccctccggttcgggttcgggttcgtgaggttctccggggttcggtttcgtgggtgggcggatcgagatggcggcgtcggatgttgagtaccgct

SEQ ID NO: 16356 - DNA, 292 bp, Zea mays
ctcatggacactgatctgcatcaaataattaagtcatctcaaccactatccaatgaccactgccagtatttcctttttcagctgctccgaggcctgaagtacctccattcagccgggatactccacagagacctaaagccagggaacctcctggtcaacgcaaactgtgacctgaagatatgcgacttcgggctcgcccgcacgaacaacaccaagggccagttcatgacggagtacgtggtgacccgctggtacagggcacccgagctgctgctctgctgcgacaactacg

SEQ ID NO: 16357 - DNA, 297 bp, Zea mays
gtgttcttgggcgtacgcggacacagccccgatccgaatcgtcctcctcgcgagcctcgtcgatcccccactcccctcccctcgcttcaagatgcagatctttgtgaagaccctcaccggcaagactatcaccctcgaggtggagtcttctgacaccattgacaatgtcaaggctaagatccaggacaaggagggcatccctcctgaccagcagcggcttatcttcgccggcaagcagcttgaggacggccgcacacttgctgactacaacatccagaaggagtcaacccttcattt

SEQ ID NO: 16358 - DNA, 291 bp, Zea mays
ctctgagaagacaaagtcagcactggcagctgctgaacatagtgtctcgactgctggatctgctatcatgaagaacaggtatgtgctaaccggagctgcatgggtaactggtgctttcagcaaggtcaccagtgcagccaacgaggccggtgcaaaggctaaggaaaaaatagcagtcgagcaggagcacaagaatgctgagggtggacctgcacaagcgaacatctcagagacccatgaagcgcacaggggtttggacggcggattctcaaggctacatgactctgaaac

SEQ ID NO: 16359 - DNA, 99 bp, Zea mays
gtaccagtgaggtctatggtgatcccctccagcaccgcagtggagacttactggggcaatgtcaatcccatcggtgtcaggagctgttacgatgagggc

SEQ ID NO: 16360 - DNA, 284 bp, Zea mays
cccacgcgtccgacaagctagacaaagttacatacaacaagtaccatccctacacatcatggatccctataactgtttatatctgcctgcgcaattgcacccagcagttgaggaatgtctctttagctcttttcgcatggcttggcaagattacactcgagacttatatttctcagatccatatttggcttaggtctagcatgccaaatggacaaccaaagtggcttctttgtttcataccagattatcctatgcttaacttcatgcttactacagcgatctat

SEQ ID NO: 16361 - DNA, 285 bp, Zea mays
ctaagttctagatcgcgatctagaactgaggttctccggggttcggtttcgtgggtgggcggatcgagatggcggcgtcggatgttgagtaccgctgcttcgtcggcggcctcgcctgggccacggacgacctactccctccacaacgccttcagcacctacggcgaggtcctcgagtccaagatcatcctcgatcgggagacgcagaggtcccgcggcttcggcttcgtcaccttctccacggaggatgcgatgcggaacgccatcgagggcatgaacggcaag

SEQ ID NO: 16362 - DNA, 289 bp, Zea mays
agatgatcgaggtggtgctgaacgaccgcctggggaagaaggtgcgggtgaagtgcaacgaggacgacaccatcggcgacctcaagaagctggtggcggcgcagacgggtgacgcgccccgagaagatccgcatccagaagtagtacaacatctacaaggaccacatcacgctcaaggactacgagatccacgacgggatggggctcgagctctactacaactaggcgccctgaccccaaccgtgccctgatgttaatccgaattctgaagtcatgggtgcgcttccag

SEQ ID NO: 16363 - DNA, 293 bp, Zea mays
cccacgcgtccgcccacgcgtccggacgcgtgggcgcgcggggtcaagacggactggatcatgcacgagtacaggctcgccgacgccggccgcgccgccgccgccaagaaggggtcgcttaggttggatgactgcgtactgtgccggctgtacaacaagaagaacgagtgggagaagatgcagctggggaagaccgccgtcgccggcgtcggcgccaccaaggaggaggcgatggacatggccacctcgcacacgcactcccactcccaatcacactcgcactcgcactcgtg

SEQ ID NO: 16364 - DNA, 289 bp, Zea mays
cggacggtgggtcaagatctcctatctggcgacgagctcctgtcggattcattcacctacaaggagctcgagaacggcgtcctgtgggaggtcgagggaaagtaggtcacccaaggtcctgttgatgtagacattggtgccaatccatccgccgagggtggtgaggacgaaagcgttgatgacacagccgtgaaggtggttgatattgttgacacattccgtctacaggagcaacctccttttgacaagaaatcatttgtctcttacattaaaaaatacatcaagaatc

SEQ ID NO: 16365 - DNA, 286 bp, Zea mays
gcgggacggcagccactacagcatctccagcggcatcctgccgtcgctcggcgcgcgcacaaccgccgcgccaagctcaggcccttcatcgtctcgccctacgaccgccgatacagatgctgggagacttttctcataattcttgtgatatactctgcatgggtttccccatttgagtttggcttcattcggaaaccggcgggcgccctagctgcagtggacaatgtcgtgaatgcgttcttcgcagtggacatcatcctgaccttctttgtagcttacttggata

SEQ ID NO: 16366 - DNA, 280 bp, Zea mays
cccacgcgtccgcggacggtgggccgccgcctccgacatcgtcccttcgtccccacgagcaaccgataatccgccggcgttgagatgttggtttatcaggatctcctatctggcgacgagctcctgtcggattcattcacctacaaggagctcgagaacggcgtcctgtgggaggtcgagggaaagtgggtcacccaaggtcctgttgatgtggacattggtgccaatccatccgccgagggtggtgaggacgaaagcgttgatgacacagctgtgaagg

SEQ ID NO: 16367 - DNA, 282 bp, Zea mays
cgctgctggtcaacgtatacccgtacttcgcctactcgagcagcggcgggcaggtagcgctcgggtacgcgctgctgtcggcggacgccggcgcggcgtcgtcggtcacggacgccggggtggtctacaccaacatgttcgacgctatcgtgggcgcgacgcacgccgcggtggagaaggccggggtccaggggctggagctggtggtgtcggagaccggctggccgtcggccggcggcgagggcgccaccgtggagaatgccgcggcgtacaacaacaacg

SEQ ID NO: 16368 - DNA, 167 bp, Zea mays
gttcgtgaggttctccggggttcggtttcgtgggtgggcggatcgagatggcggcgtcggatgttgagtaccgctgcttcgtcggctgcctcgcctggtccacggacgaccactccctccacaacgccttcagcacctacggcgaggtcctcgagtccaagatcatc

SEQ ID NO: 16369 - DNA, 283 bp, Zea mays
ggaagaacgaagagagatcagcgacttaacaacaataatggccaccgccatagttcccacggacgccgagctgctgcaggcgcaggccgacctgtggcgccacagcctctactacctgacatccatggcgctcaagtgcgcggtggagctccacatcccgaccgccatccacaacctaggcgggtctgccacgctgccggacctcgtggccgcgctgtccctgccagcggccaagctcccgttcctcgggcgcgtgatgcggctgctggtcacgtcgggcgtc

SEQ ID NO: 16370 - DNA, 282 bp, Zea mays
ctgggacaccatggctccgatgaagctgtacggggcggtgatgtcgtggaacgtgacgaggtgcgcaacggcgctggaggaggctggctccgactacgagatcgtgcccatcaacttcgccaccgccgagcacaagagccccgagcacctcgtccgcaacccgtttggtcaggttccagctctgcaggatggtgacttgtacctcttcgaatcacgcgcaatctgcaagtacgctgctcgcaaaaacaagccagagctgttgagggaaggaaacctcgagga

SEQ ID NO: 16371 - DNA, 316 bp, Zea mays
cccacgcgtccgcccacgcgtccgcccacgcgtccgagttccccgaccacaccgttcctccgagcccaggagcagccccgcgccaggaggaagtttgttcttttaacaatatgtcgagggaggagaatgtttacatggccaagttggctgagcaggctgaaaggtatgaggagatggttgagtatatggagaaggtggctaagactgtagatgtggaagagctcactgttgaggagcgtaaccttctgtctgttgcatacaagaatgtgattggggctcgccgcgcttcatggcgcattgtttcttccattgaaca

SEQ ID NO: 16372 - DNA, 314 bp, Zea mays
cttgattgctgagccttgccggacagcacatctccgtgccatggaaattgccaaagaggctggtgcactgctctcttacgacccaaacctgagggaggcactttggccatcccgtgaggaggcccgcacccagatcttgagcatctgggaccaggcagatatcgtcaaggtcagcgaagtcgagcttgagttcttgacaggcatcaactcagtggaggacgatgttgtcatgaagctgtggcgacctaccatgaagctgctcctggtgactcttggagatcaaggatgcaagtactataccagggatttccatg

SEQ ID NO: 16373 - DNA, 316 bp, Zea mays
attcttggtggagatcaagtcccaaatggaaaaccttcccctgacatatttttggaggctgcaaagaggcttggtgcaaatccatcgtcttgcttggttatagaagattctgtcgttggagtcaagggtgccaaggcttctggggcaaaggcagttgcagtaccatcacttcaaaatcagaggaaccactattacattgctgatgtcatcctatattcgcttttggactttcaacctgagatgtggggtcttcctccatttgaagatcgcattcaaggtgttctgccaattgatcccttactttcaaatgcccgga

SEQ ID NO: 16374 - DNA, 316 bp, Zea mays
acgctttccccaactcgatctcgcacctagggtttcgtctcgccgctctcgtcctccgcgaagatgccgaagaacaagggtaagggaggcaagaaccggaagcgaggaaagaacgaggctgacgacgacaagcgcgagctcgtcttcaaggaagacgggcaggagtacgcgcaggtgacccggatgctcggcaacgggcggtgcgaggccatctgcgtcgatggcacgcgccgcctctgccatatccggggtaagatgcacaagaaggtctggatcgcggctggggacatcgtcctcgtcggcctccgcgactacc

SEQ ID NO: 16375 - DNA, 312 bp, Zea mays
  unsure (1)..(312): unsure at all n locations
cggacgcgtggngtttctgcatccccctcccgccgcgccgcctcaccgccgccggagaagatgggtcgcgtgatccgcgcgcagtnaagggtgcggggtccgtgtccaagtcccacacccaccaccgcaaaggccccgcccgcttccgctccctcgacttcggcgagcgcaacgggtacctcaagggcgtcgtcaccgacgtcatccacgaccccggccgtggcgcgccgctcgccaaggtcactttccgccacccattcaggtacaagcaccagaaggagctctttgtcgcagccgagggcatgtacacgg

SEQ ID NO: 16376 - DNA, 311 bp, Zea mays
cccacgcgtccgcgccgacaacggcatccctcttcctaacgtcaactccaagatcctatccaaggtaatcgagtactgcaacaagcacgtacatgccgccgcagccgcagccgccgcctcgaaggccggttccgacgacgtgggtgccgcctccgccaacagcaccgccgcctccggtgaggacctcaagaactgggatgcggacttcgtcaaggtcgaccaggccacgcttttcgacctcatcttggctgcaaactatctgaacatcaagggtctgctcgacctgacctgtcagactgttgctgacatga

SEQ ID NO: 16377 - DNA, 306 bp, Zea mays
gacgcagcgcatgcaggtagcaatggccgaggagacgaagaagggcctggtgctgctggacttctgggtgagcccgttcgggcagcgctgccgcatcgcgctggcggagaagggcatcgcctacgagtactcggagcaggagctgctgggcggcgccaagagcgacatcctcctccgctccaacccggtgcacaagaagatccccgtgctcctccacgacggccgccccgtctgcgagtccctcgtcatcctcgagtacctcgaggaggccttcccggaggcctgcgccaggctgctccccgacgc

SEQ ID NO: 16378 - DNA, 308 bp, Zea mays
ggctggcacaaagttagtatcacttggtctccttgttcttatgggcataggattagccaatgcagcgagggtggcgagatactctagtgctgatgggactggcaacggagagggacagggtagcggatatgtgaatggcgggggatcagggtctgggtccggtaccggatccggtgatagtagtccttatggtacccatgcaagtgctggagggggtggtgcaggtggtggagctagccaatacggtgggtctggatatggttcaggatcagggtctggttcagggtctagtacatatagtcaaggag

SEQ ID NO: 16379 - DNA, 309 bp, Zea mays
gctcttcgaagatttggaaggtttgatcgggaaattgacattggagttcctgatgaagttggccgtctcgaggttctccgcattcacactaagaacatgaaactagctgaagatgttaatttggaactcatttcaaaagatacccatggatatgttggtgctgatcttgctgccctttgcactgaggctgctcttcagtgcattcgtgagaagatggacatcatagatcttgaggatgagacaatcgatgcagagatattgaactcaatggctgttacaaatgaccatttcaagactgcgcttggaaca

SEQ ID NO: 16380 - DNA, 313 bp, Zea mays
ctgcagttaatcatggggcggtcgacatggctgacgactgctgccttgctggtggcactcatcgccaccgcctcctcatccgtggcactcgcctcgccgcctgggaaacttgaggtcggtttctacgagcactcgtgccaacaggccgaggacatcgtgcgcaacgccgtccgccgcggcatcgcccgcgagcccggcgtaggcgcggggctcatccggatgcacttccacgactgcttcgtccggggctgcgacggctccatcctcatcaactccacgccgggcaacaaggccgagaaggattccgtggcca

SEQ ID NO: 16381 - DNA, 305 bp, Zea mays
cccatccgcacctctctccatctccctgctcctccgcctccttcttgatccagccaagccagggatcgccatgtcggactcggaggagcaccacttcgaatcgaaggccgacgccggagcgtccaagacctacccgcagcaggctggcaccgtccgtaagaacggcttcatcgtcatcaagaaccgcccctgcaaggttgtggaggtttctacctcaaagactggtaagcatggccatgccaaatgccactttgttgccatagacatattcaacgggaaaaagcttgaagatattgttccttcat

SEQ ID NO: 16382 - DNA, 286 bp, Zea mays
agcagctgatgggtgaggttggagtgatgtttgagatcaaagaccttggctccaaagagaaagaggaatggaaggttactttcactaacgacgagaatgagacaatggaagtcggagctgttccttggcaggagttttgccagatggtgaggaagatcgtgatccattccattggagacaggggccatatggaggcttgcccttgcctggggcaggatgggaagagggactattagaagaagggatttttttttttggctggggcaggcaggagatggttgcggct

SEQ ID NO: 16383 - DNA, 301 bp, Zea mays
gccgtaaacgcccctcccggatcccgctagttcgccaccgccgcccgcccgcccgccgttcgcctcatcatggccgcctcgtcgaccgccatctccgtccacgacttcatcgtcaaggatgcgagcggcaaagacgttgacctcagcacctacaaggggaaggttcttctcattgttaacgtcgcatcccagtgtggcttaactaactccaactacactgagctggcccagctctacgagaagtacaaggaccaaggctttgaaatcctggctttcccatgcaaccagtttggtgggcagg

SEQ ID NO: 16384 - DNA, 303 bp, Zea mays
atgaaattgttcatattaaggatggtagtgtttcgatcctcaagtttgaccctcacaaagagaagccagcatctgtgcaacgagcattgtctgttcttgagatggaagttgagcaaataaagaaaggaagttatgatcacttcatgcaaaaagaaatccatgaacagccacattcgttgaaaacaacaatgaggggtagattgaaggatggtggggttgttctaggtggactgaaggaatatctcaagacaattaggcgctgtagaagggtggtatttattggttgtggaaccagttacaatg

SEQ ID NO: 16385 - DNA, 306 bp, Zea mays
gaagcatcggtttataacccggtgatcgagttcctgtgcagcaatggtagcaccgccaaggccgagacattcttcaggcagctgatgaagaaaggtgtggatgacaaggctgcattcaacagtctcatccgtggacatgcaaaagaaggtgtgccagaggcagctcaggagattctcgccatcatgacacgccgcgaggtcccaactgaccctgaatctcatgcactgctagttgatagcttcctgaagaatgagccggctgactcaaagacggcattagacagcatgatgcaacagggtcacttg

SEQ ID NO: 16386 - DNA, 128 bp, Zea mays
gtccgtggggcaggtcaggaaggacgaggtggagtccaagatcgccgcgtggcaggtcgccgaggtggccaaggtcaacaaccgcttcaagcgcgaggaactcgtcatcaacggctggggaggcgacc

SEQ ID NO: 16387 - DNA, 255 bp, Zea mays
tgatatcaagaaggaggctgcttgggccatctcaaacgctacctctggtggttcccatgagcaaatcaagtacttggtgtctgacggctgcatcgtgccgctgtgcgaccttcttgtttgccctgatccgagaattgtaacagtttgtctggagggtcttgagaatattcttaaagtaggggagcacgacaagaccatgggcgcaacaggtgacattaatgttttcgctcagatgattgacgacgcggaaggcct

SEQ ID NO: 16388 - DNA, 254 bp, Zea mays
cccacgcgtccgccaacgcgtccggtcggaattggctcacggcgctaacgcggggctggacatcgcggtgcggctgctcgagcccatcaaggaggagttcccaatcctctcttacgccgatttctaccagctcgcgggagttgtggccgtggaggtcaccggtgggcctgagattcccttccaccccggtagggaggacaagcctcagcccccacctgagggccgccttcctgatgccactaagggttctgacc

SEQ ID NO: 16389 - DNA, 255 bp, Zea mays
cccacacgtccgcccacgcgtccgagagactgcagatcaattttttgcatttaaggttcctatgcgagatggagaattaaatagtctatgccgtggtcttgacaaggcattccaaggcgctctcacagctggttactgcacccctagttgataaagaagatttagctccgcctattcctgttcttactcgatataaaaaggagcttggaatcaaggcttttgtaaaaaaagaggtccaagaagttagaacagttg

SEQ ID NO: 16390 - DNA, 255 bp, Zea mays
aaaagcctgttgttgcattcattgctggacttacggcacccccaggccgtcgcatgggtcatgctggagctatcgtggcaggaggaaagggtactgcccaggacaaaatcaaggcactcagagaggctggtgttaccgttgtcgagtcaccagcgaagattggttctaccatgtttgacatcttcaaacagcgtggaatggtagaatagacacagtggtacagtagagagacattgagaaaccgctttttgatgc

SEQ ID NO: 16391 - DNA, 254 bp, Zea mays
gtcgcaggcaatatgttcgagagtattccacctgcaaccgctgttttcctcaagaaaactctacatgactggggtgacgatgagtgtgtcaagatattgaagaattgcaagcaagccatatctccacgggatgcaggagggaaggtaataatcttggacgtggtagttgggtataaacagtcaaacataaagcatcaagagacacaagttatgtttgatttgtatatgatggccgttaacggagttgagcgtga

SEQ ID NO: 16392 - DNA, 249 bp, Zea mays
gatcgaggaggggctggaggggtacgacgagctggagcgctcctcgctcatgtcgcagaagagcttcgagaagcggttcggccagtcgcccgtgttcatcgcctccacgctcgtcgaggacggcggcctgccgcagggcgccgccgccgaccccgccgcgctcatcaaggaggccatccacgtcatcagctgcggatacgaggagaagaccgagtggggctaggagattgggtggatctatgggtcggt

SEQ ID NO: 16393 - DNA, 249 bp, Zea mays
atcctggatggcagctccttcatgaagcacgccaaggaggtgaacgccatggacccgctgctgaagccgaagcaggacaggtacgcgctccgcacgtcgccgcagtggctcggcccccagatcgaggtcatccgcgccgccaccaagtccatcgagcgagaggtcaactcggtcaacgacaaccctgtcatcgacgtccaccgtggcaaggcgctgcacggcggcaacttccagggcaccccgatcggc

SEQ ID NO: 16394 - DNA, 254 bp, Zea mays
taccacgcgtccgcggacgcgtggggtggtatgttctcgtgcagccagccttaatttgtcgcatgtcttaatgcaggttgccaaatggacggccatttcctccactgttcaactttaaccaggaactagcaaatgcctccccagagctcatcaacaggttgatcccagaccatgctaggcggcatcttgggctcacattattgcccgctactggaccataggcgaaggctctatggtggtgcggaaggcaacct

SEQ ID NO: 16395 - DNA, 253 bp, Zea mays
cgggagaggagaggagaggagaggagaggagaggttgggtctgggacaccatggctccgatgaagctgtacggggcggtgatgtcgtgcaacgtgacgaggtgcgcaacggcgctggaggaggctggctccgactacgagatcgtgcccatcaacttcgccaccgccgagcacaagagccccgagcacctcgtccgcaacccgtttggtcaggttccagctctgcaggatggtgacttgtacctcttcgaatc

SEQ ID NO: 16396 - DNA, 248 bp, Zea mays
gcacgcggcgctgttcacgtccaccgtgatgagccggctcctggcgcggcccaacgtgaagctgttcaacgccgtggcggtggaggacctgatcgtgcggcgggggcgcgtcggcggcgtggtcaccaactgggcgctcgtgtccatgaaccacgacacgcagtcgtgcatggaccccaacgtcatggaggccaaggtggtggtcagctcctgcggccacgacgggcccttcggcgccaccggcgtca

SEQ ID NO: 16397 - DNA, 245 bp, Zea mays
gtgaagcaaacatatcatatatatgttcacgttattaccgtgctccagagctcatatttggggcaactgagtacacaacatcaattgatatttggtcagctggatgtgttcttgctgagctgcttcttggccagcctctcttccctggtgaaagtgctgtggatcagcttgttgagataataaaggttcttggtactccaacgcgcgaggaaatccgatgtatgaatccaaactacaccgagttt

SEQ ID NO: 16398 - DNA, 98 bp, Zea mays
aggtgggttggcttctcctccccctccggttcgggttcgggttcgtgaggatctccggggttcggtttcgtgggtgggcggatcgagatggcggcgtc

SEQ ID NO: 16399 - DNA, 313 bp, Zea mays
gacgagtgcatcaagatattgaagaattgcaagcaagccatatctccacgggatgagggtgggaaggtgataatcatggacgtggtagtcgggtatgggcagtcaaacatgaagcgcctagagacacaagttatgtttgatttggttatgatggcggtcaatggagtcgagcgcgacgagcaagagtggaaggagatgttcattgaagctggattcaaagactacaaaatccgaccagtagctggcctcatgtcggtcatcgaggtctatccatgaattctttgtgaacaaaaggccggctgccataatataa

SEQ ID NO: 16400 - DNA, 318 bp, Zea mays
ccttctacctgagaccgggagggctttcagacgtaggcctcggttacattggactatacagtgggaacatccaatacatgctgctcggcaacgttggtgaatctgacaacggattgatccagtttgcaacgggatgcaccaacctgcggaagctcgagctgaggggctgctgcttcagcgagcgagctctggcagtggccgtgctccagatgccctcgctgaggtacatatgggtgcaggggtacagagcctctcgaacgggccaggacctcatgctcatggccaggccgtactggaacattgagttcgcgcctccca

SEQ ID NO: 16401 - DNA, 320 bp, Zea mays
cgagaaccggtctgcgcatctcctcgcgatcaagtcggacgtggagaggcagggcgacttcatccggttcctgatcaaagaggtggagggcgcggcgttcgtggacatcgaggacgtcgtgagcttcgtcaagtggctggacgacgagctctcgcgcctggtggacgagcgcgcggtgctgaagcacttcgagtggccggagaacaaggcggacgcgctccgcgaggcggcgttcggccactgcgacctcaagaagctggagcgggaggcggcctccttccgcgacgacgcgcgccagccctgcgccgcggcgctcaaga

SEQ ID NO: 16402 - DNA, 322 bp, Zea mays
cggacgcgtggcgactccgcagtccgcaggaccggtcactcggcagtcggcacgcacgctagcagcacagcagcagccagagccatcccctctcctcgctacagcttcgcttcctcggcgccgattcctcctcctcctcctccaccctcgtccgtcccgttccggcgcgcgagctcgcccgagatggcgaacgcgagatcgggtgtcgctgtgaacgatgagtgcatgctgaagtttggcgagctgcagtcgaagaggctgcaccgcttcataactttcaagatggacgacaagttcaaggggatagttgtggaccaggtcg

SEQ ID NO: 16403 - DNA, 310 bp, Zea mays
caccgccgtctcccacggcctgtggctgaacatccctgactatgatgctcccacacagctggtcaagcccaaggagaggaatgagaggtatgttgatgctgtcatgacaatccccaagggaaccttgttccccatgtgtggcatgaaccttgccttcgacagggatctcattggccctgctatgtactttggtctcatgggtgatggccagcccatcggtcgctacgacgacatgtgggcaggatggtgtgtgaaggtcatctgcgaccacctgagcctgggagtcaagactggcctgccatacatctgg

SEQ ID NO: 16404 - DNA, 307 bp, Zea mays
gctacctccaccaacaacacccttggacgagcatttggtggctggcctgccccctcttgaaccatatgctcggttgttccatagatactatgcaattgctacaccaagtgctacacagaggttgctttttggtcttctggaagcaccaccatcatgggctccagatgcacttgatgcagcagtacaactagttgagctacttagagcagccgaagattatgcttctggcatgcggcttccaaaaaattggatgcatctgcatttcttgcgtgcgattggaactgcaatgtcaatgagagctggcatt

SEQ ID NO: 16405 - DNA, 272 bp, Zea mays
tgccttgatgtatgtcaaaattgatgatcagaaacttgccattggaaccctctctgttgacaagaacccacacatacaatttgatctggttttcgataaagagtttgagctgtcgcacacatcaaaaactaccagcgtcttcttcactggctacaaggttgagcagccattcgaggaagatgaaatggatcttgattctgaagatgaagacgaggagcgggatgttccagtagtcaaggaaaatggcaaagctgatgggaagaaacagaaaa

SEQ ID NO: 16406 - DNA, 307 bp, Zea mays
cggaccggggtccgtcgattggaccccagatccgcaggccgcagcacaagagggtgggatcggaccggatcggatcggagcagagggggacaaccgaccacaatccgccggcgaccaccatgggctccgcgagccgtgccgtctcgtgcctgtgctgcccctgcaagtgcctggcgtgcgggctcctgagctgcctgtgcagcatcctcgtctcgctcgccgtcgtcctgggcgtcgtcgccctcatcctctacttcatcttcaagccgcacatgatcgcggccaccgtggactcggcctcgctctc

SEQ ID NO: 16407 - DNA, 308 bp, Zea mays
agcggttctacgtccgagtcgtcgcatcaggtcccctcgattcgccggcgggccaccaaccaagctcatacatctgaattgactagtcaaactcagtgatctctttggggactaatcaaactcaagaactaagtttcatgtctgatctcgacgtccagcttccatctgcttttgatccgtttgcagaggcaaatgctgaggactccagtgctggtgctggatcaaaggactatgtgcacgtgcgtattcagcagcgcaacggaaggaagagtctgacaactgttcagggcttgaagaaagagtacagc

SEQ ID NO: 16408 - DNA, 311 bp, Zea mays
gtgaaccgtactgagtaccagctgattgatatatcagaggatggatttgtgagccttcttacttcagatggcaacactaaggatgatcttagactcccaactgatgagactcttgtggcccagatcaaggaagggtttgaaagcggcaaggatcttgttgtgactgtccagtctgctatgggggaggagcagatctgcgcgctgaaggatgttggccccaagtaacttacctgccttggaatactgtatctcaaaacctaaatcgaaaaaagaagtgtatcaaggattgctacagagacatccatctggct

SEQ ID NO: 16409 - DNA, 311 bp, Zea mays
ccgcgctccgccaatccagagagcgagccagcccgagctcacacagcagcgagctcggtcttctcgccaggacacgaacacgaccccagcaggcggcaggcaagccacgctctctcgacgggcggacgttaatcgagacatggggcgctctccgtgctgcgagaagatggggctgaagaggggtccgtagacggccgaggaggacaggattctggtggcgcacgtcgagcgccacggccacagcaactggcgcgcgctgcccaagcaggcgggcctgctccgctgcggcaagagctgccgcctccgctgga

SEQ ID NO: 16410 - DNA, 299 bp, Zea mays
cgatttcgacaggcatcggtttagaagtcctagtccgatgtcttctccaaaccctagagctaatctccctagcaatgggttcagtccttggagcggactacaagagagattaggttttcctcaaggaaccagcatggactggcaaggagcacccccaagtcctagctcccatgttgtaaagaagattcttcgtctggaggttccagttgattcttatccgaatttcaattttgtggggcgcattttaggacctagaggtaattctctaaagcgagtagaagcatccactgggtgtcgtg

SEQ ID NO: 16411 - DNA, 298 bp, Zea mays
cgccgccggtcgccctccatctcctcgccgctgcctctcgtttctcttttcaataatcaagatgagccgtggtggtagtgccggtggtggtcaaagttctctgggttatctctttggaagcggtgagccccccaaaccagcagtggcaccagctgcaagtgctccacctgttgagaaaccatctgctgcaaagactgatgcggccaagcacgttgctgctggggttaccagccaaaccaataactaccacagggctgatggtcagaacactggcaacttccttacggaccgtccttca

SEQ ID NO: 16412 - DNA, 300 bp, Zea mays
gccgccctgcccattaccatgttctgtgggatgagaacaactttacggctgatgggttgcaaactctcaccaacaacttgtgttacacgtatgctaggtgcacacgctcagtatcgattgttcctcctgcatactatgctcacctggcagccttccgagctcggttctacatggagccagatacgagtgacagtggatctatggcaagccgtggccctccaccaggggggcgcaacaccaaggctgctggtgttgggaatgttgctgtgaggccattacctgccctcaaggaaaacgtga

SEQ ID NO: 16413 - DNA, 304 bp, Zea mays
aggagagaagattggtactctcttccataaggatgcaagtctgtgggagccatccaaggatgttagtgctcgtgagatggctgttgctgcaagagaatgttcaaggcgtctgcagaatttatcatcggatgaacgcaagacaatattgttagacattgcagatgctttggaacaaaatgaggatctaattagaactgaaaatgaagctgatgtatctgcagcacaagatgctggatatcagaaatctttggttgatagattgacattgaagccagaaaagatagcaagccttgcgaaatccata

SEQ ID NO: 16414 - DNA, 302 bp, Zea mays
ggacgcgtgggctgaagtggctaaggatgcgaaaaccacaaaagatccaaattactgtaaagtattgagctcaacattaagctcaataatgggctggacagaggaaagacttctggcatatcatgaaaccttcaatacaagtaatattgagtctatgcaaggcattgtctccattggagtgtcagctgcaagggttcttgttgaagatatatcccatgaataccgccgtagaagaaaagaagagactgatgctagctcgaagcagggtagagacatacataaggtcttcactacggacagct

SEQ ID NO: 16415 - DNA, 305 bp, Zea mays
ggtgagccagggtggttattttgagtcggagtatcgccgctcctcacctcctccgaggccccctaagaagcctgctgaagacaagggcagcatggagtacactgaggtgctgaagctccgtgggcttccctactctgcgaccactgaggacatcatcaagttcttcctggagtatgagctgacagaggagaatgtgcatattgcgatccgctcagatgggaaagctaccggtgaagcctttgttgagttcccaacagctgaagttgccaagacggcgatgtgcaaggataagatgactatcggga

SEQ ID NO: 16416 - DNA, 116 bp, Zea mays
ccgccacctctcctccggcatcgacgaggcgaaaccctagcgcccgagtccctctccctgctcccacaacccatggcggcggatatggcgtacgcgccgccgatgaaggctggcaa

SEQ ID NO: 16417 - DNA, 248 bp, Zea mays
cccacgcgtccggtcttagattcgcggaacctggattgaattatagcatacatgtatttatgcttttgatcatgttcctttttgcattttgttgcttattatggtgctcaagttgtacaaacactccctggacctcacaagtccgttgcaaagtgatgcacatgtttagggcgagatgtgttacaacttgaccctttgagactaaccatttgcttgagtttgcttgatttagtctcgaaggtggattg

SEQ ID NO: 16418 - DNA, 326 bp, Zea mays
ccaaaatccccaaaccctagcgaactcggcacggcggcgatggcagcggcgggcctgcggaaggggaacgcgcgcctcccacccgaagtgaaccgggtgctgtacgtgcggaatctgccgttcaacatctcgagcgaggagatgtacgacatcttcggcaagtacggcgcgattcggcagatccggctgggcaacgccaaggacacgcgcggcaccgcctacgtcgtctacgaggacatatacgacgccaagaacgccgtcgaccacctctccggcttcaacgttgccaaccgctatctcatcgtgctctactaccagcccgccaa

SEQ ID NO: 16419 - DNA, 326 bp, Zea mays
  unsure (1)..(326): unsure at all n locations
accacccctccgnccacgcgtccgcggacgcgtgggcggacgcgtgggtgctgatctggttgctggactgatggctctaatggagagtgatcatattggtccttacaacttgggaaacccaggagagtcttaccatgttctcgctagcacacgttgtgaaggaaacaattgactcaatggcaaccattgaattcaaacccaacacagctgatgatccccatatgagaaagccagatatcaccaaggctaagcaactgctacattgggagccaaaggtctctctcaaagaaggccttccgctaatggttcaagatttccgtcaaagg

SEQ ID NO: 16420 - DNA, 328 bp, Zea mays
ggcggcggcggcgcaagtccccttcatctccggcgcggcaaatggcaggcggcagggttgcacatgctaccctcaagggccccagcgtggtgaaggagatcttcattggactgaccctgggtctgatcgctggaggtatgtggaagatgcaccactggaacgagcagaggaaaactagatccttctacgacatgcttgacaagggccagatcgtcgtcgtcgaggagtagttcccacgtgtcacctcagaagtttttttttccagttgtttttgaaaactcactctggagagcacgacaaagtgaatgctgtggagatttggcttgaa

SEQ ID NO: 16421 - DNA, 329 bp, Zea mays
atgacaaccatgaccaacttgtgaagattgcaaaggtccttggaacagatgggttgaatgcttatttgaacaagtatcacattgagctggaccctcaacttgaagctcttgttggaaggcatagtagaaaaccctggtcaaagttcatgaatgctgataaccaacatctagtatcacctgaggccatagattttctcgataagctcctgcgctatgatcaccaagataggctcactgcacgtgaagctatggcacatccctacttcctccaagtcagagctgtggagaacagtagaacgagaccacaataatcgttgtctacaccctcg

SEQ ID NO: 16422 - DNA, 332 bp, Zea mays
caagtttctgaaagctagcaagcctggtttgtttgggtcatcaaggatcaaatggaactttaccaagtttctggtggacaaagatgggaaggtcatcgagagatacggaacctcgacagctccaatggcaattgagaaggacatccagaaggcccttgaggaataattttttgtgagcttgtctcgtctcatccaccacacacttgcagcagaaataggcacttgctgaaatatttcgtcgtagtaacattcagaccggacgtctttgcttatctgtagtaaaaattctgtgtaatgttaccctccttttcgccttccgttcgtgtaagtag

SEQ ID NO: 16423 - DNA, 335 bp, Zea mays
gcagcggctgcctcaagcctaacatcatcgcgcacggggccgaccagttccggcggggcagcggcacgacgccgcccgccggctgtcgagctacttcaatgcagcctacttgagcttctgcgtgggcgagctggtggcgctcaccgtgctcgtctgggtgcagacccgctccgggatggacgtcggatttggggtctcggccgccgccatggccgtcggcctgctcagcctcgtcgctggcgtcgccttctaccgcaacaagccgccacagggcagcatcttcactcccatagctaaggtatttgtcgccgcagtgagcaagaggaagcaagtgt

SEQ ID NO: 16424 - DNA, 323 bp, Zea mays
  unsure (1)..(323): unsure at all n locations
cggaccgtgggcaccccccgagctcagcttagctccactccagctccaatcacagtcgtgaccagagcgcgagagctagctagagggccgtgaaaatgccgatccataggatcgccctggggagccaccaggaggtgtaccacccgggcgccctcaaggcggcgttcgctgagttcatctccaccctcatcttcgtcttcgccggccagggctccggcatggccttcagcaagctgaccggcggcggcccgacgaccccggcgggcctgatcgcggcgngggtggcgcacgcgttcgcgctgttcgtggcggtgtctgtgggc

SEQ ID NO: 16425 - DNA, 315 bp, Zea mays
cagagaagcgccactgactatcttctatggcgggaaggtccttgtgttcgatgacttccctgctgagaaggcgaaagacctgatgcaaatggccagcaagggttcatccgtagcccagaaccctggcctgctgcctccttccacagctgcaaccgttactgacagcaccaagatcgcagcagtgccagccgcaccaattgctgtggccaacgcccagaagagtgcagcagatataccgcaggctcccaaggcatctcttcgcaggttccttgagaagagaaaggatcgccttactgcgaaagcaccgtacccggg

SEQ ID NO: 16426 - DNA, 325 bp, Zea mays
ccgacacgcatcgactcccgccgccgccgcttccgcttccgctccgtcgctcgcctcacgcctccggcgccacctccaccatggccccgaagaaggagaaggccccgccgccatcgtccaagccggccaagtccggaggcgggaagcagaagaagaagaagtggagcaagggtaagcagaaggagaaggtcaacaacgctgtgctcttcgaccaggccacctacgataagctgctctccgaggtgcccaagtacaagcagatcaccccatccatcctatctgagcgcctcagggttaatggatccttggcactgagggccatcaa

SEQ ID NO: 16427 - DNA, 324 bp, Zea mays
ggcgaggtccagtggtagtagaccagtggccctcgtgctgctggcgctgtgcgcgccgccctctcgtcggccacggtgaccgtgaatgagcccatcgccaatggcctctcctggagcttctacgacgtttcctgcccgtcagtggagggcatcgtgcgctggtacgtcgccgaggccctccgccgcgacatcggcatcgccgcggggctcatccgcatcttcttccacgactgcttcccgcacggctgcgacgcgtccgtcctcctgtctggttccaacagcgagcagatcgaggtacccaaccagacgctgcgtcccgaggcg

SEQ ID NO: 16428 - DNA, 327 bp, Zea mays
ccaagaagttccctccagtttgtaagctcgtttccgaaaagagctctagagccgccacacacacacagacaccatggcaccgcgttctctgctggcagtgctcgccgtcgccgccctcgcgttcttgcacgccgcctcggccaagtcgtcgtggcttgacaggaggttcaccacggacggcaccgtccgcacgggatacgacgattcgggccagcaggtggtgatgctccgcctcgaccagcactccggcgctgccggcttcaactccaaggagcagtacctttacggcgagttcagcgtcgagatgaagctcatccgggggaactc

SEQ ID NO: 16429 - DNA, 331 bp, Zea mays
  unsure (1)..(331): unsure at all n locations
cggacgcgtggnggcgtatgtggcctccaactccaaggatgaccctgccaaggaggctgctagcttcacgtcccaggtcatcatcatgaaccaccctgggcagattcgcaacggctatgccccagtgctggactgccacacctcgcacattgctgtcaagtttgcggactcattaccaagattgataggcggtctggcaaagagcttgagaaggagcccaaattcctcaagaatggtgatgctggtatggtgaagatggttcccactaagcccatggtagtggagaccttttctgaatatcctcctcttggtcgctttgctgtccgtgaca

SEQ ID NO: 16430 - DNA, 313 bp, Zea mays
tgtcgactcatccaagcagacccgagatacccaaaccctcgcaccttctcggcggtggcggcggcggcgtacgggacggcagagatggccatggaggcggtggccacggtgagctccgccagttggctccttgctatgctgcaggagcctgcgccggagctgaagctgcacgcgctcgcccgcctcaactccgtcgtccacctcttctggcccgagatctccaccagcgttcccaccattgagagcttgtacgaagatgaggagtttgagcagaggcagcttgcagcacttgttgtttctaaggtattttact

SEQ ID NO: 16431 - DNA, 310 bp, Zea mays
ggttttgagtggcttaaatggcatcctcggggacatttgataattgcaggatcagaggattgtaatgtatggatgtggaacgctgaccataatgccattataaatacatttgttggacatagtaacacagtgacatgtggtgattttactccagatggtaaacttatatgtactggatcagatgatgcatctttgaggatatgggacccaagaagtgcacaaagcaggcatgttattcgaggccatggttatcatactgatggattgacatgcttatcaatgactttggattcaccaacggttgttagtg

SEQ ID NO: 16432 - DNA, 312 bp, Zea mays
atcggttccaggctgcacaaacccaaagcagccttgcccatacaacattgactacttttcagaaaatactaccagctctggcttgctaattgaggatacactacacttgaactacagggaggaccatgtacccgtgaatgcttcagttattattggctgtggtcaaaagcaaagtggtgattatctggatggtattgcaccggatggactccttggccttggaatggcagatatttcagttcctagtttccttgcgagagctggactagttcagaattccttctcgatgtgctttaaggaagatagttctgg

SEQ ID NO: 16433 - DNA, 311 bp, Zea mays
  unsure (1)..(311): unsure at all n locations
cggaccgtgggtagggttttgctgctctccgaccccgagctccgacagccgcagcatcaggcgcggcccccctcgcgtgtgaccgagatggcgctgccgaatcagacgaccgttgattaccccagcttcaagctcgtcatcgtcggcgatggtggaactggtaaaactacatttgtgaagaggcatctcactggagagtttgagaagaaatatgaaccaaccattggtgtggaagttcatccgttggatttcaccactaactgtggtaagatcaggttctactgctgggataccgcanggcaagagaagtt

SEQ ID NO: 16434 - DNA, 261 bp, Zea mays
aggaagcgaggcggcgggggcggagatgtcggcgggactggtgaccgacgaggccaccgtggaccggctgtaccggatccggcgcacggtgatgcagatgctccgtgaccgtggctacctggtggtggaccacgagctcgccaccagccgccgcgacttcctccgcaagttcggcgagtccttccaccgcgaggacctcctcatcaacaagtacaagaagaacgacccatccgaccagatatatgtcttcttccccaacga

SEQ ID NO: 16435 - DNA, 323 bp, Zea mays
ctcacgagctgtggatagctgatactctcccccggcgccaagaaaccacgaaatcgcgcccccaccacaccttcccttcggtccatcccgatcttaccaagaatccgagatccgcctgcgacaggtagcggtcctatcttgatccgatggtgtcaccggcgccgggatgtagggattcgggggaggatggcggcaaggcggagtggctgatctacgcctttgtcgcgcgcggcatcgcggtgctggcggagtacacggaattcaccggcaacttccccgccatcgccgcacagtgcctgcagcgtctagccgccgggtcgtct

SEQ ID NO: 16436 - DNA, 310 bp, Zea mays
ggaggccctcaagggggtcaccatcatggagggcgacgccgaggacctcccgttccccaccgactccttcgaccgatacatcaccgccggcagcatcgagtactggccagacccacagcgggggatcaaggaagccacacagggtcctgagatttggtgggctagcttgtgtgatcggcccggtctacccgaccttctggctgtcccgcttcttcgccgacatgtggatgctcttccccaaggaggaagagtacatcgagtggttcaagaaggctgggtttagggatgtcaagctgaagaggattggacc

SEQ ID NO: 16437 - DNA, 307 bp, Zea mays
gcctctgatgatcagataaacagcctgccactatcagtaatcgagggtgaaggtcgttccgatgaaccctgcaatatatgcttggactgccctgctgctggtgattcactccggcgtttgccatgcatgcacaagtttcacaaagagtgcattgacaggtggctcgggatgaagatatggtgtccggtttgcaagtcaaatgtgttctcccagtaggccgtgagcatctcttatactttttggagcagcatcgaagctagattatagttggctgatacgaggcattgttacggctgcagtgtgtaca

SEQ ID NO: 16438 - DNA, 301 bp, Zea mays
cccacagctactccatcctctgggctcccacccacatcatcttctacgtcgacgacacgccgatccgggaggtgatccggcacccggacatgggcggcgacttcccggcgaactatggcggtgtacgccaccatctgggacggctccgcgtgggccacggacgggggcaagtacaaggtcaactacaagtacgcgccgttcgcgtccgacttctcggagctggccgtcgtcggctcccgcagccgcccggtgctccgcgtcccgcgccgggaccacggcgcggacctcctcgcgctcatga

SEQ ID NO: 16439 - DNA, 306 bp, Zea mays
acaagcctcagccgccacctgagggccgtcttcctgatgccaccaagggttctgaccacctgaggcaagtctttggcaagcagatgggtttgagtgatcaggacattgttgccctctctggtggccacaccttgggaaggtgccacaaagagcggcctggtttgagggggctggactacgaaccctttggtctttgacaactcttacttcaaggaacttctgagtggcgacaaggagggtcttcttcagctcccaagtgacaaagccctgctgagcgaccctgtcttccgccctcttgtggagaaa

SEQ ID NO: 16440 - DNA, 309 bp, Zea mays
caagaatatgatcactggcacttcccaagctgactgtgctgttcttatcattgactcaaccactggtggttttgaggctggtatctccaaggatggccagacccgtgagcatgctctccttgctttcacacttggtgtgaagcagatgatttgctgctgcaacaagatggatgctactacacccaagtattcaaaggcccgttatgatgagattgtgaaggaagtctcttcctacctgaagaaggttggatacaaccctgataagatccacttcgttccaatctctggttttgaaggtgacaacatgat

SEQ ID NO: 16441 - DNA, 306 bp, Zea mays
cctccgtccacgacttcatcgtcaaggacgcgagcggcaaacacgttgacctcagcacctacaaggggaaggttcttctcattgttaacgtcgcatcccagtgtggcttaactaactccaactacactgagctggcccagctctacgagaagcacaaggaccaaggctttgaaatcctggctttcccatgcaaccagttctggtgggcaggagcctggtaccaatgacgagactgtacagtttgcctgcacacgcttcaaggctcagtaccccatcttcgacaacgctgacgtcaacggtaacaat

SEQ ID NO: 16442 - DNA, 303 bp, Zea mays
actagttctagatcgccggcggccgctcgcgatctagaactagcggaccgtgggcggacgcgtgggcggacgcgtggggtttcgtgtcgaacgatgtcgggcttgacgctgaccactgcaaggtagttgtgaacattggcctgcagtcccctcatattgctcagcgtgtgcacggccacttcaccaagcgccccgaggagattggagctggtgaccaggggcacatgtttgggtatgcgactgacgagacccctgagctgatgcccgtcagccatgtccttgccaccaagcttggtgctcgtc

SEQ ID NO: 16443 - DNA, 309 bp, Zea mays
gcgtcagagcccgatcccgatccagcgaggcggcgaccctccctcctccccttgcttcgctcgtccagccctgaccacccgcatccccgtcagtcatggcagcggcagcaggcggaggcgcggtgcgtgcgctgtcccagaaggagcaggacatacagatgatgctcgccgccgacgtccaccttggcaccaagaactgcgatttccagatggagcgctatgcctttaagcgccgcaccgacggcatctacatcatcaaccttggcaagacatgggagaaactgcagcttgcagcgagggttatcgttg

SEQ ID NO: 16444 - DNA, 304 bp, Zea mays
tggcttcaagactcccagggaagcaatcgaagggacctacattgacaagaaatgcccattcactggaactgtttctatcagaggcagaattattgctgggacatgccacagtgctaagatgaacagaactatcattgttcgcaggaactacctccactttgtaaagaaataccagacgtatgagaagaggcactccaacattcctgctcacatctctccatgcttccgtgtgaaggaaggtgaccatgtcatcattggccagtgcaggcccctgtcaaaaactgtgaggttcaatgtcgttaaa

SEQ ID NO: 16445 - DNA, 301 bp, Zea mays
gcacttggtgctggtcggattttcgcccaaggtgctaagcttgttgatcaagctcttgcctcaggaaagatttatgatggagatgggttcaactacatcaaagaatcttttgaaaatggtactcttcaccttattgggttgttgagtgatggtggtgtccactcccgccttgaccaactacagttacttctgaaaggtgtcagtgagagaggagcaaaaaaattcgtgtgcacatccttaccgatgggcgtgacgttttggatggaagcagcgttggtttcgtggagaccctagagaatga

SEQ ID NO: 16446 - DNA, 298 bp, Zea mays
  unsure (1)..(298): unsure at all n locations
gaagggcctcctgtatcctctcacttccctcagtcctcgtccgtctgctccctcctctctctacctagctctagctagccttcctgtagcgcggcagagatggctgcccctgcctccaccacggcggcggcggcggcagcgctgctgctgctgctcctcctgtcgctcgccgcggcggcggacatgtcgatcgtgtcctacggggagcgcaagccgaggaggcgcggcggatgtatgccgagtggatggccgcgcaccgccggacctacaactgcgtcggctangaggagcggcggta

SEQ ID NO: 16447 - DNA, 306 bp, Zea mays
cccacgcgtccggtctcatgataatgaacccatcactacgagttgctttcattaatgaggtcgaagctccaaccagaaatggagcaactgagaagacattattccgttcttgtcaaaggtggtggaaagtatgatgagatattggagagggaaaacctgaaaaccaaaatcatggacttatcaagtttgatgtcggcaacgtggtcatggtgaccggcgggaggaacaccgggcgtgtaggagtgatcaagaacagggagaaacacaagggcagcttgagaccatccatgtcgaggactccatggg

SEQ ID NO: 16448 - DNA, 299 bp, Zea mays
actagctcggctcaggctaagattcatcagttgctgaaacaaggtctcaaagtctccaatacagatgtaccattaaagacagagcatctacagaacaaagttactccaacactacggctccatctggtatatatatataatttttttctctaataatcatgtgaataggagctctggacgggaggatcggcagcatggccgtttactctcccggcgcagagaccccctgcttcagcttttccttcttcagcttcttcttcgacaccggcttcttcttccttggcgggagcgtcttctgc

SEQ ID NO: 16449 - DNA, 302 bp, Zea mays
ccgcaagccgtccgccttgcccttcacgaaggcttggtcctcctccttgtatctccactccccccttcacagatccgttcctccagctagggttagcgttcctctgcagcgatggcgatcaagcggaccaaggcggagaagaagatcgcgtacgacaagaagctgtgcagcctgctcgatgagtacaccaaggtgctcatcgccctcgccgacaacgtcggttccaagcagctccaggacatccgccggggcctcaggggcgactcggtggtgctcatggggaagaacacgctcatcaggcg

SEQ ID NO: 16450 - DNA, 295 bp, Zea mays
aaaggattttgctatgttgaatttgtttcagctgaagctgctgcaaaggcatataaagagaagcaatcaaaggagctgcatggtcgtgaagtaagacttgacttcgctaaaggaagaagtacacaaactcctcgcagcggcaatgatggatctttccagaaggctgctcggggtaacagcagctcaatatttatccggggctttgataaaaatctttcagaggatgagatccggagctctctcgaacaacattttagtgattgtggtgagatgacaagggtctctatcccgactg

SEQ ID NO: 16451 - DNA, 289 bp, Zea mays
actagctcggctcaggctaagattcatcagttgctgaaacaaggtctcaaagtctccaatacagatgtaccattaaagacagagcatctacagaacaaagttactccaacactacggctccatctggtatatatatataatttttttctctaataatcatgtgaataggagctctggacgggaggatcggcagcatggccgtttactctcccggcgcagagaccccctgcttcagcttttccttcttcagcttcttcttcgacaccggcttcttcttctttggcgggag

SEQ ID NO: 16452 - DNA, 295 bp, Zea mays
agaaccttgagaagctgaagaaggtgctagaggtgtacgaggcacgcctgaccaagtgcaagtaccttgctggagacttcctcagcctcgccgacctgaaccatgtgtctgtcactctctgcctgttcgctacgccctacgcatctgtgctcgacgcctacccgcatgtgaaggcctggtggtctggtctgatggagacgccgtctgtccagaaggtcgctgccctgatgaagccatctgcttgaaacggttgccctgtcaatcggtgaatggaataagccaagtctgttctggg

SEQ ID NO: 16453 - DNA, 126 bp, Zea mays
cccacgcgtccgcccacgcgtccgcggcaagctgacgagggtgaagaactccttcaagctgccggccaccgacgccaagcccaaggccgccaagcccaaggcacacaaggccgcgcccaagcccaa

SEQ ID NO: 16454 - DNA, 313 bp, Zea mays
agcatatgaaggtctgtttctgggatctgtgacatttggacactataaaagaatctggaagtcttgggcattgccaaaatgtcgtttcttcctttgattggttgcccataagagatgctggacagctgatagattggcaaagcgaggcctaaatcatccagagaaatgtcttctatgtgatcaagaggaagaaaatatggatcacctccttgtgcaatgttccttctcacgagaattctggtaccttttactcaggaaattcggtcttcactctctcgcaccacagccgactgcaaactccttcctgggatgg

SEQ ID NO: 16455 - DNA, 300 bp, Zea mays
atggaacctgcccctggctcaggcccgatgggaagacccaggtgacagtggagtaccgcaacgagggtggcgccatggttcccatccgtgtgcacacagtcctcatctctacccagcacgacgagacagtcaccaacgacgagattgctgctgacctgaaggagcacgtcatcaagccagtcatccccgagcagtacctcgacgagaagacaatcttccacctcaacccgtctggccgcttcgtcatcggcggacctcacggcgacgctggcctcactggccggaagatcatcatcgaca

SEQ ID NO: 16456 - DNA, 303 bp, Zea mays
gagacaggaatggttgatccaaggaagtttggtttgctagcgaactggcagcgggactacacgatggagaacatcctcacccagctcaagaaagagatggctgcctcgcagaatcgaaagttagtgcagcctccagaagggacattcttctaacgaagtgtgtcacttggcccgtcatgggatccaacagtaattgaaagttttatgggctaaaaaacagcgtctacatctggtgcccctgcctggctttgtgattttttatgacttttatgttcttgtatcgtgaaccgcagtgaacaacgg

SEQ ID NO: 16457 - DNA, 153 bp, Zea mays
aaacacgcgtccaaacacgcgtccgcgtgaggtgggatcccattcccatggctaggctaattagagaaggagagagagaaaactgctattagttgtacttgaagtgatcgattttcatttggttgaatgattcatcaacaaaagtgttccagc

SEQ ID NO: 16458 - DNA, 330 bp, Zea mays
cattcctgaccctgaggacaagaagccagagggctatgatgatattcccaaggaaattcctgaccctgatgctaagaagcctgaggactgggacgatgaggaagatggtgaatggactgcccctaccattcccaacccagaatacaagggaccatggaaacaaaagaaaatcaagaacccgaactaccagggtaaatggaaggcacctatgattgacaacccagattttaaggatgatccatacatttacgccttcgacagcttgaagtacattggcattgagctgtggcaggttaaatcgggcactctgtttgacaacatcatcatcac

SEQ ID NO: 16459 - DNA, 321 bp, Zea mays
cccacgcgtccgtattattcttgtgagttccaccccaaaacgaagcaacacgccttgcccggtgtgcaccgacgaaaccagcgacacagcacagagacgaacggcgtggtatcctcctgtctcagctgcttcctagctgggggtgctctctaccgtttcgagtacgcagtcaacccggcgctcttcctcgccaaagcgcgaggagggacgtgcacgctcgctccctctgaccctgacgacacggtggctcgccgcgccagatacctgctgagcaacggtttcaggtgctacaacctgttcaagagcaactgcgaggacttc

SEQ ID NO: 16460 - DNA, 314 bp, Zea mays
cggacgcgtgggcggacgcgtgggccaagatttctcggatcaccactatgcaaagacttcagcaggaaaggtcacaaaggattgggtgaaggcaatccaaagtgaatgggatcttccacagaaaaacctacctgaatctatatacgttagagtctatgaggacaggactgatctgctgagggctgccatagtcgggccagcaggaactccataccatgatggtctgttcttcttcgatgtccgttttccttgcgaatacccaaagtgcccaccaaaagtatactaccattctggcggacttcggctgaacccga

SEQ ID NO: 16461 - DNA, 318 bp, Zea mays
cgagacgcgtgggaaagaattgagaacttggtccgtggaattttagctggaaacatttttgatctaggatctgcacagcttgcagaagtttttgctaaagatggactgtcatttttggcaagttgccagaatcttgtatctcgaccatgggttattgatgaccttgatgcttttaagagtaaatggaccaagaaatcatgggaaaaggcagttatttttgttgataactctggtgctgatattatcttgggtatattaccatttgcgagggagttgctccgacgtggcacaaaggtgatacttgctgctaatgatatg

SEQ ID NO: 16462 - DNA, 321 bp, Zea mays
accacgcgtccgcggacggtggggcgcggggaaggcgagggcagcttccccaccatatcctccttccggtacggcgaggagctcctcttctcgcatcatccctccaagccagtgacctcgtacacgccgaagacgtggaagacggcgtctggcgagccgatgcacgccgagagcgggtactggcggccctgccctgacggctccgtagacgtggtcatcgctcagagcactggcctcgccgaggtccagaagggttcatttgatgctgaaaagaaaacagtgacactccaaagcgaactcgtagggaatgcatcaaaggtg

SEQ ID NO: 16463 - DNA, 322 bp, Zea mays
tttacatcttcaaaaccaaagcctgatgaaatagcagcatcagaaatggcatccgcagatggctccccgaattgggcattagttgaaggccgacctccatctgctgccgaatgtcatcactgtggtactaatgcaacagctacaccaatgatgcgtcgcggacctgatggaccaagaacattatgcaatgcatgtggcctcatgtgggcaaataagggtctcctgagggacgtaacaaaatctcctgtacctctccaagctacgcaatcagctccgcatctagatggtggtaatggaagcgccatgtctgcgcctggctctg

SEQ ID NO: 16464 - DNA, 316 bp, Zea mays
ctgaagcgcgcgagagaaacgcgtatacccaggcggcggttgaggaagaggaggagaagaagaagaagatggcttcctccgcatacgcctcatggtccattcggtggatccgtcccgaggtgtacccgctgttcgtgccgatggccgtggccttgggcatctgctcgtaccagcttgtgcgcaacatcacgggcaaccccgaggtgcgggtgaccaaggagaagagggcggacggcgtcctggacaaccacgacgagggcgagaggtacgctatgcacggcctcaggaagttcgtccgcgggaagaagcccgagat

SEQ ID NO: 16465 - DNA, 313 bp, Zea mays
ccctctcgtttcttcctgtgagcgacactcggtggagctgcgccgctctcaccttcgccggcgacgggcattcacaagtagtgatctcttgactaacggcgtagtggtgactaaagagccttgacaatgagcagcataggcacaggttatgatctgtctgtcaccaccttctctcctgatggccgcgtcttccaggtcgagtatgccacaaaagctgtcgacaacagcggtactgttgttgggatcaagtgcaaagatggcattgttctgggtgtcgagaagctggtaacctcaaagatgatgctggaggggt

SEQ ID NO: 16466 - DNA, 314 bp, Zea mays
ctgccgcccaagcccattgtcgtcaaggccaagctcatctccaaggtcgccgagaagaagatcaaggcagcaggcggggccgtcgtgctcaccgcctaggtttcagtccttgttcgcctcctggttttgaaatctatatctgaactgatagtgctttcctgtctcagcaatttgtgttaagaaaacctgtagttttaaaatatgtggttcctgcctgttgggcagtgcttatgcggtttttgatgccagttcatatcaaatatttcacatcaattaaatctatcctcgctatcagttgtgctagtttcatctaa

SEQ ID NO: 16467 - DNA, 309 bp, Zea mays
ccgccagccagacccgatcccctccctcgctagggttttcgtccccgctccgccgcgctcccggatcccaccgaaacaaccatggccggcggtcccgcggcggtgtcgttcctgaccaacatcgcgaaggtggctgcggggctcggagccgcggcctcgctcgcctccgcgtcgctctacaccgtcgacggcggcgagcgcgccgtcatcttcgaccgtttccgcggggtgctcccggagaccgtcggcgagggcacccatttcctcgtgccctggctgcagaagcccttcatcttcgacatccgcacg

SEQ ID NO: 16468 - DNA, 315 bp, Zea mays
atggaatgctgattggaaaagcgctacctccttgtatgagcaagctgcaattgcgtataggttcagaaaggataatgagaaagcaaaagatgcttttgagaaggcctcaaaaggacaggaaatgatctcctcaccatgggacgctgctaagcatatggaatctgctgctgctttagcaaaggagcttgggcgctggaatgaagtatctgatttctatcacagagcttcagaattataccgtgaatgtggaaggccacaacctgcatctgatgctctagcaaagggtgccagtgcattggaggcgaaatctccaga

SEQ ID NO: 16469 - DNA, 79 bp, Zea mays
cccacgcgtccggttggcttctcctccccctccggttcgggttcgggttcgtgaggttctccggggttcggtttcgtag

SEQ ID NO: 16470 - DNA, 302 bp, Zea mays
cagtgaggatagcgttacatcaggtgatctggttgtgaaggatcaggaatttattgaagctacaaaggagccagggcttaccttcatggttgcaaaatttgatggcattcttgggctaggctttcaagaaatctctgttgggaatgcaacaccagtgtggtataacatggtgaaacaaggtctcatcagcgaccctgttttctctttctggtttaaccgacatgctgatgaaggagaaggtggtgaaattgtgtttggtggaatggattctagccactacaagggcgatcacacgtttgtcc

SEQ ID NO: 16471 - DNA, 304 bp, Zea mays
atctgaagcgcgcgagagaaacgcgtatacccaggcggcggttgaggaagaggaggagaagaagaagaagatggcttcctccgcatacgcctcatggtccaaaaggtggatccgtcccgaggtgtacccgctgttcgtgccgatggccgtggccttgggcatctgctcgtaccagcttgtgcgcaacatcacgggcaaccccgaggtgcgggtgaccaaggagaagagggcggccggcgtcctggacaaccacgacgagggcgagaggtacgctatgcacggcctcaggaagttcgtccgcggg

SEQ ID NO: 16472 - DNA, 306 bp, Zea mays
cctcctatcatatcgttaccaaacctggtcaactcccagtcgagtttcttgaaccctcagctgcccagaagttggtaattggatttgactgtgaaggtgttgatctctgccgcaatggtgctctctgtattatgcagcttgcattccctgatgctgtttacctagttgatgctattgagggtggaaaagaacttattcaagcttgtaagcccgcacttgagtctgatcatatcaccaaagttattcatgattgtaaaagggacagtgaggctttgtattttcagtttggcataaaactgcataatg

SEQ ID NO: 16473 - DNA, 309 bp, Zea mays
ctccgacccatcactctctgctcgcgcactctcacctgcccgcgccgtattcgaccgccgccaagatgaacaaggagaggctcatgaagatggccggcgccgtccgcaccggcggcaagggcaccatgcgcaggaagaagaaggctgtacacaagacggtcaccacggacgacaagaggctgcagggcactctcaagagagtaggggtcaacaccatccctgcaatcgaggaggtgaacatattcaaggacgatctcgtcatccagttcttgaaccccaaagtgcaagcttccatcgcggcaaacacat

SEQ ID NO: 16474 - DNA, 304 bp, Zea mays
atgttctccccgagtgaggcgaccgtctccttcacgagatccttcaccgtcttgctgtcgtccttgatgtcctccctctgcatctcgatctccttctccttgccgacgacgctctccgggatgtcgtccaccgagacgtagtcgacctgcggacacgctaccacctgcatcgcgaggtcgttcaccagctccctgaacttgtcgttgcgggccacgaagtcggtctcggagttgacctcgatcatgcacccgatgcggctgtcgtggatgtaggaagcgaccagtccttcggcggctagcgaga

SEQ ID NO: 16475 - DNA, 310 bp, Zea mays
  unsure (1)..(310): unsure at all n locations
gcccgaacgccatgccggggcacatcctccttcccgcaccgaacgggatgaactcaaaatccatgcccttgaagtctcgtccactctcctcgaacctttccggcacgaaatcctccggcgcgtcccacagcgctgggtccctgcctattgcccacgcgttcaccagcaccatggtgccacgaggcacgtcgtagccgagcacctggcacggggctcgggaantcccgcggcagcagcaatggcgccggcgggtgcagccgcagcgtctcctttatgactagctgcaagtatcgcagattgaccaggctgt

SEQ ID NO: 16476 - DNA, 329 bp, Zea mays
cgaaaccttttcttgtgctctgtctgtgtgtttccaaagcaaacgaaagagctcgaggatgtcttgcagctgcggatcaagctgcaactgcggatcaagctgcaagtgccggcaagatgtaacctgacctggaggagaagaccggcgggggcgctcaggccagcgccgccgccgccgtcctcggcgttgcccctgagacgaagaaggcggcgcagttcgaggcggcgggcgagtacggcgaggccgccaacggctgcagctgcggtgacagctgcaagtgcagcccgtgcaactgctgatcctgctgcgttgtttcgcttgcggcatga

SEQ ID NO: 16477 - DNA, 327 bp, Zea mays
gggaagcacgcccccaaacgttccgaggtttcgcctctcggagcgcaccaacgccacccggagcgactcgccaccggcgcggagaaggagggcggaggctaggcgatggcggacgagaatgaggctgggaagaaagaggaagaggaatttagcacaggccctctgtcagtactaatgatgagtgttaagaacaacacccaggttctcatcaattgccgcaacaacaagaagctgcttggccgggttcgtgcttttgatcgccactgtaacatggtgctcgagaacgtgcgggagatgtggacagaggtccccaagactggcaagggc

SEQ ID NO: 16478 - DNA, 325 bp, Zea mays
cggacggtgggcaaggaaggccaccgcatcacatggaatccaagatgatgaggacacaaggaaggccactacatcatatggaatccatggggaggacccaagatactgccacacgtcatatggttcccaggatgagaagggatcaaggaaggtcataatgtcatatgggtctaatggtgaggatgatccaagataggccaccacatcatatggaatacaagataaagagtatcccaggaaggccaccacatcttatggagttcaaggtgagaaggacccaagggaagctaccatctcatatgggtctcaggatgatgaggattct

SEQ ID NO: 16479 - DNA, 325 bp, Zea mays
ctcacattgtccgtgaggttgagaagccaggatccaaactccataagaaggaaacttgtgaggctgttaccatcattgaaacccctcctcttgtcattgttgggctcgtggcatatgtgaagactcctcgtggcctccgcacactcaactctgtttgggcccaacatcttagtgaagaagtgaggagaaggttctacaagaactggtgcaagagcaagaagaaggctttcacaaagtatgctctcaaatatgaaaatgatgctggcaagaaggaaattcagctgcagcttgagaagatgaagaaatatgcttctgttatccgtgt

SEQ ID NO: 16480 - DNA, 258 bp, Zea mays
ctagaagtactgcctggccgtccgcgacggcgccgtcgtgctggccccggtcaaccccaaggacgaccaccagcactggtacaaggacatgcgcttcagcacccgggtcaaggacgaggaaggcatgccggcgttcgcgctcgtcaacaaggccacggggctcgccatcaagcactccctcggccagtcccacccggtacaactcgggcctttcaacccggacaagaaggagccttcgttgctttgaacgagaaccaa

SEQ ID NO: 16481 - DNA, 323 bp, Zea mays
tttttatttttttttttttttttttaaaaacatttaagtgcaagattaacttgaagacacaaagacaagcgaatcatcagcacaaaaggtaaacaggaacacactgcaacaagggtagtacaaaactcataaccatgtatgccttacattcgatgttccataaaaaaattaagtcttaatagcatcacggtttcaacgaaagtaataatacttcatgaccaggcaaacattgccatcatagattacttgttcacgcgacaactgcaaggatgtcaacaagacgagatattttaagcttccacgaggtaaccaacaagcaagca

SEQ ID NO: 16482 - DNA, 321 bp, Zea mays
gggaacttgggcgacaacaatgaagctaagcagaccaatattctttctgggcactttgatatttgctggtttgtgtaatagatcaatacatctcatcaaggaaagaagaaattcgggtattgtacctataggttcactgcaattaggtgtttgtaggcaccgagctgtcctaatgaagtatttgtgtgaccgggcggatcctccaattccttgtgagcttgtgaggggccatcttgactatacacctcatgcttggaacattgttcctgttaaaaagaggaatggctgggtaaggatgattgttgatgcttgttaccccac

SEQ ID NO: 16483 - DNA, 318 bp, Zea mays
  unsure (1)..(318): unsure at all n locations
attttctgttaaaaatgaacgaatgcgagactgcaaatcagtcttattcaaatgccataactctttttaagcatttgcccaaaggatggattagctggggaaattactgtgatatggtttttaaagaaacaanagatgaggtttggcttgagtatgcagtcagttgttttttccagggcatcaaatatggagtttcaaactcaaggagccatctagctcgaattctctaccttcttagctttgatggacaaaatgaacctgttggaagagctttggataaatatcttgagcagctgcctcactgggtttggctttcat

SEQ ID NO: 16484 - DNA, 318 bp, Zea mays
aacaaagcagatgttttcagctttgctattgtcatctgggagctgataacgtctaagatcccgtatgaaagcatgacccctctccaagcggctgtaggtgtgagacagggattgcgcccaggacttccaaagaagacgcatccaaaggtattggacttgatgcagagatgctgggaagcagacccatctgcccggcctgctttcccagacattttagccgaactggaggatcttttggcacaggttcagggaacaccgggaaagacggcccatgctccatcaaataactcgaacacgaaagattaacccccatgcaca

SEQ ID NO: 16485 - DNA, 314 bp, Zea mays
gcactggaatggtcaaggccggtttcgctggtgatgatgcgccaagagctgtcttccccagcattgtgggaagaccacgccacaccggtgtcatggtcggcatgggccaaaaggatgcctacgtaggtgatgaggctcaggccaagagaggcatcctgacactgaagtacccgattgagcatggcattgtcaacaactgggatgacatggagaaaatctggcatcaatccttctacaacgagctccgtgtttcgcctgaagatcaccctgtgctgctgaccgaggcccctctcaaccccaaggccaacagagag

SEQ ID NO: 16486 - DNA, 317 bp, Zea mays
ggaaaaccgtgatgcttcccaagaagcaaaaggcaaggctatggaagcaatttctgaaggaaaacttgaagatgctattgaacaccttaccaacgcaatagtgctgaatccactctcagcaatcatgtatggtactagagcatctgtgtttataaaaatgaagaaaccagctgctgccattcgtgatgccaatgctgctctagagatcaacccagactctgcaaaaggctataaaactcgtggaatggcatatgccatgcttggcaaatgggaggaagctgctcatgatctgcacacagcatctaacatggattacg

SEQ ID NO: 16487 - DNA, 314 bp, Zea mays
  unsure (1)..(314): unsure at all n locations
cggacgcgtgggcgctctcagacgactgggccgccgccgcttggtgctgaggctttcgttggtctcttcggcggcgacgagcacccaccagcagttctgtagaaaacgctgatggtgangacatccagcctcttgtctgcgacaatggcaccggaatggtcaaggctggttttgctggggacgatgcaccaagggcggttttccctagcattgttggccgtcctcgccacactggtgtcatggtagggatgggacagaaggatgcatatgttggcgatgaggcacagtccaagagaggtattctcacgctcaag

SEQ ID NO: 16488 - DNA, 315 bp, Zea mays
gtgcccgtgtcattgtgaccgagatcgaccccatctgcgccctccaggctctgatggagggtcttcaggtccttcccttggaggacgttgtctcggaagctgacatcttcgtgaccaccactggcaacaaggatatcatcatggttgaccacatgaggaagatgaagaacaatgccattgtctgcaacattggccactttgaccatgaaattgatatgctcggccttgagacctaccctggcgtcaagcgcatcaccatcaagccccagactgaccgctgggtgttcccgagaccaacactggcatcattgtcct

SEQ ID NO: 16489 - DNA, 315 bp, Zea mays
ctctttcatcggcgactccgatcttctctgccgtcgccgccgccgccaagagatcgacccgaccccgagcgcccgacccgaccccccaatccaaccaccaaccgccggcgcgcgcggaagattcagatttggcccctcgccggtaagggagatagcgaggatgggtgcgtggatgtcgcgcgtgtagttcctcatgttcccagcgcgggagtacaagctcgtcgttgtggggctcgacaacgcggggaagaccaccacgctctacaagctccacctcggcgaggccgtcaccgccgcgcccaccatcggcagcaa

SEQ ID NO: 16490 - DNA, 312 bp, Zea mays
gcgtactgtagtgttgacggaagtgaaaatcgcattcttcttgggtcaggagatgagatggatactttcaccagaggtgttgaagaagagactcttaagaatacacttagatgtggtagtggctatttgcatgagggtctaagtgagcttgatcaggaacttgtaacccagctgttccttggtgggaggatccaagtgtgtgttgcaagcagcacaatgtgttggggaagaccattgcctgctcatttggtcgttgtcatggggactcagtattatgatgggcgggagaatgctcacaccgactatccaatt

SEQ ID NO: 16491 - DNA, 311 bp, Zea mays
cccacgcgtccggcgaaggcctttgtgattcggacaatgcgcggtgaagggcataatgacgaatatcaagacgaatggagcgagagcatggtgaataccttttgcgaggcagcttacaatttacaaagccaagaagctcatacgaaggaagttccgtccaagggtgcaaaagaacccaggtctgtcgatgcaagattcactcccatctagtccgcgggaaacaactccatatcaaagtgactcctccaggtcatcttacgaggacttccatgagcagtaaaacaatctggtgatgctgctttcagcttcta

SEQ ID NO: 16492 - DNA, 311 bp, Zea mays
ggctgtcattcacagccatggaatagagacttgcatcgcaacaatgctcatccctggtgcaaaggagttcagagtgacccacatggaaatgatcaaaggaatcaaaggtcatggctaccatgatgaattggtcattcctattattgagaataccccttatgagtatgagctcactgactccctaagtgaggcgattgcagcatacccaaaggcaactgctgtgcttgtaaggaaccacggaatatatgtatggggggagtcttggatcaatgccaagacacaggctgaatgctaccattatcttttagatg

SEQ ID NO: 16493 - DNA, 310 bp, Zea mays
ctctaagctggtttcctctttcattgaaagatgtgcaacacgaagttctgtagaggagaccaatattgccatgctaactgaagatcaaaccaaccaattgctgtcttcattctggattcaggcaaatcaaacagataataccccttttaattatgaggctattggacattcatacagcctaacagttctttcttcccgccttaagaattcaagcaatggcaatatcattcagtttttccaattgccattatctcttcgaagtgttgctttaaccccgagtgaagttctgccggcttattgccaacggtct

SEQ ID NO: 16494 - DNA, 327 bp, Zea mays
ggaagcgggtggccgggaacggcgtcgggagtgtcgcggactgccaggcgatgctggacttcgcggcggacatggcgtcaccgctgacaccgaggtcgtgccgatggactacgtcaacaccgccatcgagcggctggagaagaacgatgtcaggtaccgcttcgtcgtcgacgtcgcgggcagccagatggataccgttgcttagaagcctggatgcgtagttcgatcgagtcatgtagcagccgtcgttgtgcgtggtgtgaaattgtttgctcgtgccgtctatttgttggtgggtgtgggtcaataaactaggcagaacaattg

SEQ ID NO: 16495 - DNA, 326 bp, Zea mays
agaccacagcgcgacagtgagtacagcagcagcagctgagagcgtgagagcgtgcgaacgaggagggaggacaagaagaagccgatggcggttgtgagcggcacggcgggaggctgaacccctgggcggaccgttcgtgccttccggggcgcggtaccgcggcctgcggaccgtggaggcgacgccggagcaggaggtggaggacttctcccccgagtggtggcgcctggtgtccgcctccccggccttccgcgaccgctggctgcgcgagtacggcgcgctcggcctactcgacgccgaggacgacctggacgacgacgtcgaca

SEQ ID NO: 16496 - DNA, 326 bp, Zea mays
cgctgtgcgggcaggcgtacggcgcgcacaagcaccgcatgctgggggtgtacctgcagcgctcgacggtgctgctcatggccaccgccgtgccgctgaccgtcgtctacgccttctcggagcgcatcctggtcctcctcggcgagtcggagcgcatctccagggccgccgccgtcttcgtctacgggctcatcccgcagatcttcgcgtacgcgccaacttccccatccagaagttcctgcaggcgcagagcatcgtggcgcccagcgcttacatctccgtggccacgctggcgctgcacctggggctcaactgggtcgccgtct

SEQ ID NO: 16497 - DNA, 325 bp, Zea mays
gtggagccggcggtgcgcggcacgagtacgtgatcaacgcggcggcggaggccggcacggtgcggcgggtggtgttcacgtcgtccatcggcgccgtgaccatggaccccaagcgcgggcccgacgtcgtggtcgacgagtcgtgctggagcgacctcgagttctgcgagaaaaccaggaactggtactgctacggcaaggcggtggcggacaggcggcgtgggagacggcccggcggcggggcgtggacctggtggtggtgaaccccgtgctggtggtgggccccctgctgcaggcgacggtgaacgccagcatcgcgcacatc

SEQ ID NO: 16498 - DNA, 326 bp, Zea mays
ggatggccgcaccctggcggattacaacatccagaaggagagcactctccacctggtgctccgcctcaggggtggcatgcagatttttgtgaagacattgactggcaagaccatcaccttggaggtggagagctctgacaccattgacaatgtgaaggccaagatccaggacaaggagggcattcccccagaccagcagcgtctgatctttgcgggcaagcagctggaggatggccgcactctcgcggactacaacatccagaaggagagcaccttcaccttgttctacgcctcagaggtggtatgcagatctttgtaaagaccct

SEQ ID NO: 16499 - DNA, 328 bp, Zea mays
ctacaatcctaaaaccatctgcttcagccttcagctagccccaagtttagtcggccgatcgatcactgaagtagtaatggcctccgccaacagctggaccctcgagatcgcgtcgccggtggccccgcagcgcctgttccgcgccgccgtgatggactggcacaccctggcgcccaaggtcgcctcccacgtcgtcgccagcgcgcacccagtggagggcgacggcggcgttggcagcgtcaggcagttcaacttcacctcagtcatgccgttcagcttcatgaaggagcgtctcgagttcctcgacgcggacaagtgcgagtgcaag

SEQ ID NO: 16500 - DNA, 328 bp, Zea mays
cggctttcaggcggcctccaatcttgatcgtcatcggcgacccgacctgtgatcccaagtctctacagcatgctctgggaaagggagctatagagtatgaagagtttctgaaaaccggtgacccggagttcagttggaagccaccgaaggacgaatggcagagcatcgccctaggctacacttctgggactacttccagcccaaagggcgtcgtgttgcatcaccgcggtgcttatctcatggcactcagcgttgccatcgtgtgggggatgcctgaaggggctgtctacctgtggactctgcccatgttccattgcaatggttggtg

SEQ ID NO: 16501 - DNA, 331 bp, Zea mays
agccaatatgccaggtgtgaagagaaaataactatgactccagctgccatctcaagggaagctggtcttccaggatatggtcctggtcctggagaaaactttcttcaggtcagttcaaggaatactagctgtgagcagagtgtgatactggctcctaccgctatcgcaagagaagttggtccaccaggatatgcgactggagaaaaccagggcaatggggctccatggaatacaagttatgagcgaagactatttatgaatcctgtgaccagctcaagagcagtcagtcctccaggatatgggcctgaagaaagccgaggcagtggcattt

SEQ ID NO: 16502 - DNA, 335 bp, Zea mays
gcctgatgtaccctctcgccatggtcatcggcgccgccaacgcgctcgtcatggtcacgacgattgggctggagggcgcgttggtaggggaggaccttaacggctgcgccttcgtctacggctccctcagcttcctggacaagatctcctgcggaatcgccctgttcgcgctagaatcgtacgaagacacgatggtgagctacggcgagacgaggggcctcaacacggtgagcaggtacgggacgggcctgatcccctcctgcttcgccgtactctccctggtggtcacctccacgctgaggctgcaggacgacaccccgagagccgccgctgca

SEQ ID NO: 16503 - DNA, 320 bp, Zea mays
atccgtttcagtggggagcaccaacctttgatgctggtgaagcttttgctatgatggcagcttcttttgttgcccttgtggagtccactggtgcgtttatcgccgtctcacggtacgccagtgcaacaccatgccctccttccgtcttgagccgtggcattgggtggcagggagttggcattttgctaggtggcatatttggaacagctaatggcacctctgtgtctgtcgaaaatgctgggttgctcggtttgacacgcgttggtagtagacgtgttgtgcagatttctgccgggtttatgatattcttctccatcctt

SEQ ID NO: 16504 - DNA, 322 bp, Zea mays
gtccaaatccctctctcctccctcccagcaccagccctggctgctccaccgagctcccatccatggctcctgtcttcttccttctacctctcctactcggccagatccttctctgcgcagcggcgacaccatcaactcgtccacacccttgtccggcgcgcagaagattgtgtccaagggcaacaagttcaccttgggcttctacaccccaccccaaggtaccaacacctcctccaaccagggtaactactacatcgccatatggtacagcaacataccactgcagacgacggtgtggatggccaaccccgatctgccggtg

SEQ ID NO: 16505 - DNA, 322 bp, Zea mays
cggacggtgggcgtgacgcgtgggcggacgcgtgggcggacgcgtgggtgagaggtccgcagcaaaggaaagcaaccagcaaaccatgtctgatcttgatgtgaccatggctgagaccaatacaagtatcccacggaacagtacaccaagtgccaatcctgcatactacagaaatgtaacatttgtggagggcttttccaaaacctctgttgtcaagcatgcatctgatgtcaaagggaattctataaaggttttgaactgccatgattctgttatctacatattagcaccgctgaagtatgctactgtgtacggttgttct

SEQ ID NO: 16506 - DNA, 293 bp, Zea mays
cggacgcgtgggcggacgcgtgggcggacgcgtgggcggacgcgtgggcggacgcgtggggcagggccagcttattatatataatatctgaggtggagcatatatatctggctgtgtactacaagcaagcctagtacgccgcctgcgcgttcctcctattacacataacacatatagccccctccctgcgtgtatgcttgttgccgtcgtgtcgaatcttgtactacgaggctccgtcgaacctcgatggcttgcttctttatcagaacatgtttgaataaacgctatttggt

SEQ ID NO: 16507 - DNA, 320 bp, Zea mays
gcactattggtgtctgccacagagatattaagccacaaaaccttctggtgaacccacacacccaccagcttaaactatgtgactttggcagtgcaaaagttctggtcaagggggaaccaaacatatcgtacatctgctcccgatactatagggctccagagctcatatttggtgccactgagtataccacagcgattgacatttggtctgctggatgtgttcttgctgagcttatgctagggcagcctttgtttccgggtgaaagtggtgtggaccaccttgttgaaatcatcaaggtcctcggtacgccaacaagggaa

SEQ ID NO: 16508 - DNA, 322 bp, Zea mays
gaagtagagcgtgctttagccaaactgggtcctgctagaattcaaggaagatcctcccccaaaagaattgaagggcctgatggaagaaatcttcagctccagttcagaagtcagttggctcttccaatcttcactggtggaaaagttgaaggtgagcagggagcagctatacatgtcgtgctgttggatgcaaacactggatgtgttgttacttcaggacctgagtcgtttgcaaaattggatatccttgtacttgagggtgacttcaataaagacgaagatgaggattggacagaagaagagtttgaaagtaatattgtca

SEQ ID NO: 16509 - DNA, 322 bp, Zea mays
gcaagattgattgggacaaggcccgcaatctatgtgctaaggaagatctgtactatccacatccatttgttcaagatgtcttatgggccactctccataaatttgttgaaccagttatgatgagttggcctggcagtaaattgagggagaaagctctggagacagccatgcaacatgttcactatgaggatgagaacactcggtacatttgcattggtcctgtaaacaaggtattaaatatgcttgcttgctggattgaagatccaaactcagaggccttcaaactccacatcccacgagtctatgactacttgtggcttgc

SEQ ID NO: 16510 - DNA, 327 bp, Zea mays
gtcgggaaggtcaacaaaaaccttgtttccctcatcaacatcgcgggaggcaccgccattggtctgtgcggcaaggacgcgcgccttatcaccgctcgcccgtctccaaatgcagcggcgctgggattcgtcggcgaggtttcgcgcgtggacgccaccgtcctccatcccatcatcgccgcgggccatatcccggttatcgccaccgttgccgccgacgagactgggcaagcctataacatcaatgctgatacggcggctggcgagattgccgctgccgtgggcgccgagaagctgctgttgctcacagatgtgtctggcattttg

SEQ ID NO: 16511 - DNA, 328 bp, Zea mays
cccacgcgtccgcaataagcttgattgctgagccttgccggacagcacatctccgtgccatggagattgccaaagaggcaggtgcactgctctcttatgacccaaacctgagggaggcactatggccatcccgtgaggaggcccgcacccagatcttgagcatctgggaccaggcagacattgtcaaggtcagcgaagtcgagctcgagttcttgacaggcatcgactcggtggaggacgatgttgtcatgaagctgtggcggcctaccatgaagctgctcctagtgactcttggagatcaagggtgcaagtactatgccagggattt

SEQ ID NO: 16512 - DNA, 316 bp, Zea mays
tcggagatggaggatttcctgaacaagttcttccccgggttgctcaagaggacggcgcgcgccaacaaggacgtgtactgcatttacaacaaccaggcgctgacggccttcacgtcgtcgctgtacgcgttcggcatggtggggacgctgctggcgagccgcgtgacccggcggctggggcggcaggccgtcatgctgatcggcggcggcctgttcttggccggcgccctcgtcaacgccgccgcggccaacatcgccatgctcatcgtcgggaggatgctgctcggcctggggctcggcttctccggccaggcca

SEQ ID NO: 16513 - DNA, 317 bp, Zea mays
ggaaagacaaagcagatatctccagttccaattcatctcagcatatactctccacatgtggtcaacttaacattgattgatctgccgaggcctaaccaaagttgcagttgaggggcagcctgaaagcattgttcaagatatcgaaagcatggtgcgttcatatgttgataagccgaattgtattatattggctatatctcctgccaatcaagatatagcgacatcagatgcaatcaagcttgcccgggaagtggatccaactggtgagaggacatttggtgtgttgacaaagcttgatttaatggacaagggaacaa

SEQ ID NO: 16514 - DNA, 322 bp, Zea mays
cggacgcgtgggccgcatcggaactaggaaggcgaacgatagcgcgtgcgcggcgcggcacggatcgagcgatggcggtggcccctcctacggcggcggcgctggaccagctaagcagcagcaagatgttcgacggcttcaatctccgcttccgccaccagagcgccacccttggctgcgccatgactttctccatctacctgcccccgtccccggcgtccaaccttcccgtgctgtactggctctcgggtctcacctgcaccgacgagaatttcatcataaagtccggcgcccagcgcgccgccgctgcccacggcatcgc

SEQ ID NO: 16515 - DNA, 322 bp, Zea mays
cccacgcgtccgatacccgacgcgcaaccagtgccgcacccagaccagatctccgcgacatatcagtcgttcgtccagctaactgcactgcactgcactgcacgcaatggccaccacggcgaccgaggcggccaaggctgcaccggcgcaggagcagcaggccaacggcaacggcaacggcgagcagaagacgcgccactccgaggtcggccacaagagcctgctcaagagcgacgacctgtaccagtacatcctggacacgagcgtgtacccgcgggagccggagagcatgaaggagctgcgcgagatcaccgccaagcac

SEQ ID NO: 16516 - DNA, 326 bp, Zea mays
agcggatcaaaccctagatctcgtcttgtcgccccgttcctccgatcccatcctatccgatcctcatggattcctcctcgtccagcctcagccagcagcccgagttcgactacctcttcaagctactccttatcggcgactccggcgtcggcaagagcagcctcctcctccgcttcaccgccgactccttcgatgacctctcccctaccataggtgttgacttcaaggtgaagatggttagcattggtggcaaaaaactcaagcttgccatctgggacacagctggacaagagaggtttaggaccttgaccagctcttactacaga

SEQ ID NO: 16517 - DNA, 311 bp, Zea mays
ccgtttcgtcgtcgctgaacccggacgcgccgctcttcatcccggcggcgctgctgcaggtggaggacttctcgccgcagtggtgggacctcatcaccaccactgcctggttccgcgaccactggctcccgcgagcgcgcccacctggacgagatggccgagcagatcgacgcggccggcctcctccccgacgacgaggacctcttctacgacgaccagctcgagcagggccccgtcgccgccgcccttaagacagattcggtgctcaaggcgctgaacatgacctccccgaatgtcggcggcgacgcccg

SEQ ID NO: 16518 - DNA, 311 bp, Zea mays
cccacgcgtccggtttggcataagctcagccaccctaatgttacaaagtttgttggtgcatctatggggaccacagaccttaagattccatcaaacaattccaatggtgctgcacgtacaaatttgccagcaagagcatgttgtgttgtggtagagtatcttgctggaggaactttgaagcaatatttgataaagaatagccgacggaagcttgcttataaagttgtggtccagcttgcattggatttggccagaggattgagctatctgcactccagaaagattgtacatcgggatgtgaaaagcgaaaa

SEQ ID NO: 16519 - DNA, 306 bp, Zea mays
aaattagggatgaagatggaactgtgttgcctaatatccatatagctgactgtggccataagattggactgaatggcgttgataatgggcggatttggtttcagaatatacgtgttcctcgtgagaacttgcttaatttggttgctgatgttttgccagatgggcgatatgttagcatgatagataatccagatcagaggtttgcagctttcctatctccgcttacacttggtcgagtaaacattgcagttaactcagtctacatttcaaaggtcagcctagcaattgctgtgagatacagtttgt

SEQ ID NO: 16520 - DNA, 308 bp, Zea mays
ccactggccacctgatctacaagctcggcggtattgacaagcgtgtgattgagaggttcgagaaagaggccgcggagatgaacaagcggtcattcaagtatgcctgggtgcttgacaagctcaaggccgagcgtgagagaggtatcacaattgatattgctttgtggaagttcgagaccaccaagtactactgcactgtcattgatgcccctggacaccgtgacttcatcaagaatatgattactggcacttcccaagctgactgcgctgttcttatcattgactccactactggtggttttgaggct

SEQ ID NO: 16521 - DNA, 285 bp, Zea mays
cggacggtgggacagcatcgagaccgtcatgggcgcgcagacgtacgacgccaacatttccatacctgggtgcgacaagaacatgccaggtacaataatggcacagggacggcttaatcgacctagcataatgatatatggtggaactattaagcctggtcactttcaggggaattcctatgatatagtatctgctttccagtgctatggagaatatgttagtggttcaatcactgatgagcaaagaagtacgtcctcgcagttcatgtcaggagcaggtgctgt

SEQ ID NO: 16522 - DNA, 305 bp, Zea mays
aggagctgctatgatgagggcaaacgtacagctgaaacattaaccatggactaccatcgtggtgccaaccttgaggtaaggattgcccggatctttaacacatatggtcctcgcatgtgcattgatgacggccgtgttgtcagtaatttcgttgctcaggcgctgaggaaggagcctttgacagtctatggtgatggcaagcagactaggagctttcaatatgtctcagatttggtggaagggctgatgaagctcatggaaggggagcacattgggccgttcaacctcggcaaccctggagaatt

SEQ ID NO: 16523 - DNA, 305 bp, Zea mays
cggacggtgggtccgtctccaaaagagagcccaatcctaaattcccaatccctcaaaggaaggaggattcttcagcgtctcgcttgccggccccgaatcgcagtcgccgcccggatccgaggaaacaagtcgtcgtcttgctccaccgtccgcccgccgccatgagcttcatcttcggcaagaagaagactcctgctgagctgctgcgggagaataagcggatgctggacaagtccatccgggagattgagagggagaggcagggcctgcaggcccaggagaagaagctcatcaacgagatcaag

SEQ ID NO: 16524 - DNA, 303 bp, Zea mays
cggacgcgtgggcggacgcgtgggcggctactgatcgcacaggccaaacaccagaatcccatgtactccactgaagcagaggacaccgaaatggtggactccatgatcatggacgtctccgccctacgggccgccacgggggatttcgacgagagcaacaagctcggcgaaggcggctttggcgccgtgtacaagggtgtcctcccggatggcgaggagatagcggtgaagcgtctgtccagtagctcgtcgcagggggtgcaggagctgaagaacgagctggcgctggtggccaagctgaag

SEQ ID NO: 16525 - DNA, 301 bp, Zea mays
ggagtgaacagcattcctggtattgaagaggtcaacatctttaaggatgatgttgttattcagtttgtaaatcctaaagtgcaagcgtcaattggtgctaatacatgggtggtcagtggaactccacagacaaagaagctgcaagatctgcttccgtcgattatcaaccagcttggtcctgacaacctggacaatctgcggaggctcgcagacatattccagaagcaggcctctggtgcttctggtgcagaggctggtgccagcgctggggctgttcaggacgatgatgatgacgttcctg

SEQ ID NO: 16526 - DNA, 301 bp, Zea mays
cttttgttgtgctgcaagatgcgacaaatcactttgatgagcagatggtcattggagttggagactttgggaaggtctacaaagcagtgatgcaggatggaagcaaacttgcagtaaagcggggcaaccagaagtcccaccaagggctgagggagttccgtacagagattgaattgctgtcagggctgcgacaccgtcatctcgtgtcgctcgttggttactgtgatgaacacaaccagatgatcttggtgtatgaatacatggagaaaggaactctgaagagccatctttatggcggtga

SEQ ID NO: 16527 - DNA, 299 bp, Zea mays
cccacgcgtccgcgcgaccatggctgaggaggtcacgccccacaacatccacatcctcctcatctgctacccgagccagggccacatcaaccctatgctccgcctcgcgaacgcatcgcagccaagggcatcctcgtcacctgctcctcgtcctccgtcgtccgcgacgatctcgccgctgcctcgggggtgtcggctggcggcgacggcgtgcccttcggcgccggccgcctccggttcgacttcctagacgacccattcgacgggacacttttggacctggaggacttcctgcggca

SEQ ID NO: 16528 - DNA, 299 bp, Zea mays
ggccgcaggaacagctccctcctcgacgatgagtggtcaatgaacctcttgggctatgcatggaccctgtggaaggaaggcagcgtctcggagctcatcgacccgctcatgggagcaacgtacgcttacgatgaagcctgcagatgcgttcaggtgggtctcctgtgcgtgcaggaggtaccagccgagaggccagccatgcccctggtgctcaggatgctgagtggtgacgccgcgatcccgtccccgaagcaagctgcgtttttcgttgggagggcacctcgtcttcctcctgcgga

SEQ ID NO: 16529 - DNA, 300 bp, Zea mays
gagatgagcagtagatcggtatccctggatttctatctcaacgttataacttgtgtcaaaccttagacactggggtagactgcttggtcctaatactggttttatcatgtgactgcgctcgctggggcaaaatcctacagaggctgagctccaggacatgatcaacgaggtcgatgctgatggcaacggcaccatcgatttcccagagtttctcaaccttatggctcgcaagatgaaggacaccgactctgaggaagagctcaaggaggccttccgtgtgtttgacaaggaccagaacgg

SEQ ID NO: 16530 - DNA, 302 bp, Zea mays
cgaggagatctacctgcactcgctccccgtcaaggagcaccagatcgtcgagaccctcgtcccggggctcaaggacgaggtcatgaagatcacgcccgtccagaagcagacccgtgccgggcagcgcacccgcttcaaggccttcgtcgttgtcggcgatggcgacggccacgtcggcctgggagtcaagtgcgccaaggaggtggccaccgccatccgcggcgccatcatcctagccaagctctccgtcgtccccgtcaggagggggtactgggggaacaagatcggacagccccacaccg

SEQ ID NO: 16531 - DNA, 300 bp, Zea mays
cccacgcgtccgctcaagtttgaccctcacaaagagaagccagcatctgtgcaacgagcattgtctgttcttgagatggaagttgagcaaataaagaaaggaagttatgatcacttcatgcaaaaagaaatccatgaacagccacattcgttgaaaacaacaatgaggggtagattgaaggatggtggggttgttctaggtggactgaaggaatatctcaagacaattaggcgctgtagaagggtggtatttattggttgtggaacaagttacaatgctgccttagctgcaagacctttt

SEQ ID NO: 16532 - DNA, 313 bp, Zea mays
cggacggtggggaaaagacaaggctgttacttcctcgaaaccaaagcacagatcgactgcaaatcatgaagcgtgggagtgcggggggcatgtaagagcaatcacaatttcgatcagccaaatgaaggaaacaacattggagaacatacaaggtacacttatttacatgccatccaaagttttttttttgtttttcagtttttgtttaattgcaatttctgcaatggacattgtattgatgagctggactggcttcttccaaccaaattatatgcaatcgcaagcgtacaggatggcgaggtccagtggtagt

SEQ ID NO: 16533 - DNA, 310 bp, Zea mays
accggacgtgctgggaaatctggtcttgcgactgcattcttcaacgagagcaacactacgcttgcaaggccattgagtgatctctactacaagggcttcctcgccctgcaggcgcaccgcgcgcgcacgggctgtggtgcgaggaccgctccgcgccggccttcctcctccagagccgcgcgtccgaagtgttcggcgtcgacatccaccccggcgcgcgcattggctcggggatcctgttcgaccacgccacgggcatcgtcatcggcgagacggccgtcgttgggaacgacgtctccatcctgcacgg

SEQ ID NO: 16534 - DNA, 313 bp, Zea mays
cccacgcgtccgggcaactcaacctccatccaagagatgttccgccgcgtcacgagcagttcacggccatgttcaggaggaacgctttcttgcactggtacacaggcgagggtatggatgagatggagttcaccgaggcagagagtaacatgaacgacctggtggccgagtatcagcagtaccaggacgccactgccgaggatgaggagtacgaggaggaggaggaagaagaggaagagacctaagtcattctccgcagtgcttggtacagatatgatattccttgtatcgctgttagtactcgtcagtttga

SEQ ID NO: 16535 - DNA, 309 bp, Zea mays
cccacgcgtccgcctcttctgatgtatgcctggaaagttggccctgctttggcatgtggaaatactctcgtgctcaagactgctgaacaaacccctctatcggctttgtatatctccaaattgttgcatgaggctggactacctgagggtgttgtgaatgtcgtttctggttttggccctactgctggtgctgctcttgctagtcacatggatgttgataagatcgcatttactggatctaccgatactggaaaaattattctcgagttggctgcaaagagcaaccttaagacagtgacactggagtta

SEQ ID NO: 16536 - DNA, 306 bp, Zea mays
agaggagaagaaggctgctgaagaacgtgctgcggctgccaaggcttctggcaagaagaaagaatctgggaaatcgtcagttttacttgatgtgaagccatgggacgatgagactgacatggccaagctcgaggaagctgttaggagtgtccagatggaaggactgctttggggcgcatccaagcttgtcccagttggatatggcatcaagaagctgcaaatcatgatgaccattgtcgatgaccttgtctctgttgacactctcatcgaggaccatctctgcgctgagccagtgagcgaatacgt

SEQ ID NO: 16537 - DNA, 306 bp, Zea mays
cctgtatttgctacctgttgtgccgatatgattaacagatgggaaaattcaatgtcttccaaggaaccttctgagatggacgtctggcctgagttccaaaatcttactggagatgttatctcaagaaccgcatttggtagcaactatcaggagggcaggaacatcttccagctacaaggagagcaggctgaacgccttatacaatcttttcaaacaatatttatcccaggctactggctcttgcccaccaaaaataacagaaggatgaaagaaattgatcgggagatccgtaaaattctgcatgga

SEQ ID NO: 16538 - DNA, 304 bp, Zea mays
ggtcaggttcccaggatgcacaatacttggggcagattttggagtattctctggatatggttcgcaagctctctgctgctgcaaaggaggatgagatgaagaaaaaccatgataaattattgagtgaattgtctacgaattctgaagttaacggcgatggcatcaactcatttgtcattgctgttatcaagggccttcgtttcatcctggaagaaataaaggaactgaaagcagaagtgagtaaagcacgtatccagatgatgcaacagatcataaaagagtcggctggggttgagtacctgca

SEQ ID NO: 16539 - DNA, 305 bp, Zea mays
cagaagcaaacataattaagcagttggtggtcattagcgtactgcacagagtgcctacagaaaagctagagaagtaaacaaaatggctgcgtcctcgtacttccttcttgctgcttttctagcggtggttgcttcccatgccaccgcttccgatcctagcccgctccaggatttctgtgttgcggacatgcactctcctgtgaaggtgaatggatttgtttgcaaggactccatggccgtgaccgcagatgacttcttcaaagcagccaatcttgataaggctagagacaccatgaagagcaagg

SEQ ID NO: 16540 - DNA, 304 bp, Zea mays
gaccttcttgaggcccctgatcctgccaacttggagaagttccttggaactataccaatgatgttcaatgttgttatcctttctcctcatggctacttcgctcagtccaatgtgcttggataccctgacactggcggtcaggttgtgtacattctggatcaagtccgtgctttggagaatgagatgcttctgaggattaagcagcaaggccttgatatcactccgaagatcctcattgttaccaggctgttgcctgatgctgctgggactacgtgcggtcagcggctggagaaggtcattggta

SEQ ID NO: 16541 - DNA, 309 bp, Zea mays
agcgaacatcgctccccgcgccgccgccaaaaccctagcttctcctactccatggccactgtctcgctcaccccgcaggctgtcttctccacggagtccggtggcgccctggcctctgctaccatcctccgctttccgccaaactttgtccgccagcttagcaccaaggcacgccgcaactgcagcaacatcggcgtcgcgcagatcgtcgccgccgcgtggtccgactgccccgccgcctccgcggcggcggaggtcagcgcaattcccaacgctaaggttgcgcaaccgtccgccgtcgtcttggcc

SEQ ID NO: 16542 - DNA, 298 bp, Zea mays
cccacgcgtccgaagaaccacagccaccgcgatggcgcagatcatcgatggcaaggccatcgccgccgacgtccgccgcgaagtcgccgccgatgtggccgcgctctcgtcagcccacggactcgtgccggggctggccgtggtcatcgtggggagcaggaaggactcgcagacgtacgtgaacatgaagcgcaaggcgtgcgccgaggtacgcatctgctccatcgacgtcgacctcccggacgacatctccgagaccgcgctcgtcgccgaggttcatcgcctcaacgctgacccc

SEQ ID NO: 16543 - DNA, 298 bp, Zea mays
cacacgcgtccgcggaccgtgggaggaggtgctgcttccaggtggccatggcctcatggttcgtgggtatcgtccggttataaatactctcgcaaaaggcttagatatacgcctcaaccataaggttgatgaaattgttcgccataggaacagggtagaggttaccgtaagcagcggccaaacgtttgttgcggatgctgctgtggtcactgttccgttgggtgtcctgaaagcgaaaaccattaaattcgagccgaggctgccagagtggaaagaggaagcgatcagagaacttacg

SEQ ID NO: 16544 - DNA, 299 bp, Zea mays
ctcgaaaccttttcttgtgctctgtctgtgtgtttccaaagcaaacgaaagaggtcgaggatgtcttgcagctgcggatcaagctgcaactgcggatcaagctgcaactgcggcaagatgtaccctgacctggaggagaagagcggcgggggcgctcaggccagcaccgccgccgtcgtcctcagcgttgcccctgagacgaagaaggcggcgcagttcgaggcggcgggcgagtctggcgaggccgcccacggctgcagctgcggtgacagctgcaagtgcagcccctgcaactgctg

SEQ ID NO: 16545 - DNA, 299 bp, Zea mays
cccacgcgtccggcgctgtgagacaaaaacaaaggacaatgtttttgtgaatgtggtggcatctattcagtaccgcgctctggctgacaaagcaagtgacgctttctacaaactgagcaacacaaggtcccagatccaagcctacgtctttgacgtgatcagagcaagcgttcccaagctccatttggacgatgctttcgagcagaaggacgagatcgcaagggcggtggaggaagagcttgagaaggccatgtcggcttatggctttgagatcgtgcagactctcatcgtggacatcg

SEQ ID NO: 16546 - DNA, 301 bp, Zea mays
gccctcgccgccgtttcctccacgcgcagtcacaaaaggagtccgtggctgacaacgccgggatgttggcaggcggcatcaaggacgtgccggcgaacgagaacgacctccagctccaggagctcgcgcgcttcgccgtcaatgagcacaaccaaaaggccaatgctcttctggggttcgagaagcttgtgaaggccaagacacaagttgttgctggcacgatgtactatctcactattgaagtgaaggatggcgtagtcaagaagctttatgaagctaaggtctgggagaagccatggga

SEQ ID NO: 16547 - DNA, 299 bp, Zea mays
atattttccactgcagtcaagcctaaggatgcggcgaggtggtgatgctatggattcacgaccttatttctgcctgggagatctttgggaatcattcagggaatggagtgcttatggggccggtgttccacttgtgctaaatggcagtgactctgtgattcagtattatgtgccatatctttctgctatccaactatttgcagatccatcaagacctgcttcaagaaacaggcgtcctggggatgaaagtgatggggactctatggatactagcagtgagagcagcattgagaatgacg

SEQ ID NO: 16548 - DNA, 278 bp, Zea mays
cggacgcgtgggcggacgcgtgggcggacgcgtgggcggacgcgtgggcggacgcgtgggcggacgcgtgggcttccaaagtacaactctcctggactggccatggaaaggggatttacagacttctgtacgaaggaccatgctgtagtttctacgcctgacgtctcctatcaccacgtcacggagaaagacgaatttgtggtgctggctactgacggggtctgggacgtgctatcaaacgatgaggttgttagcactgtctgccgagccacatctca

SEQ ID NO: 16549 - DNA, 309 bp, Zea mays
gcaaagatgggcagtgctggtgatcctgctttagctgatgagcttggtgaaggaagcactgccacaagaaccttgcttgccagctattctcagactccaaggcttggtatgacaccattgcgaactccgcagcgaactccagactgggaagggtgatgcaatcatgatggaggcagaaaatcttgcacgtctcagagaatcacaaacacctctattaggaggtgataacccagagcttcatccatcagatttctctggtgttacaccacgcaagaaggagatacagactccaaatccaatggcaacacc

SEQ ID NO: 16550 - DNA, 310 bp, Zea mays
ggacgttcgtgcacgagcgcgtgtacgacgagttcgtggagaagtccaaggcccgcgccctgaagcgcgtcgtcggcgacccctatcagggacggggtcgaacaggggcctcagatcgacggcgagcaattcaacaagatcttgcggtacgtccagtccggcgtcgacagcggtgccaccctcgtcgccggcggcgacaggcctaggcgacaggggcttctacatacagccgacggtgtttgaagacgccaaggacgaaatgaagatcgctcgggaggagatattcgggccggtgcaaaccattctcaag

SEQ ID NO: 16551 - DNA, 299 bp, Zea mays
gaaaagaatgcttaattgatggggaactccagggctttggccagttgcatccacgtagtcaaggagttgagacattaggaacaatatacagttcctcactctttccaaatcgtgctcctgacggtagggtgttacttctaaactacataggaggtgctacaaacacaggaattgtttccaagactgaaagtgagctggtcgaagcagttgaccgtgacctccgaaaaatgcttataaattctacagcagtggaccctttagtccttggtgtccgagtttggccacaagccatacctcag

SEQ ID NO: 16552 - DNA, 301 bp, Zea mays
ctcgctggtcgttgcctgcttcggattgcccccaggcgggccccactcattccgctgctgatatttcgtttggttctcctttccgtcttgtccgtcgccgaggccttccgctcgctccccagctccagcaggcagatcagatccatccaaccacgaacaggaaggaaggtaggaggaggggctgaagttgaaccatgagtgccgtcgcggtttcgtcgtcgctgaacccgaacgcgccgctcttcatcccggcggcgctgctgcaggtggaggacttctcgccgcagtggtgggacctcat

SEQ ID NO: 16553 - DNA, 208 bp, Zea mays
ctccatcatatagccctgcatcaccaagctatagtcccacctcaccgtcttacactcctggctctcccacctacagtccaacaagcccgaattactccccaaccagcccgacgtacttcgctaccagcccatcgtactcagccacatctccgagctacagcccaacatcatcaagctacagccctacattgccaaggtacaggcctac

SEQ ID NO: 16554 - DNA, 299 bp, Zea mays
cggctttcaggcggcctccaatcttgatcgtcatcggcgacccgacctgtgatcccaagtctctacagcatgctctgggaaagggagctatagagtatgaagagtttctgaaaaccggtgacccggagttcagttggaagccaccgaaggacgaatggcagagcatcgccctaggctacacttctgggactacttccagcccaaagggcgtcgtgttgcatcaccgcggtgcttatctcatggcactcagcgttgccatcgtgtgggggatgctgaaggggctgtctacctgtggactc

SEQ ID NO: 16555 - DNA, 305 bp, Zea mays
ctcgtgttccgcttcttgcagccgtcgccgcgaagtctccagagaacttccgtcaacatgggacacgtggtatgggagccgggcgcaactcaagacccaccgcaggaaccagcggtgggctgacaaggcatacaagaagagccatttgggcaatgagtggaagaaacccttcgctgggtcatcccatgccaagggcattgtcctggagaagattggtattgaggccaagcagcccaactccgctatccgtaagtgtgctcgtgttcagcttgttaagaatggcaagaagattgctgccttcgtgc

SEQ ID NO: 16556 - DNA, 303 bp, Zea mays
cccacgcgtccgctgagggaggtggaccttaatgagacgccagtgacacaaaacaaaaggctccgttcaagggtagatgcactgatgaaaacagtggagctgggccgtcggtacttcccgaactgctcgcaggtgctggacaagttcctggaggacgatctgccggaaggtctggaccagttctacctccagaggggcacagccgatgagcagaaggtgaagaggatgcgcttctgcgagctgaaagaggacgtgctgaaggcgtttagcaaggacaaggcggagggcagcgtgttctcgggc

SEQ ID NO: 16557 - DNA, 301 bp, Zea mays
cggacgcgtgggggacgagttccacaagttactgaatgggaaccatgcggatcctactgatcggcgacacgggcacaggatgcagtgaagcctgatgattgcaatgaggatgcccccatggaaattgtggatgaggaagccaccaagcctgagggatggttggatgatgaacccgaggagattgatgatcctgaggcagccaagcccgaggactgggacgatgaagaggatggtgaatgggaggcaccaaagattgacaaccccaggtgtgaagaagcacctggatgtggcgagtggaaga

SEQ ID NO: 16558 - DNA, 301 bp, Zea mays
ataagactagtgtttttgaccgtctcattcagttaataggatctgctatcgagaacgaggatgacaatgacaaccttgcttactggctctccaatacatctagcttattgttcctactgcagagaagtctcaaggctgctggtgctcctggtagcgtttcacgaaagaaacctcctcaaccaacatcattatttggaagaatggcccaaggcttgcgttctgcatcttttgccaacatgcatgttgaagcgacagatgttgtgcgccaagttgaggccaaatatcctgccttgcttttcaa

SEQ ID NO: 16559 - DNA, 295 bp, Zea mays
atcattatggaggacggggctgaaactacaactggagttggcgagctctgcattagaagtccatctcttttcaaggagtattggaaaagaccagaggtcaccgcagaatctttcattgatggaggattcttcaagacaggtgatacagtaactgtagatgaggaaggatacttcataattttgggacgcacaaatgccgacattatgaaatttggcggttacaagctgtcagcattagaaattgaggcagaactgttagagcatgatgctgtactggaatgtgctgtccttggct

SEQ ID NO: 16560 - DNA, 297 bp, Zea mays
cacacgcgtccgcggacggtgggcagacattgaagcagcatataactgcctcaaggaaaaatatggtgtagcagatgaggatataatcttatatggtcagtctgttggaagtggaccaaccattggtcttgcttcgcggttgccagacttgcgagctgtggttttgcatagtcctattttatctggactaagagtaatatatccagtcaagcggacgttttggtttgacatttacaagaacatcgataaaattggcttggtaaattgtccggtgcttgtcattcatggtacatcaga

SEQ ID NO: 16561 - DNA, 295 bp, Zea mays
cacacgcgtccgcacacgcgtccgcggacgcgtgggttcgagaagccgaagaaaattcgaagacgaggagcagctacactgcggacggacttcgggcatggagggccagttccaggttggcaaggaggaggtcatccaagcatggtacatggacgacagtgaagaggaccagaggcttcctcatcatcgcgagcccaaagaattcatccctctcgacaaactttccgaactaggaatattaagctggcgcctaaatgctgatgattgggagaatgatgagaacctcaagaaaatt

SEQ ID NO: 16562 - DNA, 218 bp, Zea mays
cgtgacggtgggtcggcacgcgtgggcagaggtgggttggcttctcctccccctccggttcgggttcgggttcgtgaggttctccggggttcggtttcgcgggctagcggatcgacacggccgcgtcgggttgttgagtaccgctgcttcgtcggcggcctcgcctgggccacggacgaccagtccctccacaacgccttcagcacctacggctaggt

SEQ ID NO: 16563 - DNA, 292 bp, Zea mays
cccacgcgtccgcgagctgagattagggtacagttccgacatgttcctggaaatctctacaaggggagttttggcacagatcttgatagggccactaatgagcttgtgatacgtgtgcaaccggatgaagcaatttacctaaagattaacaacaagattcctggtctcggtatgcgactagataggagtaacttgaatctccattatgccgcaaggtactcaaaggagatacctgatgcttacgagagactcctgcttgatgccatcgaaggagagcgcaggcttttcatcc

SEQ ID NO: 16564 - DNA, 290 bp, Zea mays
cgacaagagcagagtgagatcgtcgtcagcgagcccagcagatacgagagagaggatggcggacatcgcgttgctggtggcggacagttcgagaagacggcaaggcgaggcgcccccggcggggacagcggtacgacagggtgaccggcggcgagacgaggaacttcggggccgtggccaaggtgtggagctcttgggtggagtccgcctccgccgccgcgtccggggtcagattcaccgtcgcggtgcagctggagcccaagaccgggctcgcgctggccgccgccgac

SEQ ID NO: 16565 - DNA, 289 bp, Zea mays
ggagaatgtttacatggccaagttggctgagcaggctgaaaggtatgaggagatggttgagtatatggagaaggtggctaagactgtagatgtggaagagctcactgttgaggagcgtaaccttctgtctgttgcatacaagaatgtgattggggctcgccgcgcttcatggcgcattgtttcttccattgaacaaaaggaggagtcccgtaagaacgaagagcatgtgaaccttatccaggaatatcgtggcaagatcgaggctggactgagcaatatctgtgatgga

SEQ ID NO: 16566 - DNA, 210 bp, Zea mays
ctagcgacgccgagctactaaaggcacaagccgacatatggcggctcagcctctcctacctcacgcccctgtcactgaggtgcgccgtggagcttggcatccctacggcgatctaccgccatggaggggctgcctcagccgctgagctggtcacggcgctgtctctcccctccactaagctgccgttcctccgccgcctgctgcggctcc

SEQ ID NO: 16567 - DNA, 268 bp, Zea mays
ctcttctgctcctgggcctacagagatacggggtgcggaagctggagttcctgatctcgatgctggtgttcgtcatggcggcgtgcttcttcggggagctgagcttcgtgaagccgccggcggttgacgtggtcaaggggctcttcatccccaggctcaagggcgacggcgccaccgcggacgccattgcgctcctcggagctctcgtcatgccgtaagctagctagctagcattcagggatattagctaccagtaccactaccaggt

SEQ ID NO: 16568 - DNA, 334 bp, Zea mays
cccacgcgtccggttgattaccccagcttcaagctcgtcatcgtcggcgatggtggaactggtaaaactacatttgtgaagaggcatctcactggagagtttgagaagaaatatgaaccaaccattggtgtggaagttcatccgttggatttcaccactaactgtggtaagatcaggttctactgctgggataccgcagggcaagagaagtttggtggcctcagggatggatactatatccatggccagtgtgcgatcatcatgtttgatgtaacctcaaggcttacttacaagaatgttcctacgtggcatagggatctgtgcagggtctgtg

SEQ ID NO: 16569 - DNA, 322 bp, Zea mays
aaaggaaagggttgaactatgagcgccgtggcggtttcgtcgtcgctgaacccggacgcgccgctcttcatcccggcggcgctgctgcaggtggaggacttctcgccgcagtggtgggacctcatcaccaccactgcctggttccgcgaccactggtcccgcgagcgcgcccacctggacgagatggccgagcagatcgacgcggccggcctcctccccgacgacgaggacctcttctacgacgaccagctcgagcagggccccgtcgccgccgcccttaagacagattcggtgctcaaggcgctgaacatgacctccccga

SEQ ID NO: 16570 - DNA, 259 bp, Zea mays
ctcagctcccatatccgctcccctacctctccagcatctcccgtctccgtcgtctcgtctctgctcctcacctcgccgccagccatgggcaagatcaagatcggaatcaacggtttcggaaggatcggcaggctcgtggccagggtcgccctgcagagcgaggatgtcgagctcgtcgccgtcaacgaccccttcatcaccacggattacatgacctacatgttcaagtacgacaccgtgcacggccaatggaagcaca

SEQ ID NO: 16571 - DNA, 327 bp, Zea mays
gtttcgatggcgctgctagtgcggagggcacggagggcggcgaccaaggccgcggtgtccctcgccggcagaaccggcagcgtggagcttgccatcccggcgcacttccggtgcccgatctcgctggacctcatgcgggaccccgtcacggcgccggcgggaatcacgtacgaccgcgagagcatcgaggcgtggctggacacgggccgcgccacctgccccgtcacccacgcgccgctccgccacgaggacctcgtccccaaccacgccatccgtcgcgtcatccaggactggtgacgtcgcaaccgctcccgcggcgtcgagcgc

SEQ ID NO: 16572 - DNA, 327 bp, Zea mays
atcgaatcgtctcgctcgtggctgccctactcgtgctgcttgccctcgccgccgtttcctccacgcgcagtcacaaaaggagtccgtggctgacaacgccgggatgttggcaggcggcatcaaggacgtgccggcgaacgagaacgacctccagctccaggagctcgcgcgcttcgccgtcaatgagcacaaccaaaaggccaatgctcttctggggttcgagaagcttgtgaaggccaagacacaagttgttgctggcacgatgtactatctcactattgaagtgaaggatggcgtagtcaagaagctttatgaagctaaggtctg

SEQ ID NO: 16573 - DNA, 331 bp, Zea mays
cgagacgcgtgggaaaggccgtcgccttcccattcttcctcgccgcgggggtcgcctgagatcacataaacaatggtgaaggctgttgctgtgcttggtagcagcgatggtgtcaagggcaccatctttttcacccaagagggagatggccctaccgctgtcaccggaagtgtctctggcctcaagcctggcctccatgggttccatgtacatgcacttggtgacaccaccaatggatgcatgtcaactggaccacactacaatcctgcgagcaaggagcatggggcaccagaagatgagaaccgccatgctggtgatcttggaaacgtga

SEQ ID NO: 16574 - DNA, 322 bp, Zea mays
gagacatccgtgttcgccaaggtcgcccagttcgaggacgacctgcgtgcggcgctgcccaaggcggtggaggctgcacgggcggctgtcgagaacggcacggcagggataccgaacagaatcgccgactgccgctcctacccgctctaccgcttcgtgcgcgaggagctcggagccgtgtacctcaccggcgagaagactcgctctcccggcgaggagctgaacaaggtgctcgttgccatcaaccagggcaagcacatcgacccgttgctcgagtgcctcaaggagtggaactgcgagccactgcccatctgctgaacag

SEQ ID NO: 16575 - DNA, 320 bp, Zea mays
aaggtaacaggcttgctctagctctcttccaggggccaccagctgctggtggaagcaacggttcatgggaggctttcccttcaaatggtggcaaccaggtgacttcggcctggcagaaccctgcagctgaacctgggaaggctgattgggagcttgcccttgtagagacagcaagcaacttgtccaatcagaagccagcaatgtcaggtggcatggacccgctgctgctgaatggtatgtatgaccagggtgttgtgcgccagcatgtcggtgcacaggtgaccaccgggagtgccagcagtgtcgcgctgcctgctcct

SEQ ID NO: 16576 - DNA, 286 bp, Zea mays
ctcagaggtgggttggcttctcctcccccaccggttcgtgttcaggttctggttcgtgggcgagagggaagagatggcggcgtcggacgttgagtaccgttgcttcgttgcggcctcgcctgggccaccgacgaccactccctcaacaacgccttcagcacctacggcgaggtcctcgagtcgaagatcatcctggatcgggagacgcagaggtcccgcggcttcggcttcgtcaccttctccacggaggacgcgatgcgcacgccgatcgagggcatgaacggca

SEQ ID NO: 16577 - DNA, 146 bp, Zea mays
cccacgcgtccggattgacatcatatggatgcaaaataacagttgttccagcaaattggcctgcttcagaggtactcaatttgaagcctaatggtgttctttttagcaatggtcctggagatccagctgcagttccctatgctgtg

SEQ ID NO: 16578 - DNA, 319 bp, Zea mays
gaacgagcagttcttgcagttacttattcagtggacatttggtataactattgtcaattcgcaatttcaacatatgatgacccagatatcatccgaagactgtttgaacgtggcttggcatacgttggaactgattatcgctccaatattttgtgggatgagtatattaagtatgaagagtcactggaggcatggagtcacctcgctgttatatatacaagagtattggaaaatcccatccagcagcttgatcgctattttaattgcctcaaggaattggcttcaaagcacagtttttcagaaatacttactgcggaag

SEQ ID NO: 16579 - DNA, 311 bp, Zea mays
cccacgcgtccggctcgacatctccgacctgcccatcatcaacaccgaccttgagaccggcagcggcagcggcaccgtcttcccgcccgccgtcgaggccttccgcgccaaggtctgccaggccgactgcttcctcttcggcgcgcccgagtacaactactccatcgccacccccctgaagaacgcgcttgactgggcctctagaggaaagaactgttgggcagacaaacctgctgcgatcgtgagtgcaggcggcggctttggaggagggaggtcgcagtaccatctccgtcaagtcggggttttcctgg

SEQ ID NO: 16580 - DNA, 326 bp, Zea mays
cacaccacaacccagccacccaccacctcccccaattgcctcttctcttctcccagcagcagccgcgacgcagtcctactcctgcggtgcctccagtttcgcagcaccgttgccacacatcgccaactaacgccatcgatcacccggcggcctcccagagtcttgccctgccatatccgaacctgctcctacagctagccagcaacacaaacagaataggtcggtcggtcgatcgatcgatggccagcgttatcgacggcaatggaggcagccggctggtggtgacggagctgggccacctcaaggagctggcgatgcagctggag

SEQ ID NO: 16581 - DNA, 314 bp, Zea mays
  unsure (1)..(314): unsure at all n locations
cggacgcgtgggtaaaaaccgcagccagtcgatcccgtagcggggcccactcgccgatcaaccagcaggatggccaccgagacaacgaccgactcggcgccaccgggcgaccctcctcatcctcctccggcggnagcgggcgccgccacgccaagccgttcgagaccatcggggttcgagcagctggacgggcgagtcaaggagctgacctcgtcgcaggcggagttgctggagaggatccagaagctgaaacatgaggtgcagaactggcgctccaatgtagagacgcaggtcaagacatgccagaatgaact

SEQ ID NO: 16582 - DNA, 312 bp, Zea mays
atttcacaaaagcgtgtggccgatattcagctggaagacttcctgcagtatgggctccagaacgagcaggggaaggttggcaagcccctgcttcgcagattgaaggatggcaggatggtgaactgggacgtgcaatcagaggacgctctttgcacactcgaagaagcgttcgacaaggtcaatccaaggttgggcttcaacgtcgagctgaaatttgacgacagtcttgaatacaccgaggaagagctcactcgcatcctccaggccatccttaaggtggttttcgagtacgccaaggacaggcctatactt

SEQ ID NO: 16583 - DNA, 314 bp, Zea mays
ctcaggtcatccatccatccatccctgcagcaatggcgtctgcagtgaccagcagcgacaaggagcaggccgtccctaccatcgacgctgacgaagcgcacgcgctgctgagctccggccatggctacgtggatgtcaggatgcggggggacttccacaaggcgcatgcgcccggtgctcggaacgttccctactacctgtccgtcacgccgcaagggaaggagaagaacccacactttgtagaggaagtggctgccttctgtgggaaggctgatgtcttcattgtgggttgcaacacggggaacagatccagg

SEQ ID NO: 16584 - DNA, 311 bp, Zea mays
cccacgcgtccgccgtttttcgctgctgccggtccaaccctctcctctcacccaaacacctttttttcccacgagaaaccccggaacatccgagtttatgtccatcgaaaatctcaagtccttcgaccccttcgccgaagccgacgacgacaccggtgataccaaaaaggtcgagaatcccatccaaattcgtattcaccagcgcaatggtcgcaagtctctgacaactgtaactggtcttcctgctaagttcgaccccggcaagattctgaccttcttaaggaaggaattcgcttgcaatggcaaaaagg

SEQ ID NO: 16585 - DNA, 313 bp, Zea mays
cggacgcgtggcgtgacgcgtgggcgtggcacccaactgagaactccatcgcgtgcgctgccgcaaacagcttgtacatgtactacgcatagggacacgtgctagaacgaactggtacagtagtgctttttttttgcttgtttgcttgcttgaagtgaaaggcgtggtctttcacacgttcaaggatccaggcgcaggaaactgttgtcggttcgatggctggggagcccccgaaaagcggcagtcggtgattccacaagatcagtcctggcacaagctgacttcctcctcgggattttccttggtggatgtg

SEQ ID NO: 16586 - DNA, 312 bp, Zea mays
gcagcgcgccagacactccgtagtctgtaccccaagcaccggcgcggcggcggcggctaccatggcagtcgggaagaacaagaggatctccaagggaaagaagggtggtaagaaaaagaccgtcgatcccttctctaagaaggactggtatgacatcaaggccccatcggtcttcagtgtgcgcaacattgggaagactctcgtgtccaggacacagggtaccaggattgcctctgatggtctgaagcacagagtctttgaggtttgtctagctgatcttcagggtgacgaggatcaggcttacaggaaaat

SEQ ID NO: 16587 - DNA, 312 bp, Zea mays
actagttctaggatcgcgagcagccgccctttttttttttttttttagtattcaatgcatgcgtcgttttatagataatatagcaaggataaccatgtctcaacaccaattccattttcaaccaggataaacaaaactgcaatcttatcaccaggcttactactctcaagacagggtcacagaagttcaaacatagcacaaattcgaagacaccaaagaccaaacaagagcccaccaagaacgctagggcttcagcgcagcctcctggcctccctctcggactcgagcagggtgaggatgtcaccctcgcgg

SEQ ID NO: 16588 - DNA, 308 bp, Zea mays
cccacgcgtccgagccaattcgctcgagttcagatctagcgcgcgccaagcaagtcttccggccggccgcgaatagcgcaatcaagctttacaagatggtgaagctcgccttctgaagcgtcggcgactccttcagcgccacctccatcgaggcctacgtggccgagttcatcgccaccctcctcttcgtcgtcgccggcgtcggttccgctatcgcctacggtcaactgacgaatggcggcgcgctggattcggcgggcctggtggcgatcgcgatcgctcacttgcttgcgctgttcgtgggcgtg

SEQ ID NO: 16589 - DNA, 310 bp, Zea mays
gccgtcatgtcgaagcgaggtaggggaggttcggctgggaacaagttccgcatgtcactgggtctaccggtggcggccacggtgaactgcgcggacaacacgggcgccaagaacctctacatcatctccgtcaagggcatcaagggccgcctcaaccgcctcccgtccgcctgtgtcggcgacatggtcatggccaccgtaaagaagggaaagcccgacctcaggaagaaagtgatgcccgccgtcatcgtccgccagcgcaagccgtggcgtcgcaaggacggtgtctacatgtacttcgaagataatg

SEQ ID NO: 16590 - DNA, 308 bp, Zea mays
atctttgaggaggagagcacgcatgatgacagatggtttcaacagttgccgaaacgtcgtgtgcaatttcactgaaggagctatgtactctttcccccaaatacgtctgccaccgagagctattgaggcggcaagaagagccggcaaatcagcggacgtcttctactgcctcaagctcctggaggcgacaggaatctccactgtcccgggctctggttttgggcaaaaggaaggggtgttccaccttcggaccactatccttccagcggaggaagacttccctgccatcatgtcgagcttcaagaagt

SEQ ID NO: 16591 - DNA, 306 bp, Zea mays
ctcgaatccgccatgaagggggccaaatccaagggcgccgctaaggccgatgccaagctggcggtgaagagcaagggggcggagaagcccgccaagggcaggaaagggaaggccggcaaggaccccaacaagcctaagagggctcccagcgctttcttcgtgttcatggaggaatttcgcaaggagttcaaggagaagaaccctaagaacaagtctgtcgctgcggtggggaaagctgctggcgacaggtggaaatccctgagcgagtcggacaaggctccctatgtagccaaggctaacaagctc

SEQ ID NO: 16592 - DNA, 291 bp, Zea mays
ccaccgcgctcgcggacaagctgctcgccgcgctcggcccgagcttccttgggcccgtggcgatactgaggatttggagcttctgcctgttctatgttaaggctgagctctggggcagcgtcgtcatctccgtgctcttctgggggttcgctaaccagattaccacagttgatgaagcaaaggaattctacccgttatttggccttggggctaatattgcacttatcttttctgggcgcactgtgaagtatttctcaaatttgcgcaagacattgggtcctggaattgatg

SEQ ID NO: 16593 - DNA, 310 bp, Zea mays
gtcctctgttacttctccctccgccgccactcccctcccattcaccgccaccgccaattccataccgtcctccgccacctctgctgagagcgagaagagatggcaggcaagggtgatgggccggcaatcggcatcgatctcggcacgacgtactcttgcgtcggcgtctggcagcacgaccgtgtcgagatcatcgccaacgaccagggtaaccgcaccacaccctcgtacgtcgccttcaccgactccgagcgcctcatcggagatgcggccaagaaccaggtcgccatgaaccccatcaacaccgtct

SEQ ID NO: 16594 - DNA, 303 bp, Zea mays
cttccgccgataatcttcaatgccgggtttcaagtaaagaaaaagcaattcttccgcaactttataacgattattttgtttggtgctattgggactctgatttcctttgtaataatctctcttggtgctatggggttgttcaagaaacttgatgttggtccactcgagcttggggactatcttgcaattggtgctattttctcggcaacagattctgtttgcaccttacaggtgcttaaccaggatgaaacacccctactctatagtctagtttttggtgaaggtgttgttaatgatgccaca

SEQ ID NO: 16595 - DNA, 303 bp, Zea mays
aggcccctggcgcagaggacgccttcaaggccgtctccaaggccttccagtgcctgagtgatgcggagagccgcaagcgctacgaccttgttggctcggatgagccagtagcacaccacaggagggcctccactgcccgcgcatacaatgggttctatgaggatgactttgacccagatgagatattcagaaacttcttctttggcggtatggcgcctgcaaccaccaggcagtttggacagtttggaactttccattttaggactggtgggatgcatgcccatgcccatgcccatgcccaac

SEQ ID NO: 16596 - DNA, 303 bp, Zea mays
cacaaggtctacttcgacatcgagatcgacggcaagcccgcagccggattgtcatggggctttttgggaagactgttcctaagacggcagagaacttccgagctctttgcacaggagagaaaggggttggcaagagtggcaaagccctccactacaagggaagtaagttccacagaatcatccccagcttcatgctccaaggaggtgacttcactctcggggacgggaggggtggtgaatctatctacggtttgaagtttgcggatgagaacttcaagatcaagcacactggtccaggccttc

SEQ ID NO: 16597 - DNA, 305 bp, Zea mays
caccacaccaaccagcaagcaaaaattccccaatcctctcgtctccgcggcgaagatgtcggggcgcggcaagggcggcaagggcctgggcaagggcggcgcgaagtcaccggaaggtgctgcgcgacaacatccaggggatcacgaagccggcgatccggaggctggcgcggcggggcggcgtgaagcgcatctcggggctcatctacgaggagacccgcggcgtgctcaagatcttcctggagaacgtcatccgcgacgccgtcacctacaccgagcacgcgcgccgtaagaccgtcaccgcc

SEQ ID NO: 16598 - DNA, 303 bp, Zea mays
aacaagttcggccactacgagaagctcaagttgcgcaactccagaggatgctgcacaacggcctgggcagccacgagggcgacaagtgggccaagcaccgcaggatcatcaaccccgcgttccacctcgagaaactcaagcggatgttgccggccttcgccgcgtgctgcacggacctggtggagaggtgggaaggcctggtcgcggatgggcagcagccgtgcgaggtggacgtgtggcctgagatgcagaacctgacgggggacgtcatctctcgcgccgcgttcggcagcagctacctcg

SEQ ID NO: 16599 - DNA, 149 bp, Zea mays
gtcctcagtccctcacacactcactatacactgctctgctgcagcaagaaggaagaagctagcgcctccctagctctcgttgtcagcaatggccaccaccgccgcgtccagcctcctcaagtcctccttcgcgggctcccggctccctt

SEQ ID NO: 16600 - DNA, 146 bp, Zea mays
ccgcatctcccgcgcgcagacgctcatcgcgctctgcggcacagtcccgggctactggttcaccgtcgcgctcatcgacgtcgtcggccgcttcgccatccagctgctgggcttcttcatgatgaccgtcttcatgctcggcctcg

SEQ ID NO: 16601 - DNA, 125 bp, Zea mays
tgaagatcacgagaaggatgtcctattagttggtgatgacccatgggaggacttcgtgaactgcgtgcggtgcatcaggattctttcgccgcaggaagagaggcaaatgaggctggccagcgact

SEQ ID NO: 16602 - DNA, 316 bp, Zea mays
ggtggatgtatcaaactggtctccgtttatgccaaatggtttcaaatctgtagtgactggagccacagtagtcttttttgcataagttggatttgatgcggttgctaattctgctgaggaagccaaaaggccacagagagacctacccattggtatactaggaagccttatagcatgtgtgttgttatacgttgctgtatgcttggtcattactggaatggttccatatacattactcggtgaagatgctcctttggctgaggcttttgctgctaagggcctgaaatttattactgtattgattagtattggagct

SEQ ID NO: 16603 - DNA, 314 bp, Zea mays
gtccataatttatctcggtatcaggccaggtggaacaaacctaggcctgaaagtgcgacaattgatgaggaactggcttcgaagttgaattctatggcagctaaggaaaaactgtactgcgaaattgcttcaacggcagaatcgggatgggatttcagctctcgatggatgaggaattctactgacatgacaacattggcaaccacttacataatacctgtggacttgaacacatttctttttaagatggagctggatattggtgccttggctaaagtcgtaggagataatgcgacttcagaattttttttaaa

SEQ ID NO: 16604 - DNA, 310 bp, Zea mays
cccacgcgtccgctcactgctcgtagccggctgcccccgcggccccggccagtccatcccctcgctcgctccccaactccagcaggcagatcagatacatccaaccattcgcggaccggaaggaaaggaagggttgaactatgagcgccgtggcggtttcgtcgtcgctgaacccggacgcgccgctcttcatcccggcggcgctgctgcaggtggaggacttctcgccgcagtggtgggacctcatcaccaccactgcctggttccgcgaccactggtcccgcgagcgcgcccacctggacgagatggc

SEQ ID NO: 16605 - DNA, 310 bp, Zea mays
atccgctcccctacctctccagcatctcccgtctccgtcgtctcgtctctgctcctcacctcgccgccagccatgggcaagatcaagatcggaatcaacggtttcggaaggatcggcaggctcgtggccagggtcgccctgcagagcgaggatgtcgagctcgtcgccgtcaacgaccccttcatcaccacggattacatgacctacatgttcaagtacgacaccgtgcacggccaatggaagcacagcgacatcaccctcaaggactccaagacgcttctcttcggcgagaagccggtcaccgtctttg

SEQ ID NO: 16606 - DNA, 306 bp, Zea mays
cgcagatcgagtcatcaagctagctagcccggagcacgcctagacacgccagcagcaatggcggctcagctggccgtcgcgtttctcgccttgttgtcctcctctgccttcttggccgtgtctggccagaagttcaacgccatcttcagcttcggcgactccatgtccgacaccggcaacctgtgcgtgaacggtccccccgccggcctgacgctcacccagccgccctacggcgagaccttctttggccgcgccacctgccgctgctccgacggccgcctcgtcgtcgacttcctggccgagaag

SEQ ID NO: 16607 - DNA, 248 bp, Zea mays
gctcaacaaaggttcgcccatgcgcaaatgagaccacaagcgtctcaacaacctgcactgtctccacagaaggtgcctggtcaaggtctgtcgaggacagcatcaattgcagcattaaattcacaactgtctggatcatcacaaaatggacagatggtggcaatgtctatgcctcagcaacagcagtggttaaagcaaatacaatcatccatgggctcaccagtttccccacagcaacaatatcaaca

SEQ ID NO: 16608 - DNA, 105 bp, Zea mays
gttggcttctcctccccctccggttcgggttcgggttcgtgaggatctccggggttcggtttcgtgggtgatcggatcgagatggcggcgtcggatgttgagtac

SEQ ID NO: 16609 - DNA, 307 bp, Zea mays
cggacgcgtgggcggacgcgtgggccgccctcgtatcctcacgcccacaaaacacccgaagaaaagaagagactgaacgccgcgagttcacgtgacgatggagacacgccgcctccaccatcgctaagccgtcgctgtccaagaagccctcgccgtcgttccgcctccggaacggcagcctcaacgcactgcgcctgcgccgcgtgttcgacctcttcgaccgcaacggcgacggcgagatcaccctcgacgagatggcctcggcgctcgacgcgctcggcctcggcgccgaccgctccggcctgga

SEQ ID NO: 16610 - DNA, 303 bp, Zea mays
gttgatttccagcaccctgttttcaacatcgaggaggatgaacattctacgaaatcaaaaggaccccttaagttctacaactcggagatccacacggcatcattctgtttgccctcttttgcaaagagggtaattgagtcaaaggcaagctagacgtgaggatacttcaccaagtccagtcgattgggttaagtaccttaggcgcaacacaaaatttgttgtcgtgtgaaaatgggatgcctccctcccccaccccccacttgatgaataagcacatgagatgagatgcaacggttatcggag

SEQ ID NO: 16611 - DNA, 299 bp, Zea mays
gccagaaacagctctaggcctctttccagatgtaggggcctcttattttctatctcggctaccagggttctatggagaatatgttggtctaactggtgccagattggatggtgcggaaatgcttgcctgtggcctggcaactcattttgtcccgtcaaagaggttgccattgcttgaggaatcgcttaaaaagctggacacgtccagtacttttgctgtgtcgggtattatcgaccagttttcacagaggccattagtgaaagatagcagctctttaaataggatggaaaccatcaaca

SEQ ID NO: 16612 - DNA, 300 bp, Zea mays
cgctcccattccccacctccacccatggcggcgctctccgcgcccctccgcgccgtcgccgccggatcccgcgtcgccgcgtccgaccccgtcaaggtctcgtgcgtgaggagcactggctcagctcacttcggctgcgccttcccctacatcagggcctcctcttcggctgcgaggaacctcgagccgctgagggcgataccacgcaggcgccccctgccatgccacaatattcgagtggggagaagacaaagattggcatcaacgggtttgggcggattggcaggttggtcctgcgaa

SEQ ID NO: 16613 - DNA, 303 bp, Zea mays
cggaccgtgggcgtgacgcgtgggcacggcctcggcgactcaggcccggccaacgagcccatccgcaacctcttctccgccccgcagttccggctcgccaagtggtcgttcccctccgctccccgcgcccccgtatcatgcaacaatggttttgtcatgccgtcgtggttcgatatccacgagcttcccatgagcgctggctctccgcaagatgagactggggttctcaaggctgtggaaaaggtgcacgccatgatagacagggaagtagccgatggcatccaccctgagaacatatttgtt

SEQ ID NO: 16614 - DNA, 206 bp, Zea mays
gactagttctagaccggagacttgggggcttcacctgctgtatctcattaccatctgcatctggttgcccgttgattgagaaggaggagctgagggccatggcgaccgagaagcccatcctgtacaacgcctggatcagctcctgctcacacctttgaggttgagtgcgatgcgaacacggtgggaggactagttctagatcgcga

SEQ ID NO: 16615 - DNA, 308 bp, Zea mays
ggaacgaagcagctgagtttcgtttcaaatggggctatgagatgccagttgatgtgttagcaaaatggattgctgacaaagctcaagattacacgcaacatgcatacatgagaccccttggagtagttgccatggtcttgggctacgacgaagagaaaaatgcacaactattcaaatgcgaccctgcgggtcacttctttggacataaggcaactagtgccgggctcaaggagcaggaagcaataaattttttggagaagaaaatgaaggatgacccgaaattcacctatgatgaaactgttcagatt

SEQ ID NO: 16616 - DNA, 308 bp, Zea mays
gagacgaagtcctcttcgagtcccgtgcgatcaaccggtacatcgccagcaagtacgcgtcggagggcacggacctgctccccgcgacggcgtcggcggcgaactggaggtgtggctagaggtggagtcgcaccacttctacccgaacgcgtcgccgctggtgttccagctgctcgtgaggccgctcctgggcggcgcccccgacgcggcggtggtggacaagcacgcggagcagctcgccaaggtgctcgacgtgtacgaggcgcacctcgcccgcaacaagtacctcgccggggacgagttcacgc

SEQ ID NO: 16617 - DNA, 316 bp, Zea mays
gctgacccaactcctcaaggactcgcttggaggagcatgcaacaccgtcatgatcgccaacattagcccctctaacctttccttcggcgagacacagaacacgcttcactgggctgatcgtgccaaggagataaaaacaaacgacgcaacaaaccactgtgaatgaggaggttctggaccaaccagactctgaaactatgcttgtactggagctccagaaggaaaaccgcgtgctgagggagcagttggcgaacaacaacagaaattactgactgccgaggctcagctactcacttcaaaaacctcgccacaacga

SEQ ID NO: 16618 - DNA, 331 bp, Zea mays
ttcaaggatacttcatgacacaagtggaaccttcaaatactatattaaggttgttccgactgagtacaaatatctgtcaaagaaagtattgccaacaaatcagttttctgtcactgagtattttcttcccatccgtccaactgacagggcctggccagcggtttacttcctgtatgatctgtcaccaattacagtcaccatcaaagaggaaagaaggaacttccttcattttgtaactcgtctatgtgcagttcttggtggcacatttgccatgacaggaatgcttgaccggtggatgtaccagcttatcaagacagtcaccaactcaaag

SEQ ID NO: 16619 - DNA, 213 bp, Zea mays
gaaggtcatggatttgtacaagaagaaatgtgaaggtcccctaagaacaggaatcaggacagggattataagtggcatcggttttggagtttcctttttcttgctgtttggggtctatgcagctagcttctatgccggtgctcggcttgtcgaggacaggaagacaacctttcctaaagttttcagggtttttcttgctcttgcaatggcggc

SEQ ID NO: 16620 - DNA, 125 bp, Zea mays
ccgacgcttgggccttctacagccagaacctgttccagaaggacatcttcaccagcatcaactggatccccaaggccaacaccatgagcgcgctggaggaactgtaccgcatctcccgcgcgcag

SEQ ID NO: 16621 - DNA, 326 bp, Zea mays
attccccagcccggttctttgcgtgcggttgatctcgtcggaggcccggccgcggttccccaatccgccatcgaattcgatggcggccaacgccgggaataagatccgcaacgccaagctggttcttcttggagatgtgggcgctggcaaatctagcttggttcttcggtttgttaagggacagtttgttgaattccaggaatcaacaattggagcagccttcttttcccagaccttagcactcaatgatgagactgttaagttcgaaatctgggatactgccgggcaggagaggtatcatagcttggctcccatgtactataggg

SEQ ID NO: 16622 - DNA, 316 bp, Zea mays
  unsure (1)..(316): unsure at all n locations
cccacgcgtccgcggacgcgtggnggggccccgcgctcgcggagtactacgcgcaggttccacggaaggcggcttgctcatctccgagggcaccatcatctcgcccgccggccatgggttccctactgtccctgggatatacaatcaagagcagactgatgcatggaaaaaggtggttgatgctgttcatgccaagggagccatctttttctgccaactatggcatgtaggtcgagcttctcaccaagtatatcagccgggtggttctgctccaatatcctctactgataaaccaatatcatcaagatggaggata

SEQ ID NO: 16623 - DNA, 314 bp, Zea mays
cccacacgtccgcccacgcgtccgcacaaacttcactggtggtgtggagacaattgagaactgtgtttgtttgcatgaggaggatcatgggatcctttggaaacatcaagactggagaactggtttagcagaagtaaggcggtcaaggaggctcactgtttcatttatctgtacagttgcaaactatgagtatggtttttactggcacttctatcaggatgggaaaatagaggcagaagtaaagcttactggaattctcagtttaggggccttgatgcctggggaatcgaggaaatatggcacaactattgccc

SEQ ID NO: 16624 - DNA, 315 bp, Zea mays
gcgccgcccacccacccacccactcgcttcagccgcctccgccgcgcgtacaagcaggtggagacaggatgccggctggccacggcctgcgctcgcggacgcgcgacctcttcgcgcgccccttccgcaagaagggctacatcccgctcaccacctacctccgcacctacaagatcggcgattacgtcgatgtcaacgtgaacggcgccgtccacaaggggatgccgcacaagttctaccacggccgcaccggtcgcgtctggaacgtcaccaagcgcgccatcggcgtcgaggtcaacaagcaggtcaatgggc

SEQ ID NO: 16625 - DNA, 114 bp, Zea mays
cccacgcgtccgaattactggggaaccaatccaacggttaagtgcttacctccttgagggtttggttgctagacatgcaaactcaggtacaaacatatatcctgccctgaagtg

SEQ ID NO: 16626 - DNA, 263 bp, Zea mays
gacaaatgttgttgggacactgaacatgcttggattggccaagaggattggggcaaggtttctacttacaagcaccagtgaggtctatggtgatcccctccagcaccctcaggtggaaacctattggggcaatgtcaaccctataggtgtcaggagctgctatgatgagggcaaacgtacagctgaaacattaaccatggactaccatcgtggtgccaaccttgaggtaaggattgcccggatctttaacacatatggtcctc

SEQ ID NO: 16627 - DNA, 315 bp, Zea mays
tgccctatattcttgttcttctcagtgaatacaagtgggcagtttgttggtgttgccgaaatgactggcgccgttgattttgagaaaaccctagagtattggcaacaggacaagtggaacggctccttctctgttaagtggcacattgtcaaggacgtgcccaacaatattctcaagcacatcatcctggagaacaatgagaacaagcctgtcacaaacagccgtgacactcaggagatacgcctcgaacaaggccttcagatgctcaagatattcaaggatcatgtcagcaaaacttccatcctcgacgacttt

SEQ ID NO: 16628 - DNA, 311 bp, Zea mays
tgctatgcttccaaagtgtgatgtgattgtgatcaacacacctcttacggagaaaacaagaggcatgtttaacaaagagaggattgcaaagatgaagaaaggtgtaattgttgtgaataatgctcgaggagcaatcatggatgctcaagcagtcgcagatgcatgttctagcggtcacattgctggatacggtggtgatgtgtggttcccacagccagcaccaaaggatcacccctggcgctacatgccaaaccatgccatgacccctcacatctctgggactacaattgatgcgcactgcgtgtatgcgg

SEQ ID NO: 16629 - DNA, 308 bp, Zea mays
aatcaagcttgctatatgtgatgatattggagaaaggtcatacgattttgctgatgtggcggcgattcttgtgcagatgttgataagacatcctgcagtaggttctgaagcatttcgaagacgatataagattgatgtagatagtgagtgcggtaaaacgtttgtcacaaagctctctgttcacttgttcaatggagacacaagccaggcagctttccgcatattgtctgactacaggaaaggcaaatttggatgggtagcgctggagagacctccaacatgaacaagcgggatatcatagatcctta

SEQ ID NO: 16630 - DNA, 305 bp, Zea mays
agcaaacgcaggcgaaggcgagggtgtgagggaaggagcaccagccatggtgcacgtcaacttctaccgcaactatggtaagacgttcaagaaaccaaggcgtccttatgagaaggagcgtcttgatgctgaactgaagctggtcggtgagtatgggctgaggtgcaagcgtgagctttggagggtccagtatgcactgagcaggatccgtaatgctgcaaggcacttgctcacccttgacgagaagaacccccgtcgtatctttgagggtgaggcgcttcttcgccgcatgaaccgctatgggc

SEQ ID NO: 16631 - DNA, 306 bp, Zea mays
gaagagatctcctctatggttcttatcaagatgcgtgagattgctgaagcttaccttggtagcacgatcaagaatgctgtggtcacagtccctgcctacttcaatgactcacagaggcaggccacaaaggatgctggggtgattgctggccttaatgtgctgcgtatcatcaacgagccaacagctgcagctatcgcctatggtcttgacaagaaggctaccagtgtcggtgagaagaatgtcctcatctttgatcttggaggtggtacctttgatgtctccctcctcaccattgaggaaggaatc

SEQ ID NO: 16632 - DNA, 307 bp, Zea mays
cggtcgccgagggcacgcccccgtggcgaaccggatcgcggacagccggtcgttcccgctgtaccgcttcgtgcgcgaggagctcggctgcgtgttcctgaccggcgagaggctcaagtcccccggcgaggagtgcaacaaggtgttcgtcggcatcagccagggcaagctcgtggaccccatgctcgagtgcctcaaggagtgggacggcaagccgctgcccatcaacgtcaagtaaagaacgccaaggtgaagatgagggacgggaggaaatacgtgaaaaaaaataaaacctgtacacgtgtat

SEQ ID NO: 16633 - DNA, 310 bp, Zea mays
gtgaagaaggccgcggcggggcgtcgcggcgggggcggccccaagaagaagccggtctctcgctccgtgaaggccggcctccagttccccgtaggccgtatcggccgctaactcaagcagggtcgctactcccagcgtgtacgcaccggcgcccccgtctacctcgctgccgtcctcgagtacctcgccgccgagctcctcgagttggcggggaacgcagcgcgggacaacaagaagaaccggatcatcccgcgacacgtactgctggcgatccgcaacgatgaggagctcgggaagctactggccggcg

SEQ ID NO: 16634 - DNA, 323 bp, Zea mays
gccactcgccacgttccaccagccggcgccccttttccttctcactccgctggcgccggcgccgccttatccatggcgtcggagaagaagcaatccaacccgatgagggagatcaaggtgcagaagctggtgctcaacatctccgtcggagagagtggggatcgcctcacccgcgccgccaaggtcctggagcaactgagtggccagtcaccagtgttctctaaggctaggtacactgtccgttcctttggtatcaggcgtaatgagaagattgcctgctatgttactgtaaggggtgagaaggcaatgcagcttctggagag

SEQ ID NO: 16635 - DNA, 320 bp, Zea mays
caaacacactcgaaggcagcgaacccgagccttcccttccctccaatcgatcacccgcttcgatccgctagctagctagcagcgcgatggcttccctcaccgtgtccacgaagaccgcggcggccggcggcaacaagcagcgcgagggcgcggaggtcatcacgggcgcggaggcctgcttcgcgcactccaagcagatgctccaggcgctgggcttcccgggcggcgtgatgccgctgcgggggctggaggagtgcggctgggtgcgcgagaccgggttcgtgtggatgcggcagaaggccccctacgagcactacttc

SEQ ID NO: 16636 - DNA, 320 bp, Zea mays
atccgttgctcgcaaaacgcccccacacgccgccggcgaatcggcgactccccttgcgacgggaggaagcagccacgccgccgtctcggcgactccctgacgactgcctctccggtctcgaacgcgatctggcccatggtggctctggcgccgttggttcgtgagatctagggttgtcgagcgccgcggagtgggagcggatggggcgccggaagatgtccgcagcggcgccgccgtcccggagctggtccaacgttggcgggagcgtaatccccgaactacttgcaaaacacaaaatggacttggaaaatttgacgctg

SEQ ID NO: 16637 - DNA, 322 bp, Zea mays
  unsure (1)..(322): unsure at all n locations
cggacggtggngccgacgcgtgggcggatcttgaccaagaccttcacgtctgatttccctcatgtcgagaggtatttctggaccatggttaaccagcctaacttccagaaggtcattcgtgaggtcaagcaggcagagtctgcacctcctattccgaaaaaggctgctccttctaaggagccaaaggcaaaggatgtcaagaaggaggctccaaaggaggcccccaagccaaaggtggttgaggcaccagcagaagaggaagcaccaaagccaaagccaaagaatcctcttgacttgctgccaccaagcaagatggtccttg

SEQ ID NO: 16638 - DNA, 321 bp, Zea mays
gaaagcacttcaaaagaatttccggaagtacatgacattcaagaaggactacaacgagctgctcctgctgctcctgcgcacactggtcaaggacgccgtgcacttcgaagaaatcatggcaggatcagcctcacgtcttactcacgtcgaggtcaaattggaggacctgaggaacaaggcccaagaatacgagatctacgatctgaagccgttcttctccagcgcgtgcttcagggacaacggcttccttctggatgaagggcgtgggatcatcaggcatccactggcggagtaacaactgagaactgatcttcctcatgt

SEQ ID NO: 16639 - DNA, 319 bp, Zea mays
gaaatctgaagacctgcaaatgcgagctgcttcttagcatccactagatggcgagatgttcgtacgtgtcagattccattcccgtagcatgatgtgtcgtcagccgtttctgttcactgcactctgcatggtccggtgggcgcgtggcttggcattttcagagaccgcgttgctcgttgcagcccgggatgaaggcgatgcagtaggttttgtggatgtggtgagctctgtatatgcctattgatgagtcatgttgcaagctgtaacgacactatgatccgtgaagtgtagaagcagccaagtatgttctttctatgct

SEQ ID NO: 16640 - DNA, 319 bp, Zea mays
cagagtgaggcatgttggcggagatatgttcaagtccatcccctccggtgatgccattttcatgaagtgggttctgacgacgtggaccgacgacgagtgcacggccatcctgaggaactgccacgccgctctgccggacggcggcaagctcgtggcctgcgagccggtggtgccggaggagacggacagcagcaccaggacgagggtgctgctggagaacgacatcttcgtcatgaccacctaccggacgcaggggagggagcgctccgaggaggagttccgccacctcggcgtcgacgccgcatcgttcaccgccttc

SEQ ID NO: 16641 - DNA, 319 bp, Zea mays
ctcgtgcgacggtctcttggtttacgctgggttctgcgatggtgctatcggagtcttcgaagcagaatctcttaggctgcgctgccggattgctccttccgcttacattccaccttcaatactagcctgtgctggacgggtctacccgttggtagtcgctgcacaccccatggagcctaaccagatcgcgatcggcatgagcgacggcaaggtccatgtggtggagccattagacggggacccgaagtggggatcggcacctccacaggacaatggagcgcacccgcacccgcatccagcgatatcagcggcaccgtcg

SEQ ID NO: 16642 - DNA, 323 bp, Zea mays
gccattctcagttaacgactacataaaggcggggtcaatagaaggcaaggtggttgaaataggactcacttctacttcattgatcaatccagaaaagctccctgtcatagtacccaactctttgttctccagtcagatgatagttaacagatcacgagctaattggcgagctagtgtgacaaagattcctattcgaattgaggatattgagaaggttccttctgcatcagaggagataaagactatgttaaggtctaatcaaaatgtgtcctttgatagtgatgttccttactgctatctctcgagattggaaagctcatatg

SEQ ID NO: 16643 - DNA, 116 bp, Zea mays
gaacttgaatcagttcctcgggatgttgtgcctgagaataaatccgaccgaggcgtctgtgaacttaattcaattcgtcatgaagctgtgccttagaataaattcgacgggtgtcc

SEQ ID NO: 16644 - DNA, 330 bp, Zea mays
ccgccgccgcggcttccttctctacccttcttccctcgcgccgccgccaccgcaagagtatctcaactctgccccgagacctcccccctcgctggtctcagccatggtgaaatattcgacggagccgaccaaccccaccaagtccgccaaggccatgggccgtgacctacgtgttcacttcaagaacacacgtgagacagcttttgcccttaggaagttgtcactcaccaaggccaaaagttaccttgaggatgtgatcgcccacaagcaggccatcccgttccgcaggtattgtggtggtgttgggcgtactgctcaggctaagtctcg

SEQ ID NO: 16645 - DNA, 315 bp, Zea mays
cgaagaagcagtagcaaaaggattccattctcgtgttcttggagtggtccatcgatcgagctccgtgaaagagagagagagagagcaagcaatggcgacagcagggaaggtgatcaagtgcagagccgccgtggcgtgggaggccggcaaaccgctgtccatcgaggaggtggaggtagcgccgccgcaggccatggaggtgcgtatcaagatcctctacaccgcgctctgccacaccgacgtctacttctgggaggccaaggggcaaaccccggtgttcccgaggatcttaggacacgaagcgggaggcatcgt

SEQ ID NO: 16646 - DNA, 312 bp, Zea mays
cggacgcgtgcggatgactttatttacttgccaattgattttaagaataaatgtaatgttggctatgctttcatcaacatgaccaatactcagcatatcattccatcttatcagacttttaatggtaaaaagtgggagaagtttaacagtgagaaggtggcatcacttgcttatgctagaatccaagggaaaacagctctgattgctcatttccagaactctagtttgatgaatgaggacaaacgttgccgccccatactcttccactcagatggtcctaatgcaggagatcaggaacctttccctatgggt

SEQ ID NO: 16647 - DNA, 313 bp, Zea mays
gaggtccgagtcctgctttgatggcgaccgacgtggctgagactcccgcgccgttggtggatgcggccccagatgcgcccgccgacgccccggcggcgcctgctgccgacgcgaaccggccaaggccaagacggccaccgcgccgaagaagcgcgccagctcgacccacccgccgtacgccgagatggtctcggaggcgatcacgtcgctcaaggagaggacggggtccagcagctatgcgattgccaagttcgtggaggacaagcacaaggacaagctcccgcccaacttccgcaagcttctgaacgttcag

SEQ ID NO: 16648 - DNA, 316 bp, Zea mays
agcacggacaccgcgccgcccgcgcacagctactgcaccagcactacccggcggtggcgccggaccagacggagtgcacctcgggcgagccgtgcaagcgcatccgggacgcggagtgcaagcccagggtgtcgaagctgcacgtgcacgccgacccggccgacctcagcctggtggtcaaggacgggtaccagtggcgcaagtacgggcagaaggttaccaaggacaacccctgcccgcgggcctacttccgctgctccttcgccccggcctgcccagtcaagaagaaggtgcagcgcacgctcgacgaccccac

SEQ ID NO: 16649 - DNA, 316 bp, Zea mays
ggaaagtatacttacaaggtctgtgcatataagacagcatcacaggctgaagggcacagttccaccaacctggggagatgggacaaacttgaagaatcgtacagagtaatgcacttttcaggtggagacaaatgctggaatggtcctgaccgaagcctaaaggttaggcttagatgtgggctgagcaatgagcttaatgacgttgatgagcctagcagatgcgagtatgttgctgtattgtcgacgcccgcactctgcgtcgaggagaagctgaaggagctgcaaaacaaactggatgccatgtcttcgaagcagc

SEQ ID NO: 16650 - DNA, 316 bp, Zea mays
cggacggtgggctcatatgggtcccaggatgatgaggattctagaaaagtcaacatgtcatatgggtctaatggtgaggacgacccaagacaggccaccacatcctatgggtcccatggtgagtatgaatcaaataaggccacaatgtcatatgggttccaaggcatggaagacttaaggaaggccaccacatcatatggaatacaagatgaagagtatccaaggaaggccaccacatcatatggagttcaaggtgaggaggacccaaagaaagataccatgtcatatgggtcacaagatgacgaggaatctagaa

SEQ ID NO: 16651 - DNA, 317 bp, Zea mays
  unsure (1)..(317): unsure at all n locations
cggacgcgtggggcagaagctacaatcctaaaaccatctgcttcagccttcagctagccccaagtttagtcggccgatcgatcactgaagtagtaatggcctccgccaacagctggaccctcgagatcgcgtcgccggtggccccgcagcgcctgttccgcgccgccgtgatggactggcacaccctggcgcccaaggtcgcctcccacgtcgtcgccagcgcgcagccngtggagggcgacggcggcgttggcagcgtcaggcagttcaacttcacctcagtcatgccgttcagcttcatgaaggagcgtctcgag

SEQ ID NO: 16652 - DNA, 307 bp, Zea mays
cccagctcccgtggtaccgcagcaccgtccctcagatggccatggcggggttcctcccgttcagcgcgatctacatcgagctgtactacatcttcgcgagcatctgggggcacaagatttacaccatctacagcatcctcttcatcgtgttcatcatcctcatcatcgtcacggccttcgtcacggtggcgctcacctacttccagctcgccgtcgaagaccaccagtggtggtggagatctgtcctgtgcggaggctcgacaggcatattcatattcttctactgcatctactactaccacgcgcg

SEQ ID NO: 16653 - DNA, 304 bp, Zea mays
caccacgcgtccgcggacggtgggcgacgcgtggggcccccggagccggagcaagagcgccgccaacagcccgctaccggcgccgtgtcatggcgggggcaggagacaaggtcgactacgtcttcaagaccgtgctgatcggcgactcggcggtgggcaagtcgcagatcctcgcgcgcttcgcccgcaacgagttcagcctcgactccaaggccaccatcggcgtcgagttccagacccgcaccctcgtcatcgaccacaggagcgtcaaggcccagatctgggacaccgccggccaggagag

SEQ ID NO: 16654 - DNA, 301 bp, Zea mays
ccgcagcgtgggcgcgacgcgtgggccacaactaccctggaagctaggacgggtgttggcaaggcctttatcactgctttccgctctggcgctgttatgggtttcctgctcgcatcaagtcggcttgtggttctgtacatcacaattaatgtatttaagttgtattacggtgatgactgggagggtctttttgagtccatcactggctatggtcttggtgggtcgtccatggctctcttcggaagacttggtggaggtatctacacaaaggctgctgatgttggtgccgatcttgttggaa

SEQ ID NO: 16655 - DNA, 309 bp, Zea mays
  unsure (1)..(309): unsure at all n locations
gtcggacttcgggctcgccaagaacgggccctccgccgggcagtcgcacgtcacgacccggatcatcggcacctacggctacgcggcgccggagtacgtcgccaccgggcacctgtacgtgaagagcgacgtgtacggcttcggcgtggtgctgctggagctgctgacggggatgcccgcgnacgacccgaaccgccccagccaccagcacaacctggtggagtgggcgcggccctacctctccggcgccggcagcaagctcaagactctcatggaccagcggatcgacggccagtaccacaccaaggc

SEQ ID NO: 16656 - DNA, 315 bp, Zea mays
agagtccgcgcgacgcgtgggacggacgcgtgggcggacgcgtgggcggacgcgtgggcgtagcgtggggtgttctcaactgctgctgacaatcagacccaagtgggtatccgtgacctgcaacgtgaccgtgaaatggccgcagacaacaacgttcttggtgaatttgacctcgtgggcattccacctgctccaagaggcttgcctcagattgaggttacattcgacatcgatgccaatggaatcgtgactgttgctgccaaagacaaggctactgggaaggagcagaacatcaccatccgatcctcaggtggg

SEQ ID NO: 16657 - DNA, 316 bp, Zea mays
cgacttcgagtcggagccatggcccagcgtctccgaagcgccaaggatcttgtgaggagaatgctcatcagggacccgaggaagagactgaccgcccatgaagttctacggcatccttgggtccaggttggtggtttggctcctgacaagccgctggactcggctgttctttctcgtatgaagcagttctcggccatgaacaagctgaaaaagatggctctcagggtgatcgcagagaacctgtccgaggacgagatcgcggggctgaaggagatgttcaagatgatcgacgcggacaacagcgggcagatcacgt

SEQ ID NO: 16658 - DNA, 314 bp, Zea mays
gtcgtcactgtaatctactgacctgcaaatcgcggacgcggaggcgacggtggggcgactgatgctgtactcgtactggcgcactcgtgctcccaccgtgcccgcatcgctctcaatctcaaaggtgtggattacgagtacaaggcggtgaaccttctcaagggcgagcagtctgatccagaattcgtcaagcttaatcctatgaagttcgtccctgcgttggttgatggcagttctgtaataggtgactcttacgcgataacactgtatttggaggacaagtacccagagcctcctcttctacctcaagacct

SEQ ID NO: 16659 - DNA, 300 bp, Zea mays
gcggaaccgaggcgatggcggggtctcgaggaggtgggccgtcctgctctgcctcggcagcttctgcctcggcctgctcttcaccaacagaatgtggacgctgcctgacgcaagtcagattgctaggccgaatgccaatctcgaggaaggcaccgtgccgattgccgcggagtgtggttctaaaaaggtccaagacaagcaggattacagagatattttacaggttcaagatagccatcatgatgtacaaacactggataagacgatagcaagcctagagacagagctctcagctgcaag

SEQ ID NO: 16660 - DNA, 314 bp, Zea mays
ctgttattgatgccccgggacaccgtgacttcatcaagaatatgatcactggcacttcccaagctgactgtgctgttcttatcattgactcaaccactcgtggttttgaggctggtatctccaaggatggccagacccgtgagcatgctctccttgctttcacacttggtgtgaagcagatgatttgctgctgcaacaagatggatgctactacacccaagtattcaaaggcccgttatgatgagattgtgaaggaagtctcttcctacctgaagaaggttggatacaaccctgataagatccacttcgttcca

SEQ ID NO: 16661 - DNA, 317 bp, Zea mays
gtcctcgatccgatccgccgagtgcacaccacctttccccactccgatcgaatcgatggccgccgagggcgagaagaagatgataaccctcaaaagctccgatggcgaggagttcgacgtggaagaggcggtggcgatggagtcgcagaccatccgccacatgatcgacgatgactgcgccgacaacggcatccctcttcctaacgtcaactccaagatcctatccaaggtaatcgagtactgcaacaagcacgtacatgccgccgcagccgcagccgccgcctcgaaggccggttccgacgacgtgggtgccgcct

SEQ ID NO: 16662 - DNA, 321 bp, Zea mays
gatggcagcccgcaagccggagaagccgctgaggacgacgaggacatcgggaggataatctgcgactgcatcggcgacgacttctccaactacaacagggccatagtcgagactgtccaaatgggctatggcctcgctgaagtgatctatgccgtgctgaacaacggcgtccaaggccgggtcgctgtcaaacttgctcgcctcccggtgtccaaagccggagaagaagacgccaccgccattctcgggaggatcgttgctcgcagcaagctgttcgacgtcggctgcgtgctcttctacaaagagggtgacaatggagtg

SEQ ID NO: 16663 - DNA, 311 bp, Zea mays
gcggcatccatccagtagtccgaccaatccatggcttcagccttcggcaccgcctccacttgccgcattaaacatgcacctgccggccttgcgcttgccgcgcccatgacgcacctttccctcgtctcgccctcgctggtttcgcttccgcgcaagacgaggccgcgaacgaagtacaacttcagggtaaacgctgcaaaggagctgcatttcaacaaggatggctcggctatcaggaaaatgcaaaatggggtcaacaagcttgcagatctcgtcggggttactcttggaccaaaggggcgaaatgtagt

SEQ ID NO: 16664 - DNA, 311 bp, Zea mays
gatctcctgaagggcatattctttgaggtaaagaagaagtttgagacagctcttggtgttcttaaaaaggaaaagatcactattgatccagatgacccagcggcagtttctcgttatgcccaagtcatgaagactgtaagggaaaaggcggatcttctctctgattctcaaaggattaaatataccattgagaccttcaccaagggcatccctgatgcacggacttacttgaatactcttcaacagctcagaataaagagtggtcttatagatcatcttggaattgagcctttgatgatggaagctcttga

SEQ ID NO: 16665 - DNA, 305 bp, Zea mays
gcgaggcttggctggcgtgaattccaaggtattaactctaatgaggtgtttggagaggtttacaaggtctgagagacttgatgccgagcagaagttcttctgtgaacactgcaacgagaggcaagagtccctgaagcaaatgtccattcgcaggcttccattagtttcctgctttcacataaagagatttgagcattcgtcagtcaaaaaggtgtcgaggaaagtcgatcactgtttgcagtttcccttttcccttgacatggcaccttacctgtcgtcatctattctcaggagtagatatggta

SEQ ID NO: 16666 - DNA, 305 bp, Zea mays
cggacgcgtgtgcccgtccgcgtgcacaccgtgctcatctccacccagcacgacgagaccgtcaccaacgacgagatcgccgccgacctcaaggagcacgtcatcaagcccgtcatcccggacaggtacctggacgagaagaccatcttccacctcaacccgtcggggcgcttcgtcatcggcgggccccacggggacgccggcctcaccggccgcaagatcatcatcgacacctacggcggctggggagcccacggcgggggcgccttctccggcaaggaccccaccaaggtggaccgcagcgg

SEQ ID NO: 16667 - DNA, 304 bp, Zea mays
cccacgcgtccggtgagaaaatccactttatggcaccgaatatatactgctgtggagcaggaactctgcggacacggaggccgttacagatatggtgagctcccagctacagcttcaccgttatgcaacgggccgcgaatcaagagttgtaactgctcttacactactgaagtcacacctcttcaagtatcaaggccatgtcagtgctgcccttgttcttggtggagtggattgtactgggccacatttacacactgtttatccacacgggtccactgatactcttccttttgccaccatgggc

SEQ ID NO: 16668 - DNA, 304 bp, Zea mays
gaggcatggttcttggccgtgtattcgaggacatgtgtgcacaaatgtgctaccgtggcaagatgtttggtttcgtccacctttacaatggccaggaggctgtctccactggcttcatcaaacttctgaaccaagctgactgtgttgttagcacataccgtgatcatgtccatgcgctgtccaagggcgtcccggcacgttctgtcatggctgagctctttggcaaggccacaggctgctgccgtggacagggtggttccatgcacatgttctctgctccccacaacctcctgggaggctttgc

SEQ ID NO: 16669 - DNA, 305 bp, Zea mays
cccacgcgtccgcatcttttctcgtttagaacctctaaaatttcccccactcgccagtcgcagcagcacctgtagcagccatggacgccagcggagcggtagcaaggggaagaagggggcggccgggcgcaaggcaggcggccccaggaagaagtcggtgacgcggtccgtcaaggccgggctgcagttccccgtcggccggatcgggcgctacctcaagaagggccggtacgcgcagacgtgaggcactggcgcccccgtctacctcgccgccgtcctggagtacctcgccgccgaggttctgg

SEQ ID NO: 16670 - DNA, 326 bp, Zea mays
cggacgcgtgggcgtgacgcgtgggaaaggaagtacttgtaaatgggatcagtgtacgggtcaaatactgtgatacttgcatgctgtaccgaccacctcgatgcccacactgttccaattgcgataactgtgtggaacggtttgatcatcactgtccatgggtcggccagtgcataggactgcgtaattatcggttcttctatatgtttgtattctcgacgacattgctctgcctctatgtatttgccttctgttgggtgtatgtgatccagattagagctgctgagcaatcgtcagtttggaaggccttgctgaagacaccagca

SEQ ID NO: 16671 - DNA, 311 bp, Zea mays
ggacgcgtggacggtgacgatggccgcttcctccctctgccacgggcacttgctcctgtttctcctcgtgtccgtcacatcggcctgcctcggtaccgcggcggcgcatcaagccgggtctggagagggctacacgatcgccggccgcgtcaagatcgatggcgtgagtgcgaagggctatggtcttccagccaagacatcagacacaaaagtgatacttaatggcggacagagggttacatttgccaggccggatggtactttgcattccacaacatgccagctggaactcatcttattgaggtctcctc

SEQ ID NO: 16672 - DNA, 310 bp, Zea mays
tttgctttcaaaaatcacaatgagagtgggattgccaatctttacagcctgcactcttggattgggataggaacaattactttgtatggtattcagtggataattggattcgtcacgttcttcttccctggtgctgcgccaaacgtgaagaagggtgttcttccttggcacgtactctttgggctctttgtctacatcttagcactggctaatgcagaactcggctttcttgagaagctcactttcctcgagagctcaggtctcgacaaatatggcacagaggcattcttagtgaacttcacagcattgg

SEQ ID NO: 16673 - DNA, 121 bp, Zea mays
cagaggctctgaccaccgccgtgcgaccaacgttagtgctagattggatgcccagcagaagaggcttaacctccccatccttcccaccactacaatcggttcgttcccacaaaccgttgag

SEQ ID NO: 16674 - DNA, 293 bp, Zea mays
tgaagattgtgcacacatcctcaacactgcatggtcagatatacataccagaaatcaattggatgctgatgatactctgcctggctgttactattggtttcagagacacaaaacacttggcaaatgcacaagggttggcagtaataactgtcatgcttgttaccacttgcttaatgtcactcgttattgttcattgctggaacaagagtatcttccttgcccttgggttcctacctttctttggcacgatcggagtaatctacttctcagcttcccttgtcaagtttcatgaa

SEQ ID NO: 16675 - DNA, 153 bp, Zea mays
ctctctcgttctgctcacatcgacgcggttcggttccagtttcactcccactgccgtctcggcaacctcccctgttccacgcttcgtcctcgggttcccaaccgagctcttccgcgcggagggcagctccctcgccgggctcatcgcgctcgg

SEQ ID NO: 16676 - DNA, 315 bp, Zea mays
  unsure (1)..(315): unsure at all n locations
ggacgcgtgggctgccattataataactgctcttgatgaggttgcttggttgtacaacattcgaggaagtgatgtggattatagcccagtggttcactcttaacctattgtaacattgcacagtgctttcttttatgttgataagagaaaagtaactgtcgaggttcagaaatacatgtctggaaatggtatcgaaataagagagtatgaaactgttcaatcagatgcaagtttgcttgcatctggcaagctacaaagttctgtacatgtggaaaagtatatggatgaggtggagagttcanaaatttggattgg

SEQ ID NO: 16677 - DNA, 114 bp, Zea mays
ggtccgtgggctgtataatggctgagctccttgccaaagaaccattatttaatggaaaaacagagtttgaacagctagataagattcttagaacacttggcacacctagcgaga

SEQ ID NO: 16678 - DNA, 311 bp, Zea mays
gctcccggtccgcgggcccccgccgtcccaggatgccggcaccccccgctccgctagctcggcctcggctatggatgtggagatgtctggtgcatggaacagcaggtctaagaccatcttgaggccacttggcagcattagcaagaagaaggtgcagcttcatttgaagatcaagaaagacaagagataagctaggaagaagggaaagttttcttttaagaagtagacgagtgtatgataaatcatgcagttttgttcccggttttgtaaacaaacgcactgcagtcatgtcatgtggtgcactacctaag

SEQ ID NO: 16679 - DNA, 303 bp, Zea mays
caaggtcatcctcgccagccacctgggtcgtccaaaaggtgtcaccccaaagtacagcttgaagcctcttgttccacgcttgtctgagctccttggagttgaagtcgtgatggccaatgattgcattggtgaagaagttgagaagttggctgccgctttgccagaaggtggagttctgctcctagagaatgttagattctacaaggaggaagagaagaacgaacctgagtttgctaagaagctagcatctgttgctgacctttatgtcaatgatgcttttggcacggcacacagagctcatgc

SEQ ID NO: 16680 - DNA, 307 bp, Zea mays
cggacgcgtggcgtgacgcgtgggcagacccagcagctattgtggtcgtccctcagccgcgtcgcaccgcatcgcattctacgattcgaagctctctctgctcgcagccatggcgacaaattacccaaccgtgagcgccgagtacagcgaggccgtcgagaaggccaggcgcaactccgcgccctcatcgccgagaagagctgcgcgcccctcatgctccgcctcgcgtggcactccgcggggacgttcgacgtgtcgtcgaggaccggcggtccttcggtactatgaagtgcccggcgggactggc

SEQ ID NO: 16681 - DNA, 225 bp, Zea mays
aacatggtgactccaggctccgactccaagaaggtgacccctgaggtgattgctgagtacaccgtccgtaccctccagaggaccgtacctgctgctgtgcctgctgttgatttcctctctggtggacagagcgaggatgaggccacccgcaacctcaatgccatgaacaagctcagcaccaagaagccgtggtcgctgtctttctccttcggccgtggcctccag

SEQ ID NO: 16682 - DNA, 307 bp, Zea mays
tggagttgaagtcgtgatggccaatgattgcattggtgaggaagttgagaagttggctgccgctttgccagaaggtggagttctgctcctagagaatgttagattctacaaggaggaagagaagaacgaacctgagtttgctaagaagctagcatctgtagctgacctttatgtcaatgatgcttttggcacggcacacagagctcatgcttcaaccgaaggagttaccaagtatttgaagcctgctgttgctggcttcctcatgcagaaggaacttgactaccttgttggagctgttgccaaccca

SEQ ID NO: 16683 - DNA, 306 bp, Zea mays
gcggagaagaagccggcggccgaggagaaggcggagaagacgaccgcagcaagaagcccaagtccgagaagcgcctgcccgcctcgaagtcctccggcaaggagggcggcgagaagaaggggaagaagaaggccaagaagagcgtggagacctacaaaatctacatcttcaaggtcctaaagcaggtgcaccccgacatcggcatctcctccaaggccatgtccatcatgaactccttcatcaacgacatcttcgagaagctcgccggcgaggccgctaagctcgcccggtacaacaagaagccca

SEQ ID NO: 16684 - DNA, 308 bp, Zea mays
cggacgcgtgggggtctgttctctcgcttcgcttctactccccccgcatgcttgcttgctccttcctatcttgctgcccgctccacccgagtctgccacacgtctactaggagttcccgctgtcatcagtccccacgtatgaagcccaagcagggtgcaactgcaacacggggtagcttcgcggcgacctgcgaggctgtgactctggcgatcttatcctatggaggaacaggaagatctctggcggggtacttgctggtgccacggccatctggctcctattcgaggtcatggagtaccatctcctc

SEQ ID NO: 16685 - DNA, 305 bp, Zea mays
ggcttcttctccctaatagctaccttcttcctatcaggctggagttcatcaaggatttgaacctggaactggagcccacaagcacacagaggaggaagaacaccaagactggttcccaacctatccaaggtagaagcgagcaacgttagtgtggtagtaacatggtgactgtgagagaggagatgcgtaaggggccatggacagagcaggaggacattcagctggtatgcactgtgcgcctgtttggtgaccatcgttgggacttcattgctcaagtctcaggcctcaacaggacaggaaagagc

SEQ ID NO: 16686 - DNA, 305 bp, Zea mays
cggacgcgtgggctagccagccggcaaaggtgacctgctgatggtgatgatgagaggcgagtcctacgccctagtcctactagtaccctctttgtgtgctgccatacatccgtccccgctagacgatcgaggagagaataacgcagagctctgtgctcccggcctctgtcttctgccgtcccggccgtttaatttataggtgtctactgtgtgttcgtcccatgtgtttagcagcagcagcaggtgtattgtgcgggtatgtaatggtattgcaactatattgggtgtaaaaccataataaatgt

SEQ ID NO: 16687 - DNA, 308 bp, Zea mays
gagctcgacgccgtcgtcggccgcgaccgcctcgtctccgagtcggacctcccgcgcctcacgtacctcacggcggtgatcaaggagacgttccgtctgcacccgtccacgccgctgtcgctgccccgcgtcgccgccgaggagtgcgaggtggacgggttccgcatccccgccggcaccacgctgctggtgaacgtgtgggcgatcgcccgaaacccggaggcgtggcccgagcctctcgagttccggcccggccgcttcctcccgggcggctcgcacgcgggagtcgatgtcaaatggagcgactt

SEQ ID NO: 16688 - DNA, 291 bp, Zea mays
ggacgctgggccatgaattgacacctccacccgcagctgagcctgttgaggccaaggttaagccgagggcagagcttgtgaggatgcggaacccaaggccagggagcctaacaagagggagatgagcctggaggagaagaacatgctcagggtggggctggagagtttgcccgaagagaagatgcataatgtgctacagattgtgcgcaagaggaacaacaatccggagatgctgggggatgagatcgagcttgatattgatgagatggatgttgagacacagtgggagct

SEQ ID NO: 16689 - DNA, 312 bp, Zea mays
cggacgcgtgggcagtagtgccaacattaaatggctgcgtcctcgtacttccttcttgctgcttttctagctgtaacagcttctcatgccaccgcttccgatcctagcccgctccaggatttctgtgttgctgatattcactctcctgtgaaggtgaatggatttgtttgtaaggatcctatggcggtgaccccagatgacttcttcaaagcagccaatcttgataaagctagagacaccatgaagagtaaggtggggtccaatgtcactttgatcaacgtcatccagctccctggcctcaacactcttggc

SEQ ID NO: 16690 - DNA, 299 bp, Zea mays
ggtgaacgccatggacccgctgctgaagccgaagcaggacaggtacgcgctccgcacgtcgccgcagtggctcggcccccagatcgaggtcatccgcgccgccaccaagtccatcgagcgagaggtcaactcggtcaacgacaaccctgtcatcgacgtccaccgtggcaaggcgctgcacggcggcaacttccagggcaccccgatcggcgtgtccatggacaacgcccgcctcgccgtcgccaacatcggcaagctcatgttcgcccagttctccgagctggtcaacgagttctaca

SEQ ID NO: 16691 - DNA, 294 bp, Zea mays
acccacgcgtccacacaaggtccgggaccgggttggggaaccaggtgaattcaccatgctggaacttgcagagaatgtgaaggagttgattaacccagatataacagtgacgatgaccgagaacactcctgatgatccccgccagaggaagccggacatcaccaaggcaaaggaagttctagggtgggagcccaagatcgtcctgaaggacggcttggtgctcatggaggatgatttccgggagcgcctggccgtgcccaagaaaaccaaggcctaaactgccctgcggtgggc

SEQ ID NO: 16692 - DNA, 299 bp, Zea mays
gaggagaggcgcagagcatcgacgatggcgagcggcacatgaagagggagatcagcgagacccacgacaccctccgcttcggcctcaatgccggcgtcaagaccgacctcgcgccgccgcacccgctccagtccagcatccaatcggaggccaagttctgggcggacaagaagaagtttgggacagaggccatctacggatccgccttgaacatccgcaaggatctcgatgcccaaatcctctcaaggttccaaaggccccctggtgctttgccatcatctctgcttggatatgaggca

SEQ ID NO: 16693 - DNA, 299 bp, Zea mays
cgaggacagagacggccttcttactattccggagagtactaaaggttttattgcgatcggattgacccctgccttcgcactttctttggccacagcgacccatgctgctttcggccctttgacaacccctcctggaaagttaccgagcataaatatctacgtgtcccacatccacggagcagttcatccaagtgactcgggagccattgataagaagggaaactttgtccccaaaaagtttgaaagaatattccagaagttttcacacagtgaggaggacgccttgtcatggttggaga

SEQ ID NO: 16694 - DNA, 291 bp, Zea mays
gtcgatcagcaagaagccggggtcagaggaatggcggcgacgtcgcggctggcgctggccctcctgctggccgccttggtggcggcgtggcagctgccggcagcggcggtggcgggcaactacacggtgggcgacgagagagggtggaacccggacgtggactacacggcgtgggtgaagaagcacaagccgttctacaagggagactggctcatcttcgagtaccagaacgggcggtcggacgtggtgcaggtggacgaggtcggctacgacaactgcgacaaggccaac

SEQ ID NO: 16695 - DNA, 296 bp, Zea mays
ggacgcggtgcgtattggtcctgcagcaagtaggaaaaatacaggaggtgttgttcaagagagagtaccaaattctcaaggagctcagtctgagaatgatcctaacaataccactatatttgttggtgggcttgaccccaatgtcactgaagataccctaaaacaagttttttctccttacggtgaagtcgtccatgttaagatccctgttgggaagagatgtggttttgttcagttcgttaccagaccttctgctgaacaagcgctgctaatgctgcaaggggccttgattggtg

SEQ ID NO: 16696 - DNA, 299 bp, Zea mays
gaacgacgcgtccgggacgcgggccgtctacgcctccaatttggcctctctcccttgcaagtttaagcttcatcttcagccataggtaaggagaagtcccacatcaacattgtggtcattggccacgtcgactctggcaagtcgaccaccaccggccacctgatctacaagcttggaggcattgacaagcgtgtaatagagaggtttgagaaggaggctgctgagatgaacaagcggtccttcaagtatgcttgggtgctcgacaagctcaaggctgagcgtgagaggggtatcaccat

SEQ ID NO: 16697 - DNA, 301 bp, Zea mays
agctcccatatccgctcccctacctctccagcatcctcccgtctccgtcgtctcgtctccgctcctcacctcgccagccatgggcaagatcaagatcggaatcaacggtttcggaaggatcggcaggctcgtggccagggtcgccctgcagagcgaggatgtcgagctcgtcgccgtcaacgaccccttcatcaccacggattacatgacgtacatgttcaagtacgacaccgtgcacggccaatggaagcacagcgacatcgccctcaaggactccaagacgcttctcttcggcgagaag

SEQ ID NO: 16698 - DNA, 302 bp, Zea mays
actccacgcaccagctccacggcatcttcgaggccgcgagcttcggcgggaccaacatcgacccgacggcgtgggaggacaagaagtgccccggcgagtcgcgcttccctgcgcaggtaccctacctgtactgtctgcttcgatccacagtctagtactctagtctagcagccatggcggcggcggcggcgggtgatcgatcagctcaaccacacgccggccacactagcgaacgtcgacttgtacgcttgtttcaattgtgttcaacaccaccaaacagtacatgtatacatgtatcaccg

SEQ ID NO: 16699 - DNA, 293 bp, Zea mays
atcagctcatctgtcagcgccacaggtgaccggaaaaccacggccggcgttcctgcttctctacccggtccgaattgctgaccggatcaacccgagaccttgcaggattatcgatctgattgcggcatgatccgcttcatcctgctgcagaaccggcaggggaagactcgactggccaagtattacgtcccgctcgaggactcggaaaagcacaaggttgaatacgaggtacaccggctcgtggtcaatcgggaccctaagttcaccaacttcgtcgagtttcgcacacacaa

SEQ ID NO: 16700 - DNA, 292 bp, Zea mays
ctcgacaaggggaagaaggtgaaggatggaggaaggggagacggggaaaccgatctcaacgaggctcttacctcgcaggtgcgtcgccttgccatggaggtccggcaacttggtaattcacgttcaataactgttctcaatggaggttctgcacaatcaggagtatcaggcctgatagtacctgcagcaactgtaggagcactgggttacggttatatgtggtggaaggggatctcgttctcagatctaatgtatgtcaccaagcgcaacatggcaaatgctgtttcaagca

SEQ ID NO: 16701 - DNA, 292 bp, Zea mays
ccatgcgtccggtccatcgacccacccaacccccccctccgcgccgcgcttcgcctgggtaccggcgtccgcgcgccccgtccagtccaggaacaggaagagcagtaacccatccatcggggatcaccaggggagcaagatgtcgactgccgccgccccaagattgcccgctcccagatccggggcaagctatcactatcagacgaccgcggctccggtggccaacaccctctccttcgccggccacgcgaggcaggcggcccgcgcgtccgggccacggctgtccagcagg

SEQ ID NO: 16702 - DNA, 292 bp, Zea mays
gacacaagagcaactgaggggcctatagttgctgataagaattgtgagaagatccactttatggcgccaaacatttattgttgtggagcaggaactgctgctgacactgaggctgttacagacatggtcagctcgcagctacagctgcaccgttacgcaacgggtcgcgaatctagagtcgtaactgctcttacactgctgaagtcacatctctttaggtatcaaggccatgtcagtgctgcccttgttcttggtggagtggattgtactggaccgcatcttcacactgttt

SEQ ID NO: 16703 - DNA, 297 bp, Zea mays
gtgagatcgatcgagcttccacctcctgtcatcctcctcctcctcttgcaggtcgcagctgagcagcaacaaggccggaaaggatgtcgtggcagacctacgtcgacgagcacctcatgtgcgagatcgagggccaccaccacctcacctcagccgccatcatcggccacgacggcaccgtctgggcccagagcaccgcattcccgccgttcaagcctgaggagatggccaacatcatgaaggacttcgacgagcccgggttcctggcccccaccggcctcttcctcggccccacca

SEQ ID NO: 16704 - DNA, 285 bp, Zea mays
cccacgcgtgcgagccactcgatcgagcacacacacacttgatcactactaatataaacacattgcgcaaaggccgccatggcttaccgcgcctttgctacgctgcttgcagtgctagcatttgtgggcttcgcttcagttccccgtggtctggcaactgacccgacccagctccaggacttctgcgttgctgataacaagaaccctgtgctggtgaacggggtggtgtgcaagaacccgaacgtggtgaaggcaaccgacttcttcttcaggatagtgccgatg

SEQ ID NO: 16705 - DNA, 284 bp, Zea mays
aagatcaccatttcttggtggccttgcggcaatgcgtgattcagaagtagactacacaattgaagctattctagcaaacgctcagaatgaaagcccctggaggtacctcaagggtctatacaagggtgagaataacctgctaatagaggacgagcgcatctctggtgtttgtttcaaggtcctgaagaatgattggacttgtgtatttgctttgagtttgctgctcgatcttctctgcactggtttgcagccttcagatgaacttaggtccactcttgaaacaa

SEQ ID NO: 16706 - DNA, 285 bp, Zea mays
gtgatcttcgcggtggacggcaccccggtgcgggacttcaagaaccacgaggcgcgcggggtggcgttcccgaggatgcagcccatgaggctgtacgccagcctgtggaacgccgacgactgggccacgcagggcgggcgcgtcaaggcggactggtccaaggcccccttcgtcgcctccttccgcggtttcagcgccgacgcctgcgtctgggacggcggcaggcagcgctgccctgagggcaccatggaggccgccgccgtcgcgggtgccggctccggccgc

SEQ ID NO: 16707 - DNA, 288 bp, Zea mays
  unsure (1)..(288): unsure at all n locations
cttctctttcctgcaggtttcatctgctcgaggagttcgacgaggtgaagcgaacgtgcaggaagcgcctcgacggacacaaccggcgccgcgcaagccgcagccggatcctctcaaccctgctgccggcttgtttggcaatcaccaccatggaggagtgacaaggttcacatcgtacccacaccgcttcaccaaatccatcgcaaagcccgaatgggggntcgtcaagacggagaccgacgcgttccaagaccagtactaccctgccgtccacctcaacggcgccgg

SEQ ID NO: 16708 - DNA, 287 bp, Zea mays
gctcgatcgagcacacacacacttgatcactactaatataaacacattgcgcaaaggccgccatggcttaccgcgcctttgctacgctgcttgcagtgctagcatttgtgggcttcgcttcagttccccgtggtctggcaactgacccgacccagctccaggacttctgcgttgctgataacaagaaccctgtgctggtgaacggggtggtgtgcaagaacccgaacgtggtgaaggcaaccgacttcttcttcaggatagtgccgatggcgccaaacgggcagggc

SEQ ID NO: 16709 - DNA, 287 bp, Zea mays
cccacgcgtccggtgaccaatgatgagatcgctgctgacctgaaggagcatgtcatcaagcctgtcatccctgagcagtaccttgacgagaagaccatcttccaccttaacccatctggccgctttgtcattggtggacctcacggcgatgctggcctcactggccgcaagatcatcattgacacctacggtggctggggagcccatggtggtggcgctttctccggcaaggacccaaccaaggttgaccgcagcggagcctatgtcgcaaggcaggctgccaagag

SEQ ID NO: 16710 - DNA, 323 bp, Zea mays
ccggccgccccggtcagaatataatccagatcagtatctatgggagaaagagtttatccttgctggacgtaaatacaaacgactagacttggagcttacaaatgcaagaggctatatcttaaaatgcagccactatgttcctgcttttatcccagagaatactgccctcccatgtgtggtctattgccatggaaatagcggatgccgagcagatgcaaatgaagccgctgttatacttcttccttcaaatatcactgttttcacacttgacttttctgggtcaggtctatccggcgggggattatgtcagtttgggttggcat

SEQ ID NO: 16711 - DNA, 323 bp, Zea mays
cggacgcgtgggcggacgcgtgggcaggtagtccgagccagcgcagagaccaactattcgtttgcttttcgtcttcgtcctctctttgcccagttgtcggtcgcccgcaccgacgtctccgctccgccggccttcctgcgaaaccctagcgaggcgagcgagagagaaactagcggccatgttcggctacaggaaggctgacccggacctcgaggccggcgggtcctcgctgctgtacccgggaatgacggagagccccgagctgcggtgggcgttcgtccgcaagatctacgtcatcctagccgtccagctcgccatgacgg

SEQ ID NO: 16712 - DNA, 247 bp, Zea mays
attcatctctgccctagcaccagccatggcgaactcagcttcttctctgtttcctactcgccgcctccgcgccgctaatcgtcgccacggccaagaaatccggggacgtgtcggagctccagatcggcgtcaagtacaagccggaatcatgcagcattcaagctcacaaaggtgacaaggttaaagttcactaccgtggaaaacttactgatggaacggtttttgattcaagctatgaaagaggtga

SEQ ID NO: 16713 - DNA, 309 bp, Zea mays
caagaacatcgtgaggctgataggctgttgcctagaagtcgacaagccaatgctcgtgtatgagttcctctccaaaggcagcctcgacgatgttcttcatggaagcagacgtgatccactgaacttgaaatgccgtctggacattgctgcagagtccgcagaaggcctagcctatctgcattcgaaaacaacaaacgtcatcttacacggcgatgtgaaaccagctaatatacctttggatgaagactggacaccaaagatctctgaccttgggtatatcgaggctgaatgttgaaaggtaacagcaca

SEQ ID NO: 16714 - DNA, 323 bp, Zea mays
ggcagaaagctgctgagaaaaaacgacgaacagaagaggcacaacaagctggcctcaatgctgctgctgcccaaagcaatggaactggctatcaagcgtctcgtctgggcaaggcttcacaggagccacctgcgcctccgaacaacatcctcttcatccagaatctgccagaccagaccacgagcatgatgctccagatcctgttccagcagtaccctggcttccgggaagtacggatgatcgaagctaaaccaggcatcgcttttgtggagttcgaggacgatggccagtccatggtcgcgatgcaggctctccaaggcttc

SEQ ID NO: 16715 - DNA, 319 bp, Zea mays
cggttatgttattatcggcggtgaagctataatggtgtacagggtacttccaacatcgaatcatgacacaactaagctgatccatctagttctccacgggattgcacttgtccttggtgcggttggaatatactttgctttcaagaatcacaatgagagtgggattgccagtctttacagcctgcactcttggattgggataggaacaattactttgtatggtattcagtggataattggattcgtcacgttcttcttccctggtgctgcgccaaacgtgaagaacggtgttcttccttggcacgtactccttgggctc

SEQ ID NO: 16716 - DNA, 322 bp, Zea mays
accgcatgctccgcctgctcgcctcctacgacgtcgtccggtgccagatggaggaccgggacggccggtacgagcgccgctactccgccgcgcccgtctgcaagtggctcacccccaacgaggacggcgtgtccatggccgccctcgcgctcatgaaccaggacaaggtcctcatggagagctggtactatctcaaggacgcggtgctggacggcggcatcccgttcaacaaggcgtacgggatgacggcgttcgagtaccacgggacggacccgcgcttcaaccgcgtgttcaacgagggcatgaagaaccactcggtgat

SEQ ID NO: 16717 - DNA, 323 bp, Zea mays
cggacgcgtggggcagccgcagtcccaccgaccccgccgccggtcgccctccatctcctcgccgctgcctctcgtttctcttttcaataatcaagatgagccatggtggtagtgccggtggtggtcaaagttctctgggttatctctttggaagcggtgagccccccaaaccagcagtggcaccagctgcaagtgctccacctgttgagaaaccatctgctgcaaagactgatgcggccaagcaggttgctgctggggttaccagccaaaccaataactaccacagggctgatggtcagaacactggcaacttccttacggac

SEQ ID NO: 16718 - DNA, 317 bp, Zea mays
cggacgcgtgggtccctccctccttccctccctcgctcgcctctggaggaccctcgccatcctgcccaagcgcaccaccaaacccccagcagcggcgctagggctcgcgcctcggcgcgtcggcaccgtcacctgcggcgatggcggggcaggagcgtaggacaatcgatctggaggagggatgggcgttcatgcagaagggcatcaccaagctgaagaacatcctcgagggcaagcccgagccgcagttcagttccgaggactacatgatgctctacacgacgatatacaacatgtgcacgcagaagccgccgcag

SEQ ID NO: 16719 - DNA, 316 bp, Zea mays
gacaaaaccagaccaccaaacaagtgccagcgccctctcgcagtcgccgcaatggagagcaccttcatcatgatcaagcctgacggcgtccagaggggcctcattggtgagatcatcagccgttttgagaagaagggcttctacctcaaggccttgaagcttgtcaacgtggagaggtcgtttgccgagaagcactacgccgatctcgcctccaagcccttcttccagggcctcgttgactacatcatctctggccctgtggtggccatggtctgggagggcaagagcgtcgtcacaactggccgcaagatcattg

SEQ ID NO: 16720 - DNA, 316 bp, Zea mays
atcgagttccagcgcaacgccgagctcgacccggagaagaggctgtaccccggcggctcctacttcgacccgctcggcctggcggccgaccctgacaagaaggagcggctgcagctggcggagatcaagcacgcgcggctcgccatggtcgccttcctcggcttcgccgtgcaggccgccgccaccggcaaggggccgctcaacaactgggccacccacctgagcgactcgctccacaccaccatcttcgacacgttcggagggtcctcttaagcacgccattgctccgccccgtccatcgaccggccgggacgtg

SEQ ID NO: 16721 - DNA, 311 bp, Zea mays
gcgacattcccaaaagagatacagaggatggctgcagatttccttgctgattacatctttcttgctgttgggagagttggttcaagcaccgatttaattgttcagagggtggagtttgtcctcgattcagacaaacgaagctacctcatggatcttattcatgcacaaaaggctaatggcacacatggaaagcacgctcttacattggtctttgtggagacaaagaggggggctgatgccctggaggactggctttttagaaatggtttccctgcaactagcattcatggagacaggacacaacaggaaag

SEQ ID NO: 16722 - DNA, 317 bp, Zea mays
agaccaccggacagaagaataagatcacgatcaccaacgataagggacggctaagtaaggaggagatcgagaagatggtgcaggaggcagagaagtacaaagccgaggacgaggaacaccagaagaaggtgaacgccaagaacacgctcgagaactatgcctacaatatgcgcaacaccatcagagacgacaagatcgcctccaagctaccggtggacgacaagaagaagatcgatgacgccgtcgagggggccatcaattggctcgacaacaaccagctcgccgaggttgatgagtttgaggacaagatgaaggag

SEQ ID NO: 16723 - DNA, 311 bp, Zea mays
gtttgcggactccattaccaagattgataggcggtctggcaaacagcttgagaaggagcccagattcctccagaatggtgatgctggtatggtgaagatggttcccactaagcccatggtagtggagaccttttctgaatatcctcctcttggtcgctttgctgtccgtgacatgaggcaaacggtggctgtcggagtcatcaacagtgtggagaagaaggatccaactggagccaaggtgaccaaggctgccgcaaagaagaaatgatgtgtctggctggttctgtgtttgcttgagggatacctagtgg

SEQ ID NO: 16724 - DNA, 316 bp, Zea mays
caaacgcgctcggcgcttccccacccaaaaaggaaaaccaaccaccactcccaccaccctccgcctccgcctgcgccacagctgccgattcgaaagccctcgtcctgacccctcgcaaaaccctagctccaaccaccatgaagggcaaggccaacgcctccaagaaggatgagggcaggctccgggccggcggcggcggcgccggaaagcccaagaaggccgccgcgagcgtgaagcccaagcgccctccctccgccttcttcgtcttcatgtctgaattcaggcaggagtaccaggcgcacaccctggcaacaag

SEQ ID NO: 16725 - DNA, 317 bp, Zea mays
gccaagtcttgcggtcgcgaagagcaacgcaacaagatggtgaagctcgcattcggaagcgtcggcgactccttcagcgtcacctccatcaaggcctacgtggcggagttcatcgacaccctcctcttcgtcttcgccggcgtgggttccgccatcgccttcgggcaactgacgaatggcggcgcgctggaccctgcgggactggtggcgatcgtggtggcgcacgcgctggccctcttcgtgggcgtctccgtggccgcgaacacctccggcggccacctgaaccccgccgtgacgttcggcctggccgtgggcgg

SEQ ID NO: 16726 - DNA, 318 bp, Zea mays
cccacgcgtccgcccacgcgtccgcccacgcgtccggacagggaaagccgtgttgcaagaaggggaattccgctgcgagatccgtgaacggttcagagatggcacagacggtgttcaccccctctttggaagcgatgaagcatgtcaaggcagataacggagtcattctcaccaagcccttccttgatgtctgcaagcaaatattgcctgtcctcgataaatttggaggtgctatggcaattgtaaagagtgatatcggcggcaatatcacaagactggaaaacaagtatacttcagaaccatcagagtatgaacact

SEQ ID NO: 16727 - DNA, 312 bp, Zea mays
  unsure (1)..(312): unsure at all n locations
acttgctaaaccagcggaaacctaaccagctagcagcattagcttttcaacaagcctcgctcgcncgccgtgaccgatagatggccatcacccacgacgactacgtctccctgtgcctcatggcgctcgcagccgcnggaggaggagggcacgctgcggcagccagtgnnnnnnnnnnnnnnnnnnnnnnnnnncaagantgcganctccgcttccggtgctccgtctgcngcaaggccttcncgtcgcaccaggcgctgggcnggcacaaggccagccaccggaagcngccgccgccgctcgcacaggcgg

SEQ ID NO: 16728 - DNA, 304 bp, Zea mays
gaacaagcaggcttcgagaacaagactgcacgcggaaggggaggaccaagcgaaaggggaactagagcaagatgggcggcgcactgctgcttgcgctcactcctcgtctctgctgctgccgcccctcaggtacttggagttggcaatggagacaatcacatgagaatcatccaggaggacatcatcgagacagtcaacaaccatcccagtgctgggtggacagcctcacgtaatccttacttttcaaactataccattgcgcgatttaagcacatacttggagtgaaaccagcaccacagaatg

SEQ ID NO: 16729 - DNA, 306 bp, Zea mays
accacgcgtccgcgaccgtgggctctcaaaacctttctcctcccgccgccgtctcgcccccgctgtctctcgctcctcccacgcgctgccatgggctccgtagctggagacaccgccgcccgcctcgcgtacccgccggcccgccgcgacgattcggtcgtcgacgactaccacggcgttcggatcccagatccctatcgctggctggaggacccggactcggaggagacgaaagagttcgtggcgcggcaggcggagctggcggagacggtgctcgccgggtgccccgacaggtagaacctgcgc

SEQ ID NO: 16730 - DNA, 284 bp, Zea mays
cccaaggtgaccggcaacctcatcgtctgcatcgaccgcgcaacgcgccttgtcaagtcgcagcagggcgctggcaaggagtacgtctgcgtcgcccgcttccacgccgccgtgccggacaccgcgcgagtggcccgcgcgcttgaggcgctcactggcgcggtgttccagcgcccgccgcttatctccgcagtcaagcgccagctcagggtgcggacaatctacgagagcaagctgctggagcacgatcccgagcggcaccttgccgtgttcctgatctcatg

SEQ ID NO: 16731 - DNA, 305 bp, Zea mays
cccacgcgtccgcccacgcgtccggcaggttgcaaggattctaatgaagaccttatctcaattgacatctggaaaacaacctgttggtacaatggcttacatgggcaatgtacaatatctgatgcaatgcaaatgtgctgttaacacagctgaagattggcttaaccctgttgccatacaagaggcgtttgaagccagggctctcaggatggcagtaaactgtgcccagaacataggccaagcagcaaaccaagaagaaggtttctatgagcggtcccctgatttgctagaggctgcagtagctc

SEQ ID NO: 16732 - DNA, 305 bp, Zea mays
cggacgcgtgggcggacgcgtgggcggacgcgtgggacgaactcccgttctccatttccagccatggcggtgtcgatcgagctcaccaaggagtacggctacgtcgtgctggtgctagtggcctatgacttcctcaacctttggatgggcttccaggtcggcaaggcccgcagaaagtacaaggtgttctaccccaccatgtacgccatcgagtcggagaacaaggacgccaagctcttcaactgcgtgcagagggggcaccagaactctctagagtggatgcccgttttcttcgtcatactgct

SEQ ID NO: 16733 - DNA, 299 bp, Zea mays
cggacggtgggctgccgtctacgcctccaatttggcctctctcccttgcaagtttaagcttcatcttcagccatgggtaaggagaagtcccacatcaacattgacgtcattggccacgtcgactctggcaagtcgaccaccaccggccacctgatctacaagcttggaggcattgacaagcgtgtaatagagaggtttgagaaggaggctgctgagatgaacaagcggtccttcaagtatgcttgggtgctcgacaagctcaaggctgagcgtgagaggggtatcaccattgatattgc

SEQ ID NO: 16734 - DNA, 309 bp, Zea mays
cgccttcctccgctcgagcggctcgccgaggaaatagcgaaagggcgctatgagttcagcgaatggtacaaccaatgtccatgggaaagaagcagcaccgtatgaggagcagctgttcaagattggtaaagttagaactgacctaggacaactatctggaaaatcagctctatattgctcagatgcttcaattgcaaggtacctgatagcaaggaactgggacataaggaaggctactaaaatgctgaagaaaaccttaaaatggcgttcagaatataagccagatgaaatccgttgggatgacatatc

SEQ ID NO: 16735 - DNA, 308 bp, Zea mays
agaacttccgccacggcttgcacgggaagggcgcgtcggtgaagatctcgggaggccgtggcggcagtgggagcgcttattcgacgccgaagaaggcactgctgatgcgcggcgagactaacatgctactgatgagcccaggagaggctctgcattccaatggtgttcaccatgttgacgttgagactgggaaggttgtcgcagaatggcggtttgagaaggatggagctgatatcacaatgcgagacattgccaatgacagcaagggagcgcagttggaaccctccgggtcgacattcttgggcctg

SEQ ID NO: 16736 - DNA, 279 bp, Zea mays
gagatgtccttcttcttccgggccgcatcgcggcagcgcctgttgccgcaggagatcgcgcgctccctcaaggactccctcgttgccctcgacaccaagaccggcgccaaggctctcgaggatgctgagaaaaacatacttacattgaggcatacgctcgctggtgatggagaagtggaaccaaatcaagagcaggttttgcagatagcccttgagatttgcaaggagggtgttctttccctctttgttcagaatcttccttcattgggttgggaggct

SEQ ID NO: 16737 - DNA, 314 bp, Zea mays
cgctcggttgctcgggagctttccccttcctgttcctgaagcttccgacatccgaccgcctcctcctcctcgttctactcgccgccccttctagaatcatccagaggcgtgccggtgaagcgcgagacggtgaggcatggcgatgcagacgggggtcgcgacctccaaggtcctcatcctcgtcggtgcagggatgacgggctcgatcctgctgcggaatggccgcttatctgatgtgttgggagaactccaggagattatgaagggtgtaaatcaaggaacttcttcgggtcgctatgacattgcacttattc

SEQ ID NO: 16738 - DNA, 317 bp, Zea mays
gaacactagagacatcatcatgagggagttccggtctggctcctcccgtgtgctcatcaccactgacctgcttgctcgtggtattgatgttcagcaggtgtccctggtcatcaactatgatcttcccacccagccagagaactacctgcatcgtattggtcgtagtggtcgttttggtaggaagggtgttgccatcaactttgtgacccgcgacgacgaacgtatgctgtttgacattcagaagttctacaacgtgttgattgaggagctgcctgccaatgttgctgagcttctgtgatcaatttgaagaaaaaaca

SEQ ID NO: 16739 - DNA, 315 bp, Zea mays
cccacgcgtccgcccacgcgtccgcccacgcgtccgcccacgcgtccgcccacgcgtccgtcatggtcgagctggtcggcaccaaggccgtcgacggggaggcgccgcccaggatcctgcacttgaaccccaggatccgcggggactaaagccggaagcccgtcgtcgagatgaacagctgctaccggatgcagtggggacagtcgcagcgctgcgagggcttcgctcccgccccgccgacgacaccggtgagttgtcgtcaacctctccagcgacctccggatttgtcgggttcattttgatttgctattttga

SEQ ID NO: 16740 - DNA, 281 bp, Zea mays
tgattccgcatcccgttcgcgagcgcgacacacgctgacagctcacggctgaccttcccgagtcccgacggcctccagctccatcttgattcttgagcgaacccggtgcgtaagagtctgccatggccagcgagaataaggtctttgggttcgaggaagtcgccaagcacaacgtcaccaaggactgctggatcatcatcgccggcaaggtgtatgacgtcactccgtttatggatgagcatcctggtggagacgaggttttgctagctgtaactgggaaa

SEQ ID NO: 16741 - DNA, 312 bp, Zea mays
cggacgcgtgggggcgcagagaatccccaagcaaacaaacagggtagaccgagacgcgacgcgacgcgacgcgaggctgggtctgggacaccatggctccgatgacgctgtacggggcggtgatgtcgtggaacgtgacgaggtgcgcaacggcgctggaggaggctggctccgactacgagatcgtgcccatcaacttcgccaccgccgagcacaagagccccgagcacctcgtccgcaacccgtttggtcaggttccagctctgcaggatggtgacttgtacctcttcgaatcacgagcaatctgcaagt

SEQ ID NO: 16742 - DNA, 312 bp, Zea mays
cacccgacttgtttacccccgaaaatttgccgtcttctcatctcgctcccctctttgcgccgcccccagatccggcaccgcccgctgctcgaacccgcaccccacgcccgcagccgggaccggtgggcgcgcgccgggcagtaggacggagaggaagggcggcatggcggcgccgccggcgagggcccgggccgactacgactaccttatcaagcttcttctcattggggatagcggtgttggcaagagttgcctcctgttgcggttctctgatggttccttcactacaagctttattaccacaattggtat

SEQ ID NO: 16743 - DNA, 120 bp, Zea mays
cggacgcgtggggacgacttgtttcattgattcttgaagagatcgagcttcttttgcaccacaaggtcgaggatgtcttgcaactgcggatcaagctgcggctgcggctcaagctgcaag

SEQ ID NO: 16744 - DNA, 249 bp, Zea mays
tgataacggtgaaggcggaccatttgctctctattcgcttctttgcaggcatacaaaactcagcttgctgccaaatcaacaagcagctgatgaggaactatcttcatactacagaaatgggtttgcacctagcaatggatcttcaccttggttaagaaggtttctggagaagcacaaaaaaatgagagttgtgcttcttctcatagctctctgtggcgctacatggtgattggtgatggtgtcctcacc

SEQ ID NO: 16745 - DNA, 307 bp, Zea mays
gtcgagggtgagaatgcttcaaatggatccgcacctgaatcgaaacaaaaggaaatcctcaaggttgtcgccacggaagttcttggtggtgggaagttttatgttcagacagtgggtgaccagagggtggcttcaattcaacagcagcttgcatctttgaaacttaaagatgcaccagtcattggtgcctttaatcctgtgaagggagagatagtcctctcacaatttagccttgacaactcctggaacagagctatgattgttaatggacctcgctctgtagaatctctaaacgacaagtttgaag

SEQ ID NO: 16746 - DNA, 307 bp, Zea mays
ccaatctagaagctcccctcttcgtccctccctctctctctctctcttcgccgtccgaagctccgcacccaatctaatcgacacctcaccgagatgggccgcaagttcttcgtcggtggcaactggaaatgcaatggaaccacagatcaggtcgagaagattgtcaaaaccctgaatgaaggacaggttcccccttcagatgttgtcgaggtcgttgtcagccctccttatgtcttccttcctgtggtcaagagccagctgcgccaagagttccatgttgctgctcagaactgctgggtgaagaagg

SEQ ID NO: 16747 - DNA, 311 bp, Zea mays
gcctgctcctaccgcagctctccctcaggtttagtgttcgcaatggcggccttcaacaagcttggtggccttctaaggcacagtgctctggtgagcggtatcactggtggctcttctcctgcagtgttcaatgctgcacggctcatgtctaccaagctatttattggtggtcttgactggggtgttgatgacgtgaaactaagagaagcatttagcagctttggagaggttactgaagcgagggtgatcacagacagggagactgggaggtcaagaggctttggctttgtgaactactccgacagtgatgc

SEQ ID NO: 16748 - DNA, 315 bp, Zea mays
ggagcagaagctcaaggtcacgaaggcgatcgagaaggggaacatggacgacgcccgcatctacgtcgagaacgccatccgcaagcgcaccgatcacaagaactacctccgccttgcctctcgacgccgtcgtagcccgcctcgacacgcaggccaagatgcaggtcatcggcaagtccatgcagtccatcgtcaagtcactcgactccgtgctcgccaccgggaacctccagaagatgtccgagaccatggacaatttcgaacgccatggaggtctaggccgagttcatggagggcgccatggccgaatccacc

SEQ ID NO: 16749 - DNA, 310 bp, Zea mays
ggaaagtctactgttgtgaaggctatatccggagttcagactgttcggttcaagaatgagctggaacgtaacattaccataaagctgggctatgctaatgcaaaaatctacaaatgtgaggatgacagatgtccacgaccaatgtgctacaaggcctatggaagcggaaaagaagatagccctctatgtgatgtgcctggatttgaaaacactagaatgaagctcctgagacatgtttcttttgttgattgcccgggacacgacattctcatggctacaatgcttaatggagctgctatcatggatggag

SEQ ID NO: 16750 - DNA, 312 bp, Zea mays
acgacatctttgtttgaaacttctcatgagggttccactgtttgaaaatatggacgaacagcttttggatgccatgtgtgactgcctaaagcccattctgtacacagaaggtagctgcgttattcgcgaaggagatccggtgaacgagatgctctttgtcatgaggggaaacctaatgagcatgacgacgaatggtggaagaaccggcttctttaactccgatgttctgaaggccggagatttctgcggcgaagagctcctcacctgggctcttgaccccacgtcaacatcgagcctccccagctcaacaag

SEQ ID NO: 16751 - DNA, 313 bp, Zea mays
  unsure (1)..(313): unsure at all n locations
aaactcgtgagcactttctcctcgtccccgacaagccactcgaagccgagatacggccatggactccaccggcaccggagcagcggggaagggaaagaagggagcggccgggcgcaaggtcggcgggccaaggaagaagtcggtgtcgaggtccgtgaaggctgggctccagttccccgtcggccgcatcgggcgctacttgaagaagggccgctacgcgcagtngtcggcaccggcgcccccgtctacctcgccgctgtcctcgaatacctcgccgctgaggttctggagctcgccggtaatgctgccaggg

SEQ ID NO: 16752 - DNA, 305 bp, Zea mays
cgattcccttccccaagaacccaagcccccaccatgacaagctcctcctctccttcccgaaaggcgctgagcaagatcgcttgcaatcggctgcagaaggaactcgccgagtggcaactcagcccccctgctggattcaagcacaaggtctccgataacctacaaaggtgggtaattgaggtcactggagcggcgggcaccctttacgccggcgagacctaccagttgcaggttgacttccctgagcattatcctatggaggcacctcaggtcatttttctcaatccagcgccaatgcatccaca

SEQ ID NO: 16753 - DNA, 311 bp, Zea mays
gtgatctcaacccaagtcgtgcctccgctccggtcacccgtcgctccacgcaaccatgtcgaggaggaagaccagggagcccaaggaggagaacgtcacccttggacccactgtccgtgaaggagagtatgtctttggtgttgctcacatctttgcatccttcaatgacaccttcattcatatcactgatttgtctgggagggaaactctggttcggatcaccggtggcatgaaggtgaaggctgaccgtgacgagtcgtcaccttacgctgctatgcttgctgctcaagatgtcgcacagcgctgcaagg

SEQ ID NO: 16754 - DNA, 253 bp, Zea mays
cggacgcgtggcaggacgcgtggggctgatcgatggtggtcttcactttacaaagtgatcgaaggcctcgccacaatgagcagattgggccgcaaccgtctgcagcaacacttcttataattttgagaacaacaattctattgactgggaccaaatgtagatgtagaattctggatcacaacagcattgtggagtaggctggaggtgtagttatttctggcggatttgattcctgcggtgtgtaaacgctgca

SEQ ID NO: 16755 - DNA, 304 bp, Zea mays
cggacgcgtggcttggtcaccaacagatgctacagcaagtaaagttccatcttcagcgtgctcaggacagaatgaagaaacaggctgataagggtcgcgtggacgtacttatactgtgggcgatcaagtttttctgaaacttcagcccttctgtcaacgattagtggctgacagaccagtttctaaactggcatttcggttttttggtccctttgaggtgattaaacagatcaatcctgtggcctatgaactagcgttaccatctgggagtgctatccacccggtctttcatgtatcgcagtta

SEQ ID NO: 16756 - DNA, 307 bp, Zea mays
cacccggctggccggctccccacctgctcgcctctcgctccgaagcttctcctctcgcgtatcctaccaggagggtgggagacccagggagcggaggtgtgcgaactcgcctcgcaccacgcgctgcggcctgcggggcgagagatcggggcctgagctagggtctggtggcggagatgtcgacgccggcgaggaagcgcctgatgcgggacttcaagcgcctgcagcaggacccgcccgccggcatcagcggcgcgccgtacgacaacaatatcatgctctggaacgccgtcatattcgggccgga

SEQ ID NO: 16757 - DNA, 306 bp, Zea mays
cggacgcgtggcgcggcgccaaggtgaaccagaaggtagacgtgtacagcttcggcgtggtgctgctggagctggcgaccgggagggtagccaacgacagcagcaaggacgccgctgactgctgcctggtggagtgggcgtggcggaggtacaaggcgggggaccctctccacgacgtcgtggacgagaccatccaggacagggccgtttacatcgacgacgccgtggccatgttcaagctcggggtcatgtgcaccggggacgacgcgccgtcccggccgtcgatgaagcaagtcctgcagcaac

SEQ ID NO: 16758 - DNA, 306 bp, Zea mays
ctccacttctcttctccgcgtcacctcctcttcgccgccgccgacgcttcacccggcagccagccatggatgaggagtacgacgtgatcgtactaggcacggggctcaaggagtgcatcctcagcggtctcctctctgtagacggcctcaaggttttgcatatggacagaaatgactactatggaggagattccacctcactcaaccttaatcagctctggaagaggtttagaggggaagacaagcccccagcacatctaggtgcaagcagagactacaatgtggacatggtgccaaagtttatga

SEQ ID NO: 16759 - DNA, 309 bp, Zea mays
tggacagcagcagtgaactcgacgccgctccgccacctcgccactcgcctcttctcgctctcgccaccgggccagggaagggaccatccgatcggctccgtcatggctggagctgctgctctcaatgagggtatcctttcttccgtgtccgagaaaaatgttgctgctcacccatggcatgatttggagataggaccagaggctcctgaagtgttcaattgtgtggttgagattcctagaggcagcaaggttaagtatgagttggacaagatatctggtctgatcaaggtggatcgtgtcctttactcc

SEQ ID NO: 16760 - DNA, 295 bp, Zea mays
aggaaagccaggctaagattaagcgctacatgacaatgatggattccatgactgatgcagagcttgacagcacaaatcctaagctgatgactgaatcacggatcattcggattgcacgggggtctggtcgtcctgtcagggatgtcatcgacatgctggaagagtataagcggcttgctaaaatctggggcaagatgaagggtctcaagatcccaaagaaaggggagatgagtgcactgtcccgcaacatgaatgttcagcacatgagcaaggtccttcctccgcagatgcttaa

SEQ ID NO: 16761 - DNA, 302 bp, Zea mays
atcatccaccgctacctcaactgcagcaacgtcttcatcaatggcaacaacggccatgtcaagatcggcgacctcgggctggcggcgatcgtggacaagacgcacgtggcgcacaccatcctgtgcacgccggagttcatggcgccggagctgtacacggagacgtacacggagtcggtggacatctactcgtacggcatgtgcgtgctggatatggtcacgcgggatgtgccctacgccgagtgcggcagcgtcgtgcagatcttccacaacgtcacccggggcgtcccgcccgcggcgct

SEQ ID NO: 16762 - DNA, 296 bp, Zea mays
gtggcctcggcggcggccctgatctcgccggcggctgtggtgcggtcgtggctgctgctggcgtgggtgagcacggtggcgggcaacctgtcgctgctgggatcggcggcgaacctgatcgtgtgcgagcaggctcgacgggcgcacgcaacgcctacgacctcaccttctggaaccacatcgtcttcggcgtgccctccaccctcatcgtcaccgccatcggcatccccctcatcggaagatcaacatctgatcgtagctcatatatactacactacatgcataattgtatgcct

SEQ ID NO: 16763 - DNA, 301 bp, Zea mays
cacaagcgagcgagggacccggggcggaagaagagagagaagacgtctctctcctctcggcgtccccgttccccaacctctcgtctgctgcctgcctgcctgcctgcctgcaaaaaggagtttgtcatggcgtctaagcgcatcctcaaggagctgaaggacctgcagaaagacccccccacatcatgcagtgcaggtcctgctggtgaggacatgtttcattggcaagcaacaattatgggaccacctgacagtccctatgctggtggtgttttcttagtgaacattcatttcccgccag

SEQ ID NO: 16764 - DNA, 296 bp, Zea mays
cggacgcgtggctatgacttacaacattaggcctgtcattgaagaaattcaaaggtctgcggaggatagtggtgacagacgaactttgaagatgtgcttggggatgctaaagtccatgagaaatcgctctgatcagaactttgttgcttatagaaagggtcttggtgttgtttgcaacaaaaaaggtggatttggtgtagatgactttgttgttgaattctttggggaggtctacccttcttggagatggtatgaaaagcaagatggtattaaacatatacaaaataacagtgaag

SEQ ID NO: 16765 - DNA, 277 bp, Zea mays
aaaatagagagaccaaatattagttactaaaaccaaacaacttgacgccactgggaatcctcccaaaacaatgcatatcaagatgcaaatgtcaacgcgctatggcctaaaaaatgtctacttgggaagtggcggtatgctctgctcgttcctgaagtagtcagtgggatccactgccgccttcactgccgccagccgccggtagttccccatgaagtatctctccgcccacgccctggcgctccagtacgatgacaagccgtcgctgccgatgacg

SEQ ID NO: 16766 - DNA, 267 bp, Zea mays
  unsure (1)..(267): unsure at all n locations
atacagacacaccacccacccaaccactcgattcagccgccaccgccgcgcgtacaagcaggtggagaaaagatgccggctagccacggcatgagcacgcggacgcgagacctcttcgagcgcaccttcagaaagnagagcaacatcccgctcaacaactacctccgcacctacaagatcggcgattacgtcgatgtaacagtgaacggcgccgtacaaaaggggatgccgcacgagttctacgacggacgcacggtacgcgtatag

SEQ ID NO: 16767 - DNA, 287 bp, Zea mays
cataactcctggtggtggggtgacatatgttcatttatcaaagcatattcccagcatcatggaccttgtggacgacacagaggagaaaatgggtgtaaatatagttgggaaggcacttcttgtccctgctatgacgatagctcgcaatgccggggcagacggtccagctgtcgtggagaagcttctcgccagcgagtggcgggttggttacaatgcgatgactgacgagtttgaagaccttgtcgctgctggtgtggtggacccgtgaagggtcgcgagatgcgtgc

SEQ ID NO: 16768 - DNA, 296 bp, Zea mays
atgagccactacgtgctcgtcgtctaccgccacgccttcgccaccgtctctattgcaccgtttgctctcatccttgagaggaaggtgaggcccaacatgacgtggtccgtcttcctccagatcttcgtgttggcactgctcgggcctgtgatagaccagaacttctactacgccggcctcaagttcaccgggccgaccttcgcgtgcgccatgagcaacatccttcctgccatgaccttcgtcatggccgtgattttcaggatggagaaggtggacctgaagaaggtgcggtgcca

SEQ ID NO: 16769 - DNA, 298 bp, Zea mays
cgccctcgaagacgcaacacgtttagccgtgacagggggcatagatgttcactctgtgtacgcaacagcgcttccaaaggcacatcctagcttttctctccagcaagtcttggaaatgtctgaaaggtggaaggctcgccctgtgccagacgaaccaatccatcttttcatcggcatcctctccgccacaaaccatttcgccgagcgcatggctattaggaaaacttggatgcagtttccggctatccaatcggggaatgcggttgctcggttctttgttgcgctgagccacagaaag

SEQ ID NO: 16770 - DNA, 240 bp, Zea mays
gtcctcagaaattcaaaatatcggcaaagaacgagaagcttccgaatcaaggaatacttttatgggattgcaaatgatcttgcaccgcactcaaacattgtcaatttcagtgatgtctcggtgtacaaaatcggtggtggccatcaagctccccgttcagcattacctatcggtgcagagcctgtggcagatcctactcgacttgctgctgtcaacatcagcacggatatgatccataca

SEQ ID NO: 16771 - DNA, 252 bp, Zea mays
caggcgcttcctggccgccgtgctgcccgaccgccagtcaggatcctcggcggcaggctcggcagcttcaacctcaacccggggcccttcaacgtcaaggagcacgtcatcatcaccatcttcggcaactggagcgtctcctaaggcggcggagacgcttactccatcggcgccatcaccgtcatgaagggctactacaagcagacgctcaagttcgcatgcgccctcctcatcgtccctcacacacagata

SEQ ID NO: 16772 - DNA, 311 bp, Zea mays
aagagaatcctgaattttaatcaacgtatagtgattgcccttgatattgctattgcattgacttatctccatttgtgttctggggacgctttaatctgttacaacttgaggacgtcaaacatcctactgacagagagctaccgagccaaagtgtgctgttctgaactgtcaaaaagtggtaatatcgtgctattaaagggaacagggggctacattgatccagagtacttggagacctcagagctcactgccaaatctgatgtctactcttttggaataatactcttagaaatcatatcttctcatgggcc

SEQ ID NO: 16773 - DNA, 275 bp, Zea mays
caccagcatcggctgcgctgccgtcgtctgcagcaacgaaggcggcgtcttcgccatctgcagctacaacccgccgggcaacctcgacggccagagtccgtactagcttggcgatcatcgatcatatacgcacgcagctgtggatgcttgcaatacctactacgtgtaagtgtcgtatgcatgagtacatgtatacacataccgtacgtgtgtgtcgacggatgacataaaactgggaaccgcatgccatatttaacacacaccaaaaccaaaaa

SEQ ID NO: 16774 - DNA, 283 bp, Zea mays
cagatcgtgtgattttgcatcccatccgccaacccgacacggctgacctactcgacggcctccacctccgtcctgaggcgaacgaccaactctttcgaagggaaattatatctcaggtgcttaggagtctgccatggccagccagaataaggtatttaggttcgacgaagtacgcaagcacaacgtcaccaaggactgctggatcatcatcgcccggaaggtgtatgacgtcacccctttatggatgagcatcctggtggagatgaagttttgctagctgtaa

SEQ ID NO: 16775 - DNA, 312 bp, Zea mays
acttatccgaggttccgtgcagcagtggaaaagagcagattttagcagagcagcgagggtcggagaagcctccccaagcttcgaatcgctatgcagcccgtcaaggtgtacgccgaccggcggtcgcaaccctcccgagctgtcatcatcttctgcagggtgaaccagatcgatttcgaggaggtcacggtggatctgttcaagtctcagcacctcacacccgaattcaaaaaaataaacccaatgggacaggtacctgcaattgttgatggaagattcaaactatttgacagtcatgcgattttgaggtat

SEQ ID NO: 16776 - DNA, 279 bp, Zea mays
ccatgattggcacagaagatcgaatcctgaacagatgggcacaatttgcaaagaattggggtttcctcccgcttgttggtggtggatctactaagattcagcctgtgtatgtaatcgatgttgctgctgctattgtgaactccctgaaggatgacggcactagcatgggaaagatatatgaacttgggggccctgaaatttacactgtccatgagctggctgagctgatgtacgagacaatccgcgaatggccaagatatgtcaatgtccctcttcctg

SEQ ID NO: 16777 - DNA, 305 bp, Zea mays
agcaaagggtgacactctggaatttcataagttctacaagaacctttccaagaccttgaaggacgtcgtctggcaatccgacgatcttcaaacgcaacatgcttcttagcagaacctcagagaggaggaatggcaaactattttgtgcaccatcctttcaagcaaactattctgcatgtaacggtgggtgcccaggaaattgcgctggtgctccaccatcgttgtatatgctgcgtcttgagttgcttgctgtagctgaagggaagttcattcagtaggttttgagtatgagttttgtatatccg

SEQ ID NO: 16778 - DNA, 308 bp, Zea mays
actacagctcctcatctcaagtgtgtagacgagacagagagacactgagagagcgccatggccagcctccaagtcactcctacttcggcgttcactgagtggaacgagctgaagttcgaaggcctgtacctgttccacacgcccctgggctcaggcgccaaccaagctcgggtcatagacaacaaggcgccgattggcatcggtgccaccgtagttaacaactggacagtgtatgacgggccagggccgaacgcaaagctggttgcccgtgcacagggcttgcatatccaagccggcaactgggtcaa

SEQ ID NO: 16779 - DNA, 300 bp, Zea mays
ggaccgggcggacggtgggaggatagcaaaggtgtggaagactttggggatgtcataagagatggaggtggtgctcttgcaaaaggcatcttcagaggtgtcacaggcatcttgacaaagcccatcgagggtgcaaaatcttctggtgttgaaggttttgtgcaaggagttggaaagggtataattggcgcactgcacaaccagttagcggagttcttgatcttttatcaaaaactactgaaggtgccaatgcggtaaaaatgacaatatcatcagcgataatggctgaggagcagttgc

SEQ ID NO: 16780 - DNA, 306 bp, Zea mays
ccgggttgttctcccctcttggccacgctttcccttctgtcttctcggagtggaatgcccctaagccaatgcatccttctcttttgaatgaggccttgcgatggacagctacagacggacaaaagaaagatctatggtcacccttgccatatcaggggtggaaaccatgcttaacgccatcagtttctcacaaattacctctggaaccaagtggatacatccaagtatttcttgatggtggattgaaccaacaaagaatggggatatgtgatgccattgcagttgcaaagattcttaatgctactc

SEQ ID NO: 16781 - DNA, 292 bp, Zea mays
tctttcttaaattccaaaaaggcaacatagtttttttaacaaacaaataaacatgacgctgatgtttgaatacatggacattgtacttattcaactacaagcatgcccatcgcttattacaatgctatagcaataaagggtacgtcgaaataaacagggtgcccatccagcactgatgactaacatagtggtggcaaagagatgagtagcggtggggaaaattctcatacatggtcgcaatctacaacttccgtaccttataaaacatttggcagccattattgtcttacac

SEQ ID NO: 16782 - DNA, 295 bp, Zea mays
gcggctggtgctggacaggcacgtggacaacttcttcaacgagaacgagcagctggcgttcgggccggggctggtggtgccagggatctactactcggacgacaagatgctgcagtgccgggtgttcgcctacgccgacacgcagcgctacaggctgggaccaaactacctgatgctgcccgtcaacgcgccgcgctgcgcgcaccacaacaaccactacgacggcgccatgaacttcatgcaccgcgacgaggaggtggactactacccgtccaggcacgcggcgctgcggcag

SEQ ID NO: 16783 - DNA, 295 bp, Zea mays
ccgctccatccactgggaggcttcacaaaagcagatgatgtgcctcttagttggagaatgaagcaacatgagaaggttcttgaggaaggtgtcctcaacccagaatcaactgttgttgcgatctttccctctccaatgcattatgctgggccaactgacgtgcagtggcatgctaaggctcgtattaatgctggtgcaaatctctatattgttggaagggatcctgctggtatgagccatcccacggagaaaagggacctctatgatgctgaccaccggaagaaggttttgagca

SEQ ID NO: 16784 - DNA, 297 bp, Zea mays
cggacggtgggtcggacgcgtgggtggaatacaacctggtatcctaaggctgcagatcatgtaactaccgagaagacatggtatgttgttgatgcaacagacaagatcctaggcaggctagcatccaccattgcagtacatatcaggggaaagaatgaacccacttacactcccagtgtagacatgggagcttttgttattgtggtcaatgcagataaggttgctgtttctggtaaaaagcggtcacaaaagctttataggaggcactccggaaggcctggagggatgaaagaagaa

SEQ ID NO: 16785 - DNA, 301 bp, Zea mays
aaacaagccactgatcaagccttacaagttctccacacaacgactcaatgctctgggtatgaagttcactactttgaaagagagtttatacaacacagtggttagcctacaagagaatggtcatatcccagtactgctacataagtcgtctctatgaggaataaggatataaaaagatggatttccacaagatggtgtcaatgccttagttggtaaagttggactttgtatgaacatgaaaagatgattcttaaagtgaataaccactcaaattgtccaatgaataacataattcagagtt

SEQ ID NO: 16786 - DNA, 300 bp, Zea mays
gtacaaagagggttctcatgttatggagtatggtgataagaccttcaaggatgagaagctttccttttatcaaggttttgatcctgctaatgccaacattgcaaacatgctgctttggccaggcccaaagggtgcagtcaatcaaagagatgctgatcttctcttcatgtggaagaggtacgagcagttaaattgggggaccgaagagaagctgagggctctcatagagattaaagaaactgttcagcacaggaagcatcttgacagcagtatcgatttcgttgggaggctcgtcttcgg

SEQ ID NO: 16787 - DNA, 300 bp, Zea mays
gagtctgggaagatgaccaaggaccttgcccttctcgacggctccaacgcaggcagcctcaagcttctgggtgaagtcaagtagtctagcattgtcatcaagctttgccctgtgtgcaagtcctcttgtccacgcaaagattgaggcaatactgttcgtactagtttcacctcctttctggtgaacacggtaatgacgggtaacagtaccatgggcagcttcagcttcgatcgtctttccatcagggcacaccagtaccgaagtcatcaaacccaatgttgaaggacagcgttactcaaa

SEQ ID NO: 16788 - DNA, 302 bp, Zea mays
caccttgtgccgtcttccaccgctcccgagtccaaggtcttctatctcaagatgaagggtgactactacagataccttgctgagttcaagactggagctgagagaaaggacgctgctgagaacaccatggtggcatacaaggctgcccaggacattgctttggctgagcttgctccaactcaccctattaggcttggactggcactcaacttctcagtgttctactatgagattctcaactcacccgatcgcgcctgcagtcttgcaaagcaggcttttgacgaggccatctcggaactgga

SEQ ID NO: 16789 - DNA, 273 bp, Zea mays
tcaaggtcctcatctaattagcttcagaccttctgctcgaaatgtaccgctgcaacatcaatgactgtgacagatgagcctggttattatgaagcatggggcctttggtataagactggagaatgtacttatttgcaaagacgccaatgctaagtttaattttggagataaaggttatttggcatttgaacatataacatgggctccataccagaccaagctgatagacaccgggcttctgacccctgttgagatcgactgggtgaacacgta

SEQ ID NO: 16790 - DNA, 276 bp, Zea mays
ccctcatcaaatggaaggtactgcatggtggaaagagttgttcactactcagaactggtgaacattatccgcaacatgtatcctacccttcctcttccggacaagtgtgcagatgacaagccgtttgtcccaccctaccaagtatcaaaggagaagataaaaagcataggcatcgagttgattccactggagacgagcgtcaaggagaccatcgaaagcttgaaagagaaggggttcgctagtttttgactcgagcaagctgtgaaacataagtgt

SEQ ID NO: 16791 - DNA, 275 bp, Zea mays
cttgctgcactatccgtgtcaccttatgacaaaaaatatggtgcatttgagacagagaatgagaaagagcgcaacatgcgtctgtccaaccttgttaacttttcgcttgataacaagcgtgaaaacagggaaatgccttcaagaccatatcttctatcagagttggcctccaaaggagtcctttcatgtgcttcccaagaagtgcgagatttgtacaaccttttggaacatgagtttctacctctggatcttgcatcaaaagtgcagccacttct

SEQ ID NO: 16792 - DNA, 272 bp, Zea mays
cccacgcgtccggcttcaacaagctaggcagctgcaacatctcccaaatcccagcctgctgccccgcgcgaacacacttctcttgtcgttgcattgcagggcagctagccggctacagcatccgccatggcgcgcggcggggacggcctgcaggtgctcagcgcgctggacgcggcgaagacgagtggtaccacttcacggccatcatcgtcgccggcatgggcttcttcacggacgcctacgacctcttctgcatctccctcgtcaccaag

SEQ ID NO: 16793 - DNA, 272 bp, Zea mays
cggacgcgtggcgggctgccggcggtgcacccgcacagcatgctggtgatcaccatcaacggcaccggcatggcgatccagctgacccacgtggcgctcttactcctctactcggtgggggctgcgcggcgcaaggtggtcctgctgctggccgccgaggtgggcttcgtcggcgccgtcgccgcgctggtgctcagcctggcgcacacgcacgagcgcaggtccatggtggtcggcatcctctgcgtcctcttcggcaccggcatgtacgc

SEQ ID NO: 16794 - DNA, 274 bp, Zea mays
gaggcttgagaacgagcgacggagacctagccgaagcaggagctccccatggcgaccggcaacctggcgagcgtggtggtggctgtagacggcagcgaggagagcatgaacgcgctgcagtgggcgctcgacaacctccgcctgcgccccgacggcgagctcgtcgtgctgcacgtccagccgccgcccaacatcgccgcgggactcaacccggcgcccatccccttcggcggccccagcgggttggaggtgccggcgttcacgcaggccatcg

SEQ ID NO: 16795 - DNA, 269 bp, Zea mays
cggacgcgtggcgctgcctgaagcaagtgagattgctaggccgaatgcgaatgttgaggaaggcaccgtgccgattgccgcggagtgtggttctaaaaaggaccaagaaaagcaggattacagagatattttacaggttcaagatagccatcatgatgtacaaaacactggataagacgatagcaagcctagagacagagctctcagctgcaagatcgctgcaggaatccctgctgaacggctcccctgtcgcggaagagtataaagtt

SEQ ID NO: 16796 - DNA, 158 bp, Zea mays
gatggacaggtgcttccttgagcttcaggttgagggtgaagaagcttatcagactttctcccgtgttaatgagaatggcaatgtcattatggcaacatatgaagataaggtccctggtgatgtccaagtatacccagagaaagggacagttggccttt

SEQ ID NO: 16797 - DNA, 276 bp, Zea mays
gcattcgagaagccgaagaaaattcgaagacgaggagcagctacactgcggacggacttcgggcatggagggccagttccaggttggcaaggaggaggtcatccaagcatggtacatggacgacagtcaagaggaccagaggcttcctcatcatcgcgagcccaaagaattcatccctctcgacaaactttccgaactaggaatattaagctggcgcctaaatgctgatgattgggagaatgatgagaacctcaagaaaattcgtgaagccagggg

SEQ ID NO: 16798 - DNA, 266 bp, Zea mays
ggtgggttggcttctcctccccctccggttcgggttcaggttcgtgaggttctccggggttcgttttcgtgggtgatcggatcgagattgcggcgtcggatgttgagtaccgctgcttcgtcggcggcctcggctgttccacggacgaccactccctccacaacgccttcatcacctacggcgaggtcctcgagtccaagatcatcctcgatcgggatacgcagaggtctcgcagcttcggcttcgtcaccttcgccacggaggag

SEQ ID NO: 16799 - DNA, 268 bp, Zea mays
cgccacgctgctcttcgtgttcgccggcgtcgggtccgccattgcctactcgcaattgacgaagggcggcgctctggacctcgccggcctggtggccatcgccatcgcccatgcgttcgcgctcttcgtcggcgtctccatggccgccaacatctccggcggccacctgaaccccgccgtcaccttcggcctcgccgtcggcggccacatcaccatcctcaccggcatcctctactgggttgcccagcttctcggcgcttccgtggcg

SEQ ID NO: 16800 - DNA, 266 bp, Zea mays
cttccagccgccgccgcgtccgcctcgccaagcgcacagccgccgcagcacatcgctctcttgatctcagccatggcggaggtggagcagcaacaggacacgccgaagctcttcaaccgctggaccttcgatgatgtccaggtgaacgacatctcgctgaacgactacctcgctgtgaacgcgacgaagcacgcgatgtacctgccgcacaccgcggggcgctactccaagaagcggttccgcaaggcgcagtgcccgatcgttga

SEQ ID NO: 16801 - DNA, 265 bp, Zea mays
gcaagttaatgagttgcatcgaagcagcccttttatggaaagggtggcattattacctgcattttgaccattttctgttgattgtataatatgatgttcaggttaatgcaagtggtcagttctgtggcgtggctgagatggttggtccagtagatttcaacaggaacatgaacttctggcaacaggacaagtggaatggtttcttctcggtaaaatggcacattatcaaggatgttcccaatccacaatttcgccatataatttt

SEQ ID NO: 16802 - DNA, 267 bp, Zea mays
cccacgcgtccgcggacgcgtgggcagtcagcaaagtatgacaccaaggtctactgcagacagacgctgattggtggcaattacggccttcttgacaccgagactttcgtaccaaacccggattactacagtgccttgttgtggcatcagctcatggggacaggagttctttctgtagacatcagtggttcttcgtacttgcgcgcctacgtgcattgcgccaagcaaaagggtggcgtcactcttctcttgctgaacctgcaccga

SEQ ID NO: 16803 - DNA, 267 bp, Zea mays
ggtcaacccttgggcctattgattaagatgtctcccctggtgtccgagctgcatctgtatgatattgctaatgtcaagggagtcgatgcagatctcagccactgcaacacgcccgctcaggtacttgacttcactgggccctcagagttagccagctgcttgaaaggcgtggatgttgttgtcatccctgccggggtcccaaggaagccgggcatgactcgtgatgacctttttaacatcaacgcgagcatcgtcaagtcacttgtt

SEQ ID NO: 16804 - DNA, 262 bp, Zea mays
ccaagagttggtgatttcaatgagagcacatactacatggagggtaacactgggcatccagtgtttgaaacagcttatggcaaaataggagtgaacatttgttatggaagacatcatccccttaattggcttgcgtttggtctcaatggagctgaaatagtgttcaacccatctgcgactgttggtgaactgagtgaaccaatgtggcccaatgaggcaaggaacgccgcaattgcaaacagctacttcgttggatcaatta

SEQ ID NO: 16805 - DNA, 262 bp, Zea mays
cttgctgcactatccgtgtcaccttatgacaaaaaatatggtgcatttgagacagagaatgagaaagagcgcaacatgcgtctgtccaaccttgttaacttttcgcttgataacaagcgtgaaaacagggaaatgccttcaagaccatatcttctatcagagttggcctccaaaggagtcctttcatgtgcttcccaagaagtgcgagatttgtacaaccttttggaacatgagtttctacctctggatcttgcatcaaaag

SEQ ID NO: 16806 - DNA, 259 bp, Zea mays
cggacgcgtgggccgagaagaggtgccccggcgtggtctcctgctccgacatcctcatctacgccgcccgcgacgccgccagcatcctcagcaacggccacgtccacttcgccgtccccgcagccgcctggacggcttcgtctccaaggccgaggaggcccaggcggagctcccggactccacccacgacgtgcagcagctcatcgacaacttcgccaggaagaacttcaccgtggaggagctcgtcatcctcaccggg

SEQ ID NO: 16807 - DNA, 261 bp, Zea mays
cttcgaaggcctggatggcggggctggtagcttggtcaagtggaaccccgtggccaacgtcgacggcaaggacatctggactttcctgcggaccatggacgtacctgtcaacaccctgcatgctcagggctacgtgtccatcgggtgcgagccgtgcaccaggcccgtcctgccggggcagcacgagcgtgaaggccggtggtggtgggaggacgccaaggccaaggagtgcggcctccacaagggcaacatcgacaagga

SEQ ID NO: 16808 - DNA, 263 bp, Zea mays
cccacgcgtccgctctcctcctcgtcgtcctccgccttccccgaccccgaccgcaagcgcgcctcctccgacgccgaccccggccgctcctccccgctcgccgcgtcctccgacgctgcaccggcacccaaggctcgtgtggtgggctggccgccggtgaggtcgtaccgcaagaacgcgctcgccgacgccgcgggctccagcaaggccgccaagttcgtcaaggtggccgtcgacggcgcgccctacctgcggaaggtgga

SEQ ID NO: 16809 - DNA, 315 bp, Zea mays
caaccgcctagttctttgctctggaaaggtgtactatgaactggatgaagaaagaaggaagtcggagcgcactgatgttgctatatgtagagttgagcagctctgcccgttcccctatgacctcatccagcgcgagttgaagagatatccaaatgccgagatcgtgtggtgccaagaggagccgatgaacatgggagcatacagctacatcaacccgcggttgctgacggcgatgaaggttctgggccggggtggcatcgaggacatcaagtacgtcggcagggccccgtcggctgctaccgcgacgggcttcta

SEQ ID NO: 16810 - DNA, 312 bp, Zea mays
ggcgcacgccaccaacttctaccagctcaccgccgagcggaacgaaactcggcgagtgagagcggaacggcgccgagcaaccaaaccctctcctcgtccgtcgccgtctccccggaccatggccatggccgcctcctcctcccggctgctctgggcgtcccgcgccgccgcctacctcaggatctccacattccccagggccttctccaccgtgatgaaggatctgaagtatgctgactctcatgaatgggtgaaagttgagggtgattcaacaaccgtggggattagtgaccatgcccagcgtgctttggg

SEQ ID NO: 16811 - DNA, 308 bp, Zea mays
cccacgcgtccggagcaccagttcgacctctggttcgacccctccgccgactaccacacctacaccatcatctggaacccgaccaacatcctgttcaaggtggacggcgacgtgatccggtgcttcaagcgctacgccgacctgccgtacccgaacgcgaggcccatggcgctgcacgccacgctgtgggacggcagctactgggccaccgagaagggcaaggtgccggtggactggtccgccgcgcccttcgtcgtctcctaccggggctactccgccaacgcctgcgtcacggcggggcctgctgc

SEQ ID NO: 16812 - DNA, 309 bp, Zea mays
cagcatggcactgtcatcaatgtttaagacaataaatgtgaaagatttgacctccaaggtttcagtctataccagtgctacagagttatctggtggactaaacatgatatttaggcgctgggccacgaaaaggactgctggatcaacaaaaaatggtcgcgattccaatccaaagtatttgggggtaaagaagtttggtggagagaaagtactaccagggaacatcattgtccgccaaagagggacccgcttccatcctggaaactatgttggcatgggcaaggatcatacacttttttgcctgaaaga

SEQ ID NO: 16813 - DNA, 314 bp, Zea mays
ccctcttcctaccattagcagtagccacagccagaacaccagcagacagcagcatcagcagggaggaacacgatgagcggcgccggtccggatctgcagctgccaccggggttccggttccacccgacggacgaggagctggtgatgcactacctctgccgccgctgcgccggcctgcccatcgccgtccccatcatcgccgagatcgacctctacaagttcgacccatggcagctcccaaggatggcgctgtacggcgagaaggagtggtacttcttctccccgcgggaccgcaagtacccgaatgggtccag

SEQ ID NO: 16814 - DNA, 309 bp, Zea mays
cccacgcgtccggtgccactgagcgctatgcggggaacgattggctatatagctccagagatggtatctcgaagctttggtgtcatctctagcaaatccgatgtgtacagctttgggatgctactattggagatgacgggcgggcgaagaaacgcagatcctcatgcaggaagctccagtcaagcatactacccatccttggtgtacaagcagctgagccagggtgatgcaaacatgatcaatgaaggtgttgatatgcacgagttagagaagaagttatgtatcattgggctttgctgcatccagatg

SEQ ID NO: 16815 - DNA, 149 bp, Zea mays
acgcgacaactgcaaggatgtcaacaagacgagatattttaagcttccacgaggtaaccaacaagcaatctatgatggcaatgtttgcctggtcatgaagtattattactttcgttgaaaccgtgatgctattaagacttaattttttt

SEQ ID NO: 16816 - DNA, 267 bp, Zea mays
gttaagaatggtggacttgcacctggtggtttcaactttgatgccaaattgcggagggaaagtactgatgttgaggacatgtttcttgtccatatctccggaatggacaccctggcacgtggcctccgcaacgttgccaagctgattgaggatggttccctagatgatcttgtccgcaacggtaccagagtttgatagtgtacggtgcttatcgaggtgggaaggagctttagacctagaaagaggtctagagtggggtagccactg

SEQ ID NO: 16817 - DNA, 304 bp, Zea mays
atcggcggtccgttctggagcgtgccgacggggaggcgcgacggcaccgtgtccatcaagcaggaggcgctggaccagatccccgcgcccaccatgaacttcacccaactcctccagtccttccagaacaagagcctcaacctcgccgacctcgtctggctctcaggggctcacacgatcggcatctcccaatgcaactccttcagcgagcgcctgtacaacttcacggggcgcagcgggcccgacgacgcggacccgtcgctggacccgctgtacgccgcgaagttgcggctcaagtgcaaga

SEQ ID NO: 16818 - DNA, 300 bp, Zea mays
aacacgcgtccgcggacgcgtggcgaccgtggtcgcgacgcgtgggcgcagctccaaagccactcccaaacccccgcttccagaaccttctcgaagctccccgcaggctccttcactcgcaccgatcgcgaaggaacacatgcgcgtgctcgtcactggcgccgcagaccaattggatatgcctggttcccatgattgctaggggtgttatgcttggtgcagaccagcctgttattctgcacatgcttgacattccgccagcagctgaagcccttaatggtgttaagatggagttggttg

SEQ ID NO: 16819 - DNA, 306 bp, Zea mays
cgcagacgcgtgggtagccgcgcccttcttttccactcctttccagccctacgtctaccagagccagcaaggatctgtgacggcgtttcagatatccggtggagatgtacaggtcctgcaggtgatgctgaagtctcaggagaagctgactgcaaaaccaggtgcaatgtgctacatgtctgggaatatgcagatggacaacaattacttgcctgaaaatgatggaggcgtgtggcagtggatttttgggaaacgtgtaagcagcaccattttctttaattctggatctgatgatggatatgtcgg

SEQ ID NO: 16820 - DNA, 303 bp, Zea mays
ggttactccactgcaaccaggccaatcaacaaggacacttttacaaatgaccccgttccagaatatcagccctggtgcaccaaactcgctactacaggttgctgtgaagaataatcagcagccagtgtggtacttcaatgacaaaattccgctgcatgttttctttggtgaagatggaaaaatggaacgagctggttttcttgaggcctggaaatctttgcctgatgacaatgaatttacaaaagaattcccgggctctgtcatcagcagcatagatgctactgttgagcgctttgcagcttc

SEQ ID NO: 16821 - DNA, 302 bp, Zea mays
aaacacgcgtccgcggacgcgtgggcggaccgtgggcggccactccctagcacatcaaaccctagctccgcccagcccccaaccatgtcggcgatgatgcaaccgcagatcatactgctcaaggagggcaccgacacgtcgcatgggcgcgctcaggtggtgagcaatatcaacgcgtgcacggcggtgggcgacaccgtgcggaccacgctggggcctcgggggatggacaagctcatccacgacgacaagggcggagtcaccatctccaacgacggcgccaccatcatgcgcctcctcga

SEQ ID NO: 16822 - DNA, 298 bp, Zea mays
cggacggtgggcggacgcgtgggcggacgcgtgggcgagccgcgagtggaactgtggaagcgtcgagcttttttcttctttgtcttgctgcgcaagaagaagggaaacgagaggagggaggcgatggcgtagaggctgctcccgtcgctgaaccgggtgctggtggagaagctggtgcagcccaagaagaccgccggcggcatcctcctcccggaaacatccaagcagctgaatgctgctaaagtggtggctgttggccctggtgagcgcgacaaggcaggcaatctgatcccagttg

SEQ ID NO: 16823 - DNA, 296 bp, Zea mays
gtcatctgggttgtcagagagcatgacccttctggaagagatgttgaacttttccgtagcaccattattctgggggaaagggtccaacagtgaaaggtctgaaaggagcggactggctgatgggcttgttatcaaagaaggggaatacaagttggtgaagactagatttagtgctttcttcgcaacacatcttgattctgtcctgaaaactgcaggaataaagaacttggttattgttggagttcagacaccaaattgcattcggcagactgtgttcgatgctatagcactggact

SEQ ID NO: 16824 - DNA, 297 bp, Zea mays
tgatgatgctgtattggaagaacggattactggtcgttggatccactcagccagtggtaggacttaccactcaaaatttgcacctccaaagtctccaggagttgatgatgtaactggagagccattgattcaaaggagagatgacaccgctgaggtcttgaagtcaaggcttgaagctttccacagacaaaccgaacctgtgattgattattactccaagaagggcttagtggtgaacctgcctgcagagaaaccaccgaaggaagtgactgctgaggtgcagaaagccctctcgtg

SEQ ID NO: 16825 - DNA, 296 bp, Zea mays
tctccctctccgaaatcaaggtagcgtacaccgctgcagtttctagagccctttctgccactcgtgatcccactagtcacaatgcctgccctcgccaagcccgcctcccgcaccgccaagcccgccgcggctccgaagccgaagcctgccgccgccaagccgaagcggccaccgctggtgcctcccacccgccttacttcgagatgatcaaggaggctatcacggcgctcaaggagaggaccggctccagctcgcaagcgatcgccaagaccaaggctaagccggcaaaggccgcc

SEQ ID NO: 16826 - DNA, 297 bp, Zea mays
cccacgcgtccggtattcacaaggttgcttatggattatttgaatgattatgcttatgacgcccaagttgctggcctctattatgttgttaagccaaatgacactggttttcaggtaactatggttggcttcaatgacaaaatgagaacccttttggagactgttattggaaaaattgcagaatttgaagttaaggctgaccgtttttctgtgataaaggaagctatgacaaaggagtatgagaatttcaagtttcggcagccataccaacaagtcctatattattgttcgctaata

SEQ ID NO: 16827 - DNA, 279 bp, Zea mays
cccacgcgtccgcccacgcgtccggtttggcgccgggacggagaccacatcggtcacgacagaatgggccatgtcgcttcttctgagccacccggaggctctgaagaaggcacaggcagagatcgacgcggtggtgggcaactcccgccgcctgatcaccgccgacgacgtgccccgcctcggctacctgcactgcgtcatcaacgagaccctgcgcatgtacccggccgctccgctgctgctgccgcacgagtcggcggcggacatgcaaggtcggcg

SEQ ID NO: 16828 - DNA, 278 bp, Zea mays
gcttcaaaagagaactttttgaaaggcattcagactatcaaatctcagggagggaaaatcctttttggaggatctgccattgaatcagaaggaaactttgtgcaaccaacaattgtggaaattacaccttctgcaccagttgtgaaagaagaactctttggtcctgtcctttatgctatgaaatttcagaccttgaaggaagcaattgaaatcaataactctgttcctcaaggattgagcagttctatatttacaaagaggccagatattatttttaa

SEQ ID NO: 16829 - DNA, 277 bp, Zea mays
cccacgcgtccgcgatcttctccttgctgtgggttcgcatcgatccgttcaccacccgcgtcactggcccggatactcgaacgtgtggcatcaactgctagggaggtggaaggtttgtagaaacagagagataccacgaatgtgccgctgccacaaattgtctgttagtaagttatataggcaggtggcgttatttacagctacgtacacacaaggggatactccgtttatcactggtgtgcattcttttgttgatataagttactatatatacgta

SEQ ID NO: 16830 - DNA, 277 bp, Zea mays
ctatcaatccatatggtaaggcaaagaagatggcggaggacatcatcttagattttacaaaatcaaagaagcaatcaaatatggctgtcatgatcttaagatacttcaacgtgattggatcagacccagagggacggctaggagaagctccaaggccagagctacgcgagcatggacggatatccggtgcttgctttgatgcagctttgggaatcattccagggctaaaggttcgtggaaccgattactccactgcagatggaacttgcgttagaga

SEQ ID NO: 16831 - DNA, 272 bp, Zea mays
atctctcccagtgtcccagctcagcttagcaatccgtctctctatctacaggcgggggaattaatagatggagggcaaggaggaggacgttcgcctgggcgccaaccgctactcggagcgccagccaatcggcacggcggcgcagggcacggaggagaaggactacaaggagcctccgccggcgccgctgttcgaggcggaggagctgacgtcgtggtccttctaccgggccgggatcgccgagttcgtggccaccttcctgttcctgtaca

SEQ ID NO: 16832 - DNA, 272 bp, Zea mays
gaggtgggttggcttctcctccccctccggttcgggttcgggttcgtgaggttctccggggttcggtttcgtggctgagcggatcgagatggcggcatcggatgttgagtaccgctgcttcgtcggcggccttcgcatggaccacggacgagcactcgctccacaacgccttcagcacctacggcgaggtcctcgagtccaagatcatcctcgatcgggagacgcagaggtcccgctgcttcggcttcgtcaccttctccacggaggatgcg

SEQ ID NO: 16833 - DNA, 271 bp, Zea mays
cttggttgcatgtttgctggaatgatatttcgcaaggcaaccattcttttatggccatgacaaccatgaccaacttgtgaagattgcaaaggtccttggaacagatgggttgaatgcttatttgaacaagtatcacattgagctggaccctcaacttgaagctcttgttggaaggcatagtagaaaaccctggtcaaagttcatgaatgctgataaccaacatctagtatcacctgaggccatagattttctcgataagctcctgcgctat

SEQ ID NO: 16834 - DNA, 266 bp, Zea mays
cgcttccgtcgagccgggggcgacgtccgtcctgcctcatggggcgtcaagcttaccgccgacgccctcctcgccgacctcgcggacgatgagttcgccctcatctctctaccgggagggatgcctggttcttccacttttggagaatgcaaagttttggagaaaatggtcaaaaaacatgtagagaagggcaagctttatgctgcaatttgcgctgcaccagcaatgactctaggaacttggggtttgctcaatggcttaaaggc

SEQ ID NO: 16835 - DNA, 271 bp, Zea mays
gcgatctggcaaggagctcgagaaggagcccaagttcctgaagaacggcgatgctggtatggtgaagatgattcccaccaagcctatggtggtggagacattctccgcgtatcctcccctgggtagatttgccgtccgtgacatgaggcagacggttgctgttggagtcatcaagagtgtggagaagaaggacccaaccggcgccaaggtgaccaaggcggctgccaagaagaaatgatgcgataccgtgtctgcttttgcagtgcctgga

SEQ ID NO: 16836 - DNA, 271 bp, Zea mays
cacagaggtcttggtggtgtgtccattacttcagattgcttctacaatggtggttggacagaagatgtccgagaggtcattacacacctgcatcacagatatccgaaaaccacactgttttgcattggtacaagcataggtgccaatattgtggtcaagtatcttggagaagaaggcgagaatactcctatagcgggtgcagtatctatttgttctccatgggatctgttgataggtgacagatttatttcccgcaagcttgtacagcgta

SEQ ID NO: 16837 - DNA, 271 bp, Zea mays
gacgcgtggagctcccatatccgctcccctacctctccagcatcctcccgtctccgtcgtctcgtctccgctcctcacctcgccagccatgggcaaactcaagatcggaatcaacggtttcggaaggatcggcaggctcgtggccagggtcgccctgcagagcgaggatgtcgagctcgtcgccgtcaacgaccccttcatcaccacggattacatgacgtacatgttcaagtacgacaccgtgcacggccaatggaagcacagcgacatc

SEQ ID NO: 16838 - DNA, 269 bp, Zea mays
cccacgcgtccgagcgtctctactcctcttcctcctctctctactctccaagttctcttctccgtcgaccgctctacacgtctcttgtcgacctggacaccgaggtggaagaaggaagcagtcagcagatggatccatggatcagcagccagccttctctgagccttgacctgcgcgtcggcctgccgccgctcagcctccaccaccaggcgccggtggccgtcgccttgcccaggcccaagctgctcgtcgaggagaacttcctcctg

SEQ ID NO: 16839 - DNA, 264 bp, Zea mays
cccacgcgtccgcccacgcgtccgcttccacctcaacccgtctggccgcttcgtcatcggcggacctcacggcgacgctggcctcactggccggaagatcatcagtccaggtctcctacgccatcggcgtgccccgagcccctgtcggtgttcgtggacacgtacggcaccggcgcgatccccgacaaggagatcctgaagatcgtgaaggagaacttcgacttcaggcccggcatgatcatcatcaacctcgacctcaagaaa

SEQ ID NO: 16840 - DNA, 264 bp, Zea mays
cggacgcgtgggcggacgcgtgggacatgggtgagctccaccttgccatccggttcacagtcacatcccttatcaatgtgctcttcacatactctaggcctcacttgcccaagacgcactacgcacagcctctgtcaatagttcagcaggaaatgctccgccaccaagctgtgctgcttgttgcgcagcgcctgggacgcatggagccaccagtccgcagggaagttgttgagtttatgtcagatgctcgctctcacctgtgga

SEQ ID NO: 16841 - DNA, 261 bp, Zea mays
cccacgcgtccgattcctaggagagacaccttctctaccagtgttgggttcacttgtccctattgttggcggagttgtattggcgtcgatgactgaagtttcattcaactggattggattctggagtgccatgacttcgaatcttatgaatcaatcgcggaacgtttacagcaagaaaattctcgctgataaagaggacagtttggatgacataaatctcttctcaataataactgtcatggcattcttgttatctgctcc

SEQ ID NO: 16842 - DNA, 264 bp, Zea mays
tgtgaacaccaatgatgttttcaaggagcccaatgatgtcttcaaggagcctggcagcaataagcgtttgaggtcaggatgcaatgatgtgcatgtgccaacatctaaagcttctagggaaaaaatgaggaggaacaagctgaatgacaggtttcttgaattggggtctacattagaaccagggaagccagtaaaagctgacaaagctgctatcctaagtgatgctactcgcatggttattcagcttcgttcagaagcacagca

SEQ ID NO: 16843 - DNA, 302 bp, Zea mays
cccaatcgaacccaccaagccgataccctaaccctcgcccttctcgatgtcggccgccaccaccggcccagccccttcagtagccactccgatggcgccccctccgtcctacccggcctcctccacggcctcttcctccatctccgcgtccgccgaggaggaggaggacctctatggccgcctcaaatcgctccaacgccacatggagttcgtcgaaatccaggaggagtacgttaaagacgagcagaagaacctgaagcgcgaactccttcgtgcgcaggaggaggttaagcggatccagt

SEQ ID NO: 16844 - DNA, 299 bp, Zea mays
aatccaatctagaagcacccctctccctctctctctcttcgccgtccgaagctccgcaccccaatctaatcgacacctcaccgagatgggccgcaagttcttcgtcggtggcaactggaaatgcaatggaaccacagatcaggtcgagaagattgtcaaaaccctgaatgaaggacaggttcccccttcagatgttgtggaggtcgttgtcagccctccttatgtcttccttcctgtggtcaagagccagctgcgccaagagttccatgttgctgctcagaactgctgggtgaagaagg

SEQ ID NO: 16845 - DNA, 88 bp, Zea mays
ctggcttctcctccccctcttaccaagtcctcctagggttagggttccttagggttttgtagaggagcgatggaggcggctgatgtgg

SEQ ID NO: 16846 - DNA, 296 bp, Zea mays
gtcgtacctgctgccgcatctgcactcggggtgggcggtggaccaggccatcctcgccgaggaggagcgcctcgtcatcatccgcttcggccatgactgggacgagacctgcatgcagatggatgaagtgctagcagcagtagctgagaccataaagaactttgcggtcatctaccttgttgacatcacagaggtccctgatttcaacaccatgtatgagctgtacgacccttcgacagtgatgttcttcttccggaacaagcacatcatgattgatctcgggactggaaacaaca

SEQ ID NO: 16847 - DNA, 295 bp, Zea mays
ccaccatgtcgtctgtccaggaggagcttaataacacacaggacatgctccaaggttacgtggagctctacaattacagtctctcctacgtgaagaccatggcgatcgggtgcgcgatccagctaggcatccctagcgccatccaccgccttggtggggcagcaacaatctcggacatcgtcaccgagaccggcgtcgacccgtcgaagctcccgtatctccgacggctcatgcgcgtgcttaccgtctccagcatcttgggcaccacaggcacagatgagagcgacgacagtac

SEQ ID NO: 16848 - DNA, 294 bp, Zea mays
gaggaaggcctatctgatccaaaatctcatgaccagccgttggatagctgctcagcagaaatcaccacaaccaagcgtcgaaggacataatggatgtacacgacgacctggatgtgttgcttcgtaccgagacccagggaaacaaatatttggctgtgagcattacaaaagaaactgcaagcttgttgctgcatgctgcgataagttattcacttgcagattctgtcacgataaagttagtgaccatacaatggacaggaaatcagtgatggagatgatgtgcatgcaatgtct

SEQ ID NO: 16849 - DNA, 291 bp, Zea mays
ggacgtgggtgttcgaggggcttcgcgtcgcaggccgccaagcccaccgggaaggagatcaaggttccaaaggctctagcttggcggcacaggcaactatgccagtgcactgttcctcacagcagctaaatctaatgcattggacaaagttgaatctgagattagagctattgtagaggcttccaagaagagcccgttgttttctcaattcataaaggacttgtcagttccaaaagcgaccagcgtgaaggctatagccgaaatatttgctgacgctgggttttcagatgt

SEQ ID NO: 16850 - DNA, 290 bp, Zea mays
ggaccgtggtgctcgcctcgggtcaaaccctaagcagggagttgatttatccgctgcagccatgagtaagttgcagagcgagtctgtcaaggatgccatctcccagattgttggggatgccaaggagaagaataggaagttcactgagactgtggaacttcagattggtctgaagaattatgatccacagaaggacaagcgtttcagtggctctgttaagttgccccatatccctcgtcccaagatgaaggtgtgcatgcttggtgatgcccagcatgttgaggaggccg

SEQ ID NO: 16851 - DNA, 289 bp, Zea mays
ctcaggttttgctgctctccgaccccgagctccgaagccgcagcatcaggcgcgccccccctcgcgtgtgaccgagatggcgctgccgaatcaggggaccgttgattaccccagcttcaagctcgtcatcgtcggcgatggtggaactggtaaaactacatttgtgaagaggcatctcactggagagtttgagaagaaatatgaaccaaccattggtgtggaagttcatccgttggatttcaccactaactgtggtaagatcaggttctactgctgggataccgcaggc

SEQ ID NO: 16852 - DNA, 292 bp, Zea mays
cagagggttacacatataactactatgaggacctcactccaaaacgagttgttgagattgttgagatgcttagaagaggtgaaacaccccctcgaggtacacagcacccagagcgaaaaaactgtggccctgccggggggaacaccaccttgcacggagagccgaaacctcctccatgcagggatctggatgcctgctaggtttgcttcggagcattacgagcacgcgcataacttggctcgtactgtaaggtgtgcaaactgcacacagcggaggctgtgttatttgtatt

SEQ ID NO: 16853 - DNA, 287 bp, Zea mays
aaagtttataggccgcagtgatactctaccacatgttgatgcacggtatccagccatactattcaaacagcagcttactgcatgtgtcgaaaagatatttgggcagctcagagataatctaaaaaaggaaatatcacctcttcttaatgtttgcattcaggctccaaagtcaacacgtgggcaatctggaaaagcatccaagtcatctggagttggtgcccacccagcatcgaactccaactgggacaatatcgtcaatttccttgacttacttatggatacattgc

SEQ ID NO: 16854 - DNA, 287 bp, Zea mays
gcgtggtgatcgcattgagaactctccttatgtgtttgaaaagggggaaccaagatgtgccagattatctgcaaagcaaaaattgatgataaacaggcaaaggagctcaaggaaaaaatagaggatgagtatcgggtgaacatgattcttgacaatctcccactagttgttcctcttgcaaggcaggataggggtgctactgtttaccaggctggatatcatgttggtgtcaagggccaatacgctggtaacaatgataagaagtcctttatccacaatcacttggc

SEQ ID NO: 16855 - DNA, 289 bp, Zea mays
ctgcaattcacttgtaatgcagagggacacctctggtttaaccactgagaacagggagctgaagctccggctgcaggccatggaagaacaagctaaactccgagatggtacgtagtctttctccggaaggtcttgagccactatcataccaggcccagaaagcgactcactttccctgtttcaagatcattacaaggcaaacgatatcaaccgatcagttatctcctgtcctgaccaactttattctcttgaaaaatactgtagttatcttctgagcagataggtagat

SEQ ID NO: 16856 - DNA, 287 bp, Zea mays
gtctttgaagatacaagacaatttgttggagagttgaatatcacactggtcaaaggcaccaacttggccgttagagacatgctaacaagtgatccatatgttgttttaacgctcggagggcagaaagttcaatcaacggttaaaaaaagtgatctgaatccggtatggaatgaagtgcttaagatatctgttcctcgaaattatggacctctaaaacttgaagtgtatgaccatgatatgttctcagctgatgatatcatgggtgaagcagagatagatctccagcc

SEQ ID NO: 16857 - DNA, 285 bp, Zea mays
cgaacatcatgggctggcttgcaatctctttcgcaaaggacactacgtttctgtacgtggggagattactggaaggatttggtgttggcgtcatttcctatgtggtgccagtatacattgcagagatatctcctcataacatgagaggagcccttggcgctgtgaacccgttgtctgcaacctttggtgtcctgctttcctatgtgcttggcttgtttttcccttggaggcttcttgcattaataggaaccctgccctgcttactgttggtggctggtctattct

SEQ ID NO: 16858 - DNA, 305 bp, Zea mays
gcaaaagctgacatatgggcttgtggagtgatcctctatgtgttgttggcgggctatcttcctttccaagacaagaacatgatggacatgtataagaaaatttgcaaagcagaactcaaatggccaagttggttttcttcagatgttcgaaagcttttgcggcgcatccttcatccaaaccctaatagacgaatatctattgaagaaataagaacacatccttggtttagaattggtcttgatgcaagattgtttgattctacaacgagagatcatgtgcctagtgacatggatttggctttgaa

SEQ ID NO: 16859 - DNA, 308 bp, Zea mays
cgggaaggcttctgttctagcagctcttgactattatatcagcatgcatagcgacattttcatatctgcatctcctggaaacatgcacaatgctttggtggctcaccgaagctatgagaacttgaagaccataaggccaaacatggcactgcttgggcgcacctttgcgaataagagcatggagtggccagagtttcagcaggttgtacaggcaggacacaaaggaagatacgggcaaatccggttgagaaaggcaacgcaatccatctacacttatcctgcacctgactgtatgtgccaaggatagg

SEQ ID NO: 16860 - DNA, 302 bp, Zea mays
  unsure (1)..(302): unsure at all n locations
gcgccccggcgccctctccgccggcggctttgctgggtcccgcgctcctcctcctcctaggctgttctggttggggctgcagcggagggaactaggtaaggcggaaggaaaggggaggtttgacggagagcgcaggncagcggcagcagcgatgccatcgcacgcggatctggaccgccagatctcgcagctgcgggattgcaagttcctgcctgacgcggaggtcaaaacgctatgcgagcaggccaaggcgatcctcatggaggagtggaacgtgcagcccgtgcgttgccccgtcactg

SEQ ID NO: 16861 - DNA, 305 bp, Zea mays
gcgggattcgaatggtgtcagcagaggttctggatttgttgctttcaaatctgctgaagatgctaaccgagctcttacggagatgaatggcaaaatggttggaagcaagcccctttatgtagctcttgcgcagcgtaaagaagacagaaaggcaaagctacaggcacaattttcacaaatgcgtcctgttgcaatggcgccttcagtaggtcctcgcatgcccatgtttccacctggtgtccctggagttggtcagcagctgttctatggtcagccaccaccagccttcatcaaccctcaggctg

SEQ ID NO: 16862 - DNA, 303 bp, Zea mays
ggattctagtcactacaagggtgatcacacctatgtcccagtcactcagaagggatactggcagtttaacatgggtgatgtcctggttgatggaaagtccactgggttttgtgctggtggttgtgcagcaatagcagattctggaacttccttgcttgctggccccacagccattattactgaaatcaacgaaaagattggtgctgctggtgtagtcagccaggagtgcaagactgttgtttctcaatacggacaacagatcctagatcttctgctagctgagacgcaacctgcgaagatctg

SEQ ID NO: 16863 - DNA, 300 bp, Zea mays
gagactagacccgctagctgaggccgggcggcgcgctggacacgaacatgatggggagaaaggcgctcggctgtggtcctcttctcctcctcttggccgccgccgtcgctccggccgagctcagcgtcggggcggcggctgcctcgggcgcggtcacccgggccgacttccccgcggggttcgtcttcggcgtcgggtcctccgggtaccaggtcgaaggtgcagttgcagaggacggaaggaagcctagcatctgggacacattcacacatgaaggctattcccttgacaacgccacag

SEQ ID NO: 16864 - DNA, 305 bp, Zea mays
agcaatcaatatttgctgacattgagaaaatctgtccaaaacattgcatacttgcaacaaacacatccaccattgatttgaatgttgttggcaagaagacaaattctcaagatagaattataggggctcactttttcagccctgctcatattatgcccttgcttgaaattgttcggacggagaagacatcaccacaagctatccttgatctcatcaccattgggaagataataaagaaagtccctattgtggtcggcaactgcacaggatttgcagtcaaccgtacattttttccttacacacag

SEQ ID NO: 16865 - DNA, 304 bp, Zea mays
ggtgaatgcggaagagagcagcgatgacttagctaacccacccaaggtagaggagaagcttggtgctgtccctcatggcctgtccaccgactctgaggttgcccagagggaagctgagtctatctctaggaagactcttaggagctccgccgagaagtttgagttccaggctgaggtgtccagactcatggacatcatcatcaactcactctacagcaacaaggatatcttcctgagggagctcatatccaatgcctctgatgcattggataagatcaggttcctttcccttactgataaggaa

SEQ ID NO: 16866 - DNA, 304 bp, Zea mays
actcactgctcgtcaccggctggccccgcggccccggccagtccatcccctcgctcgctccccaactccagcaggcagatcagatacatccatccattcgcggaccggaaggaaaggaaagggttgaactatgagcgccgtggcggtttcgtcgtcgctgaacccggacgcgccgctcttcatcccggcggcgctgctgcaggtggaggacttctcgccgcagtggtgggacctcatcaccaccactgcctggttccgcgaccactggtcccgcgagcacgcccacctggacgagatggccgag

SEQ ID NO: 16867 - DNA, 303 bp, Zea mays
cgccgcacgcccgcggagacgtccatcttcgccaaggtggccgagttcgagcagcaggtccgcgcggcgctgcccaaggaggtggaggccgcgcgcgcggcgtgtgagagcggcagccccctggtccccaacaggatcagggagtgccggtcctagccggtgtaccggttcgtgcgcgatgaggtcggcaccgagtacctgaccggcgagaggaccaggtcccccggcgagtaactcaacaaggtgctcgtagccatcaaccagcgcaacagcatcgacccgctgctcgagtgcctcaaggag

SEQ ID NO: 16868 - DNA, 303 bp, Zea mays
gcagctttgctggccagggtgtggtctatgagacactccatctaagtgccctcccaaactacactactggtggaaccattcatattgttgtcaataaccaagttgcctttacgactgatccaagagctggcaggtcctcccagtactgcacagatgttgctaaagccctgaatgctcctatattccatgtaaatggcgacgatttagaggctgttgtttgtgtttgtgagcttgcagcggagtggcgccagacttttcactccgatgtggtggttgatctgatttgctaccgccgtttcgggc

SEQ ID NO: 16869 - DNA, 303 bp, Zea mays
cagatcgatgaggcagctctaagggagggtctgccactacgcaagtcagagcatgcattctacctggactgggctgtccactctttcaggatcaccaactgcggagtccaggacaccacccagatccacacccacatgtgctactccaacttcaacgacatcatccactccatcatcgacatggatgccgatgtgatcacgatcgagaactcccggtctgacgagaagctactgtccgtcttccgtgagggtgtgaagtacggagctggcattggccctggtgtctacgacatccactctcct

SEQ ID NO: 16870 - DNA, 300 bp, Zea mays
ctctccattttttcatctcattcggcgccgcggcaccccctgctcgtcactcgcgatggcccggatcaaggtgcacgagctgcgcggaaagagcaagacggatctgcaagcgcactcaaggagcttaaatcggagctctccctcctacgcgtcgccaaggtcaccggcggggctcccaacaagctctccaaaatcaagattgtgcgcacctccatcgctcgcgtgctcaccgttatctcgcagaagcagaagtcggcgctgcgtgaggcgtacaagaagaagaagcttctcccgctcgat

SEQ ID NO: 16871 - DNA, 298 bp, Zea mays
cggacgcgtgggcaagcgacgtacacgactgctcgtcttggatcctttagggttctaactaacaaagcagttgaaaagaatgaagggaagccataccctctatttcagaaagcttttattggtctgactgctggtgcaattggtgcttgtgttggtagtcctgctgatctggcactcattagaatgcaagccgattcgaccctgccagttgcacaacgacgcaactataagaatgctttccatgcactctaccgtatcagtggtgatgagggagtccttgcgctttggaagggtgcag

SEQ ID NO: 16872 - DNA, 294 bp, Zea mays
taccacgcgtccgcccgcgcgtccacccacgcgtccgcccacgcgtcgtgccgcgcgtccgcggaccgtggcgtggggtccgctcttcggggaagctcttctgcgccttgtgggtgatggttgggtgtacgcgttcctcaagggtctcatgggtcggcagaaccgcacgccgaccatcgtggttgtctggtggatggtggtggcgtcgatgttctcgttgctgtgggttggcgtggatgcgttcaccacgcgcgtcagtggcccggatactcggacgtgtggcatgaactgcta

SEQ ID NO: 16873 - DNA, 297 bp, Zea mays
ccctcaggcagctaaatcaggaaatcgtgctgctgagtcagctgtcacatccaaacattgttcagtactatggcagtgatttgtgcaatgagacactctcggtctatctcgagtatgtttctgggggctctatccataagctgcttcaagaatatggtccgtttggggaggcagtgcttcggaattacacagcacaaatcctttctggccttgcatacttgcatgggcggaatacagtgcatagggatatcaaaggggcaaacatacttgtagatcctaatggtgacatcaagcttg

SEQ ID NO: 16874 - DNA, 295 bp, Zea mays
gagaagaaaaatggtgtgatcgagtttgatgagtttattcattccctaagtgtcttccaccccttggcaccaattgaagacaagatcgattttgcatttaggttgtatgacttgagacaaactgggtttattgagcgtgaagaggttaagcaaatggtaattgctattttgatggaatctgatttaaaattatcagatgacttactcgaggccatcatagataagacatttgaagatgctgatgcggataaggatggaaaaataaataaagaggagtggaaggaatttgcgttac

SEQ ID NO: 16875 - DNA, 298 bp, Zea mays
cggacgcgtggcgtgacgcgtgggcggacgcgtggggtccgactcccagccgtcgtctgctgcgtactccgcctccagtttggtctgtttcttagcaagttgctcactcggtagttccaccaactgtcaccatgcagaacgaggagggtaagactgtggacctctatgttcccaggaagtgctcggccacaaacaggatcatcactgccaaggaccatgcctctgtccagatcaacattggccacttggatgcgaatggcctgtatgatggtcacttcacaacatttgctctctctgg

SEQ ID NO: 16876 - DNA, 295 bp, Zea mays
gatttatactttttgcagagagagaagatatggagtcgacaggaaagattttgatggagcggtatgaagtggggaggctactggggaaaggcacatttggcaaggtgcactacgcaaagaatcttgagtccaacgagagtgttgccattaagatgatggacaaggacaaagtgctcaaggccgggctttcggagcagataaggcgggagatcacaacgatgcggttggtggctcataagaacattgttgagcttcatgaggtcatggcgacgcggaacaacatctactttgtcat

SEQ ID NO: 16877 - DNA, 296 bp, Zea mays
cgccgtctgccttctgcgcctccatttcggcctctgtccctcgcaagttcaatctcacctccaaccatgggtaaagagaagtcccacatcaacattgtggttattggtcatgtcgactctggcaagtcgaccaccacaggacaccttatctacaagcttggaggcattgacaagcgtgtgatcgagaggttcgagaaggaggctgctgaaatgaacaagcggtccttcaagtacgcgtgggtgctcgacaagctcaaggctgagcgtgagagaggtatcaccattgatatcgctct

SEQ ID NO: 16878 - DNA, 297 bp, Zea mays
cccacgcgtccggcggaagctgatgaacctcctcctcctcggcgccatctcgttgcccaccgtcggcatggtcgtcccctacggcgccttcttcgtccctgccggctccgggaacgccggcggcgggacctacgcgaaggacaagctgggcaacgacatcacggtggaggcgtggctcaacacgcacggtcccaacgaccgcacgctcgcgcaggggctcaagggtgaccccacgtacctggtggtggagcaggacaagacgctggccacctacgggatcaacgccgtgtgcactca

SEQ ID NO: 16879 - DNA, 297 bp, Zea mays
cctagcgccgccgccgccccaactcgccttgcgtgactgaaagctcgtcggcttccgtccacgcgagaagcgagagcatggacacccaggtgaagcttgctgttgtggtgaaggtgatgggcaggaccggctccaggggtcaggtgacccaggtcagagttaagttcttggatgaccagaaccggctcatcatgaggaatgtcaaggggcccgtccgcgagggtgacatcctcaccctgctcgagtccgagagggaggccaggaggctgcgctgaagccctagcgttcttggtgggc

SEQ ID NO: 16880 - DNA, 266 bp, Zea mays
ctctaggctctagtcctctcgcatccgcagcttccccagccagctagggtttgcagatgacgaccgcagcgcgccccacctgggcgccggccaagggcggcaacgagcaggggggcacccgcatcttcggcccctcccagaagttctcctcccgcgacctcgccgcgcacacctccctcaagccaagaaaagacggtcaacagacccaagaggagttacagaagaggaatctcagggaggaacttgaggaacgtgagcgcaacact

SEQ ID NO: 16881 - DNA, 254 bp, Zea mays
cccacgcgtccgttttttttttttttttttttttttttcagaaaaataggaacattctgcgggttcgccttacatcgatccgagctatttttaatcgctcagagaagtaaattggatgcctggaattatgtttattaatctactctatgaaaaatatctactgccttaagcaggaacctggttctgatggtgccgagcggccataaccagctagtggtgcagcagcaacccctctttgattcagcaagcacctg

SEQ ID NO: 16882 - DNA, 267 bp, Zea mays
ctctaagccaaagcaagttgctaggtcctttgaaccagcaactgaagcttcctcgtctcatcatcgagaccagtaagcaacatggcggctaatctcaagtgggctcctgttctagccctcgtcgtcgtcgttgctgccatggttggcaccacgagcgccggcaacatcgcagtgtactggggccagaacggcaacgaaggcagcctggcggacgcctgcaactccgggctctacgcctacgtcaacatcgcgttcctcacaaccttc

SEQ ID NO: 16883 - DNA, 236 bp, Zea mays
ccagaagctccgggacctggggctgcagttccggccggtcagccagtcgctttacgacacggtgaagaacctccaggagaagggacacctgccggtgctcggagagcggacgacgacggatgccgccgacaaggatgcccccgcggccgagatgcagcagggagggatcgccatccgtgcctgagagggcgatgccacacatgaacacaaagcaatgttcatactgctgccctgca

SEQ ID NO: 16884 - DNA, 263 bp, Zea mays
attgattttgttgctcatgattctctgccgtatgctgatgctagtggagctggtaacgatgtttatgaacatgtaaaaaagcttggtaagtttaaggagactcagcgcactgatgggatatcaacatcggatattataatgcggattgttaaagattataatgagtatgttatgcggaatctggccaggggctacactagaaaggatcttggtgttagttatgtcatggaaaaacgactgcgagtgaacatgggactcaaaaa

SEQ ID NO: 16885 - DNA, 258 bp, Zea mays
ctcgatctcgcacctagggtttcgtctcgccgctctcgtcctccgcgaagatgccgaagaacaagggtaagggaggcaagaaccggaagcgatgaaagaacgaggctgacgacgacaagcgcgacacgtcttcaaggaagacgggcaggagtacgcgcaggtgacccggatgctcggcaacgggcggtgcgaggccatctgcgtcgatggcacgcgccgcctctgccatatccggggtaagatgcacaagaaggtctg

SEQ ID NO: 16886 - DNA, 262 bp, Zea mays
gaagagggttggaggggcttcatgcgaggcaacggaacaaactgtatacgcattgttccttattctgctgtgcaattcagcagttacaacttttacaaaaagagtatattcgaaccatatctaggaactgacctgactcccgtcgcccgcctgatttgcggtggactggcgggaataacatctgtcttcctgacctatcctctcgacatcgtccgaacacggctatccattcagtcagcgagctttgcagaattaggagcga

SEQ ID NO: 16887 - DNA, 260 bp, Zea mays
gataagctatagccatcttcttctcttcgctgaattccagtccaagggccggaataccgtcagagcagagtgagtgggaggaagataagaaaaagatggtgaagctcgcatttggaagctttcgcgagtctttgagcgccgcgtgcgctcaaggcctatgtggccgagttcatcggcacgctgctcttcgtggtcgccggcgtcgagtccgccattggctactcgcaattgacgaagggcggcgctctggaccccgccgg

SEQ ID NO: 16888 - DNA, 260 bp, Zea mays
gccggcagccgcaaccccagcctggactacggattcaagggcaccgagatcgccatggcctcctactgctccgagctccagtacctgggcaaccccatcaccaaccacgtgcagagcgcggacagcacaaccaggacgtcaactccctgggcctcgtctcggccaggaagaccgccgaggccgtcgacatcctcaagctcatgtcgtccacctacatcgtcgcgctgtgccaggccgtcgacctgcgccacctggaggag

SEQ ID NO: 16889 - DNA, 264 bp, Zea mays
cccacgcgtccggttcttggatggcgctgggaaacatcctaggctattcctctggttccacaaacaactggcacaagtggtttccgttccttatgacaaacgcgtgctgtgaagcctgcgcaaacctgaaaggcgcgtttctggtggctgtggtgttcctagtcatgtgcttgactataaccctgttcttcgccaaggaagtgccctacagaggaaaccagaacctcccaacgaaggcaaacggcgaggtcgagactgaacctt

SEQ ID NO: 16890 - DNA, 255 bp, Zea mays
cacccgggtgtagcaacctggccaccaagggcatgggcgccaacctcttcgaccggccgcagcccaactcccccaccgtctacgactggctctacagagacgagaccaggagcaaccaccgctagatcgggcgagatggatggacagtgaagaggccatgtttgctggtccttgtggttatctaaaacgcacgcatgctctattatagctagtcatcactatatatatacttgtgtttgtgtattgttgttcttg

SEQ ID NO: 16891 - DNA, 258 bp, Zea mays
catccatcgattggaacccagatccgcgagccgcagcacaagaaggtgggatcggatcggatcggagcagagcaaaggggacaaccgaccagaatccgccggcgaccaccatgggctccgcgagccgtgccgtctcgtgcctgtgctgcccctgcaagtgcctggcgtgcgggctcctggagctgcctgtgcagcatcctcgtctcgctcgccgtcgtcctgggcgtcgtcgcctcatcctctacttcatcttcaagc

SEQ ID NO: 16892 - DNA, 260 bp, Zea mays
aattatttggcctccgtcagacaaggggagaaagacccgttcgaggcggcggcgatgtcggggcgcggcaatggcggcaagggtctgggcaagggtggagccaagcgccaccggaaggtgctccgcgacaacatccagggcatcaccaagccggcgatccggaggctggctcggaggggcggcgtgaagcgcatctcggggctcatctacgaggagacccgcggcgtgctcaagatcttcctcgagaacgtcatccgcga

SEQ ID NO: 16893 - DNA, 257 bp, Zea mays
cgctccgcttccgccgatcggcttgccccgtcgatttcgccaacccctcgacccgatcgactccattgatcgtacctcgtcgtccggttgtcgatggccaggacatctttcaaaatggagcacgacctcgagaaaaggcagtccgaatctgccaggatcagggataagtatcccgacagaattcctgtgattgttgagaaagctggcaaaactgatgtccccgagattgataagaagaagtaccttgtccctgctga

SEQ ID NO: 16894 - DNA, 261 bp, Zea mays
acgctgggatcaggaaactcttgagaaggttgttgaatccaaaaagatggagtatcagcaatacaaacctaccgatattgtctgcaagtactttcttgatgctgtggagtagaaacagtatggatggttctgggtttgcccaaatggcggcaaagagtgccattacaggcatgcccttccgcctggatacgtactgaaatcacaaatgaaggccttactagaggaagagagtgagaagatagccattgaagatgagattga

SEQ ID NO: 16895 - DNA, 257 bp, Zea mays
caatgagctcttaagctccagaaagagtgtattaaacggaattgtaaatggaattgacattaatgattggaaccctgccacagacaaatgtatcccctgtcattattctgttgatgacctctctggaaaggccaaatgtaaaggtgcattgcagaaggagctgggtttacctataaggcctgatgttcctctgattggctttattggaagattggattatcagaaaggcattgatctcattcaacttatcataccag

SEQ ID NO: 16896 - DNA, 257 bp, Zea mays
cgatcatgtcggcctactgcggcaagtacgcggatgagctcatcaagaatgctgcctacatcggcacccctggcaagggtatccttgctgctgatgagtcaactggcaccattggcaagcgcctttccagcatcaatgtcgagaacgtggaggagaaccggcgggctctccgtgagctcctgttctgctgccctggtgccctccagtacatcagcggtgtgatcctcttcgaggagaccctctaccagaagaccaag

SEQ ID NO: 16897 - DNA, 312 bp, Zea mays
cccacgcgtccggctgcctgctacaaggcgctcaacgagcaccatgtcctcctggagggtaccctcctgaagcccaacatggtgactccaggctccgactccaagaaggtgacccctgaggtgattgctgagtacaccgtccgtaccctccagaggaccgtacctgctgctgtgcctgctgttgtattcctctctggtggacagagcgaggaggaggccacccgcaacctcaatgccatgaacaagctcagcaccaagaagccgtggtccctgtctttctccttcggccgtgccctccaggcgagcaccctc

SEQ ID NO: 16898 - DNA, 256 bp, Zea mays
cgattgtggcatatgcagggttggtggcaaggaaaacttcttccactgtgtgaagtgtgggtcctgctattctgttatactccgtgataaccatcagtgtgtggagaactcaatgaggcagaattgcccaatctgttatgagtatctatttgactcattacaaggaacaagagttctgaactgtggacacacaatgcacttgacatgttttgaagaaatggtggcgcataacaaatacacttgtcgaatatgctct

SEQ ID NO: 16899 - DNA, 301 bp, Zea mays
cctagcacagctagcgcctgctccccttcgtctgtgatcatgtcttgcagcagcggcaagtgcactgcggctccagctgctcctgcgcgcactcatgcaactgcatgtcccctgacgtggagaccgccgccgccagcagcatcaagaccatggtcctcgctgcgccgaccaccaaggccagcgccggccgcttcgaggcggccaccgacggccgcggctgcgactgcaacacctgcaactgctgcaccagctgcggctgctcctgctgcagctgcaactgatgctgcccgctcggcccggc

SEQ ID NO: 16900 - DNA, 272 bp, Zea mays
catcccgctgtcaaccgccgctgccgccaacttcacacgcggcgagctcgccacagcccttcgtaagaatccatacatggtcaatgttattctcggtggttacgataaggatgttggcgcctcactgtactacatcgactacattgcgaccttgcacaagatcgacaagggcgcttttgggtacggatcgtatttctgcctgtctctgatggacaagctgtaccgcccggacatgaccgttgaggaagcggtagacctcgttgataagtgca

SEQ ID NO: 16901 - DNA, 311 bp, Zea mays
gccagccaagtcttgcggtcgcgaagagcaacgcaacaagatggtgaagctcgcattcggaagcgtcggcgactccttcagcgtcacctccatcaaggcctacgtcgcggagttcatcgccaccctcctcttcgtcttcggcggcgcgggttccgccatcgccttcgggcaactgacgaatggcggcgcgctggaccctgcgggactggtggcgatcgctgtggcgcacggggtggccgtcttcgtgggcgtgtccgtggccgcgaacacctccggcggccacctgaaacccgccgtgacgttcggcctgg

SEQ ID NO: 16902 - DNA, 302 bp, Zea mays
cttccgccgcgcttcgccctctcgctccagccgcttcacagcgccgccgctcgcctctccgaccgccgcgagaatgccgttcaagaggttcgtggagatcgggcgcgtggccctggtgaactacggcaaagactatggccgcctcgtcgtcatcgtcgatgtggtcgaccagaacagggcacttgtggacgcccctgatatggtcaggtgccagattaacttcaaacggctctcacttactgacatcaagattgacatcaaacgcgttcccaagaagtcaaccctgatcaaggctatggagg

SEQ ID NO: 16903 - DNA, 302 bp, Zea mays
cttccctttcgttcctcctcgccccagcgacgcgacctcccgtagaccgagcaaggcaacccaccactgagaggcacgcagaggagcaggaagccggagaccaagatgtcgtcggtgttcagcggcgatgagacggcccccttcttcggtttcctcggcgccgccgccgccctcgtcttctcatgcatgggcgcacgtagcgggaccgcgaagagcggcgtcggcgtggcgtcgatgggtgtgatgcggccggagctcgtcatgaagtccatcgtgcccgtggtcatggctggtgtgctcgg

SEQ ID NO: 16904 - DNA, 296 bp, Zea mays
gggccctgctgctctgcgacatggcgcacatcagcgggctcgtcgccgcgcaggaagctgcaaatccttttgaataacgtgatgtggttaccacaaccacgcacaagtccctcagagggccaagggctggcatgatcttctacaggaaaggccctaagccccccaagaagggccagcctgagggtgctgtttatgattacgaagacaagatcaactttgcagtgttcccatctctccaaggtggccctcacaaccaccagattgctgcacttgctgttgctctacagcaaactatg

SEQ ID NO: 16905 - DNA, 300 bp, Zea mays
atccgggacgcgtggcgagacgcgtgggcagaagtatgtcggcgaaggtgctcggatggtcagggaacttttccagatggcccgctcaaagagctcgtgcattagcattcttcgatgaagttgatgctattggtggtgctcgttttgatgatggggtgggtggcgacaatgaggtgcagcgtacaatgttggaaatagtaaaccagcttgatgggtttgatgcaagagggaacatcaaagttctcatggccactaataggcctgatacattggatcctgcacttctgcgtcctggtcgtc

SEQ ID NO: 16906 - DNA, 299 bp, Zea mays
cggacgcgtggcgtgacgcgtggggtcatatctagctatagtagctcccttgagaagcatttgacggaggagccatgtctgaggagaactaccaccaccagctgtttcaccaccgcaagccagaggaggagggcgcctccgggaggtcgactacgagaagaaggagaagcaccacaagcacatggagaagctcggcgagctcggcgccatcgccgccggcgcgtacgccctgcacgagaagcacaaggccaagaaggacccagagaacgagcacgggcaccgggtcaaggaggaggtgg

SEQ ID NO: 16907 - DNA, 297 bp, Zea mays
cggaggctgggatgagagagctaaaattcctgatccagatgcagtaaagcctgatgactgggatgaggatgccccgacggaaattgtggatgatgaagccaccaagcctgagggatggttggatgatgaacctgaggagattgatgatcctgaggcagccaagcctgaggactgggacgatgaggaggatggtgaatgggaggcgccaaagattgacaaccccaagtgtgaagaggcacctggatgtggcgagtggaagaggccaatgaagcagaatcctgcttacaagggcaagtg

SEQ ID NO: 16908 - DNA, 295 bp, Zea mays
gttgcagcacaattgggaacatacttgatcaaggtcactgtggctcttgttgggcttttggtgctgtggagtgcctccaggaccgtttttgcattcacctcaacatgagcattttactttcagtcaatgacctactggcatgctgcggttttatgtgcggcgatgggtgtgatggaggctatcctatagaggcatggcgctactttgttcaaaatggtgttgttacggatgagtgtgatccatacttcgacccggtcggttgcaagcatcctggatgcgaacctgcttatcctac

SEQ ID NO: 16909 - DNA, 286 bp, Zea mays
ggaccgtggtaccaccaccgctcaccgcggtttggctttctcccctcttctgcaccacttctcgctccggattccggattccctcagctctttccctaacgaaggtagccatggcggggagaggtaaggcgatcggctcaggcgccgccaagaaggccacgtccaggagctccaaggctggcctccagttccccgtgggaaggatcgccaggttcctcaaggccggcaagtatgccgagagagtcggcggccgcgcccctgtcctactcgcttgcgtgctcgagta

SEQ ID NO: 16910 - DNA, 275 bp, Zea mays
cccacgcgtccgcccacgcgtccgcctgatccatccaagacagggatcgccatgtcggactcggaggagcaccacttcgaatcgaaggccgacgctggggcgtccaagacctacccgcagcaggctggcaccgtccgtaagaacggcttcatcgtcatcaagaccgtcctgcaagttgtggaagttctaactcaagacttgtaagcatggcacgccaaatgccactttgtcgccatagacatattcaatgggaaaaagcttgaagaaatggtccc

SEQ ID NO: 16911 - DNA, 301 bp, Zea mays
cccacgcgtccggtatccttgagaggatcaaggagattgaggccgagatggctcggactcagaaaaataaagcaacagaatatcatcttggacaactgaaggcaaaactagcaaagttgaggacacaactattagagcctccaaagggttccagcggaggtggagatggttttgaagtcacaaagtttgggcatggtcgtgttgcacttattggatttcccagtgttggaaagtcactcttttaacgatgttgactgggacacattctgaagctgcatcatatgagttcacaacgcttact

SEQ ID NO: 16912 - DNA, 306 bp, Zea mays
cggaccgtgggcggcgaaatggcccccaagcgaggtggcagggcgccggtgccggccaagaagaagacggataaagtgacgaaccctctgtttgagaagaggcagaagcagttcggcatcggcggcgcgttgccgcccaagaaggacctgcaccggttcgtcaagtggcccaaggtcgtgcgtatccagcgccactgccgcatcctcaagcatgcgctcaaggtaccaccggcgctcaaccagttcacccgcaccctcgacaagaacctcgctacgaacctgtttaagatgcttctcaagtaccgg

SEQ ID NO: 16913 - DNA, 305 bp, Zea mays
  unsure (1)..(305): unsure at all n locations
gagaaggaggcgtgcaggttcgcgggcgagcacggcatcagcctggtcaccgtctgccccgtcatcaccgtgggcgcggcgccggcgcccaacgtccgcacgagcatcatcgacagcctctccatgctgtccggcgacgagcgagggctcgccgtgctcaagggcatcgagaagacctccggcgcggtgcagctggtccacgtcgacgacctctgccgcgccgagctgttcctggcggaggcggcggcggccgacacgaggtacatctgctgcggcctcaacacgnacgatctcgagctcgcgcg

SEQ ID NO: 16914 - DNA, 307 bp, Zea mays
gcaataatggccgctcctctatgctcttccgtgtctctcatgctgctactgctagtgctctcggcctcagcggacgggaagctgatccacctccacttctacttccacgaggtcgacgccggcacgcccaacgccaccgtggtcaacgtcgccagcctgcacaagaacgcctcgacgttcggtgacctgaacgtgttcgacaacgcgctgcgggagggggcggacccggcgtcgcggctcatcggcagggcgcaggggatcggggtgcacgcgtcgctggacgaatccggcggcctcaccgccatcg

SEQ ID NO: 16915 - DNA, 308 bp, Zea mays
ctctaggctctagtcctctcgcatccgcagcttccccagccagctagggtttgcagatgacgaccgcagcgcgccccacctgggcgccggccaagggcggcaacgagcaggggggcacccgcatcttcggcccctcccagaagttctcctcccgcgacctcgccgcgcacacctccctcaagccaagaaaagacggtcaacagacccaagaggagttacagaagaggaatctcagggaggaacttgaggaacgtgagcgcaagcactactcttccaaggataagtcctatgccgaaggaagagaccgg

SEQ ID NO: 16916 - DNA, 305 bp, Zea mays
gttgactacgagaagattgtcagggagacctgccgcaacattggttttgtgtcaaacgatgttgggcttgacgccgaccactgcaaggtgctcgtgaacattgagcagcagtcccctgatattgctcagggtgtgcatggccacttcaccaagcgccccgaggagattggagctggtgaccagggacacatgttcgggtatgcgaccgatgagacccctgagttgatgcccctcagccatgtccttgccaccaagctaggtgctcgtctcaccgaggtccgcaagaacggaacctgcccctggct

SEQ ID NO: 16917 - DNA, 306 bp, Zea mays
ctcactgctcgttgccggctgcccccgcggccccggccagtccatcccctcgctcgctccccaactccagcaggcagatcagatacatccatccattcgcggaccggaagtaatcatcaggaaaggaaagggttgaactatgagcgccgtggcggtttcgtcgtcgctgaacccggacgcgccgctcttcatcccggcggcgctgctgcaggtggaggacttctcgccgcagtggtgggacctcatcaccaccactgcctggttccgcgaccactggtcgcgcgagcgcgctcacctggacgagat

SEQ ID NO: 16918 - DNA, 300 bp, Zea mays
tatgataacggatgtttgtgtccctctatccagacttgctgaatgcatatctacatcaaagcgattgcttgatgcgtcgccattgacttgtctggttattgctcatgctggtgatggaaattttcacacaattatcctgtttgatccaagccaagaggaccaacgataggaagcggagagactaaaccatttcatggttcatacagctctgtctatggaaggtacatgcacaggagagcatggtgttggcacagggaaaatgaagtacctggagaaggagttgggcatcgagtcactcag

SEQ ID NO: 16919 - DNA, 306 bp, Zea mays
  unsure (1)..(306): unsure at all n locations
gtcagagcagctgagtacgttaagcagcatcttttcagcaatttaatcaaacacccaaagttcatcactgataccaaggccgctattgctgaaacttacaaccgcacagattcagaatttctgaaagctgatagcactcaaactcgagatgctggctcaactgcctcaacagctattattgtaggtgatcgtttgcttgttgcaaatgttggagattctagagctgttatttctanaagaggacaggcgattgcggtttcaagggatcacaaacctgatcagacagatgagaggcaaagaattgag

SEQ ID NO: 16920 - DNA, 333 bp, Zea mays
ggaactcgcattccgacgcacgcgtccgatgtttatctcaagctccttgtcaagctctaccgtttcttggtcaggaggaccaagagcaacttcaatgctgtcattctcaagaggctcttcatgagcaaaaccaatcgcccaccaatctccatgcgccgccttgtcaagttcatggaaggaaaggagaagaacattgctgtgattgttggcacagtcacagatgacaagaggatccaagaggttccagcaatgaaggttactgccctgaggttcaccgagacggcaagggccaggattgtcaatgctggtggggagtcctcacatttgaccagc

SEQ ID NO: 16921 - DNA, 302 bp, Zea mays
ctcaagctcgaacgcgtcaaggactaccttctcatggaagaggagttcgttgccagccaggagcgcctgcgccccagcgaggataagacggaggaggaccgatccaaggtcgacgacctccgcggcactcccatgaacgtcggatcgctggaggagatcatcgacgagacccatgccatcgtctcctcgtccgtcggtcccgagtactacgtcgggatactttccttcgttgataaggaccagctcgagcctggatgtgcattctgatgcacaacaaggttctgtcagtggttggtattttg

SEQ ID NO: 16922 - DNA, 303 bp, Zea mays
cccacgcgtccgagctaaagatcgagagggtaaataaggacgagcgggcgcgagctagaagagcagctgcaggtactaccatcatcgtcgtcgtcgtcgccaggatgaccgtcgtcgacgccgtcgtctcctccaccgatgccggcgcccctgctgccgccgccaccgcggtaccggcggggaacgggcagaccgtgtgcgtgaccggcgcggccgggtacatcgcctcgtggttggtgaagctgctgctcgataagggatacactgtgaagggcaccgtcaggaacccagatgacccgaaga

SEQ ID NO: 16923 - DNA, 297 bp, Zea mays
gttgccaaagaattccctcccctagccgccgccgccgccgctcgtctccctgagaggtgccgggaccgaggaactggccgagtactaggtagagaatcggtttttcttgtctcagcccggggtctgctgcgtctggtggtggtgaaggggagaaattcgtgagatctgttccggatcaggcgtgcgagctcgggaatcaggggtttcacacatagcttcgtcgatttgaatttgatgtactaatggagtctaagggtggcaaaaagtctagcagtagtcgttctatgatgtatgaag

SEQ ID NO: 16924 - DNA, 300 bp, Zea mays
gggtacagtagttcttgtcttccaaccagctgaggaaggtggcggtggggccaagaaaatgatagaagacagagctgtggaaaacatagatgccatttttgggcttcatatagctgactctgtgcctattggtgtgctggcatccaggccagggcctattatggctgggagtggattctttgaggccgtaataagtggaaagggagggcatgctgcacttcctcatcacactatagattcgatattggctgcctcaaatgttattgtgagccttcagcaacttgtttctcgagaagctga

SEQ ID NO: 16925 - DNA, 297 bp, Zea mays
gtttcgccaggaaaaagatgctgcagtagatggggcaccatctgacactgatggagcagtggctgagacccgagaggaagaaacgacagacaatgttggtgaagcgacatttagctatgaccgcttgatatctaaatctaccgatccagtccgtgggatagattacaaacgcagagaggcatacttatctgatagtgagttccaaagtgtttttggcatgaccaaggatgcattctaccgacagccaaattggaagcaagaactacagaagcgaaaagcagatctcttctaaagaga

SEQ ID NO: 16926 - DNA, 301 bp, Zea mays
cccacgcgtccgcgctctcgcaagtcgccaagccaccgatttgtttacaggcgccggagctcccgacgacgactgagccatgtgcggcggcgcgatccttgccgaactccgcgaaccggcgccgcgccggctcacggagcgggacatctggcagcagaagaagaagcccaagaagggcggcgccggcgggaggcgctcgttcgcggcggaagacgatgaggacttcgaggccgacttcgaggactttgaagccgactccggtgattcggatttggagctcggggaaggggctgacgacgac

SEQ ID NO: 16927 - DNA, 300 bp, Zea mays
gctgccagtagagctctcagaactcgggaaaaaaaatgtcagaggccgccgtgcgtgtgatcggcctatggccgagcccgttcgtgatccgcgtcctgatcgccctgaagctgaagggcgtcgagttcgagttcgtggaggaggtggtgggcaggaagagcgagctgctgctgaggtcgaacccggtgcacaagaagatccccgtcctgctccaccacggcaagcccatctccgagtctctgatcatcgtccagtacatcgacgaggtctggtcctccggcgcgccggccttcctccccg

SEQ ID NO: 16928 - DNA, 296 bp, Zea mays
gaagagtgccgcaagaagatttggttggtggactcaaagggtttgattgttgactctcgtaaaaactccgttcagtcattcaaaaaaccttgggcacatgagcatgagcccttgacaaccttgtacgatgctgttcagtccatcaaacctacagttctgattgggacgtctggagttggaagaacattcacaaaagaagttgttgaggccatggcttccttcaatgagaggcctatcatcttttcactgtcaaatccaacctctcattctgaatgtactgctgaagaagcatataa

SEQ ID NO: 16929 - DNA, 296 bp, Zea mays
cctgtttccgcgcgcgagatcgccgccccgggtgggctctagatcccgatggcctcgcgccgccgcaccctgctcaaggtcatcatcctcggcgacacggggttgggaagacgtctttgacgaaccaatatgtgaacaagaagttcagcaaccagtacaaggctacgattggggcggatttcctcaccaaggaggtgcagttcgaggacaggctcttcactctgcaaatatgggacactgctggtcaggaaaggtttcagagtcttggcgttgcattctaccggggagcagattgt

SEQ ID NO: 16930 - DNA, 292 bp, Zea mays
agcctcccctttcttaatgaagaagagaggaagaagaatcttcattttgttgttgtgggtggtggacctactggagtggaatttgcagcatctttgcatgattttgttaccgaagatttatccaagctttacccctcgattcagcaccttgtcaagatatcgttgattgaagctgcagatcatatactgaccatgtttgacaagaggataactaattttgctgaggataagtttggaagggatggtattgatgtgaaaactggatataaagttgtgaaggtttctaaggatg

SEQ ID NO: 16931 - DNA, 288 bp, Zea mays
cggacgcgtgggtgatcttccagcagctgctgctgcgggcttaactgtggctgaggtcactggaagcaacactgtctctgtggcagaagatgagctcttgcgcattctgattctgctcaggaacttcttgcctgggtaccaacaggtagttcaaggcgaatggaacgtagcaggcattgcccatagagcttatgatcttgaaggaaaaactgttgggactgttggggctggtcgtattggcaggctcttgcttcagcgtcttaagccctttaactgcaacctgcttta

SEQ ID NO: 16932 - DNA, 295 bp, Zea mays
cccacgcgtccgcccacgcgtccgcccacgcgtccgcccacgcgtccgcccacgcgtccgcggacggtgggttgtcaacatttgccacttcatgggtgtgatgcaccgtgacctgaaaccggagaacttcttgcttgcgagcaaggaggagaatgcaatgctcaaggccactgattttgggctttccgtcttcatcgaagaaggaaagatgtacagggacatcgttggaagtgcttattatgttgcgcctgaagtccttaagcggacctatggaaaagagatagatgtttggagc

SEQ ID NO: 16933 - DNA, 291 bp, Zea mays
accacgcgtccgcggaccgtggtgttcaaactctgatgtcgctgagtacaatctgagtttgaaatcacttttgaaggaaaatatatgttactagggtcaagaagctttgcaatttcaattgcataggctttgtcacccatcgtgtatatatacatctcaaacatattgcttgcttctttcagaagtgatttcaaactcagattgcactcagcgacatcagaaaggtcttgatgtgattcttggagctgaaagtgttgcagtgattcttgatgacactgagtatgtatggca

SEQ ID NO: 16934 - DNA, 257 bp, Zea mays
cttgatccatttaaggccttgttcggttaattccgttacacatggattggatggtattggaaaaaattaagaagaagtttgacttccttgggatttaaaccacccaatcccactcaatccatatggattgagagataaccgaacaagctctaaacgcgcaacacttctcttttaggagctatatatactacgtcgatagaatgtatatataggtcctcaaataaaccagccaattaaccaacagaaccatagctcat

SEQ ID NO: 16935 - DNA, 288 bp, Zea mays
tcctggcgctcgccgcgctctacgccgcgcgctgcctgctccgcttccccgccgtgcgcgcagagttccggcaccacgtcgccatgaactacctgttcgcgccgtggatctcgtgcctactgctactggctctgatgaggaccactcatcctctccaactcgcagccatgatggtgacaaagcagctgcagatgatgatgacgatgatgtccagtggcagactgacacttcaattgacgctgcgaacggcgcatgcaagagcagctgagtgcagcaactgctgaaatg

SEQ ID NO: 16936 - DNA, 288 bp, Zea mays
cgaaaagctatgtgatctttgccacatcacattgaacaagaatgctgtcttcggtgacagcagtgcattgtctccgggtggtgtccgcattggcgcgccacaatgacctcgaggggtctactggagaaggatttcgagcagattggggagttcctccaccaggcagtgaccatctgcctgaacatccagaaggagtacggcaagctcctcaaggacttcaacaagggcctggtgaacaacaaggacatcgagaacctcaaggtccaggtggagaagtttgccgactcc

SEQ ID NO: 16937 - DNA, 286 bp, Zea mays
gctctcgaaaccctaggtgcgtgccgaccggcggcggcggcgaggtgatggcgatggacccggacgcggtggcgaaaccttcgtggagcactactaccggacgttcgacaccaaccgcgcggcgctggtggggctgtatcaggagacctccatgctcaccttcgagggccagaagttccagggcccatccgccattgccggcaagctcggatctcttcccttccaggcctgcgagcaccagatcgtcaccgtcgactgcctaccgtcggggccccagggaggcatg

SEQ ID NO: 16938 - DNA, 282 bp, Zea mays
gcatccgcgcgctgggtctgagagcagagcggcatggcgccatggcggcatcggtggcgctgagcagcgggcaccggatgccggcggtggggctgggcgtgtggcggatggagaatgcggacatccgcggcctcatccacacagcgctccgcgtcggctaccgccacctggactgcgccgctgactaccagaacgaagctgaagttggtgacgcgctcgcagaggcattccagaccggactcgtcaagcgggaggacctgttcatcacaaccaagctgtgga

SEQ ID NO: 16939 - DNA, 286 bp, Zea mays
cggacgtggacgtgacgcgtggggcaaccgcaggcagagaaaggggaagcccgccgccgccccggcccccagcaaacagcagatcgggacctctgttctgcgcaatccatccatggcggaggaatcaggccgtcccttgccaaagtttggtgaatgggatgtcaacgatccggcttccgcagacggatttactgtcatattcaacaaagccagagatgagaagaagggtgggaatggtcaagacacagactcaccttccaaggaccccaggactgagagggtggag

SEQ ID NO: 16940 - DNA, 284 bp, Zea mays
ggagaccaccacccagggccacgatgacctcggcaagcgctgcgctaagtactacgaggccggtgcccgctttgccaagtggcgtgctgttctcaagattggccccaacgagccgtcacagcttgccattgacctgaatgctcagggtctggctcgctacgccatcatctgccaggagaacggtctggtgccaattgttgagcctgagatccttgttgatggccctcatgacattgatcgctgcgcttacgtcactgagacagtccttgctgcctgctacaagg

SEQ ID NO: 16941 - DNA, 279 bp, Zea mays
ccaaaccctcgccgtgccgccgcctccgactcctgctccgtccgagcctaccaccacagggcaagggcttcatccagccgcgtgcgagcctgaccgcccagttagacgatgagccgcagcctcggtatcccggtgaagctgctgcatgaggcggcgggccacgtcgtcacggtcgagctcaagaccggcgaggtctaccgcggctccatggtcgagtgcgaggacaactggaactgccagctcgaaaacatcaccttcacggcaaaggacggcaaggtg

SEQ ID NO: 16942 - DNA, 275 bp, Zea mays
ggaccgtggcagcaagctggtgttgcatgagaatgtcactgtaacaccccaccttggagcaagcactgtcgaggctcaagaaggcgtcgctatcgagattgcggaaccgtggttggtgcgctgagaggggagctcgcagcaaccgctgtgaatgcgcccatggtcccagctgagatcctgtcagagctggctccatatgtttctctggccgagaagctcgggaggctggcggtgcagctcgtggccggcgagagcggcatcaagggcgtgaaggt

SEQ ID NO: 16943 - DNA, 281 bp, Zea mays
cccacgcgtccggcacaagatcacggaggaggtcgctgccgcggcggccgtcggcgccggcggctacgtattccacgagcaccacgagaagaagaaggaccacaaggacgccgaggaggccagcggcgagaagaagcaccaccacctcttcggctgaccgtagtaccggccggcgcgcgaccgagctagctagctccggcgcacacaaccacacacctgtttaattctgtactgcatgcgtgtgtaatttgatggttcacaataatgagtccctctccgga

SEQ ID NO: 16944 - DNA, 278 bp, Zea mays
  unsure (1)..(278): unsure at all n locations
ggaccgtggcggnacgcgtggggaactgagagacgatgaggaatacaatgacattgtggaggacatgagggaagaaggacgcaaatatggtaacttggtgaaagttgtaattccacgacctgaccccagcgatgctccagttgctggtgttggaaaggtgtttttggaatatgcagatgtcgagggctcgaccaaagcaaagacggggatgcatgggcggaaatttggcgggaaccaggtggtggccgtgttctatcccgaggacaagttcgctgctg

SEQ ID NO: 16945 - DNA, 279 bp, Zea mays
gtgaggacatgacctccttgcctccgagtactgcagattttgcgctcccgtacagggtgaggagccagccttcgtcgagcccagtacgggatcacaaacagcttcttgacgcctcggaggaaacaagatacgccacggacaaagatgttgacctcccattgtttgagctggaggtgattctggccgccacggacaacttcgcgggccacaaaaggatcggagcaggcggatttggcccagtttatatgggagttcttgaggatggacagcaggtagcag

SEQ ID NO: 16946 - DNA, 281 bp, Zea mays
atcgagaacatacagtacatgcagagagagaatgagtttctgactgctcgtttattaacaatggaagaagaaaccaagatgcttaaagaggcattgacaaagcgaaacagtgagctgcaatcttcaagaagcatgtatgctaagacagcaggaaagctccgaagctttgaagttcatatgttgactggaaaccaacataagagtccaactatgaacatggatattcattttgatggtgcactgagccaaaatggaagcaacccacctagcatgacttccat

SEQ ID NO: 16947 - DNA, 196 bp, Zea mays
cccacgcgtccggagtgtttatcttcgttcgtctcgtgtttgttgttgcccatctgtgtttttgattgaaggtcgctctgtgtcagttgttagtgctgtgttcatcctcggctccagcagacccatgcatcaaccagcatggactgcggatcgatgggtgctgttacccccgtcaggctttattctaagttaaatc

SEQ ID NO: 16948 - DNA, 332 bp, Zea mays
  unsure (1)..(332): unsure at all n locations
ctcgcatttcttcccatccgatccccccttcgcaaccaaaaccccaactcgccccgcatcgatggcgcccaaggccgagaagaaacccgcggcgaagaagccggcggaggaggagcccgcggccgagaacgcgcccgccgggaagaagccgaaggcnagaagcgggtccccgctggcaagtccgctgccaaggaaggcggcgagggcaagaggggcaagaagaagggcaagaagagcgtggagacctacaagatctacatcttcaaggtgctgaagcaggtgcacccggacattggcatctcctccaaggccatgtccatcatgaactcctt

SEQ ID NO: 16949 - DNA, 326 bp, Zea mays
ccaccacctccaatccactccccgcggtggcctcgccgagctgttcttgctccgtcctccctccaactccaagatttgtttcgcacccgattcctgagcttccgcggcgcttcttgctgaaaagaaagctccgagttcttcagttctggatcgatagagaggcggttcctttgcgggctctgaggttcagctctcgctcttgatttgtctcatcgacgcatcagttgggctgcaggcttagagctggaaggaataatttgactagagaaatggggcagtgttgtagcagagctcccgccccggactctggacggggaggcaccaat

SEQ ID NO: 16950 - DNA, 330 bp, Zea mays
ccgtcttctccgccaccgaccccaagcgcaacgcccgcgactcccacgtcccggttctggctcccctccccatcggcttcgccgtgttcatggtgcacctggccaccatccccgtcaccggcaccggcatcaacccggccaggagcctgggcgccgccgtcatctacaacaaggacaagccctgggacgaccactggatcttctgggtgggccctctcgtgggcgctgccatcgcggccttctaccaccagtacatcctccgggctggcgccatcaaggccctcggctccttcaggagcaacgcgtgatgagcggggcttggctgtggag

SEQ ID NO: 16951 - DNA, 326 bp, Zea mays
ccgaggagtacctcggcccagccgcgctgctccacgccaataggtggatacaggacagccgtgaccagttcaccaaggagcgcctggacgccatcaacgacgagttcaagctgtaccgctgccacaccatcaagaactgcacgcatgcctgccccaagggcctgaacccggcgaacagatcgacacgatcaagaagctccagttggacgcctgaaagcggtcatgccttcccttcaagacgaacatggaacaaaacctgtgaaaaattgcccttcttttgcgccgtggttttctacctgacaaataattcccgatttgggggcctc

SEQ ID NO: 16952 - DNA, 326 bp, Zea mays
caagtctatcccaagctgaataaaattcttttcctggatgatgacatagttgtccagagggacctaactggactctgggaggtagatcttaatgggaatgtaaatggagcggtggaaacatgtggagagagttttcaccggtttgacaagtacctcaacttctcaaacccaaatattgctcagaattttgatcctaatgcatgtggttgggcttatggaatgaacatgtttgatctggaagaatggaagaagaaagacattactggaatctaccacaaatggcagaacatgaacgagaacaggctgctctggaaattggggacatt

SEQ ID NO: 16953 - DNA, 328 bp, Zea mays
ggagcaacctggccaccaagggcatgggcgccaacctcttcgaccggccgcagcccaactcccccaccgtctacgactggctctaaagcgacgagaccaggagcaaccaccgctagatcgggcgagatggatggacagtgaagaggccatgtttgctggtccttgtggttatctaaaacgcacgcatgctctattatagctagtcatcactatatatatacttgtgtttgtgtattgttgttcttgttctgctggtgtctccgccgtttaatttgacctatgttatggagtgagtgatatatgtgccgtcactcctagtatatagtag

SEQ ID NO: 16954 - DNA, 323 bp, Zea mays
cacagaagcggcggcggcggagcaaacgcaggcgaaggcgagggtgtgagggaaggagcaccagccatggtgcacgtcaacttctaccgcaactatggtaagacgttcaagaaaccaaggcgtccttatgagaaggagcgtcttgatgctgaactgaagctggttggtgagtatgggctgaggtgcaagcgtgagctttggagggtccagtatgcactgagcaggatccgtaatgctgcaaggcacttgctcacccttgacgagaagaacccccgtcgtatctttgagggtgaggcacttcttcgccgcatgaaccgctatgg

SEQ ID NO: 16955 - DNA, 276 bp, Zea mays
aggacctccagctccccagcccccaggtggtcaagactcaagagacagagagagcatggccgctgctcccatggtggtgccgcgcgtgaagctgggctcccaggggctggaggtctcggcgcagggcctcggctgcatgggcatgtccgcctactacggccctcccaagccggagccggacatgatcgcgctcatccaccacgccgtcgccggcggcgtcaccctcctcaacagctccgacgtgtacgggccgcacaccaacgagctcctcctcgg

SEQ ID NO: 16956 - DNA, 323 bp, Zea mays
gggccggcgcgtcgaacggcggcgtcctcgtggggctcgctgcctgcggcgtgatgatgagcatcgtgtcgacggccgccgacctgatgcaggacctcaagaccgggtacctgacgctggcgtcgcccaggtccatgttcatcagccaggtgatcggcacggcgatgggctgcgtcatcgcgccctgcgtcttctggctcttctacaaggccttcgccgacatcggcctcagcggcagcgagtacccggcgccctacgccatcgtgtaccggaacatggccatcctcggcgtggacggcttctcgtcgctccccaagaactgc

SEQ ID NO: 16957 - DNA, 321 bp, Zea mays
ggatgatgaagagggtagtgaggaggatgaagatgatgacgagtgatggagctcctcgagacaatggaccgtgcttcatccaacaatggagcggctacacaaggccccgtggcgatcacaaaaaagggagctatatccatgtactagaattattcagtttcactccacatcgtgatgttttatttttacttttgtcgtgctataacggatagcgctcctcgttggcgccactggcgggtggttctgcctctggtctggtgtgtttgtgtgtggtcacacttgccagccagcagaggcgcctgcttgtacctagattactgt

SEQ ID NO: 16958 - DNA, 324 bp, Zea mays
gacccacgacatggccgctacctgacggcctctgccatgttccggggcaagatgagcaccaaggaggtagacgagcagatgataaatgtgcagaacaagaactcgtcctactttgtggagtggattcctaacaacgtcaaatcgagcgtttgtgacatcccccctcgtggcctctccatgtcttccaccttcgtgggtaactccacctcgattcaggagatgttccggcgtgtgagtgagcagttcacggccatgttcaggaggaaggccttcttgcactggtacacaggcgagggcatggatgagatggagttcactgaggct

SEQ ID NO: 16959 - DNA, 316 bp, Zea mays
cccacgcgtccggtgctcttacaggtttgacacgtgttagaagattccagcaggatgatgctcatatcttctgcagagaagaccaagtaggttttatttgtgtaaaccatgcctgtttactatcctttagaatggaatgaattcgtgttgtacttccattagtgtatgatgttacgataattaattttatatccttaagtgcttaacacctgcaccctgcatactttctaatttgcattagaaaagtttacaatatggttactgtttcttccttttctctgacagtagatgtactttaaaagattgttttttgttg

SEQ ID NO: 16960 - DNA, 319 bp, Zea mays
ctaagtcctaactacctccacccccgcacgcacaactggccgcaccaaggcaaagctagaagaagacaacgcaaagggagaggacagaggaggagcagaggacgatgggcagcggcggcgctaacactgcccccctcatcaccccctacaagatgggaaaattcgatgtttcccacagggtagtcctcgcaccactgacgagacagcggtcctacggcgactaaaggaggtcttctgatagctgaggccacgggggtttcagacactgcccaagggtacaaggacactcctggcatttggacccatgagcaagtcgaag

SEQ ID NO: 16961 - DNA, 312 bp, Zea mays
cttgttcatgtgagtaggttttctgcatcttagctgttgtggggaaagtgggtagagatgttcgatgaatttggatctgatccatcatttaacttttcatgtaacgccactctggaatgcaggtgtcaacagctgttgtagagccatacaacagtgtcctctcgacccactccttgctcgagcacactgatgttgcagtcctcctggacaacgaggctatctatgacatatgcaggaggtcccttgacatcgaaaggccaacctataccaacttgaacaggctgatcttacagatcatatcatcacttacca

SEQ ID NO: 16962 - DNA, 313 bp, Zea mays
gagctatctggcagtgatttgattggtttgccactgaaatctcctcttgccttcaatgaaacaatatatgctcttccaatgctcactgtcttgactgacaaaggtactggcattgtgactagtgtccctagtgattcacctgatgatttcatggcactgcaagatttagtcacaaagccagcattgagagcaaagtatggagtgaaagatgagtgggttcttccttatgagattataccaataatccacattcctgaatttggagacaagtcagcagagaacgtttgccatgatcttaagattaaaagccaga

SEQ ID NO: 16963 - DNA, 315 bp, Zea mays
gtacaatgatggtctagatcagtatcgcctgtctccagcacagctgcgtgaagagtttgccaggcgcaatgctgatgcagtatttgcctttcagcttcgcaatcctgtacacaatgggcatgctcttcttatgaccgacacacgcaaacgtctccttgagatgggttataaaaaccctgttcttctgctccatccactgggaggattcacaaaagcagatgatgtgcctcttagttggagaatgaagcaacatgagaaggttcttgaggaaggtgtcctcaacccagaatcaactgttgttgcgatctttccctc

SEQ ID NO: 16964 - DNA, 312 bp, Zea mays
ggaaccgatgcgcgtgctcgtcactggcgccgcaggcaaattggatatgctcttgttcccatgattgctaggggagttatgcttggcgcagaccagcctgttattctgcacatgcttgatattccgccagcagctgaagcccttaatggtgttaagatggagttggttgatgctgcatttcctcttctgaagggagtcgttgcgacaactgatgttgtggaagcgtgcactggcgtgaatgtggccgtcatggttggtggattccccaggaaggagggaatggaaaggaaagatgttatgtctaaaaatgtt

SEQ ID NO: 16965 - DNA, 300 bp, Zea mays
cccaagcgtccgcacacgcgtccgggacctggccagggtttcagcggacagatatcaccgagatctgccagcgtgcgtgcaagtatgccatcagggagaacatcgagaaggacatcgagcgggagaggcgcaagaaggacaaccctgaggccatggaggaagacgaggtggacgacattgccgagatcatggctgcccacttcgaggagtccatgaagtacgcccgccgcagtgtcagtgatgccgacatccgcaagtaccaggccttcgcccagacactccagcagtcccgtgggtttg

SEQ ID NO: 16966 - DNA, 294 bp, Zea mays
cagcttcgagaacaagattgcctgccgacgcggaggaccaagcgaaaggggaactagagcaagatgggcggcgcactgctgcttgcgctcctcctcgtctctgctgctgccgcccctcaggtacttggagttggcaatggagacaatcacatgagaatcatccaggaggacatcatcgagacagtcaacaaccatcccagtgctgggtggacagcctcacgtaatccttacttttcaaactataccattgcgcaatttaagcacatacttggagtgaaccagcaccacagaatg

SEQ ID NO: 16967 - DNA, 298 bp, Zea mays
ctcccacctggaggacctggagaagctgggcctgggccccttggaggtctaccgcgccgacctcgccgaggaaggcagctacgacgaggccgtcgccggatgcgactacgccttcctgctcgccgcgccggtcaactacacgtccaagaaccctgagaaagagctgatggagctcggcgtccaaggcactctgaacgtgatgaggtcgtgcgtcaagtccggcacggtgaagcgcgtggtcctgacctcgtcgacggccgccgtctccagcaagccgctggaaaacgacgggcacggg

SEQ ID NO: 16968 - DNA, 292 bp, Zea mays
caaattttgccagaaactaggtggtgcacagctgagatcatgtgtgatctcctttcatttgaagctgacagaagagctgttaacattacaataaatagtattggtactgagttgacaagagatgaccgcaggaagctgtactccaactttggtttattgtatccatatggccacgaagaattggccgtttgtgaagatgttgaccaggttcgtggtgcaatggagaagtacccaccataccagtctatattttccaggatttcatatggagaaagtcagatgttggataagg

SEQ ID NO: 16969 - DNA, 292 bp, Zea mays
atttcttgtgtcagtcttcctctccctctctccgatcctctctactagcagagaggcaagttcaatcttctagctagcagcatcggagaaggcagagctcgactgacacaatggcgggaggccagctcaacgtgctgaccacactcgaccaggccaagacacaatggtaccatttcatggcgatcgtcatcgccggcatggggttcttcaccgacgcatacgatttgctctgtatcgcactcgtgaccaagctcctcggccgcatctactactccgaccccacctccaagga

SEQ ID NO: 16970 - DNA, 291 bp, Zea mays
gaaggatggtgctggatttagaggtcaagtaaaactcactggcttgtcgaatggggatatcgaccttactaattctctttggacatatcagattggtttgaaaggtgagttttcaaggatctattctcctgagtatcaaggatctgctgagtggagtagcatgcacaatgatgacacagtttcacccttcacatggttcaagactatgtttgatgctccagaaggtaatggccctgttgccattgatcttgggagcatgggaaagggccaggcttgggtgaatgggcatct

SEQ ID NO: 16971 - DNA, 293 bp, Zea mays
gtttgatggtatttacaaagagcatctggatggagtgcgccctggcggagagaaagtttaccatgtcttcgacaatcaatttcctgtagctattaaacgattgcagtttgataaacaactctctatggaaaatgtgaggaagcttataacagaggctgatggataccagcctcacttgatagctccagaacaaggatatagacgccttatagaatcttgtcttattagtatcagaggtcctgctgaggcggctgttgacgcggtccatgcaattctcaaggaccttgtccgca

SEQ ID NO: 16972 - DNA, 293 bp, Zea mays
gtgccagtattcaatcttgaagatatagaggagggagttgaaggcgctggatttgatgatgagaaatcacttcttatgtctcaaatgagcttggagaagagatttggccaatctgcagcttttgttgcgtccactctgatggaatatggtggtgttcctcagtctgcgactccagaatctcttctgaaagaagctatccatgtcataagttgtggctacgaggacaagactgaatggggaactgagattgggtggatctatggttctgtgacggaagatattctcactgggtt

SEQ ID NO: 16973 - DNA, 300 bp, Zea mays
agacgagatcctgcttatcagcgttaacgaccccttcgtcatgaaggcgtgggcgaagacctaccccgagaacaagcacgtgaagttcctcgccgacggatctggagcgtacaccaaggcgctcgacctcgagctcgatctcacggacaaagggctgggcgtgcgctcgaagaggttcgctctcctggccgacgacctcacggtcaccgtcgcaaacatcgaggaaggcgggcagttcacgatctccggcgctgaggagatcctgaaggcgctttagaagctccgtctcctctagaagcg

SEQ ID NO: 16974 - DNA, 289 bp, Zea mays
cggacgcgtggggaatttgttaattttgaacgttaccgggatttgattaagcatcgtcgcagaggatgtcggtacctttttggtttctctgttctacttgctgttgctgtagaaatttcatatcttgcatccatttacatcacttgagggattgtcctaatgcacactttaattgtttctaaattggtacagaaaaagggtgctatttcttaattcaaagcactagttaactgaacatttacctagcttcttttcacagtttctgatgaggccggtttgcagcatgttg

SEQ ID NO: 16975 - DNA, 288 bp, Zea mays
attgtactagcaggtgaagaaactgaattactagttggtctgcaaaatgagggtgaatcgactttgaatgttgttgctgttcattcaactctccatcttccttttgaccataatatgtatggccagaaccttactgttcagaatttcttcaacgcatcagttcctgtttctgtgcaagcaaccttcccttataaattcgttgtgagcaagttcttgcagcctggagcttatgatctggttggttacatagtgtatgagatcgaccagcacccttaccagaatgtattc

SEQ ID NO: 16976 - DNA, 289 bp, Zea mays
tgactgactagtgactcagctccacccacatcccccttcgtcgtcttctccctccctgctagctgacctccaatccacgataaggcaagataagctagctaggaaggcaagggatccgatggacaagtacgagcccgttcgcgagatcggggcgggcaacttcggggtggccaagctgatgaggaacaaggacacgagggagctggtggccatgaagttcatagagcgaggaaacaggatcgacgagaacgtgttccgcgagatcgtgaaccaccgctccctccgccac

SEQ ID NO: 16977 - DNA, 336 bp, Zea mays
  unsure (1)..(336): unsure at all n locations
ctgcctgctacacccctgccaagatccatctttccggttccgccgcctgatcgaagtgaacaagcaaggaagagccatggcgagcgagcacgcggcggggggcgatgctaagcatcaccagaagcagagcctgatggacaaggcgaaggggttcgtcgcggagaagatcgcgcacatccccaagcccgaggccacgctggacggcgtgacgttcaagggcctgagccgggagtgcatcacgctgcacagcagcgtgaacgtgtccaacccctacgaccaccgcctcnccatctgcgaggtgacctacacgctccggtgcgccggcaaggaggtggc

SEQ ID NO: 16978 - DNA, 327 bp, Zea mays
cccacgcgtccgggaggaagcatgcgccctcctcagctcttccacacaccactatctggatgtcaggatgtgggaggattttgacaagggccatgtcgccggtgctcggaatgttccctactacctctccgtcactccgcatgggaaggagaagaatccccagtttgtggaacaggtttccgcgctctacgccaaggaccaaaacttgattgtgggttgccgctctggcatccggtccaaactcgccactgcagacctcgtcaacgcgggcttcaccaacgtgaggaacctacaaggcggatacctttccttgctccgaagcgcaaa

SEQ ID NO: 16979 - DNA, 326 bp, Zea mays
cctatccactgcggcctggacgcgtgcgagagacttgaccaagcagcagcagcagggatggcgcctctgaagctgtacgggatgccgctgtcccccaacgtggtgcgcgtggccaccgtgctcaacgagaagggcctcgacttcgagatcgtccccgtcgacctcaccaccggcgcccacaagcagcccgacttcctcgccctcaaccctttcggccagatcccggctctcgtcgacggagacgaagtcctcttcgagtcccgtgcgatcaaccggtacatcgccagcaagtacgcgtcggagggcacggacctgctccccgcgac

SEQ ID NO: 16980 - DNA, 327 bp, Zea mays
caaggtccaccaactcgatctcatcacccgtttcatcccccactgcagaggatgcacggtctccgtctgcttctgtgttgatgatgacaaagtttgctgacttgcctagggttgcgacatcagagaagaaggaatacccagtggatccatcccttccggacatcaagaacagcatctatgcttctgatgagttccgcatgtactcgttcaaggttcgcccttgctcacgggcatactctcatgactggactgagtgcccctttgtccacccaggagagaatgctcggcgccgagacccccgcaagtaccactacagttgtgtgccat

SEQ ID NO: 16981 - DNA, 329 bp, Zea mays
agcaccagtccccaattatttggcctccgtcagacaggggagaaagacccgttcgaggcggcggcgatgtcggggcgcggcaagggcggcaagggtctgggcaagggtggagccaagcgccaccggaaggtgctccgcgacaacatccagggcatcaccaagccggcgatccggaggctggctcggaggggcggcgtgaagcgcatctcggggctcatctacgaggagacccgcggcgtgctcaagatcttcctcgagaacgtcatccgcgacgccgtcacctacaccgagcacgcgcgccgcaagaccgtcaccgccatggacgtcgt

SEQ ID NO: 16982 - DNA, 329 bp, Zea mays
gttgaaaaggcacctttggagtcttatgctgacattggtggcttggatgctcaaattcaagaaatcaaagaagcagttgaacttcccttaacacatcctgagctatatgaggacattgggatcaggcctccgaagggagttatactatatggggaacctggaacagggaaaactctactcgcaaaggctgttgccaattctacttcagcaacgttcttgcgtgttgttgggagtgaattgatccaaaagtaccttggtgatggtcccaagcttgttagagaattgttcagggtggctgatgatctttctccttcaattgtctttattga

SEQ ID NO: 16983 - DNA, 328 bp, Zea mays
gggagcgtggctttggtggtgtggttagttttgaggttgctggagactttgatgccacaaggaaattcatcgattctgttaagatacactatcatgccccttctttcggaggctgtgagagcataattgatcagcctgctatcatgtcctactgggattcaaaggagcagagggacatctatgggatcaaggacaacctgatcaggttcagcattggagtggaggattttgaggaccttaagaatgatcttgttcaggccctcgagaagatataagctccaatccatttgcattaataaagttatgaggtgatggttgtctggatctt

SEQ ID NO: 16984 - DNA, 315 bp, Zea mays
  unsure (1)..(315): unsure at all n locations
ggttttgctgctctccgaccccgagctccgaagccgcagcatcaggcgcggcccccctcgcgtgtgaccgagatggcgctgccgaatcaggggaccgttgattaccccagcttcaagctcgtcatcgtcggcgatggtggaactggtaaaactacatttgtgaagaggcatctcactggagagtttgagaagaaatatgaaccaaccattggtgtggaagttcatccgttggatttcaccactaactgtggtaagatcaggttctactgctgggataccgcaggncaagagaagtttggtggcctcagggatgga

SEQ ID NO: 16985 - DNA, 322 bp, Zea mays
gtttcttcacaaccaaggcatggaatgcacaaaatgctggagctgctgcagttcttgttgtggatgacaagtcggaacctctaatcacaatggacaacccagaagaaggcaaagagcacctagaaaacatcactattccctcagtgcttataacaaagaaattgggggaaaaccttaagaaatccgcggaaaatggcgatatgctcagcgttcttctggactggagagaatcccttccccatcccgatgagcgtgtagagtatgagttctggacaaacagtaatgatgaatgtggtcctaaatgtgatatgcaaatggactt

SEQ ID NO: 16986 - DNA, 322 bp, Zea mays; identical to SEQ ID NO: 16716

SEQ ID NO: 16987 - DNA, 323 bp, Zea mays
gaagctgccagatggatctcttatggatattgttaaagtctatccacttgatgctgtctacgattcccctgatgatgttcctgaagatgtcaaatcgaacaaaagatatgcaggggcatcaaactggacagtaaaggaagttgttgaatcagtgaggaatgattttggcagcattgacatactactgcattctcttgctaatggcccagaggtaacgaagcctttgttggaaacctcaagaagaggctatcttgcggcaatttctgcatccagttactcctatgtttcattgcttcagcacttccttcctataatgaattccg

SEQ ID NO: 16988 - DNA, 328 bp, Zea mays
ctcctcgcattttccttgcaaccgattgcctatccccctcccaaccaaagaccgatggcgcccaaggccgagaagaagcccgcggcgaagaagccggcggaggaggagcccgcggccgagaagacgaccgccgggaagaagcccaaggcggagaagcgggtccccgcgggcaagtccgccggcaaggagggcggcgagggcaagcgtggcaagaagaagggcaagaagagcgtggagacgtacaagatctacatcttcaaggtgctgaagcaggtgcacccggacatcggcatctcctccaaggccatgtccatcatgaactccttca

SEQ ID NO: 16989 - DNA, 329 bp, Zea mays
attgctacagtgctagtcctcttgagatgcctgatgtgccaaccataaccctgacatttgctgcggacaagagcttgcaagctgttaatcctatcttgccatttaatgacaaacagggggcacttgccgggttctgcttagctgtgctgccatcaacagaacccattggaattattgcccagaatttcctggttggataccatgttgttttcgacagagaaagcatgaagctgggctggtaccgctccgaatgccacgacgttgaggacagcacgacggtgccgttgggcccatctcagcgcgacagtccagaggacccgttgccgtcg

SEQ ID NO: 16990 - DNA, 327 bp, Zea mays
ctcctatccactgcggcctggacgcgtgcgagagacttgaccaagcagcagcagcagggatggcgcctctgaagctgtacgggatgccgctgtcccccaacgtggtgcgcgtggccaccgtgctcaacgagaagggcctcgacttcgagatcgtccccgtcgacctcaccaccggcgcccacaagcagcccgacttcctcgccctcaaccctttcggccagatcccggctctcgtcgacggagacgaagtcctcttcgagtcccgtgcgatcaaccggtacatctgcagcaagtacgcgtcggatggcacggacctgctccccgcga

SEQ ID NO: 16991 - DNA, 317 bp, Zea mays
cggacgcgtgggtgtgatcaaggcagcctgggacgtgctcgatgagaggggatccactgacacagggctcctggagctcagtaaactgttcagagcctgcaagagcgtcaagcacgctgattcgattgcaggctggctacagacggcattcacctacactgccatggtggactatccaacaccggccaacttcctgatggatttgcctgcctaccccgtcaaggagatgtgcaagatcatcgacgggttcccggcaggcgccgacatcctggaaaaggtgttcgcggcggcgaacctgtactacaactacacaggag

SEQ ID NO: 16992 - DNA, 316 bp, Zea mays
gggcgaaacccacaaaccctctcccttctgtactccggccgacacatccaggggcgatgacgctgggtagctccggcgccggatcgagcgtcgtcgttcctcgaaacttcaggctattagaggagctcgagcgtggagagaagggcattggtgatgggacagtgagctatggaatggatgatgctgatgacatctacatgcggtcatggactggtaccatcattggccctcacaatactgtacatgagggtcgcatctaccagctgaagttgttttgtgacaaagactatccggagaagccaccatctgtcagatt

SEQ ID NO: 16993 - DNA, 314 bp, Zea mays
ggctgctgttaacaaatctacggcgagaaagtcctcattcagtttgaggacttcgcgaatcataatgcttttaatttgcttgcaaaatatagcaagagccatcttgttttcaatgatgacatccagggcacagcatcagtggtccttgcaggtttgttagcagcactcaacgtggttggtgggaccttggcagagcacacttatttattccttggtgctggggaggctggaactggtattgcagaactcattgctcttgagatttcaaaacagacgtcggctccaattgaagagtgccgcaagaagatttggtt

SEQ ID NO: 16994 - DNA, 319 bp, Zea mays
attgagagagccagagaggtgggcagatggcgacaccgtcgtcgtcgctttgctccagcttcgcctccctgcggaccgcctccatcggccacccccgcggcatcgcgtcatctacgcccaggaaggcgttccaagtgagggcatcagctcgggttgacaagttctcaaagagtgatatcattgtgtccccttcgattctgtctgcaaacttcgccaagcttggtgatcaggtaaaagccgtggaggtggcaggatgtgactggattcatgtcgatgtcatggacgggcgctttgtgccaaatatcacaattggaccttt

SEQ ID NO: 16995 - DNA, 319 bp, Zea mays
gggagtccaacacctcgtgtgaaaatttgcgactttggttactcaaagtctgctttgctgcattccaaaccaaaatcaacagttggaactccagcatacatagcccccgaggttctttccagaaaagagtatgatggaaaggtagcagacgtttggtcctgtggtgtcacgctgtacgtgatgctcgtgggatcatatccatttgaagatcctgaggatccaaggaacttccggaaaacgatcagcagaattcttgacgtgcaatactccatcccggattatgtgagagtgtcttcagactgcagacgccttctgtctc

SEQ ID NO: 16996 - DNA, 319 bp, Zea mays
cgcaaacgcctccttgagatgggttataaaaaccctgttcttctgctccatccactgggaggattcacaaaagcagatgatgtgcctcttagttggagaatgaagcaacatgagaaggttcttgaggaaggtgtcctcaacccagaatcaactgttgttgcgatcttcccctctcctatgcattatgctgggccaactgaggttcaatggcatgctaaggctcgtattaatgctggtgcaaacttctatatcgttggaagggatcctgctggtatgagccaccccacagagaaaagggacctctatgatgctgatcacg

SEQ ID NO: 16997 - DNA, 183 bp, Zea mays
ggggagaggatgtggttcatcctctgaaggtttctctggaggatttgtacaatggcacatcgaagaagctctctctgtcccgcagtgttctctgctccaagtgcaatggtaagggttcaaagtctggagcttcatcgaggtgtgctggttgccaaggttctggctttaaggtccagatccggg

SEQ ID NO: 16998 - DNA, 334 bp, Zea mays
ccatagacactaaggaactggtacctgcagtacggtcggaattcggtcgacacaccacgggacctggcggacgcgtggcggaccgtggcggaccgtgggtgctgctgtcccaactgagcggtaaggacatcaccgagatcattgccgcagctagagagaagtttgcttcagtcccatgtggcggcggcggtgtggctgttgcggcaggtgcacctgctgctggcggactgctcctgcagctgaggcaaagaaagaagagaaggtggaagaggaggggagaagcgatgatgatatgggcttcaagctcttcgactaggttgcacagtcatcacag

SEQ ID NO: 16999 - DNA, 109 bp, Zea mays
gcgagaagtcaactcggtcaacgacaaccctgtcatcgacgtccaccgtggcaaggcgctgcacggcggcaacttccagggcaccccgatcggcgtgtccatggacaac

SEQ ID NO: 17000 - DNA, 283 bp, Zea mays
ggacctggggaaaaaaaaaacgccgcgacgagccgacgagcaacgacgaccatggcgacgatggccgcttcttcctgccacgagcaacttctcctgtttctcctcgtggccgtcgcgtcggcctgcctcggctccgcggcagcgcatcaagccggatctggagagggctacacgatcgctggccgcgtcaagatcgatggcacgagcgtgaagggctttggtcttgcaacaaagacatcaaacacaaaagtgatacttaatggcggccagagggttacatttg

SEQ ID NO: 17001 - DNA, 284 bp, Zea mays
ctcgagaacggcgtcctgagaggaggtcgagggaaagtgggtcacccaaggtcctgttgatgtagacattggtgccaatccatccgccgagggtggtgaggatgaaagcgttgatgacacagccgtgaaggtggttgatattgttgacacattccgtctacaggagcaacctccttttgacaagaaatcatttgtctcttacataaaaaaatacatcaagaatctcactgctgtgttggagccagagaaagcggatgagttcaaaaagggtgtcgagggtgcaa

SEQ ID NO: 17002 - DNA, 282 bp, Zea mays
cccacgcgtccgaaatgagcttgcactgatgattgcacggctttacactggttgcaatgacattatctctcttaggaatggataccatgggaatgctgctggaacaatgggtgctactgctcaatccaattggagattcaatgttgttcagacgggagtacaccatgcgcttaatccagaccccttcagaggtgcttttggttctgacggggagaaatacgccagagatgttcaggaaatcatcgaatttggaactacagggagagttggtgggttcatttc

SEQ ID NO: 17003 - DNA, 284 bp, Zea mays
ctccaaacaggactgggatggattgtttaagatggatcagctgaaaaaggaactaggtaaagggtgcacatttgatggttgggttgaagggcctatcaccttccccccaacgtataaatacgagtttaactcagaaaaatatgtaagtgacgcgacgaaatctgggagaagaacacccgcatggtgtgaccgcatcctctcgtatggggaggggacaaggctactttcatacaacagggcggacttatattatctgatcatcgaccggtgactgcagtttatat

SEQ ID NO: 17004 - DNA, 195 bp, Zea mays
aaaatgagctcgtagaatcagctgcagagatgctttatgggctgatccatgcacgatacattctgaccagtaaagggctggctgcaatgctggagaagtataggaactatgacttcgggcggtgccgcgtgtttactgctgtggtcaaccatgcctgccggttggacaatcagatattcatcgatctagtaccgg

SEQ ID NO: 17005 - DNA, 279 bp, Zea mays
cgtctgtacatggaagcgcgccccttggaggagggtctcgctgaggccatcgatgacggccgtattggcccacgtgatgatccgaagtgcgctcccagatcctctctcaggagtttgggtgggacaaggacctggccaagaagatttggtgttttggacctgagaccactggcccgaacatggttgtcgatatgtgtaagggagtgcagtatctcaatgaaatcaaggattctgttgtggccggtttccagtgggcatcaaaggagggtgcactggctg

SEQ ID NO: 17006 - DNA, 279 bp, Zea mays
caagcacaaccgtctgtacatggaagcgcgccccctggaggagggtcttgctgaggcaattgatgatggccgcattggcccacgtgatgatcctaaggtgcgctcccagatcctctctcaagagtttgggtgggacaaggatcttgccaagaagatttggtgcttcggacctgagaccaccggcccaaacatggttgttgatatgtgcaagggagtgcagtatctcaatgaaatcaaggattctgttgtggctggtttccagtgggcatcgaaggaggg

SEQ ID NO: 17007 - DNA, 274 bp, Zea mays
ccacgcgtccgcgacctggccgaccgccgtcactgaatcctcagatcacggctagccgtaatcacgacactctgctgactcccggcgagcagtgtaacatttaccttcagccatgggcaaggagaagactcacatcaacattgtggtcattggacatgtcgactctggcaagtcgaccaccactggccacctgatctacaagctcggcggtattgacaagcgtgtgattgagaggttcgagaaagaggccgcggagatgaacaagcggtcattc

SEQ ID NO: 17008 - DNA, 281 bp, Zea mays
gaccgatggagaaggggagcgccccggcgatggccctggcgctcgccatgcttctcgcctgctccagcatcgctgccgtcacggcgcaggagaccgagcggatcgaaggaagcgctggtgatgtgttagaagataaccctgttgggaggctcaaggtctttgtctatgatctccccagcaaatacaacaagaagctgctgaagaaggatcctaggtgcctgaaccacatgtttgccgccgagatcttcatgcacaggttcctgttgtcgagtgctgtccga

SEQ ID NO: 17009 - DNA, 275 bp, Zea mays
ccgtgttcttcctcttcgtggccgcgcccagcgtggcgtccatggcatgggccaagatcaacggccagttcgacaacggcgcccggatcgcctacttcatcgcgctcttcctctacatgtcactggcggtgcgcatcaacttcttccggggcttccgcttctcgctggcgtggtgggcgtacacgttcccgatgaccggcgcgtccgtggcgacgatcacgtacgcgacggaggtgaccaacgtgctgacccgggcgctctccatcgggctgtcg

SEQ ID NO: 17010 - DNA, 277 bp, Zea mays
cagaacttgaagggtttgcaggacaagatggagctggtggccatcgatctgcaggacaaaccggcttggtacaaggacaaggtttacgcacagggcacggtgccttccctggagcacgacagcgaggtcagggggcgagagcttggacctgatcaggtacatcgacagcaactttgacggccccgcgctgctcccagaggatgctgcgaagaggcagtttgctgacgaattgttcgcgtctgccaacgcgttcaccaaagccctctactcgccgttg

SEQ ID NO: 17011 - DNA, 326 bp, Zea mays
ggagaagttccttggaactataccaatgatgttcaatgttgttatcctttctcctcatggctacttcgctcagtccaatgtgcttggataccctgacactggcggtcaggttgtgtacattctggatcaagtccgtgctttggagaatgagatgcttctgaggattaagcagcaaggccttgatatcactccgaagatcctcattgttaccaggctgttgcctgatgctgctgggactacgtgcggtcagcggctggagaaggtcattggtactgagcacacagacatcattcgcgttccgttcagaaatgagaatggcatcctcc

SEQ ID NO: 17012 - DNA, 328 bp, Zea mays
ggaagagagacgacggcggccatggcgacctccttccaggggacgaccaccaagtgcaccgcctgcgacaagacggtgtaccttgtggacaagctcaccgccgacaaccgcatctaccacaaggcctgcttccgctgccaccactgcaagggcaccctcaagctcgccaactacaactccttcgagggagtgctctactgcaggcctcacttcgaccagctgttcaagaggacagggagcttggacaagagcttcgaaggaactccgaaggttgtcaagccagaaagaaacgttgggaatgagaatgctactaaagtctcaagcgcct

SEQ ID NO: 17013 - DNA, 313 bp, Zea mays
cccacgcgtccgatcagaagatatagacatggaaaatgttgcagttttgaaggccccacctctgccaaagaagcaaacttttctgctggttggtgttttctctactggaaacaacttcaagcggcggatggctttgaggcgaacatggatgcaatatgaggctgttcgctcaggcgatgtagtagtccgttttttcactggtcttcacaagaatgagcaagtcaatatggagttatggagagaggctcaattatatggtgatatccaattgatgcccttcgttgactactatactttgatcactttgaagacc

SEQ ID NO: 17014 - DNA, 314 bp, Zea mays
gcggcatgatcttcatcctcgtctactgcaccgccggcatctcaggtgggcacatcaacccggccgtgaccttcggcctgttcctggcgaggaaggtgtccctcgtccgcgccctgctctacatcatcgcgcagtgcctgggcgccatctgcggcgtcggcctcgtcaagggcttccagagcgcctactacgtgcgctacggcggcggcgccaacgagctcagcgacggctactccaagggcaccggcctcgccgccgagatcatcggcaccttcgtgctcgtctacaacgtcttctccgccaccgaccccaag

SEQ ID NO: 17015 - DNA, 316 bp, Zea mays
gtaggccgccagacagggcccatagaaggctcgcgcagaacagagaggctgctcggaagagtcgcctgcggaagaaggcctacatccagcagctagagacaagccgcatgaagctgtcgcagctagagctagagcttcaacgggcgcggcagcatggtgcatatgcgaatagtgggagcatgggagactcggctctcggctacagatgcccgatagatccaggtgtttctgtgttcgagatcgactacagccactgggtggacgagcagaagagacacacggcggtactgacgtcggcgctccaggggcagcagac

SEQ ID NO: 17016 - DNA, 314 bp, Zea mays
aaattatatgcaatcgcaagcgagcagaatggcgaggtccagtggtagtagaccagtggccctcgtgctgctggcgctgtgcgcgccgccctctcgtcggccacggtgaccgttaatgatcccatcgccaatggcctctcctggagcttctacgacgtttcctgcccgtcggtggatggcatcgtgcgctggcacgtcgccgaggccctccgccgcgacatcggtatcgccgcggggctcatccgcatcttcttccacgactgcttcccgcatgtctgcgacgcgtccgtcctcctgtctggttccaacagcga

SEQ ID NO: 17017 - DNA, 321 bp, Zea mays
aggataaatgtggtgacgatgatccaaatcgaactgaacttgctactagaggtaaaggtgtgcagtttcctttttctgtcttcgacagggtcataatcaaggtatcttataagcaagacaactaagcgaaggctttcattcactctgttgtgttttctgcaataactagtgcgtgaattgaatcttttcagggaaacaagaggaccccggaacggtttgtgggacgtcaagcagttgtgacagcgcagtgcttaaatggatggtatgttgtgaagacttcagacaacgcagagagtgtgaagctgcaataccgttccttgg

SEQ ID NO: 17018 - DNA, 304 bp, Zea mays
ggaaattttcttgggcgttcttcggcttcattgtcacaaggttcgagttcgtcaccgtctagtacgactgtgcgacggaggaagaggcgaggagaagatgcagatcttcgtgaagaccctgacggggaagaccatcaccctcgaggtggagagcagcgacaccgtcgacaacgtcaaggccaaaatccaggacaaggaagggattcccccagatcaacagcgactgatattcgctggcaagcagctggaggatggacgcacgctggctgactacaacatccaaaaggagtcaactcttcatttg

SEQ ID NO: 17019 - DNA, 267 bp, Zea mays
cccacgcgtccgcccacgcgtccgcccatgcgtccgcccacgcgtccgcccacgcgtccgaaggcggcaagggtctgggcaagggtggagccaagcgccaccggaatgtgctccgcgacaacatccagggcatcaccaagccggcgatccggaggctggctcggaggggcggcgtgaagcgcatctcggggctcatctacgaggagacccgcggcgtgctcaagatcttcctcgagaacgtcatccgcgacgccgtcacctacaccg

SEQ ID NO: 17020 - DNA, 281 bp, Zea mays
gataagctatagccatcttcttctcttctctgaattccagtccaagggccggaataccgtcatatcagagggagtgggaggaagaaaaataaaatatggtgaagctcgcattttgaagctttcgcgactctttgagcgccgcgtcgctcaaggcctatgtggccgagttcatcgccacgctgctcttcgtgttcgccggcgtctggtccgccattgcctactcgcaattgacgaagggcggcgctctggactccgccggcctggtggccatcgtcatcgcc

SEQ ID NO: 17021 - DNA, 310 bp, Zea mays
gtcaggatgcgacaaacgtcggggatgaaggtggttttgcacctaacattcaggaaaacaaagaaggccttgaactattgaaggcagccatagaaaaggctggctacactggaaaggtggtcattggaatggatgttgctgcttctgaattcttcggtgagaaagacaagacttatgatcttaatttcaaggaggagaacaacgatggctcaaacaaaatttcaggcgacacctgaaagacctgtacaagtcctttgtttctgagtaccctatcgagtcgatcgaagacccatttgatcaggatgactgg

SEQ ID NO: 17022 - DNA, 308 bp, Zea mays
gatctggagtctgttggctatcttctgctatattttttaagaggaagcctcccatggcagggccttaaagctggcactaagaaacaaaagtatgataaaattagtgaaaagaaaatgcttacctcggcagagattctgtgcaaatcttacccgccggagttcgtctcatatttccactattgtcgctccctgcgatttgaagacaggccagattactcttcaatgaagaagctctttcgtgatgtatttatacgggaaggataccaatttgattacgtatttgactggactgcactcaagtaccctca

SEQ ID NO: 17023 - DNA, 261 bp, Zea mays
ttctttaaccatgaaaatggtagaaatgggatcattgatctgttcttccaggacaggtacttgaatgctatacagacaaatgctcaccatcttctgagatacctagctactgcagttgttgttaacaaaaggagaaggaatatgcttaaagagttgattaaggtcattcagcaggagcagcatagctacaaggatcccataactgagtttctgcaatgcttatatgtcaactatgattttgatggtgctccacagaaactc

SEQ ID NO: 17024 - DNA, 316 bp, Zea mays
gcggcgcaaaacaccaacacgtcttctctccggttgccaggacggtataggatttcgccgcggcgagatgtcggcgtacgacgaggtggagatcgaggacatggagtggaacgcggagctgaaggcgtacacgtacccgtgcccctgcggcgacctcttccagatcacgctcgacgacctccgcatcggggaggagattgcgcgctgcccgtcgtgttctctcttcctcaccgtcgtttacaacgccgaggactttgctgacgccaaggagccgacccacaagccgtccccgagcccagtcgccgtcgcctgatgt

SEQ ID NO: 17025 - DNA, 300 bp, Zea mays
ctcaccttctcctcctgctcctgccctcggtttctgatcagcgaacatgggaacccgcggcgtcgccctgctgctcctcgcggcggtgctgctcctccaggcgctcctccccgcgtcgtcggagggcctggttctggtcgcgctgaagaagctgcccgtcgaccagaacggccgcgtcgccgcgcgcctctccgccgaggagaggcagcgtctcctcctccgcggctccaacgctctgggctcaggcggcgacgacgactccgacgtcatcgcgctcaataactacatgaacgcgcagta

SEQ ID NO: 17026 - DNA, 282 bp, Zea mays
gaaccttggcccgacaccatgctcccaatggccgtccaccccaccaccacgccggccttgtccccgcgcgcccgcgtctcgccgcacaggcctcccatctcctccctggcggacccctcgtcctccccctgccatcgcatcgtcagtttcaaaagcaggaggctgccacttcgctctctccacatcgccgctgccgctgccgccggggcagaggaagaagaggcgcaactaggtggaagtgtgaacgcggtcgacgaggaggaagcggagaataaggtggtg

SEQ ID NO: 17027 - DNA, 303 bp, Zea mays
cttaggcaaaccttctcccagtacggagagatttcttctgtaaagattccaattgggaaacagtgcggcttcgtgcagtttgctcagaggaagaactcagaggacgcattgcaaggattaaatggcagcactattggcaaacaaaacgtgcgtctttcatggggccgcaacccagcaaacaagcagttcagaggcgacaacggcaaccagtggaacaacgggggcatgtactacgcggcgcccccgttctacaacggctacggttaccctgcggcggccccgtaccctgatccaggcatgtac

SEQ ID NO: 17028 - DNA, 303 bp, Zea mays
cccacgcgtccgcaaggcccgcgatgttggtgttaatagtttcgttctctttcctaaagttcccgatgcattgaagtctccaacaggagatgaagcgtacaacgataatggtctggttccacgtacaatccgcttgctcaaggacaagttccctgatattgttatctacacagacgtcgcgttagacccttattcatctgatggtcatgatggtattgtcagggaagatggtgtaattatgaatgatgaaacagtttatcagttgtgcaaacaggctgtttcacaggctcgtgccggtgctga

SEQ ID NO: 17029 - DNA, 305 bp, Zea mays
gaatgagaagaattaagattccactggctcccgttgatgagaagaaaaaggttgttgaagatgttgacaaagacaggaggcatgcaattgatgcatcaattgtgcgcattatgaagagccgcaaagttatgggtcatcaacagctggttgctgaatgtgttgagcagcttagccgcatgtttaagccggacttcaaagccataaagaagaggattgaggatctcatcacaagggactatttggagcgcgacaaggacaacgccaatacgtacaataccttgcctgatcggtggttagtgacaaag

SEQ ID NO: 17030 - DNA, 300 bp, Zea mays
atattttcggagaacgcatttgatgctgttatgcactttgctgctgttgcttatgttggtgagagcacaatggagccactcaggtactaccacaacataacgtcaaacacattgacagttcttgaggcaatggcagcacataatgtagatactctgatttactcgagtacgtgtgcaacctatggtgaacctgatacaatgccaattgtagaaacaactcctcagaatcctatcaatccatatggtaaggcaaagaagatggcggaggacatcatcttagattttacagaatcgaagaag

SEQ ID NO: 17031 - DNA, 304 bp, Zea mays
ttcacgaccattctagttcacactcagttcggtcgttttctgcattgacggagtcaggcccaggcctaacctcagttcatccgagcagccgaacacgcccgccgccattctacgccctgctgcccaggtcggacggaccctttgccggagacgagcacacgccacagcaggaattatcgggcgtagagcagcgcgaacgtagagatccaatggcggcggcggaggggcagtgggtgctcatggcaacggggcggacgccgactaacattgcggtgatcaagtactgggggaagcgggacgaggc

SEQ ID NO: 17032 - DNA, 304 bp, Zea mays
ccgacgcgtacgtagcacagtccattattgccgtctcccttttgcgtgacaaagaaagagagcgagaagcagtcgccatgtctggcatcatccacaagatcgaggagaagctccacatggggggcgaccacaagaataaggaggaggagtaccacaagaaggccgaggagcaccacaagaaggaggagggggagcaccacaagaaggacggcggggagcacaaggaaggcatcgtggagaagatcaaggacaagatcaccggcgagcacggcgacaagtccggcgaccacaaggagaagaagga

SEQ ID NO: 17033 - DNA, 301 bp, Zea mays
gtctcatgctggacaaatattttgttgtgtcggcgcgctcgcaatcaccgggtccctgcatcacattgatagagacctcctcggatggtggctctgtgagcgccagtgtaaagacggaggacttaatgggcggcctgagaaactagctgatgtttgctactcgtggtgggtgctatcgagcctagtcatgattgacagagtgcattggattgacaaggaaaagctaacgaaattcatactgaactgtcaggacaaagagaacggcggcatttcagatagaccagataatgcagtcgatatc

SEQ ID NO: 17034 - DNA, 299 bp, Zea mays
gtcctggcaggccggcattgtgaagaaggagcacatcaagattcatggtttctgagcaaccgcagggtccatagcaaaccaaccctgcatgcagggccagcttgttatgtataatatctgaggtggagcatatctatctggctgtgtactgcaagcaggcctagtacgccgcctgcgcgttcctcctattacacatataggcccctccctgcgtgtatgcttgttaccgtcgtgtcgaaccttgtactacgaggctccatcgaacattgatggcttgcttctttatcagaacatgtttg

SEQ ID NO: 17035 - DNA, 298 bp, Zea mays
ggaacatccaccacatccccgaccacttcccctgcccggagaagttcgacccctcccggttcgaggttgctcccaagcacaacacgttcctgccgttcggcaacgggacccactcgtgcccgggcaacgagctcgctaagctggatatgctcgtgctcttccaccacctcgccaccaagtacaggtggtccacctccaagtccgagagcggcgtgcagttcggccccttcgcgctgccgctcaacggcctgcccatgaccttcgtccgcaaggactgatgagccgccgacagatgtgt

SEQ ID NO: 17036 - DNA, 300 bp, Zea mays
cccacgcgtccgcacacgcgtgcgcccacgcgtccgcccacgcgtgcgggctggtgccctacaaccccgggtgccacgacgagtcggtgctgtggacggagagccgcgacgtcggccacggcttccgctgcgtccgcatggtcaacaacatctacctcaacttcggcgcgttccacggcgacaaggaccacggcggcgtgcgcgacggcaccaacatcgtgctctggaagtggtgcgacggcgacaaccagcgctggaagatcgtcccctggtgagtgtgctgttgtgtggctgcagtgg

SEQ ID NO: 17037 - DNA, 299 bp, Zea mays
cggacgcgtggcgagacgcgtgggtgtttaccattcctccccaaaacacatcctgcgatgctcgaagcctccgccgagcatcgatcatgtcggcctactgcggagagtacgcggatgagctcatcaagaatgctgcctacatcggcacccctggcaagggtatccttgctgctgatgagtcaactggcaccattggcaagcgcctttccagcatcaatgtcgagaacgtggaggagaaccggcgggctctccgtgagctcctgttctgctgccctggtgccctccagtacatcagcggt

SEQ ID NO: 17038 - DNA, 295 bp, Zea mays
ggaccgtggctagtgactcagctccacccacatcccccttcgtcgtcttctccctccctgctagctgacctccaatccacgataaggcaagataagctagctaggaaggcaagggatccgatggacaagtacgagcccgttcgcgagatcggggcgggcaacttcggggtggccaagctgatgaggaacaaggacacgagggagctggtggccatgaagttcatagagcgaggaaacaggatcgacgagaacgtgttccgcgagatcgtgaaccaccgctccctccgccacccca

SEQ ID NO: 17039 - DNA, 300 bp, Zea mays
ctgttctgtggtcttggtctgggtgcactccagtgccaggagcagctagccgtcttcgatcgatccgttcgcatcgccaacgcattcggtttgtaaggtaggaaggagcgtgatggccaagacaagctcgttcaagctggagcaccccctcgagaagaggcaatctgatgctaaccgtatcagagagaagtaccctgacaggattccagtgattgttgagaaggctgataggagtgatattcctgacatcgacaagaaaaagtacctcgtccctgcaggtcttacagtcgggcagttcgt

SEQ ID NO: 17040 - DNA, 291 bp, Zea mays
ggaaaccctagccgccatatctcacgatccactcgagcaccaagccgagggaaggtgaggagcgatggcgcgcggcgtggagtcggcgaagggcggcgcggtcgcgggcaagaagaaggggtcggtttccttcacgatcgactgcaccaagccagtggaggacaagatcatggaggtcgcctcgctcgagaagttcctgcaggagcgcatcaaggtcgccggcggcaaggctggcaacctcggcgactccgtcaccatctctcgcgagaagaccaaggtcaccgtcacctc

SEQ ID NO: 17041 - DNA, 294 bp, Zea mays
ctgtattatcagagaaacaagagctgtgcttctctgttgtctcattgctctggcagaagctcatagcttctcctgaaatgcagatgtctgcagaaagtacatcagctcaccaaggatggaggaaggttgttgatgcactttgtgatgtcgtttcagcctcaccaaccaaggcatcagctgctatcgttctccaggccgagaaggacttgcagccttggattgctagagatgacgaacaaggtcagaagatgtggagagtcaaccagcgtatagtgaagcttatagctgagctta

SEQ ID NO: 17042 - DNA, 311 bp, Zea mays
cccacgcgtccggtcaaagatgcgggattcacagctacaaaaatttagagatgaacttaggagccggtcccgtgttctgaagatgctggggcatattgatgctgacggtgttctccagttgaaaggacgtgctgcctgtctaatagacacaggggatgaactgcttatcactgaacttatgttcaatggtacatttaatgatcttgaccatcatcaagttgcttcccttgctagctgctttgtaccttgtgataaatcaagtgagcagatacgcctaagaaatgaactttctaggccgatgatgcagcttc

SEQ ID NO: 17043 - DNA, 309 bp, Zea mays
cacgtaccctcctggcaaaggaccgcctaaaaggggtggtgtgctctcgggtggcgcggacctgttcatgcagtggaggatccgtgggaacggttgacatatgcaaaggttaagtgctacatatgtcatgtggttagagatcctcagctgagtaaatcgattcggatcaccgttatatccccgaagagtggagacttgatcgctgccctgcaacctaagtcaggatgcaaacattaggaataaaaatgatgttgtattgatgagatggtgaaattatactagatgcaaccagagtctattaatatttaa

SEQ ID NO: 17044 - DNA, 308 bp, Zea mays
ggcgaggaaacctctcgactacgaggagctgaacgagaacgtcaagagggtgcagtacgcggtgcgcggggagctgtacctccgcgcctccgagctgcagaaggagggcaagaagatcatcttcaccaacgtcggcaacccgcacgccctcggccagaaaccgctcaccttcccgcgccaggtggtggcgctgtgccaggctccgttcctcctcgacgatccccacgtcggcctcatgttcccggcggacgccatcgctagggccaagcactatctcgccatggcgcccggcggtctaggtgcgtaca

SEQ ID NO: 17045 - DNA, 310 bp, Zea mays
cccacgcgtccgagaccgagtacaccgaccacctcacccacaagctcaagcaccacccggggtccatcgaggccgcggccatcatggagcacatccttgagggcagctccttcatgaagcacgccaagaaggtgaacgagctggacccgctgctcaagcccaagcaggacaggtacgcgctccgcacgtcgccgcagtggctcggcccccagatcgaggtcatccgcgccgccaccaagtccatcgagcgcgaggtcaactccgtcaacgacaacccggtcattgacgtccaccgcggcaaggcgctgca

SEQ ID NO: 17046 - DNA, 308 bp, Zea mays
tgctgtcgtgccactacatccagaaggggctcttcttcccggcacccgacctgcccatgtcctcggtcgtgtcgctgctcctgtcctcgctgtcgcgggcgctcgccgtcgtcccggccctcgccggccgcttcgtcacgctgcccgacgaccgcatcgtcatccgctgcaacgacgcgggcgtggacttcctccacgccgtcgcacccggcctgtcgcttgacgactttctcgtccctgacgccgacgtgccgaccaagcacacaaaggacctgttccccatggaccggaccgtgagctacgagggg

SEQ ID NO: 17047 - DNA, 309 bp, Zea mays
gtgccgttctcgatccaggcgcccaaggagaagatcgagatgtactcgccggccttctatgccgcctgcactgccggaggaatcgccagctgcgggctcacccacatggccgtcacgcctctcgacctcgtcaagtgcaatatgcagcttgacccagcgaaatacaagagtatctcatctggatttggtatcctgttaaaggagcaaggggccaggggtttcttcaggggatgggtgcctactttgcttggttacagtgctcagggggcttgcaagtttggcttctatgagttctttaagaagtattac

SEQ ID NO: 17048 - DNA, 311 bp, Zea mays
aagtttcaaggccattaccttggaggccagcgactaatgttttccgtgttaaagaggatgttcgacctatattctgggccaacagaccaaagagctatcttaaaaggacattaggttgggatcagtatccccatggacggtggggtgattctcggaacccatcatatggagcacttactgaccaccagttcacaagaccacgaggccgtggtaagaagctccaagaggaatgggctgttccactgaaatctgtggaggacattagtgagcgcttcacaaacttctgtcaagggaaactcacaagcagccca

SEQ ID NO: 17049 - DNA, 311 bp, Zea mays
cgtgatttcatcttcgtccgaccccaccccaccccaccccacctcaccggagcccctctccccctaactcctccggcagctgctccgatcccgaaccgtgattcgctcgatggcggcaaccgcgggcggcaacaagatccgcaacgccaagctggttcttcttggggacgtgggcgccggcaagtccagcctggtcctccggtttgtgaaaggccagttcgtcgagttccaggaatccaccatcggcgcggctttcttctcgcagaccctggcggtgaacgacgagacggtcaagttcgagatatgggaca

SEQ ID NO: 17050 - DNA, 307 bp, Zea mays
ctctagggtttttgattttagccgccgccgctgctcatctcacatccctcgagaagacgcctgctcctcgccgatcgatacgatggccgtcttctccgacctccacaccgccgacggcctcaagtccctcgaggctcacctcgccggcaaaacctatgtgtctggtgactccattactaaggatgacattaaggtcttcgccgcggtgccgtcgaagcctggcgctgagtttcctaatgccgcccgctggtacgagaccgtctctgcggctgtagcctcaagattccctggtaaggctgttggtgta

SEQ ID NO: 17051 - DNA, 305 bp, Zea mays
ttccttgaagcgggtggaggcaaatacggattgccgcgtgctaataagaggtcgtggcagcatcaaagatccagcacgggaggaaatgatgcgagggaagccaggatatgagcatctgaatgaacctctccatatattggttgaggcagagctacctgttgacatcattgatgctcggctgatgcaagcccgcgagatccttcaagatctgctaaagcctgtggatgaatcccaggacttcttcaagaagcagcagctctgggagctcgcgatgcttaatggcaccctgcgtgaggaagggatgc

SEQ ID NO: 17052 - DNA, 304 bp, Zea mays
tctcagtttatctggaagaaaattcgatcaaaatcaggcaggggcacgggttgcttttgatacacgaaagcgtaatcctgcagactttgcactctggaaggctgcaaaggagggcgaacctttttgggatagcccttggggccgtggaagaccgggatggcatattgaatgcagcgcaatgagtgctcactatttaggacatctattcgatattcatggtggggggaaagatttgatttttcctcatcatgagaatgagcttgcacaaagccgagctgcttatcctgagagtgaggtgaagtgc

SEQ ID NO: 17053 - DNA, 301 bp, Zea mays
gtctcggcagccacaagaaaccacccccttccggcacacgggctcgaccacctgactccatcaccgtgcctgtctgtgttctagggacaagaagagcagagatatacaggagcgagcagatgcggggagaagaggatgagcaccacaacggcgtcgtcgctgaaccccaacgcgccgctcttcatcccggcggcgtaccggcaggtggaggacttctcgcccgagtggtgggagctcgtcaacaccaccgcctggttccgggaccactgcttccggcagcgccagtccacgaggccgcctg

SEQ ID NO: 17054 - DNA, 306 bp, Zea mays
agaatctaaaaatgagtgctgccctcctttctcgatttgacttggtgtttattctacttgacaagccagatgagtcactagataaaagagtgtcagaccatataatagctctccataccaatgatgttgataatttcagacccaacaagaggaccagaacagggtcacattttgatggtgatccggggcttggagttggtggaaattcagtagcttcaaggctgaggctacacccagagaaagacaaggacttcactccattatctgggcaacttcttcgcaaatatatatcttattcaagagaac

SEQ ID NO: 17055 - DNA, 305 bp, Zea mays
cccacgcgtccggctcacccaccagtttatcgaatactgcatatggggatgggacaatctcccaaggacagtcctgatgtactacgccaatttcctttcctcgccagaggctacttccacacggtcatctgcaacgtgccggagttccgcaacaccacagtcaaccatgacctgcatttcatttcctgggacaacccaccgaagcagcaccctcactacctcacgctcgctgacttcgacggcatggttaacagcaacgcgccctttgcaaggaagttcgggagagaagaccccgtgctggacaa

SEQ ID NO: 17056 - DNA, 300 bp, Zea mays
cccacgcgtccgcaaggcccgcgatgtaggtgttaatagtttcgttctctttcctaaagttcccgatgcattgaagtctccaacaggagatgaagcgtacaacgataatggtctggttccacgtacaatccgcttgctcaaggacaagttccctgatattgttatctacacagacgtcgcgttagacccttattcatctgatggtcatgatggtattgttagggaagatggtgtaattatgaatgatgaaacagtttatcagttgtgcaaacaggctgtttcacaggctcgtgccggtgc

SEQ ID NO: 17057 - DNA, 298 bp, Zea mays
ctaatatggacggaaaaaaaatgccacaaacaactatattttagcggaatgattaataatctaatggtatacatgacgtatgggcttctaagcaagccatgtgcagaaatgcagaatctgcccatagccggcatcgacggacctgggcatgttgggctggagtcctaagatgacctttttgcgagatatttgactcaaacaatctaaccaactcaactaaactagatacttttggctcttttatttcttttcacgaaactttttgtcaacgtaggtttttagtttggtatacttatta

SEQ ID NO: 17058 - DNA, 300 bp, Zea mays
ctagttcggcggcctctacctcctggagatccaccgcgtcctccgcccgggcggcttctgggtgctctccggcccgcccgtcaactacgagaaccgctggcacggctggaacaccaccgcgcaggcgcagaaggccgacctggacaggctcaagaagatgctggccagcatgtgcttcaagctctacagcatgaagggggacatcgccgtgtggcagaagtccgccgacgcctgctacgacaagctcaccccggtcaccacgcccgccaagtgcgacgacagcgtcgaccccgacgccgc

SEQ ID NO: 17059 - DNA, 298 bp, Zea mays
cccacgcgtccgccagtctcgcatcccgtccccgtccgcaccggccgacgccgccttttcgtccccgcgtcactcgaggctccactgagcgtgcgcgtcaccggcggcaggcgagggcaggcggtggtggcgatggcgtccgctgatgcgcgcttggcgggtgatcgcctcctccatccgcgtcatccccgacttccccaagccagggatcatgtttcaggacatcacgacgttgctgctcgatcccaaggcgttccgtgacaccatcgacctctttgtcgagcggtacaaggaccaa

SEQ ID NO: 17060 - DNA, 291 bp, Zea mays
ggggagggatcattgaaagccgcagcgcccatgtcccaggcccgtctgttcgccaccatttgtccattccccctccatcattcctccccgctttctccaccatcagggcgaaaattttatgcgagctttggaaagcgcgagccagtttatccggccgggcgtggtcaccgaggcagtagcggcgagagaggggaggatctgatcgatgtcgtcgggcgaggacgggtactgcagctcggattcgccgcgggcggaatcccccgaccagccgcagcagctgcggcggcggac

SEQ ID NO: 17061 - DNA, 269 bp, Zea mays
actacgagaagattgtcagggagacatgccgcaacattggtttcgtgtcgaacgatgtcgggcttgacgctgaccactgcaaggtgcttgtgaacattgagcagcagtcccctgatattgctcagggtgtgcacggccacttcaccaagcgccccgaggagattggagctggtgaccaggggcacatgtttgggtatgcgactgacgagacccctgagctgatgcccctcagccatgtccttgccaccaagcttggtgctcgtctcacg

SEQ ID NO: 17062 - DNA, 296 bp, Zea mays
gttggcttctcctccccctccggttcgggttcgggttcgtgaggatctccggggttcggtttcgtgggtgagcggatcgagatggcggcgtcggatgttgagtaccgctgcttcgtcggcagcctcgcctgggccacggacgaccactccctccacaacgccttcagcacctacggcgaggtcctcgagtccaagatcatcctcgatcgggagacgcagaggtcccgctgcttcggcttcgtcaccttctccacggatgaggcgatgcggaactgcatcgagggcatgaacggcaa

SEQ ID NO: 17063 - DNA, 298 bp, Zea mays
ggaccgtggggaaatcttcaccactgcccaaagcactgggatgatgcagaagttttcaatccagaaagatggccttagctatggaccaaatccaaacgagataaaccaaaatttcagttacttaccatttggtggcggaccaaggaaatgtgtgggtgacatgtttgctacttttgagactgtggtggcaacagcaatgcttgtcaagcgatttgactttcagatggctccaggagcacctccggttgacatgacaactggagcaacgattcacacgactgagggattaaaaatgact

SEQ ID NO: 17064 - DNA, 302 bp, Zea mays
cggagcacgcgcgcccgacggcccaccatgatcatccccaagaagaaccgcaatgagatctgcaagtacctcttcaaggagggcgtgctgtatgccaagaaggactacaacctggcgaacacccacagattgatgtgcccaacctccaggtgatcaagctcatgcagagcttcaagtccaaggagtatgtcagagagaccttctcctggcagtactactactggtacctcaccaacgatggcattgagcacctacgcaactacctgaacctcccgtctgagatcgtgcctgccacgctcaag

SEQ ID NO: 17065 - DNA, 311 bp, Zea mays
cagctcccatatccgatcccctacctctccagcatctcccgtctccgtcgtctcgtctctgctcctcacctcgccgccagccatgggcaagatcaagatcggaatcaacggtttcggaaggatcggcaggctcgtggccagggtcgccctgcagagcgaggatgtcgagctcgtcgccgtcaacgaccccttcatcaccacggattacatgacctacatgttcaagtacgacaccgtgcacggccaatggaagcacagcgacatcaccctcaaggactccaagacgcttctcttcggcgagaagccggtca

SEQ ID NO: 17066 - DNA, 309 bp, Zea mays
cggacgcgtggcgagacgcgtgggtggccaatgattgcattggtgaggaagttgagaagttggctgccgctttgccagaaggtgacgttctgctccaagagaatgttagattctacaaggaggaagagaagaacgaacctgagtttgctaagaagctagcatctgttgctgacctttatgtcaatgatgcttttggcacggcacacagagctcatgcttcaaccgaaggagttaccaagtatttgaagcctgctgttgctggcttcctcatgcagaaggaacttgactaccttgttggagctgttgcca

SEQ ID NO: 17067 - DNA, 311 bp, Zea mays
gacgaccactccctccacaacgccttcagcacctacggcgaggtcctcgagtccaagatcatcctcgatcgggagacgcagaggtcccgctgcttcggcttcgtcaccttctccacggaagaggcgatgctgaaacgcatcgaggtgcatgaacggcaaggagctggacggctgcaacatcaccgtcaacgaggcccagtcccgctgcggccgtagaggctgcggcggctgctacggtggtggccgtggatgctgcggctacggcggttgcgggcgccgtgatggcggcggcggctacggctgtggctgcg

SEQ ID NO: 17068 - DNA, 309 bp, Zea mays
ggaccgtggctcggcagtcggcacgcaggctagcagcacagcagcagtcagagccatcccctctcctcgctacgcttcgcttactcggcgccgattcctcctcctcctcctccaccctcgtccgtcccgttccggcgcgcgagctcgcccgagatggcgaacgcgagatcgggtgtcgctgtgaacgatgagtgcatgctgaagtttggcgagctgcagtcgaagaggctgcaccgcttcataactttcaagatggacgacaagttcaaggagatagttgtggaccaggtcggggatcgcgctaccagc

SEQ ID NO: 17069 - DNA, 306 bp, Zea mays
gaaggaagtagaggatgctcaaaagatcagacggagtgtgatggactgctttgagagagcaagcctcccctttcttaatgaagaagagaggaagaagaatcttcattttgttgttgtgggtggtggacctactggagtggaatttgcagcatctttgcatgattttgttaccgaagatttatccaagctttacccctcgattcagcaccttgtcaagatatcgttgattgaagctgcagatcatatactgaccatgtttgacaagaggataactaattttgctgaggataagtttggaagggatgg

SEQ ID NO: 17070 - DNA, 307 bp, Zea mays
  unsure (1)..(307): unsure at all n locations
agccaattcgctcgagttcagatcgagcgcgcgccaagcaagtcttccggccggccgcgaagagcgcaatcaagcaagacaagatggtgaagctcgccttcggaagcgtcggcgactccttcagcgctacctccatcaaggcctacgtggccgagttcatcgccaccctcctcttcgtcttcgccggcgtcggttccgccatcgcctacgggcaactgacgaatggcggcgcgctggacccggcgggcctggtggcgatcgcgatcgcacacgcgntggcgctgttcgtgggcgtgtccgtcgcggc

SEQ ID NO: 17071 - DNA, 306 bp, Zea mays
ctctctcgttctgctcacatcgacgcggttcggttccagtttcactcccactgccgtctcggcaacctcccctgttccacgcttcgtcctcgcgttcccaaccgagctcttccgcgcgcacggcagctccctcgccgggctcatcgcgctcggctacgacgtgcacccggacgagtaccacagctacgtgcacggcaggctaccgtacgacaggatcgtgcgcgacccgcagctggcgcgcctgctgcagagcatcccgcagcgcaaagtgctgttcaccaactcggaccgcgcgcacatggagcg

SEQ ID NO: 17072 - DNA, 302 bp, Zea mays
cttctccatgacgctgctgagctggtcggtgatcgagtacagcgccaagtacaaggccatgggggagtatgaccatgtcagggagctcatcaagtggggcaccgactatctgctactcaccttcaactcctctgcttccaccatcgacaagttatacgcccaggtgggtgctgctaagatcaacggcagccggccggacgaccattactgctggaaccggccggaggacatggcgtaccctcgcccttcactgtccgtgagctccgcccctgatctgggtggcgaggtcgccgctgcacttg

SEQ ID NO: 17073 - DNA, 304 bp, Zea mays
cccacgcgtccgcccacgcgtccgcccacgcgtccgcccacgcgtccgcccacgcgtccgaaggcggcaagggtctgggcaagggtggagccaagcgccaccggaaggtgctccgcgacaacatccagggcatcaccaagccggcgatccggaggctggctcggaggggcggcgtgaagccatctcggggctcatctacgaggagacccgcggcgtgctcaagatcttcctcgagaacgtcatccgcgacgccgtcacctacaccgagcacgcgcgccgcaagaccgtcaccgccatggatgtc

SEQ ID NO: 17074 - DNA, 287 bp, Zea mays
acaataacaactaaggtccgggaggtgcgagctgggacgggctcaaggctgaccccaagaagtaccgcaagatgaaggagagacttgtcggcgtctctgaggagaccaccacgggactcaagaggcactaccagatgcaggagaccggcgccctcctcttccctgccattaacgtcaacgattccgtcaccaagagcaagtttgacaacctgtatggttgccgccactcgctccctgatggtctgatgagggccactgacgttatgatcgccggaaaggttgccgtg

SEQ ID NO: 17075 - DNA, 297 bp, Zea mays
gtaccgtggcgagacgcgtgggatccgccgccgcagccatccgcttcttctcttcggttcagctctcgagtttccaggatgaaggtagtagactcctacctgcactctgttctgggtggaaacacttccccgactgctgatgatgttaagagcattctggaatcagttggtgctgaagctgatgaagaaaaactagagttcctgctcacagaactcaaagacaaggacataacagaagtgattgcagctggaagggaaaggttatcctctgtgccttcaggtggtggtgcaattgac

SEQ ID NO: 17076 - DNA, 299 bp, Zea mays
gtcgccgcctccctccgcgcgaccgatctaccctccgccgccaccatgtcgctgatcgccggggaggacttccagcatatcctgcgtttgctgaacaccaacgtggatgggaagcagaagatcatgttcgccatgacctcaatcaagggtgtcgggcgccgcttctccaacatcgtctgcaagaaggccgacatcgacatgaacaagagggccggcgagctgacgcctgatgagctggagcgcctgatgacggtcgtggccaaccctaggcagttcaaggtgccggactggttcctcaa

SEQ ID NO: 17077 - DNA, 293 bp, Zea mays
agccttctccgttcctcctcgacgcgtctcttccacagccgcaacctctatccctcgtctggtatcgtctctcccacacccctctgccccaacccagaaaaaccctcgaaaagcggcggcggcgcgacatggcggaggtcgaggctccagctgctgcggttgcggcggcgacccctgaggtggcgacggtgaccgagggcggagcgctacggaggcgaagggtccgcataagctgcaccgccagtggaccttctggtacgacatccagtccaagcccaagcccggcgctacgt

SEQ ID NO: 17078 - DNA, 297 bp, Zea mays
cagttgcccaaatattcaaggtccatagtgaagccttctttcgggataatgagagtagtgtcttgagagatttgtcctccatgcgacgattagttgttgccaccggaggtgatgctgttatccgaccaattaactggagatatatgaagaggggcctatctgtttggttagatgtgcccttggatgctcttgctaggcgtattgctaaagtgggaactgcctctcgtcctcttctggaccaaccatctggtgatccgtacgcaatggtagctacttgttcttgttccttcaaattct

SEQ ID NO: 17079 - DNA, 300 bp, Zea mays
cccacgcgtccgcccacgcgtccgcccacgcgtccgatcttctcgatggcgcgtctcgaccgcgtgaagaacatgacaggcctggtggagatgtacggcaagaacgcgcgcctgaaggagctggcgaacctcgtgatcgtcgccggtgaccacggcaaggagtccaaggacagggaggagcaggcggagttcaagaagatgtacagcctcatcgacgagtacaagttgaagggccatatccggtggatctcggcgcagatgaaccgcgtccgcaacggggagctgtaccgctacatttgc

SEQ ID NO: 17080 - DNA, 302 bp, Zea mays
ctaggaactgcagcagacccgcggcaaggactcgttggctagcggtgcgggactggctgatggctcgtccaagccaaggcagtcgcaggagcaggcccggcgcaagaagatgtcgcgcgcgcaggacggcatcctcaagtacatgctcaagatgatggaggtgtgccgcgcgcaggggtttgtgtatgggatcattccggagaagggcaagccagtgagtggtgcctccgacaacctccgtgcgtggtggaaggagaaggtccgcttcgaccgcaacggaccggccgccattgccaagtacc

SEQ ID NO: 17081 - DNA, 295 bp, Zea mays
gacgtggtcagaccttcttcattgcctcgccgatcccaggcctgttgcttcagatctcttcatgatcctcagcttcctgcaggtgctagcgaacatctcgaacggcacgtctccgacgagcatgatgtcgccgtccttgtcctggtaggtgacggcaaactccgacaggtttttgacgttggcgctgccggaagagacgaacatggcctccaggggctcccggagctcccggtagcccttgtacatcctcaggtcgagcttccggaagcacggagcggcgtccatgctaaccttg

SEQ ID NO: 17082 - DNA, 221 bp, Zea mays
ctcacttctccaggaaagtgttcgtcctcatggcgccgccgcagccgaagtcgggcctcttcgtgggcatcaacaagggccatgtcgtcaccaagcgcgagctgcctctgcggccgtcccatcgcaagcggaaagcaacgaagatggtgtccatcgtcatggtgctgatcagagacgttgctggcattgctccttatgagaagcgtatcacggagcttctg

SEQ ID NO: 17083 - DNA, 299 bp, Zea mays
ccttctactgtgtctgtgccacgatcactaccctgggttatggggataaaagcttctcgtccaaactggggcgtgtttttgcagtgttttggataaccacaagtactctcatcatggctcagttcttcatgtaccttgctgagctctacactgagcgccggcagaaaatcctgaccaaatgggtgatcaacaggaggataaccaccatggatcttgaggcagctgatatagatgacgaccgacaagttggtgctgctgaatttgtactttacaagctaaaagagctcggcaagatcagc

SEQ ID NO: 17084 - DNA, 301 bp, Zea mays
ctcattttacggcatagaaagtcacagatgcatggaagcaactccaagtttggcttgtgcaaataaatgtgtattttgttggagacatcacacaaatcctgttggaaagagctggaaatggaagatggatgaccctcttgacattgtgaatgctgcaattgaccagcatactaagatggttaagcaaatgaagggcgtaccaggagtaaagccagaaaaacttgacgaaggtctgtcacctagacattgtgcgttatctctggttggtgaaccaattatgtaccctgagataaatgctctt

SEQ ID NO: 17085 - DNA, 300 bp, Zea mays
  unsure (1)..(300): unsure at all n locations
cgagacctggncgagacgcgtgggcggctccgcccgcgccatcagcggaggccctgtctacgtcagtgacgcacccggcaagcacaactatcagctgctgaagacgattgtcttgcccgacggttccattctccgcgcgcatctgcctggccggccgaccaaggattgcctgttcacggacccggcacgggacggcgtaagctgctcaagatctggaacatgaacaagttcaccggcgtgctgggcgtgtacaactgccagggcgcggcgtggaactccgtggagaagaagaacaccttc

SEQ ID NO: 17086 - DNA, 241 bp, Zea mays
catcccgtcgcatcccatcccactaccacccatctcgtcgtccgccgattcgatccggttcttccaacccaggggctgtgatggcgacgaagaggagcgtgggcaccctcggcgaggcggatctgaaggggaagaaggtgttcgtgcgcgccgacctcaacgtccctctcgacgacgcccagaagatcaccgacgacacccgcatccgcgcctccgtccccaccatcaagttcctctcgag

SEQ ID NO: 17087 - DNA, 293 bp, Zea mays
atacaaacacgcgtccgcagacgctggcatgagctccgatgaggtcaaccgtgggtgtttatctgttgttgagattgacccatcacaggagactgagctgcagtttgtgcacagtgaaaatacaaggaagccctttaagtttgatcatgtttttaggccagaggatgaccaagaggccgtcttttcagaaacagtgcatgttgttaggtcagtgatggatggttttaacgtatgcatctttgcatatgggcaaacaggaactgggaaaactttcacaatggaaggggttccag

SEQ ID NO: 17088 - DNA, 293 bp, Zea mays
ggaccgtgggtgtgcatgcatacaagagcaacaagatactggcgcagaggagcaatgcccggcatggatgccttcgctgctgtgtcactaagctgccacactctttctggttcgtgcggcagctgcccatcctccggcggcggctgcggacgccatgacgccgacggactattggcgagccgtgcttcctgagaccccgatgccccgagccatactcgacctattgaccacatctacaggtgaggaaggctcaaggaaggtcaccacgtcaaatgggtaccaaggccatgact

SEQ ID NO: 17089 - DNA, 293 bp, Zea mays
gaaaagtggaaaaactggcgcatgtatgactacattgtgaaggaacttccaaaagttttaagtgataactttgaacaactcaacacgtcacaggcatcaatttttgggcactcaatgggagggcatggcgcgctgacaatttacttgaaaaacactgataaatacaagtcggtgtcagcatttgctccaattgccaatccgataaactgcccttggggtcagaaagcattctcaaattacctgggctcaactaaatcagattgggaggaatatgacgcaacctgcctgattaa

SEQ ID NO: 17090 - DNA, 295 bp, Zea mays
atggcgatcaagcggactaaggcggagaagaagatcgcgtacgacaagaagctgtgcagcctgctcgatgagtacaccaaggtgctcatcgccctggccgacaacgtcggttccaagcagctccaggacatccgccggggcctcaggggcgactcggtggtgctcatggggaagaacacgctcatcaggcgttgcatcaaggtgtacgccgagaagaccggtaaccacacctttgacacgctcatggacctcctggtcggcaacgtaggcctcatcttcaccaagggagacctca

SEQ ID NO: 17091 - DNA, 287 bp, Zea mays
acgccgcgaacaaggtccgggacctgcgacgggttgaaatccagcacatttgaagttgatgttttgtatgtcgacccagataactcacaaattccacaaaaaataagcaattacacaattgcgccctttccaaacctccaacggagagaaggccaaactgaaagtgaaagtgcgtctcaacatccatgggaccgttacagttgattcggtgataatgctggaggaggatgtggaagttccagtctcatctgcaaatgaagctccaaacgatactatgaagatggaca

SEQ ID NO: 17092 - DNA, 286 bp, Zea mays
tcgccagccgaaccgacattgttttcaccccccttctcgccttctccttcacccccctagtctagaggcgtttgctccccaatcccttcggcccgcccgctcgacgtgatcccaccggcagccatggatccatacaagcaccgcccgtctagtgggagcaactccagcttctggaccaccaactccggcgcccccgtctggaacaacaactctgccctcaccgtcggacagcgaggtccaatcctccttgaggattatcatctaatcgaaaagcttgctcagttcg

SEQ ID NO: 17093 - DNA, 290 bp, Zea mays
gtcttgaaaggagagagagagagagagaagagagaaaaaagagagagagagagagaggagtgggagacccgagagaagctgccgtgtagggaccgtagactcagcgactgcgaaggagggataaggggatggccgggatcggaccgatcaggcaggactgggcgccggtcgttgtgcggaagaaggcacccaccgccgccgccaagaaggatgagaaggccgtcaacgccgcgcgccgcgccggtgcggagatcgataccatgaagaagtacaacgctggtacgaacaag

SEQ ID NO: 17094 - DNA, 287 bp, Zea mays
ctggaattggattgagcatcagcaaatgtcttgttgaactaatgggtggtcagataaactttgttagccgaccacatgttgggagtacattcacatttactgcagctctccaaagatgtgacagaagcgctattggtgacagtaagcctgttatgttgcaccctcttccatccagtttcaaaggtttatctgcattattggttgatagaagaccagtaagagctactgtaactaagtatcacttgcaaaggctgggaattgcctgcgatgttgttgctaccattgaa

SEQ ID NO: 17095 - DNA, 290 bp, Zea mays
cccacgcgtccggcggctacgcgtgcacgccaccgtccgtgacccgcgtgatcccaagaacgcccacctggggcagctggaatgggccgcggagaatctccggctgttcaaggccgacgtgctcgacagcgacgcgctggctgccgcagtctccgggtgccggggggtcttccatgttgcctgtccggtgcccacggatagggttcttgatccggagtcagaagtactggctcctgctgtgcaaggtaccttaaacattcttcaggcttgctcagctaataatattcaga

SEQ ID NO: 17096 - DNA, 289 bp, Zea mays
ccggcgttgagatgttgttttatcaggatctcctatctggcgacgagctcctgtcggattcattcacctacaaggagctcgagaacggcgtcctgtgggaggtcgagggaaagtgggtcacccaaggtcctgttgatgtggacattggtgccaatccatccgccgagggtggtgaggacgaaagcgttgatgacacagctgtgaaggtggttgatattgttgacacattccgtctacaggagcaacctccttttgacaagaaatcatttgtgtcttacatcaaaaaata

SEQ ID NO: 17097 - DNA, 290 bp, Zea mays
caacgaagaggagcgtgggcacctcggcgaggcggatctgacggggaagaaggtgttcgtacgcacagacctcaacgtcccgctcgacgatgcccagaagatcaccaacgacacccgcatccgcgcctccgtccccaccatcaagttcctcctcgagaagggcgccaaggtcatcctcgccagccacctgggtcgtccaaaaggtgtcaccccaaagtacagcttgaagcctcttgttccacgcttgtctgagctccttggagttgaagtcgtgatggccaatgattgca

SEQ ID NO: 17098 - DNA, 304 bp, Zea mays
cggacgcgtgggcaaaaattgaaaataaaattggactcagaatggttcaaaatggagacataattctaaataaagtatttgtccctgaggaagacagattaactaggcatcaattcatttcaggatataaacaaggtcctcgctatgtctcgaattatggtggcatggcaaccaataggcatatcaatgggagtttatgacatctgccatcggtatttgaaagaaagaaagcaatttggagctccactggcagcttttcagctcaatcaagaaaagcttgtccgcatgcttggcaacattcagg

SEQ ID NO: 17099 - DNA, 302 bp, Zea mays
cagacccagcagctattgtggtcgtccctcagccgcgtcgcaccgcatcgcattctacgattcgaagctctctctgctcgcagccatggcgaagaattacccaaccgtgagcgccgagtacagcgaggccgtcgagaaggccaggcgcaagctccgcgccctcatcgccgagaagagctgcgcgcccctcatgctccgcctcgcgtggcactccgcggggacgttcgacgtgtcgtcgaggaccggcggtcccttcggtactatgaagtgcccggcggaactggctcacggcgccaacgcgg

SEQ ID NO: 17100 - DNA, 302 bp, Zea mays
cagaaggcaaccacatgagtggacatgttgaaaccccaatgtcgtcaaacttctatgctggaattgggatggacagtggatatcagaagaaatctacgtccagttcatccagagtgcagattgatgaaagcagggaagcaagacagaaatactcaaaagcgaaatcaatttcttactctcagtttttaggtgatcaggccagtattgaaaaggacgctcaagtctcactccgaaagtattctggatcctctgcgatatcaagtgctgacctataaggccatacggcagacaattctagcgtg

SEQ ID NO: 17101 - DNA, 300 bp, Zea mays
gaccgcgcggggtgtgaaatacgtagattgctacggagttgacaacgcgctggttcgagttgcagatcctacgttcttagggtacatcattgacatgggggcatcttctgccgccaaagtggttaggaaggcttatccgcaagaaaacgttggggtgttcgttcaacgaggccgtgggggaccgctctcggtggttgagtacagcgaaatggattcggctatggctaccgaaatgaatcagtcgacagggcgactccgttactgttggagcaacatctgcctgcacatgttcactctgga

SEQ ID NO: 17102 - DNA, 301 bp, Zea mays
ctcacttctccaggaaagtgttcgtcctcatggcgccgccgcagccgaagtcgggcctcttcgtgggcatcaacaagggccatgtcgtcaccaagcgcgactgcctctgcgcccgtcccaccgcaaggggaaagcaacgaagagggtgtccatggtcaggggcctgatcagagaggttgctggctttgctccttatgagaagcgtatcaccgagcttctgaaggttggcaaggacaagcgcgctctgaagcttgccaagagaaagcttggaactcacaagagggcaaagaagaagagagag

SEQ ID NO: 17103 - DNA, 299 bp, Zea mays; identical to SEQ ID NO: 17083

SEQ ID NO: 17104 - DNA, 300 bp, Zea mays
ctcattttacggcatagaaagtcacagatgcatggaagcaactccaagtttggcttgtgcaaataaatgtgtattttgttggagacatcacacaaatcctgttggaaagagctggaaatggaagatggatgaccctcttgacattgtgaatgctgcaattgaccagcatactaagatggttaagcaaatgaagggcgtaccaggagtaaagccagaaaaacttgacgaaggtctgtcacctagacattgtgcgttatctctggttggtgaaccaattatgtaccctgagataaatgctct

SEQ ID NO: 17105 - DNA, 301 bp, Zea mays
cagacgcgtgggcgagacgcgtgggcggctccgcccgcgccatcagcggaggccctgtctacgtcagtgacgcacccggcaagcacaacttcgagctgctgaagaagattgtcttgaacgacggttccattctccgcgcgcgtctgcctggccggccacccaaggattgcctgttcacggacccggcacgggacggcgtaagcctgctcaagatctggaacatgaacaagttcaccggcgtgctgggcgtgtacaactgccagggcgcggcgtggaactccgtggagaagaagaacacctt

SEQ ID NO: 17106 - DNA, 296 bp, Zea mays
gggaaatgctgctgtccctggccaccaagatgaagccggagtacatcccgcccaaggaagacgtgatcgtgcagaacgaggctccggacgacgtgtacgtcgtcgtctctggcgaggtggaggtcgtactgttcgacggcgtcgacgagcgggtggaggcgacgctggggacgcgcaacatcttcggcgaggtgagcgcgctgagcgaccggccgcagggtcccttcacgttccggacgaggacgctgagccagctgctgcggctgaagcaggccacgctcaaggaggccatgcag

SEQ ID NO: 17107 - DNA, 294 bp, Zea mays
aatatcccaagttgtatccagtgatccaggcactaatggaggaacaaacacgctagctcaatcacgagtcactttgcctttccagcctcttgcactttgctttaaccatgtaaactattacgtcgacatgcctgcagaaatgaaggaacaaggattcacagaaagccgtttacaactactctctgatatcagtggcacttttaggccaggggttctaacagcactggttggtgtgagtggagctggaaagaccactttaatggatgtcctggcaggaaggaaaactagtggagc

SEQ ID NO: 17108 - DNA, 295 bp, Zea mays
ggaatctgctgagagcacaatggtggcctataaggctgctcaggacattgctctggctgagctggcacctacccatccgataaggatgggacttgctcttaatttttcagtgttctattatgagattctgaactccccagacaaagcttgcaacctggcaaagcaggcgtttgatgaagctatctctgagttagacagccttggtgaggagtcatacaaggatagcactctgatcatgcaactcctgagggataacttgaccctttggacatccgacctcacggaggatggtgct

SEQ ID NO: 17109 - DNA, 292 bp, Zea mays
ggttttcttcagatgttcgaaagcatttgcagcgcatccttcatccaaaccctaatagacgaatatctattgaagaaataaggactcatccttggtttagaattggtcttgatgcaagattgtatgattctacaacgagagattatgtgcctagtgacatggatttggctttgaattccttaaatagcaatatggtcgagtgtaattcagcggcagagaaactgactattttgaatgcttttgatatcatctccctgtctaacgggtttgatctctctggtatatttgagaa

SEQ ID NO: 17110 - DNA, 294 bp, Zea mays
gcgcgacgcgcgcctgcggttcgaggaggaggccaaggagctcgtggcgctgctggaggcgcactcgagggaaagaggttcttcgccggcgacaggccggggtacctcgacgtggccgcgtccgcgctcgggccctggcgcacgtcatcgaggagctcaacggtgtggcgctgctcagcgaggacgagcaccccaacctgtgccggtggaccagggactactgcgccttcgaggctctcaagccgtgcatgccggatcgggagaagctcctcgcctacttcactaagaacttcg

SEQ ID NO: 17111 - DNA, 295 bp, Zea mays
gttcaggctggtatatgcatggggttatatttatacctgtcacctaaatttccactctcacggtttagtgagcccctatattatgaatggggtttttggcaccgactcttctatcagtacatgtcaggctttaccgctcgttggaaatattactttatatggtcaatttcagaagcctcaattatcatatctggtctaggctttactggttggtcggaatcttctcccccaaaagccaaatgggatcgtgcaaaaaatgttgatgtattaggtgttgaattagctggaagttcag

SEQ ID NO: 17112 - DNA, 290 bp, Zea mays
gtggtcaaccgttcagcacaaagggtggatgccatccgcgaggagattaaagctatcgagattgtgtacaggcctctctcggagatgtatgaagctgctgctgaagctgacgtcgtgttcacgagcaccgcatctgaaaccccattgttcacaaaagagcacgcagatgcacttcccactgtttctgatgccatgggcggtgtccggctctttgtcgacatatctgtcccaaggaatgtcagcgcgtgtgtctctgaaattggctccgcgcgagtgtacaatgttgatga

SEQ ID NO: 17113 - DNA, 287 bp, Zea mays
cggaccgtgtgcgccgaggaaggtctacatgtcgtctccgccgccgccggtgaagctgatcggcttcttcggcagcccgtactcgttccgcgcgtatgcggcgctgagcctgaaagcgtgccgtacgagctgatcctggaggacctgttcggcagcaagagcgagctcctgctccaccataaccccgtgcacaagaaggtgcccgtgctcctccacggcgacggcagggccatctccgattccctcgtcatcgccgagtacgtcgacgaggccttctacgggccgcc

SEQ ID NO: 17114 - DNA, 291 bp, Zea mays
cccacgcgtccggcagccggcaaccgccgccatcgatcgatcgcccggaaactgacctctaccgatgtctggagccggcgaggaggataagaagcccgcggagggcggcgcccacatcaaccttaaggtcaagggacaggatggcaatgaggtgttctttcgcataaagaggtccacccagctgaagaagctgatgaacgcctattgcgaccgccagtctgtggacatgaatgccattgcattcctgtttgatggccgcagcattcgtggcgagcagacccctgatgagct

SEQ ID NO: 17115 - DNA, 289 bp, Zea mays
cggacgcgtgggcggacgcgtggggtgctgatgggtgttccacgtggcggtgcatcttctatccaaccattgcatctttcccctcttgccgaagcttgttccagaaaggatctgacagcaatacatgaaattctagaaaagacaggctacaaggatgatgaggggactgcaaatgagctctcgtttcagatgtggacaaatcagatgcaagatacactgaactcaaaaaagaagggtgacaatgcttttcgacaaaaggattttactactgccattgattgctattccc

SEQ ID NO: 17116 - DNA, 289 bp, Zea mays
cttctctctctgctcctccgcctccgcctccgcctgatccatccaagacagggatcgccatgtcggactcggaggagcaccacttcgaatcgaaggccgacgctggggcgtccaagacctacccgcagcaggctggcaccgtccgtaagaacggcttcatcgtcatcaagaaccgtccctgcaaggttgtggaggtttctacctccaagactggtaagcatggccacgccaaatgccactttgtcgccatagacatattcaatgggaaaaagcttgaagatattgttcc

SEQ ID NO: 17117 - DNA, 300 bp, Zea mays
acttgcgaacccaccggaccaaccaggacttggagcgtgcggcgtcggagttcgccggcggtgaggagcagaagaggaagggaaccaaagatgggctgctccatctcggggctcaacgcgctctacgatgcggccacgggcggcggcgacgtctggatcaacgagcgccgcttccgcgtccttcgccagatcggcgagggcgggttcgccttcgtctacctcgtcagagagcaccagcccgcctccgatgccgcgttcgctaggcgtgaccacgcccacgtctcagaggatggaacgtat

SEQ ID NO: 17118 - DNA, 312 bp, Zea mays
gcctccctaacccctacactccctccctctccccgcgggccgctagaggcaatttcgccctcgattcgaccccgattcgtccgcccgcgaccgggattccctccgccaagcgcggatctgaacgctgcgctccgtgtcgccgctcgaatccgccatgaagggggccaaatccaagggcgccgccaaggccgatgccaagctggcggtgaagagcaagggggcggagaagcccgccaagggcaggaaagggaaggccggcaaggaccccaacaagcctaagagggctcccagcgctttcttcgtgttcatgga

SEQ ID NO: 17119 - DNA, 310 bp, Zea mays
  unsure (1)..(310): unsure at all n locations
cagacgcgtggcggnacgcgtgggcgctcgcgcatcctattgccctcgcgccaccgtcgccgccgctgcagcgagccaccgcactgccgtcgccactggtagacaccaagccaccgccatggggcgtatgctcagccgcgggacgggtatctcttcatcggcgctgccgtacaagaggactcctccgatctggctcaagacagctaccaccgaggtggaggagatgattaccaaggctgcgaagaagggccagatgccgtcgcagattggtgttctgctccgtgaccagcacggcatcccgcttgtcaag

SEQ ID NO: 17120 - DNA, 307 bp, Zea mays
aaaaaatcatgctattgctctcccggaaagagttaatccagccaatttgagtttgattcttgactactgtcgatttcatcagatcactgggcgttcaaacatggagcggaagtcctttgatgaaaagtttgttaggatagaaacagaaagactctgcgaattgacttctgcagccgacagtctacagttaaagccacttgttgatcttactggccgagcgcttgctcgaatcattgaaggaaagacacctgaggaaattcgtgacattttccatttaccagatgatttaacagaggaagagaaattg

SEQ ID NO: 17121 - DNA, 309 bp, Zea mays
gtgcgtactgtctgtgcgaaggcgaccattccttcttcgctccttcgccgccgctatggttaagtactcgcaggagccgggcaaccctaccaaatcggccaaggccatgggaagggacctgagggtccacttcaagaacacaagggagacagcttttgcgcttcgcaagctgcctttgaccaaggctaagcgataccttgaggatgttattgctcacaagcaggcaattcccttccggagatactgtggaggtgttggtcgcaccgcacaagcaaagtctcgccactccaatgggcagggtcgctggcc

SEQ ID NO: 17122 - DNA, 306 bp, Zea mays
tttatttttttttttggagcaagcaagcagataaaataatgaaatactcgtcacatatgccatggctggcatatcaagcggtgcaggtgaaacaaagtctttgtggtagcatacagcatgctacgcacgaaggtactactacataccgcataacttgagcgaatacaacaagcaaaccataggcaagccccggaatgaaaggaaacaagggtacaaatgtggcggcccaaaccacccttactcgtcttggatggcctcctcgtcctcatattccgcctcctcatcagcagtggcatcctggtactg

SEQ ID NO: 17123 - DNA, 305 bp, Zea mays
ccctaagcagggagttgatttatccgctgcagccatgagtaagttgcagtctgagtctgtcaaggatgccatctcccagattgttggggatgccaaggagaagaataggaagttcactgagactgtggaacttcagattggtctgaagaattatgatccacagaaggacaagcgtttcagtggctctgttaagttgccccatatccctcgtcccaagatgaaggtgtgcatgcttggtgatgcccagcatgttgaggaggccgagaagatgggacttgactacatggatgttgaggctctcaaga

SEQ ID NO: 17124 - DNA, 303 bp, Zea mays
cccacgcgtccgcccatcgttctaatcaaacttctgcacctgaatataggcttcttttcacaaaccttggtggtgaaaagcgatttgcatcaatcgtggcaaagagactggagtcttggagctttaacgcaaggagatcgaagggctggaccatcacttagcgccttcaactatgacagtaattatggaaagaaagccctgacaatgatgtacagaggaataatggaacaggatgcctttcctgttgtgcctttcgaatgctctgagaatcaagctacccttgaagagttcatcactaaagca

SEQ ID NO: 17125 - DNA, 303 bp, Zea mays
caacctcatcctcaacaactgctgcaagatttgcccggaggacttcacttgccccaactaattgagctgaatatggagataaaaccagcatccaaggaatgtaccccttaatattcgatctcgcgattctgattgtgacttgatcatcatcactgtttatctatttttatattttatacttaattatcaataagaaaaatataaaaaaatagaaaataaactcactatacgaatgcccaaatggctgagatatggagatgcacaccctacaccatacactagtgactaaatacatgcacaaca

SEQ ID NO: 17126 - DNA, 301 bp, Zea mays
cgagcgtggcggacgcgtgggagcacattccccagcccggttccttttcgtgcggtttgatctcgtcggaggcccggccgcagacccgccatcaactatcgaattcgatggcggccaacttcgggaacaagatccgcaacgccaagctggttcttcttggagatgtaggcgctggcaaatctagcttggttcttcggtttgtcaagggacagtttgttgaattccaggaatcaacaatcggagcagctttcttttcccagaccttagcggtaaatgatgagactgttaagtttgaaatctg

SEQ ID NO: 17127 - DNA, 297 bp, Zea mays
gtcaagagccagctgcgccaagagttccatgttgctgctcagaacttctgggtgaagaagggaggtgctttcactggtgaagtcagtgctgagatgctcgtcaaccttggtgttccctgggtcattcttggacactctgaaaggagagctctgctgggagaatcaaatgaatttgttggagacaaggttgcgtatgccctgtctcagggactaaaggtcattgcatgtgttggtgagacccttgagcagagggaggctgggtctaccatggatgttgttgctgcacaaacaaaagca

SEQ ID NO: 17128 - DNA, 299 bp, Zea mays
atcgacgagctccgcctccgctccgcgccagacggagcgcccagccgctgcgacgtccgccacgacgtccccgccgtcgtcttctccaccggcggctacacgggcaacgtgtaccacgagttcaacgacggcatcatcccgctctacatcaccgcgcgccactataacaagaaggtggtcttcgtcatgctcgagtaccacgactggtggatgaccaagtacggccacatcgttgagcagctctccgactacccgcccatcgatttcaccaacgaccgccgcacgcactgcttccccga

SEQ ID NO: 17129 - DNA, 331 bp, Zea mays
gaacaatgccattgtctgcaacattggccactttgacaatgaaattgatatgctcggccttgagacctaccctggcgtcaagcgcatcaccatcaagccccagactgaccgctgggtgttccccgagaccaacactggcatcattgtccttgctgagggtcgcctgatgaaccttgggtgtgctactggccatcctagctttgtcatgtcctgctcattcactaaccaggtcattgcccaacttgaactgtggaaggagaagagctctggcaagtatgagaagaaggtgtatgtgctccccaagcaccttgatgagaaggttgctgctctc

SEQ ID NO: 17130 - DNA, 327 bp, Zea mays
caactctttcccaaatccaccgccggctcggctcgcccatcttcgcgccaagcaccgaatctccgatggcccgcacgaagcagacggcgcgcaagtcgacgggcggcaaggcgccccgcaagcagctggccaccaaggcggcgcgtaagtcggcgccggcaaccggtggcgtgaagaagcctcaccgcttccgccccggcaccgtcgcgctccgggagattcgcaagtaccagaagagcacggagctgctcatccgcaagctgcccttccagcgcctcgtccgtgagatcgcgcaggatttcaagaccgacctccgcttccagtcct

SEQ ID NO: 17131 - DNA, 330 bp, Zea mays
cgctgaggatctggagaaggttgctaccgacctcagggccagtatctggaagcagatggctgatgctgggatcaagtacatccccagcaacaccttctcgtactatgaccaggtccttgacaccactgccatgctcggcgctgtccccgaacgctactcatggactggaggagagattgggtttgacacctacttctccatggccaggggcaacgccactgtccctgctatggagatgaccaagtggtttgacaccaactaccactttattgtccctgaattgggcccaaacaccaagttctcctatgcttctcacaaggctgttaacga

SEQ ID NO: 17132 - DNA, 331 bp, Zea mays
cggacgcgtggacttgaccaagcagcagcagcagggatggcgcctctgaagctgtacgggatgccgctgtcccccaacgtggtgcgcgtggccaccgtgctcaacgagaagggcctcgacttcgagatcgtccccgtcgacctcaccaccggcgcccacaagcagcccgacttcctcgccctcaaccctttcggccagatcccggctctcgtcgacggagacgaagtcctcttcgagtcccgtgcgatcaaccggtacatcgccagcaagtacgcgtcggagggcacggacctgctccccgcgacggcgtcggcggcgaactgtgaggtgt

SEQ ID NO: 17133 - DNA, 329 bp, Zea mays
ggcgaggcctacttcggcgtgcgcccctcggcgaccgagctcggcaagggcgggccgagcaaggcggccaagtggctcatctggcagctccacccgctggtcacgctcggcctccccatgggtcctggaggagccgctgctccacacgttccacctcccgcctttcctcgtcaagggcgactacagggcgctgtacaagtacttctccacggtggcgaacaggcgctggacaccgccgagggcctgggcctgtcgcgcgaggaggcctgccacaacctcctcttcgccaccaccttcaacagctacggcggcctcaaggtgctgttccc

SEQ ID NO: 17134 - DNA, 328 bp, Zea mays
actagttctagatcgcgagcggcccccttttttttttttttttcccgatctctatccttgtcctccctgtcccgatctctatccttttctttatcctcagttttaacagccctcgtgcttggccttatgttgaagacaccggcaagaaatccatctatattttcacaatgctccaagaattcgttaaacccttccataagatctggataatgttggagtatatcattcaccaagttcttcagttcacttcttgtgataatctcttggctatagatgtgtagacatttcaaaaactcttggtaagcttcatgctccagcttttccttca

SEQ ID NO: 17135 - DNA, 329 bp, Zea mays
cccacgcgtccgggcgcgtgctgcgtcacagcagttctccaaaagggtggtctggtcgtctccaacgctggagactgccgtgcggtgctcagccgagcagggaaggcacaggtgctcacctcggaccaccgggcctcccgggaggatgagaaggagagaattgaaaatttgggtggatttgtggtgaattaccatgggacatggcgagtccagggttccctagcagtgtctaggggcattggggatggacacctaaagcagtgggttgtggctaacccagacactaggacgctcctcgtcgaccaccagtgcgagttcttgatacttgc

SEQ ID NO: 17136 - DNA, 330 bp, Zea mays
ggcggaggtgcccgcggaggccgtcgaggactccacgttcgtcgaggcctggaaaaaggtcgcccccaacatcgagcccccagcgacgcccctctccctcatgcagccgcgcccgcccacgccagctaccatccctaccaagctcaccgtcaacttcgtcctcccctacaagtccgagatcgccaacaaggaggttgacatggtaattgtaccagctacaactggtcagatgggtgttttgccaggccatgttgccacaattgcagagctcaagcctggtgttctctcagtacatgaaggacacgatgtgagcaagtactttgtgagcag

SEQ ID NO: 17137 - DNA, 328 bp, Zea mays
caatttccactgcccagggcgaagagctgaggaagctaattggtgctgccgcctacatcgaatgcagttcaaaaatccagcagaacataaaagcagtgtttgacgcagcaattaaggtggttctccagccaccaaagcaaaagaagaggaagaagaaggtgcagaagggatgcaccattttgtaactacaaacggtagagggcaacagtctggctgcggcgctgctgccaatgataaccatcgcctccttgctgtataatatatcgcctgatcatgccaccagcatgcacaagggagatggtggttttaggatccttgtcctactgtg

SEQ ID NO: 17138 - DNA, 320 bp, Zea mays
gcgtataggttcagaaaggataatgagaaagcaaaagatgcttttgagaaggcctcaaaaggacaggaaatgatctcctcaccatgggacgctgctaagcatatggaatctgctgctgctttagcaaaggagcttgggcgctggaatgaagtatctgatttctatcacagagcttcagaattataccgtgaatgtggcaggccacaacctgcatctgatgctctagcaaagggtgccagtgcattggaggagaaatctccagaagaagctatcaaaatgtatgatgaggcttgttcagttctagaagaagatgggaagga

SEQ ID NO: 17139 - DNA, 105 bp, Zea mays
agactacttggttcattgattcttgaagagatcgagcttctgttgcaccacaaggtcgacgatgacttgcaactgctgatcaagctgcggcttcggatcaagctg

SEQ ID NO: 17140 - DNA, 322 bp, Zea mays
cggacggtgggccgcgaccgcccctatggccactgcctcgtcgcaggcctcgccaagtacccaaagaaggtgatccgcaaggactcctccaagaagactgacaagaagtcgcgcgtcaagtgcttcatcaagctcgtcaacttcactcacctcatgcccacccgctacaccctcgacgtcgatttcaaggatgtcgccaccggtgggcccgacgcactctctacccacgacaagaaggtcgccgcctgcaagacggccaaagcgcgccttgaggagaggttcaagaccggcaagaacaggtggttctttaccaagctccgct

SEQ ID NO: 17141 - DNA, 321 bp, Zea mays
ctatgtgaaggacacctcttctatacgaccaaactgttattaagcaagagttaatcaggacagttgatcttgggcctttcaaacatgttgtagatgatggtcttgaactcaggaaagctgcctttgaatgtgtggatactttattggacagttgtcttgatcaagtgaatccatcgtccttcattgtacctttcctcttgtctggtttaggtgaccattacgacgtgaaaatgccttgccatttgattctatcaaagctagcagacaagtgcccttccgccgtccttgctgtcctggactccatagttgaaccaatcgaga

SEQ ID NO: 17142 - DNA, 322 bp, Zea mays
ctaaaacctagcagaggcccgcgccgccgccgccaaccgcgacgaggaaggaagcaggaacgcgatgccgaagtcgaagcgcaaccgcccagtgaccttatcgaagaccaagaagaagccaggtttagagcgcaagggcaaagtagtcgccgagataaaagatgctgtcgacaaatacagcagcgcctatgtttttacctacgataacatgaggaatcagaagctcaaggacctcagggagcagctcaagtcttcgagcaggatttttctcgctggaaagaaggttatgcagatagcgctggggcgttcgcctgctgatgaa

SEQ ID NO: 17143 - DNA, 322 bp, Zea mays
gttctgctagcaggaggttggatttcagaggcagaagctttcagccaggcgggctcagggcgcgggcacatcaatggctggcaaggaaatcctccacaagtgtgaagtgacaagggtgaaagattgcatttaagttcatcaggaccagaaacagggaaaggcaagacaaagttatcaggcaagcgtgtcaagcatggttaccatctggtgaagggcaaatctaatcatccaatggaggattatctagtggcagagtaccggcaagttggtgaacatgatttgggattgtttgctatattcgatggtcacctgggccacactg

SEQ ID NO: 17144 - DNA, 313 bp, Zea mays
gttggagtcttctctgctaccatgccacctgaagcccttgagattacccgcaagttcatgaacaaaccagtgagaattcttgtgaagagagacgagctgacccttgagggtatcaagcagttctatgtgaatgtggacaaggaagactggaagctggacacactgtgtgacctgtatgagaccctggccattacccagagtgtcatctttgtcaacacccgccgcaaggtggactggctcactgacaagatgaggagcagggaccacaccgtttctgccactcatggtgacatggaccagaacactagagaca

SEQ ID NO: 17145 - DNA, 313 bp, Zea mays
cgttgagccgtcgtgccctctgaagaagggcgccgcggccccgggccctgggccgggcccgccttcccccaccccgccgcccaccgtctgcgacagctactactcgtgccccgccagctcccacctgctgctgcatctatgagtacggcaagccctgcttcgcctggggctgctgcccgctcgagggcgccacctgctgcgacgaccgctacagctgctgcccccgtgactaccccgtctgcgacgtccagcagggagcctgcctcatgggcaaggacagcccactgtcactgtcagtgaaggctacgaagcg

SEQ ID NO: 17146 - DNA, 319 bp, Zea mays
cgacgaccatgatgaggctgaagcagcacatggtcctggtctcctcccctacccctgccatcgtcgtgaggctcggcaacaacacaccccaccgccgccgagcaactcggtctcggatcgtgtcgtcctccgcctccgacgccgcgccgttcgagaagcccagggccgtggtcaagaaggtcctcgcgcagtcgcagcccgagggtcagggtgccaccgtccgtatgagcatcggcaggcacgagctccgcaacctggacccgttcctccagctcgacgagttcactgtctccaagcccgccgggttccccgaccaccc

SEQ ID NO: 17147 - DNA, 316 bp, Zea mays
aataaagatctcttggacattttaattttagggtatgagaacatggacatcgctttacattatggtgctatgttgagggaatgtattcgccaccaaagcattgcaaggtatgttttagagtctgaacacatgaagaagttctttgactatatacagcttccaaattttgacatagcttctgatgcttcggctacctttaaggaactgttgacaaggcataaagcaaccgtggctgaatttctctccaacaattatgattggttctttgaagaatttaactctaggttgctgtcatcaaccaactacataacaaaaa

SEQ ID NO: 17148 - DNA, 305 bp, Zea mays
gcacaggacttctgattcttggtgtgctatgccactctctgccactgatgctgagatatgctgtgagctccggggagcacgcagaatcctcttgggattcaggactggagctgtcccgagcatgcagcattgtcatgctccttgcctatgtagcctaccttttcttccaactgaaaacccaccgccaactatttgaaccccaaccccaagaggttgaagatgatggtgatgattcggtctctcaagacgaggcagtactgggattttccagtgcaatgatttggctgggagtcatgaccctgatg

SEQ ID NO: 17149 - DNA, 307 bp, Zea mays
gcagagaactcagagctcttcgtgccctcctgcaagcgccaaggaggaagagaagtgtgcgtagttccatagacccctgacaaatcagcgccatcatacaacaccagcaactgttggtttagttgtaaatctgccttgcagccgtattatctgtatcaccgtttttgtgtcgcgatggctggcctatctttggaacatccttgggcgttcgccttcggtctcctaggcaacgtcatctccttcatgaccttcctggccccgataccgacgttctaccgcatctacaagagcaagtcgacggaaggtt

SEQ ID NO: 17150 - DNA, 301 bp, Zea mays
aaactctcggagacagggaagtagcgtacgtagatccagagctcggcgccagagatacccgacatcctcgtcatgtctccggttgcaagcaagggagtagtgatggacggtgcggtggcggtggcggcagtggccgcgccgtgctgctgtgcctccatctgccggcggtggcgcgaggccagctgcaggtggggttctacaacacgagctgccccaacgccgagtccctggtccgccgagcggtggccagcgcgttcgccaacgactccggcatcgccgccggcctcatccgcctcctttt

SEQ ID NO: 17151 - DNA, 310 bp, Zea mays
cggacgcgtggcgagacgcgtgggtaacgacataaaggcaaagtacatcatcgaggctgccaatcaccccacagatccagaggcagacgagatcctgtcaacgaaaggcgtcatcatcctccccgacatactggccaactctggtggcgtcacagtgagctacttcgagtgggtacaaaacatccaggggttcatgtgggacgaagagaaagtaaacgcggagctgcggacgtacatgacgcgcgccttcggggacgtgaagcagatgtgccggagccacagctgcgacctccgcatgggcgccttcacg

SEQ ID NO: 17152 - DNA, 308 bp, Zea mays
attcccagcagcaccggtgctgccaaggctgtcggtaaggttcttcctgaattgaatggcaagctcactggcatgtccttccgggttcccaccgtggatgtgtcagttgttgacctcactgtcagaatcgagaagggggcctcttacgaggaaatcaagaaagctattaaggctgcttctgagggcccactcaagggtattatgggctacgtggaggaggatctggtttccaccgacttcaccggtgacagcaggtcgagcatcttcgacgccaaggccgggattgccctgaacgaccacttcatcaa

SEQ ID NO: 17153 - DNA, 311 bp, Zea mays
aaaagactccaattttcccacggctactgaatcacggatgcttaaatctccccaatccgtatctctgtttccctcacagcgcggctgcctgtaaccactccaggtctccagcgaacagagctcaggcgcaacgcaacaacacaaggcggcggttatggcctctgctgctgcgacggctacgatggggacggggaaggtggtttgcgtcaccggcgcatcagggtacatcgcgtcctggattgtcaggctcctactcgaccgcggctacaccgtccgcgccaccgtgcgagacaccgctgacccaaagaaaa

SEQ ID NO: 17154 - DNA, 319 bp, Zea mays
ttttagttcttccattttattctatttaagtccctaaattaccaaacacggaaatcaaaactttattttagttttagtatttggtaatttagagacttgaatggaataaaatggatagactaaaaataagttcctagaaatcaaacaccctctaagcatgcgaagtatttgtgcccattggataaacacctgatcatctatgtttcttggaagatgtgacctgaagaaatgtacagtgagataacaccgccatcagtttgtgctttcttgtctcagtttgcagtgcactccctctatggagaatgtatattttggagtt

SEQ ID NO: 17155 - DNA, 320 bp, Zea mays
gagcacgcagtagtgcagcagcactgaagcactacttcctgcactcactgtgctagctgctcaaaccgtagtagtaacagtccatcaccatcaccatcaccaccaatggctcccaaggttgcgctcttccttgccctaagcctcctgttcgctgccaccgcgcatggctgcgaaccctactgttccggcccagtcgtcccaacaccaccagtcgtgccgactccgtcgtcgcatagccacgggcgctgcccgatcgacgcgctcaagctcaaggtgtgcgccaatgtgctgggcctcgtcaaggtcggcctaccgcaata

SEQ ID NO: 17156 - DNA, 327 bp, Zea mays
cggacgcgtgggcgagaaattggtaatttgtcaaaactcgttgtcttcaatatctcatctaatagactaggaggaaacataccactagagattttcatttgtacagtgttgcaacgcttgatctcagccagaatagctttgaaggttcgttgccaaatgaagttggtaggctgccacagctggagctgctatcttttgctgacaataggctaactggccagataccacccattcttggtgaactatcacatttaacagcactacagattggtggcaatcagttatctggtgaaataccaaaggagctgggtctgctgtcgagcttgc

SEQ ID NO: 17157 - DNA, 116 bp, Zea mays
cccacgcgtccgcccacgcgtccgcccacgcgtccgctcgcgagataaactttagcagctattttttagctacttttagccatttataatctaaacatgagagctaatggtgataa

SEQ ID NO: 17158 - DNA, 329 bp, Zea mays
ctccgctgggccaccagctttgaccgccgcctccctccccctccgctactgcgacctccccaccccactcccccgcaggagcggcggcggcggcggcggcgaggtcgtaccccacatcggcgagcggcggcggcaccgcggaggcaaaggcaagatgttcgggcgcgcgccgaagaagagcgacaacaccaagtactacgagatcctcggggtgcccaagtcggcgtcccaggacgacctcaagaaggcctaccgcacagctgctatcaagaaccaccccgacaagggcggtgaccccgagaagttcaaggagctcgcacaagcctatg

SEQ ID NO: 17159 - DNA, 327 bp, Zea mays
ttccgtgggcggcccacggcgctcagcccggacttcttccgtgcaagggggttccacaacatgggaaaccgagtggacctcgacatggagatgaagtggttccgcggcctgctcaacctactctgccccggcaacctcgccggttgctcggatatgatgaaccaatctctcttcttagttggagaaatcgggggcaatgactacaacggacctcttctttctggagttcccttcgaggaaattcgcgccatcactccgagtgttgttgcgaaaatttcttctacaatcagcgaattgattcagctaggagccaagactcttgtggtt

SEQ ID NO: 17160 - DNA, 328 bp, Zea mays
cggacgcgtgggcgagagcgctggatccaagtgcccaagatgccgcctgatgaatgcttcatgtgctctgacaaggaatcacttgcagtgggcactgaactgcttgtgtttgggatggcacgtattgtcttcagatacagcatcctaaccaattcatggaccagggctcatccaatgaactccccgcggtgcctgtttggttcaacaagtgttggggaaaaggccttcgttgctggaggcactgattctattggcaacatactgagctctgcagagatgtatgactctgagacacatacctggacgcccctcccaagcatgaataggg

SEQ ID NO: 17161 - DNA, 328 bp, Zea mays
ctagttctagatcgccagccgccgctcgggccgctcgatctagaactagcccacgcgtccgcggacgcgtggcacgagcgcactatctacatcccacaaccaatcctggggaaatcacccaaaagtcttcacactatctggcttgaacgttaggagctaccgctattatgatcctgcaacatgcagccttcacttcgaaggactcctggaacacctcggttctgctccttcaggttcaattgtactgctgcatgcctgtgctcacaaccctactggagtagatcctaccatcgaacagtgggaacagattaggcagctgatgagatca

SEQ ID NO: 17162 - DNA, 321 bp, Zea mays
cccacgcgtccgcggacggtgggtattgttccaacagatggcgcttcaacaactggtaacactgcatttcaagataaggggtttgatcctacaggatgggaacttgcccttgttactgcaccaagcaatacaacttcatctacttctgttggtcaattgggtggtggactcgacaagctcattttggagagcctttatgatgatggggcctacaggcagaggcaacaacaacagctgtatggttcagcagctcctaatccattcatggcaaatgatcctttcgcgatgtcgaaccaagttgctcctccaccatcagttcaa

SEQ ID NO: 17163 - DNA, 323 bp, Zea mays
aaaagatctagttgaactccaaaccatcatcagcgagctatacggagattccaacaaaccactggttgtagccccaggaggattttatgaccagaaatggtttgctcagctcctcgatgtctccgggccaaatgttctcaacgcaatgactcatcatatttacaatcttggtgctggtaatgatccacaggttccaaacagaattttgaacccgcagtatctgagccggacttccgacacattcagaagtctccaactcaccatacagcgccatggaccatggtctgctccatgggttggtgaatctggtggtgcatataaca

SEQ ID NO: 17164 - DNA, 322 bp, Zea mays
gaccaagattgctgagctcctgaggtaccactcgaccaagagcggggatgagctgaccagcctcaaggattatgtgaccaggatgaaggagggccagaacgacatcttctacatcactggtgagagcaagaaggctgtggagaactccccgttccttgagaagctgaagaagaggggctatgaggtgctgttcatggtggatgccattgacgagtattctattggacagctgaaggagtttgagggcaagaagctcgtctctgccaccaaggagggcctgaagctggacgagagtgaggatgagaagaagcgcaaggaggag

SEQ ID NO: 17165 - DNA, 317 bp, Zea mays
gcccctcctcctctcccccatccgtacccaatctaatcgacacccggccgagatgggccgcaagttcttcgttggtggcaactggaaatgcaatggaaccgcagatcaggttgagaagattgtcaaaaccctgaatgaaggaaatgttccctcttcagatgttgttgaggtcgttgtcagtcctccttatgtgttcctcccggtggtcaagagccagctgcgccaagagttccaagttgctgctcagaactgctgggtgaagaagggaggtgcattcactggtgaaattagtgctgaaatgctcgtcaaccttggcg

SEQ ID NO: 17166 - DNA, 319 bp, Zea mays
ctgggtttggtgtttataagtatagactgctgcggattgagggccaagaacccatgggtagtgtgaattatcgagtagctgaacagcttaaggtggatgtgtttgctataaggccaacagggtatttgagctttgatatctccatgggccgtgataccttgtcagttgcactcttcaatgatgttgatgatgatcaggacccactcttattcgaatatctggcacgtccaatatttcctacctctgctgtccaggggaagtttgctgaaggtggtggtggtggttgtgattgtgctgagatttgctcaattggatgtaa

SEQ ID NO: 17167 - DNA, 324 bp, Zea mays
cgttgtgctctctctcttcattcgttctcggcctcaccccgagccagtcgtctcgctagggtttcgccgccgccgccatgcctcgccgcagctcaggaaggtctgccccacgcccagctccccgtgctgcttcactgaggaacccgccacagccagcacgccaggctcctcctccagctcctgttcgagatggtggtggctccatgtttggaggaattgggtccaccattgctcaaggtatggcgtttggcacgggtagtgccatggcacacagggctgttgactctgtattaggtccccggaccatccagcatgagactcttg

SEQ ID NO: 17168 - DNA, 318 bp, Zea mays
aaaggtttgaagcagctaggaaagaagaacgagagatatctgacaaatataactcagtcaagcaaaggaggtatgagctgtttatggaggccttcgatcacatatctaaaggcatcgacaaaatctataagcagctgacaaaaagccatacacatccactcggaggaacaccatatttaaatctagaaaatgaagacgaaccgtttctacatggaatcaagtacacagctatgccacctaccaagcggtttagagatatggaacagttatccggtggggagaagactgttgcagcactggctttgctttttgccattc

SEQ ID NO: 17169 - DNA, 316 bp, Zea mays
atccaatctagaagctcccctctccctccctccctctctctctctctcttcgccgtccgaagctccgcacccaatctaatcgacacctcaccgagatgggccgcaagttcttcgtcggtggcaactggaaatgcaatggaaccacagatcaggtcgagaagattgtcaaaaccctgaatgaaggacaggttcccccttcagatgttgtcgaggtcgttgtcagccctccttatgtcttccttcctgtggtcaagagccagctgcgccaagagttccatgttgctgctcagaactgctgggtgaagaagggaggtgc

SEQ ID NO: 17170 - DNA, 314 bp, Zea mays
gcccggagactgcctcgagaagctccgcaaggccaccaccgcccgtccgctcgtcatcaacaaagacgcggacggcggcagctacaagcgggcgcagtcgatgccgtcgaccccgacgacgccggtgacgccgtcgtcgtcgtcgtcgtcgactagctcgcgcggcgccggcaacgtgtggcgcacgtcttccacccggggagcaacctggccaccaagggcatgggcgccaacctcttcgaccggccgcagcccaactcccccaccgtctacgactggctctacagcgacgagaccaggagcaaccaccgcta

SEQ ID NO: 17171 - DNA, 318 bp, Zea mays
ggataagagttactacgatatgcaggaaatgggtagatggttccactaataccgaggaattagttgaaggttttgaccaggaatactgcagctgttgtgttggcaagatacatctctttgaaaatggagatggaggaagagttcgatgcaacccggtggcttgatagatctctcatacgtctttgttcaagatttggggattaccggaaggatgatccctcttcatttagcctgcattcaaatttctcattgttccctcagtttatgtttaatcttcggcgttcacaatttgttcaggttttcaataacagtccagat

SEQ ID NO: 17172 - DNA, 322 bp, Zea mays
cacaaattggtgcttcctggtgttccttggtaccatgaacgcctgatgcatcaaacttctatgggatctttgatggttgtaatactaattcagaccatcaagtacaacctctccaagctaagagatgtctaccttcacacaaactgtcttgcaattttagcaaatatggctcctcatgtgcataggctgagtgcttatgcatcacaaaggctagttagtctctttgacatgctttctcgcaagtatgccaaactagctgagttgaaaaatgacaagtctctgaaagttatatctgatcaaatggaagcagacaacatcgcag

SEQ ID NO: 17173 - DNA, 338 bp, Zea mays
tggagattgaaatcattgataaattaatctccattccgtacgtcgaaatgacattgagattgatggagcgttttggtgtgaaagcagagcattctgatagctgggacagattctacattaagggaggtcaaaaatacaagtcgcctaaaaatgcctatgttgaaggtgatgcctcaagcgcaagctatttcttggctggtgctgcaattactggagggactgtgactgtggaaggttgtggcaccaccagtttgcagggtgatgtgaagtttgctgaggtactggagatgatgggagcgaaggttacatggaccgagactagcgtaactgttactggc

SEQ ID NO: 17174 - DNA, 330 bp, Zea mays
gatcaaagaagatggcagctgtcgacacattcctcttcacctcggagtctgtgaacgagggacaccctgacaagctctgtgaccaggtctcagatgccgttcttgacgcttgccttgctgaggaccctgacagcaaggttgcttgtgagacctgcaccaagaccaacatggtcatggtctttggtgagatcaccaccaaggccaatgttgactacgagaagattgtcagggagacctgccgcaacattggttttgtgtcaaacgatgttgggcttgacgcggaccactgcaaggtgctcgtgaactttagcagcagtcccctgatattgc

SEQ ID NO: 17175 - DNA, 332 bp, Zea mays
tgctaagaagcctgaggactgggatgacgaggaagatggtgaatggactgcccctaccattcccaacccagaatacaaaggaccatggaaacaaaagaaaatcaagaaccctaactaccagggtaaatggaaggcacctatgattgacaacccagatttcaaggatgatccgtacatttatgcatttgacagcctgaaatacattggcattgagctgtggcaggttaaatcaggcactttgtttgacaacatcatcatcactgatgatcctgcgttggccaagacttttgcagaggagacatggggcaagcacaaggaggcagagaagactg

SEQ ID NO: 17176 - DNA, 331 bp, Zea mays
gaagggtgaaggaagtgcagtgcctgtaccgtggactccaggaatgggtaggaacatcgaaaattatgttttgagggaccaggaaactcggtatcgtcaaaggtatcttgatcttatggtaaaccatgaagtgaggcacatcttcaagacacgatctaaaattgtctcatttatccgaaagtttcttgatgaccgtgaatttttggaggtggagactccgatgatgaacatgattgctggtggagcagctgcaaggccttttgttacacatcacaatgaattaaacatgcggctttttatgcgcattgctcctgaattatatctgaaggaa

SEQ ID NO: 17177 - DNA, 334 bp, Zea mays
ggcctggttggaagaagggaacaaagattacatttcccgacaaggggaatgaagctccaaacatgaaagctgctgatattgttttcatcctcgatgagaagccccatgatgttttcactcgggatgggaatgatcttgtggtgactgagaaaatctcgctggtggaagcgctgattggatatactgcacgtgtcactacgcttgatgggcggacctatcattgcccatcaactcgataatccatccgagctacgaagaggtagttcctagagagggcatgccaatacccaaggacccctctaagaagggaaatctgcggattaagttcaacata

SEQ ID NO: 17178 - DNA, 334 bp, Zea mays
cccacgcgtccgagcacggtggcgggcaacctgtcgctgctgggatcggcggcgaacctgatcgtgtgcgagcaggctcgacgggcgcacgcaacgcctacgacctcaccttctggaaccacatcgtcttcggcgtgccctccaaccctcatcgtcaccgccatcggcatccccctcatcggaaagatcaacatctgatcgtagctcatatatactacactacatgcataattgaggcactcacgttggcgtcgctcatcgatgacgagaagaagcttggcgactgtcagctcgacctctagaagcagtcctacgtggtcgcatgtgtcgctgt

SEQ ID NO: 17179 - DNA, 330 bp, Zea mays
cggacgcgtgggctccgcgagtggtgccgacaaaatgctattcaccttgaggaaaaagagaagaaggagaaggagctgaggagccaaatcatcgttgatgctgcagagtttaagaaagcttttgttgagaagagaaagctcaatgctgagacaagcaagggccaaaaccgtgacagggagaagcttttcctagcaaaccaggaaaagttccatgctggtgcagataagcaatactggaaggcgatatctgaacttatcccacatgagattgctaacatcgagaagagaggggcaaggaaagacaaggagaagaagcctgggatcgtggtg

SEQ ID NO: 17180 - DNA, 324 bp, Zea mays
cccacgcgtccgcacctccagagttctgctgcccaatatcaacaaagataatgcatgatcctgttataataacatctggacagacttatgaaagagaatatattgagaggtggtttaatgaaggatatgatacttgtcctaggacacagatgaagctagagaacttctccatgatcccaaatacctgcatgagagatctcatttgcaattggtgcaaagagcatggttttacagtttccgattttattcctccaaatgaaaatgcttacagttacttaccagagcaattgcatggttactctatgtcaagtttgcacaatgttt

SEQ ID NO: 17181 - DNA, 326 bp, Zea mays
agcacgtcaaggccactgatgctggcatgcaagctggccttgtccgtctcttcttccacgattgcttcgtccgtggatgcgacggctccatcctcctcgacacgttcagcaacgacacaagcctgaccccggagaagttcggcgtgcccaacttccccagcctgcggggcttcgaggtgatcgacgcggccaaagccgagatcgaggcggcgtgcccgggcaaggtctcgtgcgcggacatcgtcgccttcgccgcccgcgacgcgtcctacttcctcagcgccggcggcatcagcttcgccatgcccgcgggccgctacgacggg

SEQ ID NO: 17182 - DNA, 332 bp, Zea mays
caccagccgccgtcatgtcgaagcgaggtaggggaggttcggctgggaacaagttccgcatgtcactgggtctaccggtggcggccacggtgaactgcgcggacaacacgggcgccaagaacctctacatcatcctcgtcaaagggcatcaagggccgcctcaaccgcctcccgtccgcctgtgtcggcgacatggtcatggccaccgtaaagaagggaaagcccgacctcaggaagaaagtgatgcccgccgtcatcgtccgccagcgcaagccgtggcgtcgcaaggacggtgtctacatgtacttcgaagataatgctggagtgattgt

SEQ ID NO: 17183 - DNA, 252 bp, Zea mays
cgctcccactctactcctatccactgcggcctggacgcgtgcgagagacttgaccaagcagcagcagcagggatggcgcctctgaagctgtacgggatgccgctgtcccccaacgtggtgcgcgtggccaccgtgctcaacgagaaagggcctcgacttcgagatcgtccccgtcgacctcaccaccggcgcccacaagcagcccgacttcctcgccctcaaccctttcggcaaaatcccggttctcgtcga

SEQ ID NO: 17184 - DNA, 323 bp, Zea mays
gtcgacggtgacggaggtcgaggaggtgaagatggtggcgaactgctgcccatctggttcacgtgcatcctcttctggacggtctactcccagatgaccaccttctcggtggagcaggccacgcgcatggaccgcccactccggcccgggctccggcgccggcgccggcggcttcgccgtcccggccggctccttctccgtcttcctattcctctccatcctgctcttcacctcgctcaacgagcgcctcctcgtgccgctggccggccgcctcacggtcctgccgcaggggctcacctcgctgcagcgcgtcggggccgggc

SEQ ID NO: 17185 - DNA, 322 bp, Zea mays
cggacggtggggttgaaaggaaggacttcaactcatatggtagccgaagaggaaatgatgagatcatggctaggggaacctttgccaacattcgtcttgtgaactatgttcttgaagggtgaggttggacccaagacaatccatgttccatctggggataagctttcagtttttgatgctgctatgaaatacaagaatgaagggcatgatactattatcctggctggtgccgagtacgggagtggtagctctcgggattgggctgcaaagggcccaatgcttcagggagtgaaggctgtgatagcaaagagctttgagagga

SEQ ID NO: 17186 - DNA, 319 bp, Zea mays
gcggcgtcggcggactcgtggctgtacgagaagttcacgacggagggcaacgtgcgcgcggactacaacgcgcaggggcagcaggtgacgtctctgatcctgacgcagcagtccggcggcgccttcagctcgcggcagaagtacctgtacggggagttcagcatccagatgaggctgatcccgggcaactccgcgggcaccgtgacctccttctacctgtcgtcgggcgacgggcccgggcacgacgagatcgacatggagttcatgggcaacgccagcgggcagcccgtggtgctgaacaccaacgtgtgggccaacg

SEQ ID NO: 17187 - DNA, 275 bp, Zea mays
aaaccgaagaaaaaatagaaacacttggcaaatccagattgctggtgagactgacaccacaccacattctggcgtactccgagtaatactacagtactatagtagttattcagtctgacattaaaaactgaccatccatcgtctcatctcaaagcccagaacagaacggcaagaaggcggaaagacaacaactagtaaaggaagcagaacgttgcacgcagactcgacccgaacgaacgttgcacgcggcgcacagacgtggttcgactcgacga

SEQ ID NO: 17188 - DNA, 308 bp, Zea mays
tttcacgcgtccgcggacgcgtgggcgaccgtccgggctccagagcgccgagtctgacgacgaggatggcgatgaatgaagaggcgatgctgctctactgttcatggcttcacttgtataatattaaatcaataagtttattttgcttgtctggtgtcatcgatgtcagtcttcgtttggtgtcagtcggtctggtgtcgatgtctaaaaactgttattgtcgtgccgcgcagcataccctatgtggttggctgcgtttggtgtcagtccgttttgtgtttggatgtcacggtttattatggtcctgt

SEQ ID NO: 17189 - DNA, 318 bp, Zea mays
cttccttgtttgctgaagtccctggtgtggaccgtggagtctcagggagaagcgcatgcgcacgccaatcggcaatccaccaaagattccgttctcccagtcgcctctcccagtcccagatctcgttcactcgcactcgcgcaaccccgcggccccgcgcctaatggcatcctgtggcgccggcgacgccgcgtcagcgcagccgagggccagtatctcgcacgtcatcttcgatatggacggccttctcctcgacacggagggcttctacacggaggtgcaggagaagatcctagcgaggtacgacaaggtgttcga

SEQ ID NO: 17190 - DNA, 316 bp, Zea mays
gtgaggttctccggggttcggtttcgtgggtgagcggatcgagatggcggcgtcggatgttgagtaccgctgcttcgtcggcggcctcgcctggggcacggacgaccactccctccacaacgccttcagcacctacggcgacgtcctcgagtccaagatcatcctcgatcgggagacgcagaggtcccgcggcttcggcttcgtcaccttctccacggaggaggcgatgcggaacgccatcgagggcatcaacggcaaggagctggacggccgcaacatcaccgtcaacgaggcccagtcccgctgcggccgtgga

SEQ ID NO: 17191 - DNA, 317 bp, Zea mays
agcagctcagcgcagtgctaccggacgaggtggaggccgcacgagcggctgtggagagtggcacgaccccgaacaggattaccgagtgccgttcgtacccgctgtacaggttcgtgcgcgaggagctcggcgccgagtacctgaccggcgagaagacgcggtcgcccggggaggaggtggacaaggtggtgatcgccatgaaccagcgcaagcacatcgacccactgctgcagtgcctcagcgagtggaaaggcgcgccactgccaattatctgaactacagataagagagaagacaaggtatgacggatgagaaaa

SEQ ID NO: 17192 - DNA, 321 bp, Zea mays
cggacgcgtgggcggacgcgtggggtcggctgcagaggcgaaggcggcggcggtcccggagtctgtgctgcggaagcgcaactgggaggagcaatgggcagcggataagaaggagagtgcgctcgcggacaggaagaaggcgctcgagagccgcaagatcatcttcgcccgcgccaagcagtacgccgaggagtaccacgcccaggagaaggagcttgtgcagctcaagcgtgaggcccggttgaagggtgggttctatgtgagcccagaggccaagcttctgtttgtggttcgcatccgtggtatcaatgccatgcaccc

SEQ ID NO: 17193 - DNA, 347 bp, Zea mays
tcttgctcttcctcctcatggagctgaagtttatgttggggggctttcctctgatgtatcttctgaagatctcaaacaactatttgaatctgttggagaagttgcagaagtgcgaatgcgaggaaagggggataacaagacatatgcttttattaatttcagaactaaagagatggctttaaaggccatccaaaagttgagcaataaagacctaaagggaaaaaagataaaagtttcatcctctcaggctaagaataggctttttattgggaatgtaccccatgattggacacctgatgatttcaaaaccgcagtggaagaagttggtcctggagttttaaaagttg

SEQ ID NO: 17194 - DNA, 340 bp, Zea mays
cggacgcgtgggttgatgcagacagtgagcaaatcaaacaaaactggctatgaatcactactgagggtatatagggaaaccgatctaagccaggagaaagttcgtgtgttaggttctttggcatcatcccctgaccatgatgttgtccgtgaagtattgaatttcatattgtcacctgaggtgaggaatcaggacgcaatatttttgctaagaggggtgagttcaggggcacacgaggtagcatggcaatggctgaaggaaaactgggattacatattgggagcctactctggaactctgctcacctatttcgtcaacataactgtctcgccactggcca

SEQ ID NO: 17195 - DNA, 145 bp, Zea mays
agcctggtgagtgtaaaattggaatcatgccaggttacatccacaagcctgggcgtattgggatcgtatctcgttctggtactttgacatatgaagcggtgtttcaaacaacagctgtaggattgggtcagtcaacttgtgtagg

SEQ ID NO: 17196 - DNA, 339 bp, Zea mays
cccacgcgtccggagaaggtcaatccaaggttgggcttcaacgtcgagctgaaatttgacgacagtcttgaatacaccgaggaagagctcactcgcatcctccaggccatcctgaaggtggttttcgagtacgccaaggacaggcctatacttttctccagttttcagcccgacgctgcgcagctcatgcgcaaattgcaaggcacataccctgtctacttcttgacgaacggagggacggagctatacgccgacgtgaggaggaactcgctggaggaggccgtcaagctgtgccttgccggtggcctgcatagaatagtttcagaagcccgcgggatc

SEQ ID NO: 17197 - DNA, 341 bp, Zea mays
ctcctacacaaacacgagctccgacctgctgcagctcggtgacaagatcaccgctgacgacgcttacaaattcctgctcaactggttcaagaggttcccgcagtacaagtcacacgatttctacatcgccggcgagagctacgccgggcactacgtcccgcagctgtcggagaagatcttcgacggcaacagggcgggggccaaggagagccacgtcaacttgaagggcctgatggtcgggaacgcgctcatggacgacgagacggaccagacgggcatgatcgactacgcctgggaccacgccgtcatctccgaccgggtgtacggcgacgtcaaggcca

SEQ ID NO: 17198 - DNA, 342 bp, Zea mays
cccacgcgtccgcacctccagagttctgctgcccaatatcaacaaagataatgcatgatcctgttataataacatctggacagacttatgaaagagaatatattgagaggtggtttaatgaaggatatgatacttgtcctaggacacagatgaagctagagaacttctccatgatcccaaatacctgcatgagagatctcatttgcaattggtgcaaagagcatggttttacagtttccgattttattcctccaaatgaaaatgcttacagttacttaccagagcaattgcatggttactctatgtcaagtttgcacaatgtttcggtacctctcattgctg

SEQ ID NO: 17199 - DNA, 338 bp, Zea mays
  unsure (1)..(338): unsure at all n locations
ctgagcttacaaccacgaagggtgtcactaccatcatcggcggcggcgactctgttgctgctgtcgagaaggctgggctggccgacaagatgagccacatttcgaccggcggcggtgcgagcttggaactcttggaaggcaagactctacctggtgtccttgccctcgatgacgcctagatnnnnnnnnnnnnnnnnnnnncaggttctgccagctttgcgtgtcatcttgtttcggaccttggtgtagcactgcaaggctaaggtttactcctccgcacatggacttttggggataggcttgccaccgtgttttgctagatgagtcgtggaataagc

SEQ ID NO: 17200 - DNA, 331 bp, Zea mays
ggacgacgacgacgagggggacatgaaggaggcgttccgggtgttcgatgaggacggcgacggcttcatctcggccgccgagctgcaggccgtgctcaagaagctcggcctgcccgaggctcggaacctggccactgtgcaggagatgatctgcaacgtcgaccgcaactgcgacggccgcgtcgacttcggcgagttcaagaacatgatgcaggggatcaccgtgtggggcgcttagctgccgcgcacctgcgttgtcacaccccctctactgcgtggtgtcatgtatgtatccaagcaccgtagtaggatgcgcttttctacccggcgc

SEQ ID NO: 17201 - DNA, 332 bp, Zea mays
gctagctagcgctagtaccatcgtgcgagtgtgtgagcaagttactgagagatctcggaacgttgcttgacagtttgagtaggtaaataatctatggcgcgccgacagtggagcagcggcggcctcgcggtcgcggtgctcgccgtgctgtcgtccgtgctcatctgctcatcgggccacccggtgccgggcgggcacggcggcgggctccccctgaagctgcacttctacggccacgcgtgcccgcagatggaggccatcgtggggtccctcgtggcgaaggcgcacgcggaggacccgcgcatggcggcgtccctgctgcggatgcactt

SEQ ID NO: 17202 - DNA, 335 bp, Zea mays
caaagtttctcctcgatcctcatctcctccctctctcgagtcaagagcagagcagctaccaaacaagctctcctttcgcttccgatccatggagctcgacgccgacaacctgagcgccaccgagctccgcctcggcctgcctgggaccagcagcagcagcagcgacgactggcagaagaagccgtcgccctccgtcggggccaagcgcgctctggacgacggcaccaagagcgaggcctcggggaccagcccggccgccagagacctcgacttcgaccacgaccacgacaccgccgcgcctcccaaggcgcaagtggtcgggtggccgccggtga

SEQ ID NO: 17203 - DNA, 333 bp, Zea mays
atttcacatgtgaaatttgaaccccaagaagggtattatttagcgacttcttcctatgacaccaaagcagccctgtggtcagctcgtgattacaaaccaatcaaaagtttggtgggccatgagtcgaaggttactagtttggatattagtggagatggacagaagattgtgactgtgtcgcttgatcgtacgataaaaatttggtcatgcagaagtagcacacaagataatgagatggaactggattgagacaattgggttcattgttgccagccccgcttctctattcatcagctagaagtagatattctccctttttgctgatcagacatt

SEQ ID NO: 17204 - DNA, 328 bp, Zea mays
cggacggtgggccgtcagcttggagcggtccaagcgccctgcgaacaaactacgccgatggcttcggcggcggcgtgggagggtccgacggccgcggagctgaagactagcgggggcggaggtgattcccggcggcgtgcgagtgaaggggtgggtcatccagtcccacaaaggccctatcctcaacgccgcctctctgcaacgctttgaagatgaacttcaaacaacacatttacctgagatggtttttggagagagtttcttgtcacttcaacatacacaaactggcatcaaatttcattttaatgcgcttgatgcactcaaggca

SEQ ID NO: 17205 - DNA, 327 bp, Zea mays
agcctctcgctgtgcattgaccagcgcagagacaagtagagcagggagggaagcccatcgtgtgtttctcagtcccagtcagcagcatggctgccggcgtcgcaacggcggaggagatcaggaagaagagccactcgggcggtgtgcggcggtcgccggtggacaggccgccgttcacgctgggggacatcaagagggccatcccgccgcactgcttccagcgctcggcgctcaggtccttctcgtacctcctccacgacctcgccatcgcggccgggctcctgtacctggccgtggcgggcatcccggcgctcccgagcgccgcgc

SEQ ID NO: 17206 - DNA, 327 bp, Zea mays
gcccctgcctgccgctccggggcaccatcaccgcgtcgggcgacctggtcccgctctcctacatcgccggcctcatcacgggccgccccaacgcgcaggccgtcaccgtcgacggaaggaaggtggacgccgccgaggcgttcaagatcgccggcatcgagggcggcttcttcaagctcaaccccaaggagggcctcgccatcgtcaacggcacgtctgtgggctccgcgctcgcggccaccgtgatgtacgacgccaacgtcctggccgtcctgtcggaggtcctgtccgccgtcttctgtgaggtcatgaacggcaagcccgagt

SEQ ID NO: 17207 - DNA, 325 bp, Zea mays
cggacgcgtgggcggacgcgtgggtgtgttcttgcgcgtacgcgtacacagccccgatccgaatcgtcctcctcgcgagcctcgccgatcccccactcccctcccctctcttcaagatgacgatctttgtgaagaccctcaccggcaagactatcaccctcgaggtggagtcttctgacaccattgacaatgtcaaggctaagatccaggacaaggagggcatccctcctgaccagcagcgccttatcttcgccggcaagcagcttgaggacggccgcacacttgctgactacaacatccagaaggagtcaacccttcatttggt

SEQ ID NO: 17208 - DNA, 213 bp, Zea mays
cttttctcggcctctaccgccccctcgatcggtcggccggtcagctatgacgccgggaagctcggccgccggatccggcgtcgtcgttcctcggaacttcaggctcctagaagagcttgaacgtggagagaagggcattggagatgggacagtgagctatggaatggatgacgcagatgacatctacatgcgatcatggactggcactattat

SEQ ID NO: 17209 - DNA, 326 bp, Zea mays
ggtggccggactgtggttgtatgaggcacgcctgaccaagtgcaagtaccttgctggagacttcctcagcctcgccgacctgaaccatgtgtctgtcactctctgcctgttcgctacgccctacgcatctgtgctcgacgcctaaccgcatgtgtaagcctggtggtctggtctgatggagaggccgtctgtccagaaggtcgctgccctgatgaagccatctgcttgaaacggttgccctgtcaatcggtgaatggaataagccaagtctgttctgggttgtttgcttgttcagtgatgtgtcttctatgacgaaagttgagtgc

SEQ ID NO: 17210 - DNA, 331 bp, Zea mays
gagcacatcagagatgagaaagtcaaggttctgcaatctgtgaaccctattaagcctgaagaggtagtccttgggcaatacgatggctacaaggatgaccctacagtgccagatgactcgaataccccaacttttgcatctgttgttcttcgggtacacaatgaaagatgggaaggtgttcctttcattcttaaagctggtaaagcattgagttcaaagaaagcagaagttcgggtgcaattcaaggatgtccctggtgacatttttagaagcaagaagcaaggaagaaatgagtttgttatacgcctccaaccatcagaagccatgtaca

SEQ ID NO: 17211 - DNA, 321 bp, Zea mays
tgaaagggcccctctacagcgccatctttacgccgctgagcgccgtgatcacggcgacactgtccacgctcttcctgcacgaacagctccatgttggaagcgtcctaggtgcggttacgatcatcgcggggctgtacgtcgtgctatggggtaaagcggaagatgcgaacggcggacaggtcggatccaagcagacggcagatgcggatggcatcgctgtcacagtagacactccgaccaatctttcagaaccgttgctaccgacagtggctgagccagtgttttgaacttgagtcttgggatttgggaatacccaagttc

SEQ ID NO: 17212 - DNA, 322 bp, Zea mays
cggacgcgtggggcgactgttcgcgcggcccttccgcaagaaggggtacatcccactcaccacgtacctgcgcacctacaagatcggcgactacgtcgacgacaaggttaacggcgccgtgcacaagggcatgccgcacaagttctaccacggccgcaccgggagcgtctggaacgtcaccaagcgcgccatcggcgtcgagatcaacaagcaggttaatggccgcatcatcaggaagcggatccatgtccgcgtggagcatgtgcagccctcccgttgcacggaggagttccgcttgaggaaagccaagaatgaccagctc

SEQ ID NO: 17213 - DNA, 142 bp, Zea mays
ccaagatgtccctcatgagggacctatgtgcgaccttctgtggtctgatccagacgatagatgtggctggggcatatctccacgtggtgctggatacacttttggccaagacatatcggagcagtttaatcacaccaacaat

SEQ ID NO: 17214 - DNA, 329 bp, Zea mays
cccacgcgtccgggctgcaaagactgagatagaaaagttgaaactttcggagcttacctgccgggaaggcattgttgaagttgcaaagataatttatggagtgcatgacgaagcgaaggacaaagcttttgagttggagttgagctggatctgtgatgaatcgaaccgtcagcatcagaaggttccaaatgaactgttggagcaggccaaagctgctgctcaggcagctcttgaggagatggatgctgactaagaaacaggacgatttgcccagacttggtgtttttggtgctgttgaaatctccgatccctttggggtgacccactgg

SEQ ID NO: 17215 - DNA, 324 bp, Zea mays
ggtggccggacggtggtggcatcgccaattcaactccgcatctgaatcggcactcggcagcgcgccagtccatagtgtaggaggaggagatggcgctcacaagaatcggtcttgctggccttgcggtcatggggcagaacccttgcctcaagcattgcagagaaagggttccccatctctgtgtacaacaggacaacctccaaggtggacgagaccgtgcagcgtgccaaggcagaaggaaaccttcccgtctacggcttccatgaccccgcgtcctttgtgaactccattcagaagccacgggtggtgatcatgctcgtcaag

SEQ ID NO: 17216 - DNA, 314 bp, Zea mays
caagatgcagatcttcgtgaagaccctgacgggaaagaccatcaccctcgaggtcgagagcagcgatacaatcgacaatgtcaaggccaagatccaggacaaggaaggtatcccgccggaccagcagcgactaatcttcgcggggaagcagctcgaagacggccgcaccttggccgactacaacatccagaaggagtccacccttcaccttgttcttcgccttcgcggtggcatcattgaaccttccctccaggcgctcgcccgcaagtacaaccaggacaagatgatctgccgcaagtgctatgcacggctgc

SEQ ID NO: 17217 - DNA, 309 bp, Zea mays
cccaggaggcagacgatgccaagatggcagctcatttggcacaagaagaactgagaaaggccaaggaagaagctgagcgaactaaggcttctgcgacaactgcagataccaggttgcgtgcagttctgaaagaaatagaggcgtctaaagcatccaaggggctagccatagcggcagttcaagcgatgcaagagagcaatgacgcaggaagcgctggtgcttctcctcgaggagtaacgcttcctataagcgagtaccatgctcttagcaagagggttcacgaagccgaggaacttgcgagcgagaggg

SEQ ID NO: 17218 - DNA, 314 bp, Zea mays
ctcggtgcagatgaaccgcgtccgcaacggggagctgtaccgctacatttgcgataccaagggcgcattcgtgcagcctgcgttctacgaagcgttcggcctgactgtgatcgagtccatgacgtgcggtctgccaacgatcgcgacctgccatggtggccctgctgagatcatcgtggacggggtatctggcctgcacattgacccttaccacagcgacaaggccgcggatatcctggtcaacttctttgacaaatgcaaggcagatccgagctactgggacaagatctcacagggcggcctgcagagaattt

SEQ ID NO: 17219 - DNA, 124 bp, Zea mays
gttaaaaggaagaggaagaaccagttcaggggtatccgccggcgcccgtggggcaaatgggctgctgagatcagagatcctcgcaagggcgtgcgcgtctggctccgtactttccactcccccg

SEQ ID NO: 17220 - DNA, 336 bp, Zea mays
ggtcgacacgcgtctgaggaagtttaccaaagaggatgtcaaagaacttatattccaggagatactgcagtaccatcctcaacttctgaaggattacaagaacggctctgaaaagacgagttttctatatcccagcgcgttgacagttcgtagcaatttgctaacttagaagaaaatggagagaggaatgccgcgcttgacaggaaacatgtttctctcccaaggacaacaaccgttcactccactccaattcctgcaaaggaaggtccagcagcaacctcccaggttgctcaaagggttccagcagctagaccaggaagagtggtaggcccagta

SEQ ID NO: 17221 - DNA, 321 bp, Zea mays
gtcaacgacgacgtctgccggcagtgctcctgctcctcctcctcctccttcccggccgccgcgcgagctatggtgggttagtgtctcttcttcgcggagacctgtgagaggagccatcatcatggccgccgttgagactgttgtcctcaaaggttgctatgtcatgcgagggttgcgcgggggcggtcagaagagtgctctccaagatggaaggagttgaaaccttcgacatagacctcaaggagcagaaggtgacagtcaaaggcaatgtcaagcctgaggacgtcttccagacggtttccaagtcggggaagaggacct

SEQ ID NO: 17222 - DNA, 315 bp, Zea mays
cggacgcgtgggcgagaagccgaagaaaattcgaagacgaggagcagctacactgcggacggacttcgggcatggagggccagttccaggttggcaaggaggaggtcatccaagcatggtacatggacgacagttaagaggaccagaggcttcctcatcatcgcgagcccaaagaattcatccctctcgacaaactttccgaactaggaatattaagctggcgcctaaatgctgatgattgggagaatgatgagaacctcaagaaaattcgtgaagccaggggttactcttacatggacatttgtgatgtgtgcc

SEQ ID NO: 17223 - DNA, 310 bp, Zea mays
atttataactttgtgacaaagaggggaaggtgcaaagggcggggttcgaagatctcatggacacaggttgagacaggatctgctattacatggaagtacccaagcgttgagctcgtcggggatgacagtgttggagagttctactcgggttgcgcttacaaaggattgccagcaagcagacacagggacgaaaatgatccacaaggggaaaaattcacgcagccggattatatccaagggcatctctgcagggaagtcaaggaattgctaccgtggcttggtcctgatgaactctagtgcagagaatgct

SEQ ID NO: 17224 - DNA, 306 bp, Zea mays
ggacagacggtgatactctttgggttgctgaatggcacgtcaattggccttctcaacctgagcttaggattcaactccattggattctaccagatgacaaaattggcgatcatacctttcactgtgctattggagactatcttcttgaacaaaagattcagcgagagtatcaaactctctcttctggtcttacttcttggagtaggaattgcttcaattactgatctcaagctaaacatgcttggttccatcctttctggcctcgccattgccactacttgtgttggccaaattgtatcctacatt

SEQ ID NO: 17225 - DNA, 319 bp, Zea mays
ctcgtcagtcctcagtcctcactttcgggccgagctccggatatccagcggcggcaatggcagccgaagccagcgccgtccagcagctcgctggcctcctggaccaagtggacgcgccgctgaagaagacatttgagaatgtgcatcagggctacccaacagagacattattgcgtttccttaaagctagagagtggcatgtgaataaggctcacaggatgcttgaagattctttgaattggaggatgcaaaatgaaatcgatagtatattggagaaacctattatcccagtagatttgtatagatcaattcgtgatac

SEQ ID NO: 17226 - DNA, 318 bp, Zea mays
gtgggatgggtccagattttcgtgttctggtgagaaaaaactgccttctattttagtggatgaaacatctgtgcaaaagattcaggcactaacaccaaatattggagttgtctatagtgggatgcgtccagattttcgtgttctggtgagaaaaagtcgaaagcaggcacaacagtattatcggttgtacaaggagcatatacctgtaacacagcttgtgcgggagactgctgctgtgatgcaggagttcacacagtcaggtggtgtaagaccatttggagtatcactgttgattgctgggtatgatgacaatggccc

SEQ ID NO: 17227 - DNA, 319 bp, Zea mays
cggacgcgtgggtagaagcacccctctccctctctctctcttcgccgtccgaagctccgcaccccaatctaatcgacacctcaccgagatgggccgcaagttactcgtcggtggcaactggaaatgcaatggaaccacagatcaggtcgagaagattgtcaaaaccctgaatgaaggacaggttcccccttcagatgttgtggaggtcgttgtcagccctccttatgtcttccttcctgtggtcaagagccagctgcgccaagagttccatgttgctgctcagaactgctgggtgaagaagggaggtgctttcactggt

SEQ ID NO: 17228 - DNA, 284 bp, Zea mays
cggacgcgtggggctggacgagatggtcaccgccgagagcgcaccttcggcctcttctccaggagttcgcgcgcgctacgggctcactcgtcggattccacacgtgttctgctcgacatggcttctacagccagactgttcagaagacatttcacagcatcaactggatcccaaggcaacaccatgagcgcgctggagaggtgttcgcatctccgcgccagacgctcatcggctctgggcaccgtccgggctctggttcacgtcgcgtcatcgacgtcgtcggc

SEQ ID NO: 17229 - DNA, 317 bp, Zea mays
ccgcaacgcgctctccggcacgatcccggcgttcaagaactgcaggaggctggtgtcgctgtacctggccggcaacggcttcaccgggcctataccggcgtccctcggagacttacaggtgctgacgtacatcgacctgtccagcaacgccctcaccggcggcattccgacggagctccagaacctgaagctcgccctgctgaatgtctcgtacaaccagctctccggccgcgtgccgccatctctgatcaccgagcttcccgccgtgttcctccaggtgcaaccggggctgtgcggcccggggttgccgaaagact

SEQ ID NO: 17230 - DNA, 321 bp, Zea mays
cgtgacgcgtgggcgagacgcgtgggcggacgcgtggggcttcaaccgcgtgttcaacgagggcatgaagaaccactcggtgatcatcaccaagaagctgctggacttctacacgggatttcgaggcgagtcgacgctggtggacgtgggcggcggcgtgggcgccacgctgcacgccatcacgtcccgccacccgcacatctccggggtcaacttcgacctgccgcacgtcatctccgatgcgccgccgttccccggcgtgcgccacgtgggcggggacatgttcgcgtccgtgcccgccggcgacgccatcctcatgaa

SEQ ID NO: 17231 - DNA, 319 bp, Zea mays
gaagatgaggagaagcgaacaagcaggcttcgagaacaagactgcaggtggatgtggaggaccaagcgaaaggggaactagagcaagatgggcggcgcactgctgcttgcgctcctcctcgtctctgctgctgccgcccctcaggtacttggagttggcaatggagacaatcacatgagaatcatccaggaggacatcatcgagacagtcaacaaccatcccagtgctgggtggacagcctcacgtaatccttacttttcggactataccattgcgcaatttaagcacatacttggagtgaaaccagcaccacagaatg

SEQ ID NO: 17232 - DNA, 320 bp, Zea mays
cggacgcgtgggcggacgcgtgggcggacgcgtggggatgtgacctttttgtttgttaccgatcagaagaggatctggaggttgcccctttcatatacgttaatgacggagcactgagttcagttactgctgagacaaatccacatgatgctcctgtacctccttgcatcacacaactggaaggtggacttgtccaagtagccattgaagtggaagaccgggcacaacgttcagcaataacaagagtgaatgctgatgacgttcgagtaacggtagctgcccttgctgctcgaggggaagctaacagtgagttgctagaa

SEQ ID NO: 17233 - DNA, 321 bp, Zea mays
ggagatatctcgaactaatgaagacatggaccttttctgcaacagctgctcttccccgaggcgggtttttggtcgcagttatttactaagtaagacaccttgcggtgaccattagagagtaaccaatcaccctgggtaggtcaatttttatctgcaagaactgatgaggccgcttggtaggagtaaatcgcttttcctgggaacgattgttggttagcgccgctactgtatgtatattgagataccttaacgattggtcttttggctgccatttggttacatgtatttgtatttggaggcataagtatcgtgtaatttgtg

SEQ ID NO: 17234 - DNA, 310 bp, Zea mays
cccacgcgtccggagatgtgtcggatcgggcagctgcggcatcccaacatcgtgccgctgctgggcttctgcgtcgtggaggacgagaggctgctggtgtataagcatatggagagcggggctctttcgtcggtgatgaagaagaagccaggggaggaggcgccgctgctggactgggcgacacggctgatgatcgccgtgggggcagcgagggggcttgcgtggctgcaccacgggttccaggttccgcagattcaccagaacctgagctcgagcgcagtgcttcttgacgaggactacgaggcccgga

SEQ ID NO: 17235 - DNA, 314 bp, Zea mays
acccacgcgtccgcggacgcgtggggctaggacttgcaaagagagttggagctaggattttgttgacatcaacctctgaagtttatggtgatccacttgagcatcctcaaactgaggatcctactggggaaatgttaacccgattggtgttaggagttgttatgatgagggtaagcgtgtagcagagacgctgatgttcgactatcacaggcagcatggcattgaaatccggattgccaggattttcaacacctatgggcctaggatgaacattgatgatggccgtgttgttagcaacttcattgctcaggctg

SEQ ID NO: 17236 - DNA, 310 bp, Zea mays
cggtgctactgacggttgctctagatccgttcatcctggtggttttgtgaggtcgaaagcggcgagcgaattagaagatgctggacaagctgtgggacgacgtggtggccgggcctcgccggagacgggcctcgagaagctccgcatagccaccaccgcccgtccgctcgtcatcaacaaagacgcggacggcggcagctacaagcgggcgcagtcgatgccgtcgaccccgacgacgccggtgacgccgtcgtcgtcgtcgtcgtcgacacgccgcgcggcgccggcaacgtgtggcgcacgtcttcca

SEQ ID NO: 17237 - DNA, 311 bp, Zea mays
cttcgcaacaccagtgcagaggtcatccagcatggtgcatgtatggggcttgggcttgcagctttgggcacatcagatgaggaaatataatgaggacataaagaatgtcctttacacagacagtgctgttgctggtgaggcagctggtattggcatgggcttgctcatggttgggaccgctagtgaaaaggctagtgagatgcttgcttatgcacatgatacacagcatgaaaagattataaggggtttgtcactgggaattgcactgacagtatatggcagagaagaggaagcagacaccttgattgaac

SEQ ID NO: 17238 - DNA, 313 bp, Zea mays
tgagacggtgggtatggaggcgtccggctgctgatggctatctgtaaagttttctacaactattgtgttcaaaataacatcagtttaaaagctgaaaatttcagcttatcatacgatactaatattcctcggcagtctgggctgtctggttcgagcgcgattgtttgtgctgctctaagctgccttcttgacttctataatgtcagacatctaataaaagttgaaatgagacctaatctgattctcaatgctgagaaagagcttgggattgttgctggacttcaggaccgagtggcacaggtttatggtggac

SEQ ID NO: 17239 - DNA, 314 bp, Zea mays
cggacggtgggcggacgcgtgggcacaggctcaccccaccaacagcaagcgaaaatctcccgatcccctctagtctccgcggcgaagatgtcggggcgcggcaaccgcgggaagggcctgggcaagggcggacgaagcccaccggaaggtgctccgcgacaacatccaggggatcacgaagccggcgatccggcggctggcgcgcaggggcggcgtgaagcgcatctccgggctcatctacgaggagacccgcggcgtcctcaagatgttcctggagaacgtgatgcgcgacgccgtcacgtacaccgagcacg

SEQ ID NO: 17240 - DNA, 309 bp, Zea mays
tgtcactgttgttgacatcgatggagatggtagctttctcatgaacgttcaggagctagctatgatccgaattgagaacctcccggtgaaggtctttgtgctaaacaaccagcacctggggatggtggtgcagtgggaggacaggttctataaggccaacagagcgcacacatacttgggaaacccagagaatgaaagtgagatatatccagatttcgtgacgatcgccaaagggttcaacattccagcggtccgtgtgacaaagaagaacgaagtccgcgcacgatgaaagaagatgctcgagactcc

SEQ ID NO: 17241 - DNA, 304 bp, Zea mays
ctccactcactgcaccgagctcactggcaatggctaccagcaccaagctcgtggcccttggctttgccgtcctcctgatcatcggcttctccgatgcagcgagggtagttaggcttggtagccatgcgtccgctggatgtggaggtggcggtgggggaggcggctccgggtcgactgggggtggctttggcggtgggtctggcggtggcggtggttacggcataggtaagggtggcggggactggtggaacaatttcgtctctagtatagcaagtggtggaggaggaggacaaggcggaggcgg

SEQ ID NO: 17242 - DNA, 304 bp, Zea mays
gtgaacccgccgccgacgcagcagcaggagacgcgccaaggagagcccgcaaggaggcgactatgagggccaagtggaagaagaagcgcatgaggaggctgaagaggaagcgccgaaagatgaggcagagatccaagtaggctgatggggattgtggatggtggtgtcggcatagttgtgttacgtttcttcgatgcgtgagttcatggagagatgtcacatcctagttcgtcgtcaccgtttgccatgggtccaatggctcgtcttggaaacctgcagttcagtaggccatctatcgtggttt

SEQ ID NO: 17243 - DNA, 309 bp, Zea mays
gcgacccgtaccccgcctcccggttcaaccaaatccctctcgcctcatccccaccagcgcaaagccgccctatcgtcctgtcgtgagaagcaatggcgggccgtggcaaggcaattggcgctggtgccgcgaagaaggcaacgtcaaggagctccaaggctgggctgcagtttcccgtcggcaggatcgctcggttcctcaaggccggcaagtacgccgagcgcgtgggcgccggcgcccctgtctacctcgcagctgtcctcgagtacctcgccgctgaggtcctggaacttgctgggaacgcagcga

SEQ ID NO: 17244 - DNA, 299 bp, Zea mays
  unsure (1)..(299): unsure at all n locations
cggacgcgtgggcggacgcgtgggcggacgcgtgggcggacgcgtgggtcaccatgtccatcacatccacagcagcggcaacaagctagtagcagatgttttcttgctccacgacgtgctacngccagggcccgaagtcacgccgatcatcccaccgaccaccaccctaccacctctgctgcctctccgcgaggccgacgcgctcccgttctccaccgggcggttcgccgacatcctcgccatgttcgcggcgacgacatccgacgccatgggcgaagagatacggtcgacggtcgaca

SEQ ID NO: 17245 - DNA, 310 bp, Zea mays
ccgagttcatatcattcgtgaccagcgaggccagcgacaaatgccagaaggagaaacgaaagacaatcaacggggacgatttgctctgggcgatggccactttaggattcgaggagtacgtcgagcctctcaagatttacctacaaaagtacaaagagatggagggtgatagcaagctgtctacaaaggctggcgagggctctgtaaagaaggatgcaattagtccccatggtggcaccagtagctcaagtaatcagttggttcagcatggagtctacaaccaagggatgggctatatgcagccacagta

SEQ ID NO: 17246 - DNA, 308 bp, Zea mays
cccacgcgtccgatataattcacctaataatttgtgttgtttgtttgtcttttaacttatttaagctggattatataatctagagggtaaacaaacagggcaagtattacatgtgattctattagtcattgaacacatttttacagatagacagtgaattaagcaaagagatagaacaatggaatgacatgctgaggactgaagtagtaaagttgtgtcaagacaacaattttcaaacaggttttattgaaggcactgataatagcactgttgttgatgcttacgagttgaaggtaaatctaaatgta

SEQ ID NO: 17247 - DNA, 338 bp, Zea mays
cgccattgagaagatcttgacccacaacagcaagggcatcaactaccagatcctttccaacccagagttccttgcggagggcactgccattcaggacctgttcaagcctgacagagtgcttatcggtggccgggaacccctgagggcaggaaggccgtccaggctctcaaggatgtgtacgctcactgggttcccgaggacaggatcctcaccaccaacctgtggtctgctgagctctccaagctcgctgccaacgcgttcctggcacagaggatctcctctgtgaacgccatctccgccctctgcgaggccaccggcgcgaatgtgactgaggtggc

SEQ ID NO: 17248 - DNA, 343 bp, Zea mays
atcaagcaataatcatcaagaacatggatttcctgagcgaccagggcagcctgagtgtcaatattatatgaggactggcgattgcaaatttggaactacgtgtaaatataaccatcctcgagattggagcactcctaagaccaattacatgttcagccatctatgccttccacttcgtccgggtgctcagccttgtgcgtactatgcccaaaatggatattgcagatatggagttgcatgcaaatatgatcactcaatgggtacactaggctacagttcatctgctttgccactatctgacatgccaattgctccctatcctattggcttctctgttgccaca

SEQ ID NO: 17249 - DNA, 340 bp, Zea mays
gaaacatcagtggctataatggctgaaggaaaacaacacgccctggcaattggatatacaaagatgtcagcaaaagacataaggaccatcaacaaaggaattggtgttgacaatatgcactatctaaatgatggcctatggaagatggaacggctcgaatgagtagaattctctgaggggttcataacttgcggcagatcgtattgatggacatatgaaaccagcaggaccctatttgcacagctggtatcgttttaaagatgaagtactaagaagctttatttacctgaggcaacttgagcttactccgaccctttggtgtggagtgcatgtcagaaac

SEQ ID NO: 17250 - DNA, 347 bp, Zea mays
gtgagcgggcgtgggaaggacgagctgagtaggtggttcgccccctgcgagaagctgggcatcgcggcggacacggttacttcacaaggtggagcagggacgcgccatgggaggcctcagcattggccgccgacctggactggaaaacaccgggaccggtgatgcggctgtacacggaggcaacggacggctcctacatcgagcacaaggagagcggcatggtctggcaccacgacgaggcggatccggacttcggttcctgccaggccaaggagctgctcgaccatctcgagaacgtgctggccaacgaacccgtggtggtgaagagaggccagcacatcgtggag

SEQ ID NO: 17251 - DNA, 346 bp, Zea mays
gctgtcctcccttcctttccctcttcttcggctccaaggaaaaggaggcggatgcgaatgggagtggctccaacaaggcaacacaatccaccggcaccaacccagcgcggcgccaccggcgacccgtacccccttccccggagagcgatggcgacggagctgacggcggcgcactgcgcgcgtacgacggcaccgacccgtccaagcccatctacgtctccgtccggggcaaggtctacgacgtcacctccggccgcggcttctacggccccggcggcgcctacgccgtcttcgcgggccgcgatgcaagccgcgccctcggcaagatgtccaaggacgaggccga

SEQ ID NO: 17252 - DNA, 342 bp, Zea mays
cggacggtgggctcgtgggccggggggctgacggagttcgccgacgggcgcaaccaggagagcaccagcgaggccgtgaacgcctactactcggcggcgctcttggggctcagctacggggacgcgcacctcgtctccgtgggctcgacgctcaccgcgctggagatgctggcggcgcagacgtggtggcacgtccggtaaggggagggcatctacgaggacgacttcagcgggaacaaccgcgtggtcggggtgctgtgggccaacaagcgcgacagcgggctgtggttcgcgccgcccgagtggaaggagtgccggctggggatccagctgctgcccgtg

SEQ ID NO: 17253 - DNA, 339 bp, Zea mays
cttcctcagcctcgccgacctgaaccatgtgtctgtcactctctgcctgtttgctacgccctacgcatctgtgctcgacgcctacccgcatgtgaaggcctggtggtctggtctgatggagaggccgtctgtccagaaggtcgctgccctgatgaagccatctgcttgaaacggttgccctgtcaatcggtgaatggaataagccaagtctgttctgggttgtttgcttgttcagtgatgtgtcttctatgacgaaagttgagtgcctatgtgtgagcatgcttgcttgtaacgagaccttgaattgttcggaaatgagcattcctgtgctcttcttta

SEQ ID NO: 17254 - DNA, 273 bp, Zea mays
cgccaacgtcagccacgccgcgcacgacttcggctaccgccctaccacctccctcgaggccggcctccgccacttcgtcgactggttcgtcagctactataagctcgacgccaagatcgccaagcccgccgccgccgacgacgacaagcccgcgaagaagaagaagaagaacaaagccatgtcggcgtcgtcgtgatcgtacgttcatcgatcaagcacacacgggcacacagaaacagagcaccgccaaccgcaagcacagtcaccaagtgt

SEQ ID NO: 17255 - DNA, 338 bp, Zea mays
ctcgccgctatgacagccgcacgacgatcttctcgccggaggggcgtctctaccaggtggagtacgcgatggaggcgatcggcaacgccgggtcagccctcgggatcctagcggccgacggcgtggtcctcgtcggcgagaagaaggtgacctccaagctcctccagacctcgcgctccgccgagaagatgtacaagatcgactcccacctggcgtgcgccgtggccgggatcatgtccgacgccaacatcctcatcaacaccgcccgcctccacgcccaacgctacgcgctctcctaccaggaacccatccccgtcgagcagctcgtccagtccctc

SEQ ID NO: 17256 - DNA, 337 bp, Zea mays
gagagagagatcagcaacttaacaacaataatggccaccgccatagttcccacggacgccgagctgctgcaggcgcaggccgacctgtggcgccacagcctctactacctgacatccatggcgctcaagtgcgcggtggagctccacatcccgaccgccatccacaacctaggcggtgctgccacgctgccggacctcgtggccgcgctgtccctgccagcggccaagctcccgttcctcgggcgcgtgatgcggctgctggtcacgtcgggcgtcttcgcgtcgtcgtccgagtccggcgacgtctaccggctgaacccgctgtcctggctgctgg

SEQ ID NO: 17257 - DNA, 86 bp, Zea mays
acagaagcttggagcaaatgccatccttgcggtttcacttgctgtgtgcaaagctggagctatggtgaagaagattcctccttaac

SEQ ID NO: 17258 - DNA, 338 bp, Zea mays
ctgtgaagttgctttctacaatggctgcaattcggttggaggaggatggtgataacattgagaacactctttcccttgctcttgttgacacttcaagacatgggactacagataggagtatccaattgtccgatacactagcctccagctcatgggaaagggttgctgaggagaagactttaattacccctgtgcagtgcaaaaatttgtggaggcaattcaaagctgaaactgaatatacagtcactcaagccatagctgctcaggaagcaaataagaggaacaacaactggctcccacctccatgggcacttgctgcaatggctatccttggattc

SEQ ID NO: 17259 - DNA, 333 bp, Zea mays
cccacgcgtccgcccacgcgtccgcccacgcgtccgcccacgcgtccgcggacgcgtgggcgacgcaattgacatcccctcgcctaccccagctctacccgcgacgcagcatcaccaggaaggatgacgtgctcaatggatctcccggccaatggcgggttcagcttcgacctgagccgccgcaacagtatgctggagaagaacgggctcaaactcccgggattcaggaagaccggaacaaccatcgtcggcctcgtctttcaggatggggttgttcttggggcagacacaagagcaactgaggggcctatagttgctgataagaattgtgag

SEQ ID NO: 17260 - DNA, 328 bp, Zea mays
cggacggtgggtcacacacaagacacaaccccactcacccggcagggaggccctcttcgtcggcggaggccatggtttccctcaagccgcagaagaggctcgccacgggagtcctaaaatgtggcaaggggaaggtgtggcttgaccccaacgaggtctacgagatctcgatggctaactcgcgtcagaacattcgtaagctggtgaaggatggattcataattaagaagccacagaaaatccactcaaggtcccgggcaaggagggcccatgaggccaagcagaaggggaggcactctggttacggtaagcgcaggggtaccaggga

SEQ ID NO: 17261 - DNA, 333 bp, Zea mays
gtcctcggacaccatcgacaacgtgaaggccaagatacaggacaaggagggcatcccgccggaccagcagcggctcatcttcgccggcaagcagctcgaggacggccgcaccctcgccgactacaacatccagaaggagtccaccctccacctggtgctccgcctccgaggtggcgccaagaagcgcaagaagaagacgtacaccaagcccaagaagatcaagcacaagcacaagaaggtgaagctcgcagtgctgcagttctacaaggtggacgacgccaccggcaaggtgacccgcctccgcacagagtgccccaacaccgagtgcggtgc

SEQ ID NO: 17262 - DNA, 330 bp, Zea mays
gtcggatctgagacgagacgagacgaccccccctcccctcaaccggaacttgttttaccccatctcatcccactgactccccccacccacccgcccgctgcctccgccggatctcgtcggactcggatccgctcgaccacgaccaccccgcgtcgccgccgcgcacagcagcagatcagagaagatggccggactcgacaccttcctcttcacctcggagtccgtgaacgagggacaccctgacaagctctgcgaccaggtctcagatgctgttctggacgcttgccttgctgaggaccctgacagcaaggttgcttgcgagacctgcac

SEQ ID NO: 17263 - DNA, 101 bp, Zea mays
tttcgtgggtaagcggatcgagatggcggcgtcggatgttgagtaccgctgcttcgtcggcaggctcgcctggaccacggacgaccactccctccacaacg

SEQ ID NO: 17264 - DNA, 325 bp, Zea mays
gtttgccgatcgagcccgggcgacgtgagatacgagcggcgtcgaccggcgccggcgagcctccgcagccgcagccgcccgatctgggttttctttcgtagcggtagcgcaagatgagccaggaccaggagaacggaggcaccaacgggcagcacgccgccgacgtcatggaggtggagccgaagcgccgggcgccgcggctgaacgagcgcatcctgtcgtcgctgtcgcggaggtccgtcgccgcgcacccctggcacgacctcgagatcggtcctgaagctccggccgtcttcaacgtcgtcgtggagatcaccaaggggag

SEQ ID NO: 17265 - DNA, 331 bp, Zea mays
cccacgcgtccgaccacgcgtccgcggacgcgtgggccgccgcctccgacatcgtcccttcgtccccacgaaccgataatccgccggcgttgagatgttggtttatcaggatctcctatctggcgacgacctcctgtcggcttcattcacctacaaggagctcgagaacggcgtcctgtgggaggtcgagggaaagtgggtcacccaaggtcctgttgatgtggacattggtgccaatccatccgccgagggtggtgaggacgaaagcgttgatgacacagctgtgaaggtggttgatattgttgacacattccgtctacaggagcaacct

SEQ ID NO: 17266 - DNA, 340 bp, Zea mays
tgacgagatggggagagagagaggcgaggaaggagggagagagcacgggggcttgatcgaagatggatgccggagcaaaggtggtgaagaaggccgcggcggggcgtcgcggcgggggcggccccaagaagaagccggtctctcgctccgtgaaggccggcctccagttccccgtaagccgtatcggccgctacctcaagcagggtcgctactcccagcgtgtcggcaccggcgcccccgtctacctcgctgccgtcctcgagtacctcgccgccgagctcctcgagttggcggggaacgcagcgcgggacaacaagaagaaccggatcatcccgcgaca

SEQ ID NO: 17267 - DNA, 176 bp, Zea mays
gttaccgagactggtacacaaggtcccagtcatgcccgtcctgccgcgggagcctgaagagggtccggtccagagacctctgggtgctcaccggcgacgacgacgtgatcgacacggtgacgctggagaaggagaacgcgaagcacttcctcagcttcatcgacagcctgcccctg

SEQ ID NO: 17268 - DNA, 320 bp, Zea mays
cttcctcccatcccagcaagtgaaaaggaacccaccgggggaacgagtcagccaaagaaaccaatggaggactactactacttgacctcctgggggaccacgggctccgtcgagcccaccggcttcccggcccacacggtgcctcgcaaccatagctcggcgtcgccgaggacccgccgtgcgtcccgcggcgacgctgacgccggagagcggctccaccactactacctcgacgcctgcttccggtgcgggcgacatcttggcgggaacaaggacatctttatgtacaggggcgacaccccgttctgcagcgacgagtg

SEQ ID NO: 17269 - DNA, 312 bp, Zea mays
caagaacatgatgtgcgcggcggacccgcggcacgggcggtacctgacggcgtccgccatgttccggggcaagatgagcaccaaggaggtggacgagcagatgatcaacgtgcagaacaagaactcctcctacttcgtggagtggatccctaacaacgtcaagtccagcgtgtgcgacatcccacctcgtcgggctgtccatgtcctccaccttcgtgggcaactccacctccatccaggagatgttccgcgcgtgacgagcagttcacggctatgttccggcgcaagccttcctgcattggtacaccagcg

SEQ ID NO: 17270 - DNA, 316 bp, Zea mays
cccacgcgtccgcttctccatcccacgcgcgcgcaggccaaggccggatcggcggcctctcagatctcgccggccgccgtgagacagagaccgaagggagggttgaccggtgctcgggaggaagatgtctagcgggacgcagcagaagtgcaaggtgtgcaccaagacggtgtacccgatggaccagctctccaccgacggcgtcgtcttccaccgctcatgcttcaagtgccagcactgcaagtctaccctctcactgagcaactattcctcgttcgaaggagtgccgtactgcaagacccatttcgagcagctg

SEQ ID NO: 17271 - DNA, 317 bp, Zea mays
agaagctagcgcttatagcttgtcagccatggccaccgccgccgcgtctagcctcctcaagtcctccttcgcgggctcccggctcccggccgccacgcggaccacaccggcgtccctcgtggtggccaccggcccgcgcggcgccggcgcggggcccatctgcgcgtccatgtccatgtcctcctccaacccgccctacgacctgacgtccttccggttcagccccatcaaggagtccatcgtgtcccgcgagatgacccgtcgctacatgacggacatgatcacctacgccgacaccgacgtcgtcatcgtgggcg

SEQ ID NO: 17272 - DNA, 235 bp, Zea mays
cccacgcgtccgcggaccgtgggcggttcgtgaggttctccggggttcggtttcgtgggtgagcggatcgagatggcggcgtcggatgttgagtaccgctgcttcgtcagcggcctcgcatgggccacggacgaccactccctccacaacgccttcagcacctacggcgaggtcctcgagtccaagatcatcctcgatcgggagatgcagaggtcccgctgcttcggcttcgtca

SEQ ID NO: 17273 - DNA, 312 bp, Zea mays
cggacgcgtgggcgactgacgagacggggagagagagaggcgaggaaggagggagagagcacgggggcttgatcgaagatggatgccggagcaaaggtggtgatagaaggccgcggcggggcgtcgcggcgggggcggccccaagaagaagccggtctctcgctccgtgaaggccggcctccagttccccgtaatccgtatcggccgctacctcaagcagggtcgctactcccagcgtgtcggaacggcgcccccgtctacctcgctgccgtcctcgagtacctcgccgccgagctcctcgagttggcgggg

SEQ ID NO: 17274 - DNA, 306 bp, Zea mays
gaatgaggagctctctggttggaagcttgttgttggagatgtcttcagagaaccaacctcaccgaagctgctctgtgtcatgattggcgatggggttcagattttgggtatggcaattgttaccattttctttgccgcatttggcttcatgtctcctgcatcgagaggaatgttgttgacagggatgatagtcttttatatgttacttggaattgtgtctgggtatgctgctgtcaggctctggaggactttaaaaggaacgtccgagggatggaggtctgtctcctggtcaactgcttgtttctt

SEQ ID NO: 17275 - DNA, 312 bp, Zea mays
cccacgcgtccgaatctgtggaacgcatgggctacatctccccggagtacgcaatggagggcaaattctctgacaaatctgacgtattcagtttcggcgtgctggtcctagagatcgtgagtggccgcagaacagctccctcctcgacgatgagtggtcaatgaacctcttgggctatgcatggaccctgtggaaggaaggcagcgtctcggagctcatcgacccgctcatgggagcaacgtacgcttacgatgaagcctgcagatgcgttcaggtgggtctcctgtgcgtgcaggaggtaccagccgagag

SEQ ID NO: 17276 - DNA, 309 bp, Zea mays
gcgcgggcatcgccgagttcgtcgccaccttcctcttcctctacatcaccgtcctcaccgtcatgggcgtctccaagtccacctccaagtgcgccaccgtcggcatccagggcatcgcctggtccttcggagggatgatcttcgcgctcgtctactgcaccgccggcatctccggaggacacatcaacccagctgtgaccttcgggctgttcttggccaggaagctgtccctgactagggccatcttctacattatcatgcaatgcctgggctgcatctgtggagctggagtggtgaagggcttccagc

SEQ ID NO: 17277 - DNA, 312 bp, Zea mays
ggaccgtgggtcgtcagcgagcccagcagatacgagagagaggatggcggacatcgcgttgctggtggcggacagttcgagaagacggcaaggcgaggcgcccccggcggggacagcggtacgacagcgggaccggcggcgagacgaggaacttcggggccgtggccaaggtgtggagctcttgggtggagtccgcctccgccgccgcgtccggggtcagattcaccgtcgcggtgcagctggagcccaagaccgggctcgcgctggccgccgccgacggcctcttctccgcctagcgtcctgcttccatgt

SEQ ID NO: 17278 - DNA, 306 bp, Zea mays
ggacgcgtggctggaacatcagatcttcagatttcactctgcaaggaaatggtagaatggacccgtgcagagaagcgtactttcctccggcaacgtgtggaaccaaggttggcagctctcctgttagagaatcaggagtatactgaagcccttaccctgcttactagtcttatcaaggaagtcaggagacttgatgacaagttacttcctgtggacattgaccttttggaaagcaaacttcacttctccctggagaatctgccaaacgccaaagcctccttaactgctgctagaacagcagcaaat

SEQ ID NO: 17279 - DNA, 305 bp, Zea mays
  unsure (1)..(305): unsure at all n locations
atacgnacacgcgtccgcggaccgtggcgactggntatattatgtttggcttggagtagattcacctgggtcaatgaaggttactgacttgcctcttctccttgatgggacatggatttggtgcctaaattgttgccctttttgctcagttgggtggtggaatatacaccaaagctgctgatgttggagctgatctggtcggaaaagttgagcagggaatacccgaagatgatcctcgtaacccagctgtcattgctgacttggttggtgacaatgttggagattgtgctgcccgaggcgctgat

SEQ ID NO: 17280 - DNA, 302 bp, Zea mays
ggtgggttggcttctcctccccctccggttcgggttcgggttcgtgaggttctccggggttcggtttcgtgggtgggcggatcgagatggcggcgtatgatgttgagtaccgctgcttcgtcggcggcctcgcctgggccacggacgaccactccctccacaacgccttcagcacctacggcgaggtcctcgagtccaagatcatcctcgatcgggagatgcagaggtcccgctgcttcggcttcgtcaccttctccacggaggatgcgatgcggaacgccgtcgagggcatgaactgcaag

SEQ ID NO: 17281 - DNA, 190 bp, Zea mays
ctggcttctcctcctcctcttatcaagtcctcctcgggttagggttccttagggttttgttgccgcgcgatggcggcggctgatgtggagtaccgttgcttcgtcggcggacttgcctgggccaccatctacgagtcgctggagaatgccttcgcctcctacggcgagatcctcgactccaaggtcgtca

SEQ ID NO: 17282 - DNA, 304 bp, Zea mays
atcagatctagcagaactctctcgacctcatcggcgttggcggacgcgtgttgaccggagatggcgccgagcgggtggaggaggagcgcggcggcgcgggtcgcctggcgcccggccacggtttgcctgtagctcgcgctcgccgccgccgcactgacgctcgcccaggctaagaaggacctgacggaggttacccacaaggtctacttcgacatcgagatcgacggcaagcccgcatgccggattgtcatagggctttttgggaagactgttcctaagacggcagagaacttccgagctcttt

SEQ ID NO: 17283 - DNA, 305 bp, Zea mays
aatatctccacaattaacacggacttagatattgaagcctctggtggatacgatgatgacctgattgccagactgttgaagctcgggtgttgcaaaaataaggaaatagctgttaagacagtcaaaaccatcaagttcttgggactacatgaagagactcaaatacctaagggttgttcgagcccatttgatgtgatttgccagcgaatggaacagaggatggcctatggccacaatgagcaagacatggtactgctccaccacgaagtcgaggtggaatacccggacgggcaacccgccgaaaa

SEQ ID NO: 17284 - DNA, 306 bp, Zea mays
atgggcgcctccaccacgccgctcgcgtcggcggcggcgctgcttctgctgctgctcgcgccgctcgccgcggcggcggacagcatgtcgatcgtctcctacggcgagcggacagggaggaggcgcggcggatgtacgccgagtggatagcagcacacggccggacctacaacgccgtcggcgaggaggagcgcaggttcgaggtgttcagggacaacctccgctacgtcgacgcccacaacgccgccgccgacgcgggcgtccactccttccgcctcgggctcaaccgcttcgccgacctcacca

SEQ ID NO: 17285 - DNA, 305 bp, Zea mays
gcggaacggccgggctagagtggcgtgcgacttctccggcgccggctctattgtttaccagcaacccagcttctgcgccgcgacggcaagctggtgcgtggcgaacccgggtgtcggggacgcgcggctgcaaacggcgctggactacgcgtgcggccatggcgcggactgccgcgccatccagcccgggggagcgtgcttccagccggacaacaaggcctcccatgcctcgtacgcgttcaacggctactaccagcgcaacaaccgggctagagtggcgtgcgacttctccggcgccggctcta

SEQ ID NO: 17286 - DNA, 310 bp, Zea mays
cgaatcccgctcctccgccgcctcgcgtccacccttcctcttggcgcgctccgatccaagagatggcggtgccgctgctgacaaagaagatcgtgaagaagcgggtcaagcagttcaagaggccccatctcgaccgctataagtgccttaagccaagctggcgcaggccaaagggtattgactcccgtgtcaggaggacgttcaagggatgcaccttgatgcccaacattggttacggctctgacaaatcaaccaggcactacctccccaataagttcaagaagtttgtggtgcacaatgtctctgagct

SEQ ID NO: 17287 - DNA, 316 bp, Zea mays
ctccgctcggccaccagctttgaccgcctcccctcccccccgctcctgggcacccataccccacccccccgcacgaacggcgcggcggcggcggcggcaaagccaaaggcaagatgttcgggcgcgcgccgaagaagagcgacaacaccaagtactacgagatcctcggggtgcccaagtcggcgtcccaggacgacctcaagaaggcctaccgcacagcagctatcaagaaccaccccgacaagggcggtgaccccgagaagttcaaggagctcgcacaagcctatgaggttttgagtgatccagagaaacgtga

SEQ ID NO: 17288 - DNA, 313 bp, Zea mays
cttggatatctctggaagttctattaaccccagtgagagaacctatccagaggagatgatccaaactgggatatccaccattgatgtcatgaattccattgctcgtggacaaaagattccactgttttctgctgctgggctccctcacaatgaaattgctgctcagatttgtcgtcaggctggtcttgtgaagacattggagaaaggaaagcatgctgagggtggtgaagatgacaactttgctattgtgtttgctgctatgggagtgaacatggaaacagctcaattcttcaaacgtgattttgaagagaat

SEQ ID NO: 17289 - DNA, 311 bp, Zea mays
acctgccgccggaagccctagagggctcgacccatggatccgccgcagcagccggagcctgtcacctacgtctgcggagattgcggagtgagaacaccgtgaagctagtagacgtcgtccagtgccgtgaatgtggccaccgcatcctctacaagaagcggacccgccggattgtccaatttgaagcacgctgaggagtgacgacaggggaaaaacactggagatggttgatctattactcgccactcacctatgtaaagagtcttgtgagggaaatgaaagtgtcagacataatgtttgaatgaatgtcg

SEQ ID NO: 17290 - DNA, 313 bp, Zea mays
gcccggaggctataaagacgaggcccatctcgaaatcgacggcgatgaagaagaccagttcccctctcctgatcgtcctgttcctcacagcagcagccatggcggccgagccggagaagcaggcggcccccgcggcacaggagacggccgtgcacatcgtgtacgttgaccgccccgaggacgccgaccctgaggagttccacatccgcaacctcacccccgtcctcggcagcgaacagaaggccagggacgcagtgctctaccactacaagaacgccgccagcggcttctccgcgaagtcaccccccagcag

SEQ ID NO: 17291 - DNA, 298 bp, Zea mays
attgtatgcaggcaaaacaaggtactggtgaaccagctgagtcaaccagaaccaggaacatcagatctttatttccctacagagtactcacaatccacagtaggacagttcaaagcctgcctctggaagcaatggctgacctattggcgcagccggattacaaccttgttagattttccttcactttgttagttgccttgctgctcggctccattttctggaggataggcaccaacatgtaaattttcttactttcttcgtgtttggtcgctggtgccaaccttccaaatctgaaagt

SEQ ID NO: 17292 - DNA, 308 bp, Zea mays
agaccgggtcggcgtcttgcccaaaatcgtgaagctgccaggaaaagccgattacgaaaaaaggcatacatccaaaacctactgagtagcagactgaaacttactcagttagagcaagagcttcagcgggctcgtcaacagggtatttttatttcgacatcaggagatcaacctcaatcaacaagtggaaatggagctttggcatttgacatggagtatgcacgctggttggaggagcacaataaacatgtaaatgagttgagggctgcagtcaatgcacatgctggtgataatgatcttcgttgtat

SEQ ID NO: 17293 - DNA, 304 bp, Zea mays
gttgccccatttaatacttattatccacaactcggggaacatttggcacaagttggtgtggatcctaatgtcaacaagtgggaccaaccttttgtgttgggagttgttgatctgcatgactcattatctcatcctgccggggtttctgatgtccaggctgagtccaccacttgtctagatcctgatctatttacgaactttttgattcctagttggtttgaagtagaaggacctaccaaataccatccatttaccctgcctgaacgttattgggcgtcccaagggaaaagcatgcatctctgga

SEQ ID NO: 17294 - DNA, 311 bp, Zea mays
cggacgcgtggcgcgacgcgtgggctgccaacttggagaagttccttggaactataccaatgatgttcaatgttgttatccttactcctcatggcagatttcgctcagtccaatgtgcttggataccctgacactggcggtcaggttgtgtacattctggatcaagtccgtgctttggagaatgagatgcttctgaggattaagcagcaaggccttgatatcactccgaagatcctcattgttaccaggctgttgcctgatgctgctgggactacgtgcggtcagcggctggagaaggtcattggtactga

SEQ ID NO: 17295 - DNA, 312 bp, Zea mays
gatgaggcaaagctgaatgctctgtcagaagaaatcgacctactcaattccaagatcgacaagctatccagtgagagaaatgagctattcgaaaagaatgagcagaaagaaaaggaattagctggaattagcgaaaaggacatgcaattgcaagacaaaactgctgagattacttcactaaataaagagcttgtattcctcaaggaccaagtgaagatgcatttggacgaactgcacagtttaaaacgtttgaagaacgagagggaggaaacaattggaaaactgcaaatagatattgggtcactgaaactc

SEQ ID NO: 17296 - DNA, 310 bp, Zea mays
cccacgcgtccgcccacgcgtccgcccacgcgtccgcccacgcgtccgacgccatcaaggctaggctcgacgccgcctgccccggcgtcgtctcctgcgctgacacgctcgcgctcgccgcgcgtgactccgtcaggctgacgaaaggcccgttcatcccgctcccgacttgccggagggacggcaacaggtcggtggccgccgacgtcgccctgaactcgccgccgccggacgccaacatcaccgatatcatcgccctgtttgctaaaaagttcaacctcagcgccaaggacgtcgccgtcctctccgg

SEQ ID NO: 17297 - DNA, 310 bp, Zea mays
atcacagttgtccagggccccaagcctggcaagcccaccgacctctcccggatgcgccatatcttggtgaagctgaagcatgctccgccgccacatatgatgcagcctccaccaccagcacctgctgctaaagagggcacaaaggatggcagcgccaaggttggtggaaaggatggcgccaaagaaggcggcgcggcagccccagcaaacggcgccaagcagcctgctgagagccaagaaaccaccgccaatggcccctcggaggcggagaaagagcagcctgcagcctctgagtgaccggaaagggtgt

SEQ ID NO: 17298 - DNA, 306 bp, Zea mays
ctcaaatttgcttgtgggacattaaagcaaatagtagaaacaaaagtcttgacgccttgcagatttttaagcatcatgatggtgttgttgaagatgttgcttggcacttgaggcatgagtacttatttgggtcagttggtgacgattatcatcttttgatttgggacctgcggtctccagcccctactaaacctgttcagtcagtggtggcgcaccagggtgaggtgaactgcctggcttttcacccgttcaacgaatgggttgttgcaactggttctactgacaagactgtcaaattatttgatc

SEQ ID NO: 17299 - DNA, 308 bp, Zea mays
gagtttatctacaagtttgattctacaaagaaaggtcgttttggtattctcccccgctatgcaaaggatgacaaactcatcagatggtttcaactccctaattgtttcatattccataatgctaatgcttgggaagagggtgatgaagttgttctcattacctgccgccttgagaatccagatttggacaaggtgaatggatatcaaagtgacaagctcgaaaacttcgggaatgagctgtacgagatgagattcaacatgaaaacgggtgctgcttcacaaaagcaattgtctgtttctgctgtgga

SEQ ID NO: 17300 - DNA, 302 bp, Zea mays
  unsure (1)..(302): unsure at all n locations
atgattgggatgatagggggcatggtgattcagtggctccatctgccactgttgttgtcaagggactgtccctgaagactaatgatgatgacctatataagattcttgctcagtggggacctctacgcatgtgcgtgtgatcagggaacggaattctggcatgtctcgtggatttgcttttattgacttccccactgtggaagcagcccgtagaatgatggaagctacaggagagaatggtctcgaaattgatggcaggaatgtgttctttcagtacagtanaccaaccggggggatgggtg

SEQ ID NO: 17301 - DNA, 306 bp, Zea mays
cctcaggcgcgagggtgaggggcagtacgccgcggtggagccgcagaggaggccaaggtctacgttgggaaccttccctacgacgtcgacagcgagggactccgcagatcttcgaccaggccggcgtcgtcgaggtcgccgaggttatctacaacagagaaactggccagagccgtgggtttggttttgttaccatgagcactgttgaggaagctgacaaagccattgagatgttcagccgctatgatattagcgggaggcttctgaatgtaaacagggcatcttctaggggcactcgcatggaaa

SEQ ID NO: 17302 - DNA, 305 bp, Zea mays
gaaaccttttcttgtgctctgtctgtgtgtttccaaagcaaacgaaagaggtcgaggatgtcttgcagctgcggatcaagctgcaactgcggatcaagctgcaactgcggcaagatgtaccctgacctggaggagaagagcggcgggggcgctcaggccagcgccgccgccgtcgtcctcggcgttgcccctgagacgaagaaggcggcgcagttcgaggcggcgggcgagtctggcgaggccgcccacggctgcagctgcggtgacagctgcaagtgcagcccctgcaactgctgatcctgctg

SEQ ID NO: 17303 - DNA, 306 bp, Zea mays
cgcagcctccaaagccactcccaaacccccgcttccagaaccttctcgaagctccccgccgcctcctccactcgcaccgatggcgaaggaaccaatgcgcgtgctcgtcactggcgccgcaggacaaattggatatgccctggttcccatgattgctaggggtgttatgcttggtgcagaccagcctgttattctgcacatgcttgacattccgccagcagctgaagcccttaatggtgttaagatggagttggttgatgctgcgtttcctcttctgaagggagttgttgctacaactgatgttgt

SEQ ID NO: 17304 - DNA, 305 bp, Zea mays
cggacgcgtggcgtgacgcgtgggcggacgcgtgggcacatttcctagcactagctcatccgttcacagctttaaccgtagctaagcttactctgtcagaagctatataagttagctggactgccatcgtcgattgtgtctgatcgggatcccatattcactagcaagttatggcaagaactgttcagattggctgggacaaagctgtgcatgagtagtgcctatcatccacagtctgatggtcagacagaaagggttaatcagtgtttggaagcttatctgagatgcttcgttcattcttgccc

SEQ ID NO: 17305 - DNA, 278 bp, Zea mays
cggacgctggggctcggcctcttctcccccaacgagaccaaggaggacgtctccacagcaaacctcaagtacctactggtcccatattgacttgcagaaatgaccgaaaagatagcacaggaggatcggatcccggttcttaagacgtcacaggaccatctgaaggagttcattgctctatgtgaagtactagagcttatcccagaggatgagctagaattgtctaggcagaagcagccagatactatgaccaacagaagagcgcagaaggttgcccg

SEQ ID NO: 17306 - DNA, 305 bp, Zea mays
caacccagtcgctcaaaaccctagagctctcgcctgctcgcctccgccgccggagcgagctccccatcttcatccgtcaaccatggcgacccagatcagcaagaagaagaagttcgtcagcgacggtgttttctacgccgagctcaatgagatgctgacgcgggagctggcggaggatggctactctggcgtggaggtgcgcgtcacgccgatgcgcacggagatcatcatccgcgccacgcgcacgcagaacgtgctcggcgagaagggccgcaggatcagggagcttacctccgtcgtccaga

SEQ ID NO: 17307 - DNA, 303 bp, Zea mays
ggaggagctgcttcctgtggtttatacaccaactgtaggtgaggcctgccagaagtatgggtccatctttcgacaaccacagggtctgtatgtcagcttgagggacaaagggaaggtcctagaagttctaaggaactggccacataggaacattcaagttatctgtgttactgatggtgagcgaatcttgggacttggagatttgggttctcagggaatgggaattcctgtaggcaaacttgctctatacactgctcttggaggagttcgtccatcagcttgtttgcctatcacaatcgatgt

SEQ ID NO: 17308 - DNA, 301 bp, Zea mays
aactgcaagaaggctatatcatctcaagaagaagggaaggtagtgatactggatatggttgttggagcagggtcatccgacgagaagcatgtggagacgcaaatcgtattcgatctctttatgatgtttatcaatggcactgagcgagatgagacggagtggaagaagatcattttcgaagccgggtttagccgttacaagatcatacctgttctcggtgttcggtcgataatcgaggtctacccataaaaatctatgcaactcaagtatactgcatgcgtgaataatctgcgtgtgaaat

SEQ ID NO: 17309 - DNA, 297 bp, Zea mays
cgaaggacgtgaccgccgacgacttccactacggcggcctcgccacccccggcacggcgctgaaacccttcaagatctccctgggctcggccgtcgtcaccacgttccccggcctgaacgggctgggcatctccgccgcgcggatggtgatggtcccgggcggcgtcgcgccgctgcactcccacccgggaggcaccgagctcatcttcgtcatcgagggcagcgtcgtctgcggcttcatcagcgccacgctcaacagggtgtacaccaagacgctgtacgccggcgacctgatgg

SEQ ID NO: 17310 - DNA, 293 bp, Zea mays
agcagctctgcgctgccgccaaggagatcttcctgcagcagcccaacctgctggagctcgaggcccccatcaaaatctgcggtgatgtccatggccagtactctgatctcctgaggctatttgattatggtggctatccgcctcaggccaactaccttttcttgggtgattatgtggatcgtggaaagcaaagcctagaaacaatatgtcttcttttggcttacaaggtcaagtacccggagaacttctttcttctaaggggcaaccatgaatgcgcatcagtaaatcgcatc

SEQ ID NO: 17311 - DNA, 292 bp, Zea mays
gctaatcgacggcgtcactattgccatgacagaggtgtctaccaccgagacctcaagccagagaatgtccttgttgatcggaagggcaccatcaagatctctgacttcggcctcagcgctctacctcaacatctcgggagtgacggacttctgcacacaacatgtggcagccccaactacatagctcctgaggttctgcaaaacagaggctatgacggctccttgtcagatctctggtcgtgtggggtgatcctctacgtgatgcttgttggctgccttcccttcgacgaca

SEQ ID NO: 17312 - DNA, 259 bp, Zea mays
gataacatttcaggtgtgcttctgaagagagatttcgttgaacaggatgaatgcattggcagcaaccagcaggaacttcaagcaggcagctaagctgctgggcctcgactccaagctggagaagagcttgctcattccattcagggagatcaaggttgaatgcacaatcccaaaagatgatggaactttggcatcctatgttggatttagggttcaacatgataatgctaggggacctatgaagggtggaatcagatac

SEQ ID NO: 17313 - DNA, 254 bp, Zea mays
gtgaggtggggcgtcggatgttgagtaccgctgcttcgtcggcggcctcgcctgggccacggacgaccactccctccacaacgccttcagcacctacggcgaggtcctcgagtccaagatcatcctcgatcgggagacgcagaggtcccgcggcttcggcttcgtcaccttctccacggaggaggcgatgcggaacgcgatcgagggcatgaacggcacagagctggacggccgcaacatcaccgtcaacgagg

SEQ ID NO: 17314 - DNA, 294 bp, Zea mays
ggatccgcgagacgtcttggtccgcgcccgacgacatcctcctctccacctccctcgccggcttcttggacaagaaacttattgacctgctaagagatggacggaaactgcttggcaccctctgctcatttgatcagtttgcaaatgttgttcttcagggtgcttgtgaacgagtgattgtgggggaacaatattgtgatgttcctcttgggctgtacgtaatccggggagagaacgttgttttaatcggagaattggatcgcgaaaaggatgaactccctgctcacatgacct

SEQ ID NO: 17315 - DNA, 150 bp, Zea mays
gcaagaagcgtagtcgtcgccggaaggaaaggcgcggacaagatgtcgtggcaggcgtacgtcgatgagcacctgatgtgcgagatcgaaggacaacatctcagcgccgccgccatcgtcggctcagacggcagcgcttgggcgcagtcc

SEQ ID NO: 17316 - DNA, 291 bp, Zea mays
cggacgcgtgggcggacgcgtgggcgccgagctcgagcgcgcgctcgctgtcgactccgccaccgcggcctccaacccggaccccgccggccccatggtctccggccacagcctccgcgcctacctccagatcgtcgacgtcgcctccatactcaggctcgacagggacatagcggatcacgctttcgagctcttcaaggattgctcgtccgcgacttgcctcaggaatcggagcgtcgaggcgctcgcgaccgccgcgctcgtgcaggctatccgcgaggcgcagaacca

SEQ ID NO: 17317 - DNA, 288 bp, Zea mays
cacacagaagcggcggcggcggagcaaacgcaggcgaaggcgagggtgtgagggaaggagcaccagccatggtgcacgtcaacttctaccgcaactatggtaagacgttcaagaaaccaaggcgtccttatgagaaggagcgtcttgatgctgaactgaagctggtcggtgagtatgggctgaggtgcaagcgtgagctttggagggtccagtatgcactgagcaggatccgtaatgctgcaaggcacttgctcacccttgacgagaagaacccccgtcgtatctttg

SEQ ID NO: 17318 - DNA, 289 bp, Zea mays
caccagcccaccacagacccgagcggaagaagccatgtccgggcgcggtaagggtggcaaggggctcggcaagggcggcgcgaacgtcaccggaaggtgctgcgcgacaacatccagggcatcaccaagccggcgatccggcggctggcgaggaggggcggcgtcaagcgcatctcggggctcatctacgaggagacccgcggcgtgctcaagatcttcctcgagaacgtcatccgcgacgccgtcacctacactgagcacgctcgcctgaagaccgtcactgccatgg

SEQ ID NO: 17319 - DNA, 304 bp, Zea mays
aaccgccgccctttttttttttttttttggagggctatgagaagcgccttgagatcacattctctgaggcacctgtctttgtggaccctcatgggcgtggtttgcgtgccctctccagggcccagattgactctgttctggatcttgcacggtgcacaattgtgtctgagctctccaacaaggatttcgactcatatgtcctttctgagtcaagcttgtttatctatcctctgaagattgtcatcaagacctgtggcactaccaagctcctgctcaccattccaagaatccttgagcttgctga

SEQ ID NO: 17320 - DNA, 290 bp, Zea mays
  unsure (1)..(290): unsure at all n locations
gcagcagccaattcgctcgagttcagatcgagcgcgcgccaagcaagtcttccggccggccgcgaagagcgcaatcaagcaagacaagatggtgaagctcgccttcggaagcgtcggcgactccttcagcgccacctccatcaaggcctaactggccgagttcatcgccaccctcctcttcgtcttcgccggcgtcggttccgccatcgcctacgggcaactgacgaatggcggcgcgctggacccggcgggcctggtggcgatcgcgatcgcgcacgcgntggcgctgt

SEQ ID NO: 17321 - DNA, 289 bp, Zea mays
gggagattgagatatctcactggggaaatgtacagattacggaacactacaacattgctcatggtggtgccagactcaagggtgaattttccaggattgattatcaatctagaccttacgtaaggggtgtttcatcttttagacatcttattgcaaaactgcctccaagggcacactctatttattaccgagatgagattggtaatatttccacatcacatttgtggagtgattctatgaagacccaactggaaatagaaccaaggtttccattgtttggtgggtggca

SEQ ID NO: 17322 - DNA, 293 bp, Zea mays
cccacgcgtccgctactgtactcatctcttggagatgctgaaggaattgaaaagcttgcttctttggcaaaagaacacggaaaaaacaatgttgctttcctctgactttttatgcttggtaaagttgaagattgcatacagttgcttgtagacagtaaccgtatacctgaagctgcattactggcgcgttcatatcttcctagcaaagtaccagagatagtggcaatttggagagacgacctgagtaaaattaatccaaaagctgcagagtctctagcagatccttctgaata

SEQ ID NO: 17323 - DNA, 273 bp, Zea mays
cccacgcgtccgcccacgcgtccgcccacgcgtccgcagcatcctcccgtctccgtcgtctcgtctccgctcctcaccacgccagccatgggcaagatcaagatcggaatcaacggtttcggaaggatcggcaggctcgtggccagggtcgccctgcagagcgaggatgtcgagctcgtcgccgtcaacgaccccttcatcaccacggattacatgacgtacatgttcaagtacgacaccgtgcacggccaatggaagcacagcgacatcgcc

SEQ ID NO: 17324 - DNA, 273 bp, Zea mays
ggtctgttcagtttggccagaaaggcatcccctacctgaacacctatgacgaccgcaccatccgctaccccgacccgctcatcaaggccaacgacaccatcaagatctcgagaccaacaagatcatggacttcatcaagtttgacatcggcaacgtggtcatggtgaccggtgggaggaacatcgggcgtgtaggagtgatcaagaacagggagaagcacaagggcagcttcgagaccatccacgtgttgcttggagctttttgctatgtcta

SEQ ID NO: 17325 - DNA, 274 bp, Zea mays
ctcgaggtggagtcctccgacaccattgacaacgtcaaggccaagatccaggacaaggagggcatccctccagaccagcagcggctcatctttgctgggaagcagcttgaggacgggcgcacgcttgccgactacaacatccagaaggagagcaccctccacttggtgctgcgcctcagaggaggcatgcagatcttcgtgaagaccctgaccggcaagactatcaccctcgaggtagagtcttcagacaccatcgacaacgtcaaggccaaga

SEQ ID NO: 17326 - DNA, 276 bp, Zea mays
cccacgcgtccgcttctccaggtaaggaaagggttcgtactcatggcgccgccgcagccaaagtcgggcctcttcgttggcatcaacaagggtcatgtcgtcaccaagcgcgagtgcctccccggcacgttgcaaccgcaaggggaaatcaacgaagagggtgtctatggtcaggggcctgatcagagaggttgctgggtttgctccttatgagaagcgtatcactgagcttctgaaggttggcaaggacaagcgtgccctgaagcttgctaagag

SEQ ID NO: 17327 - DNA, 265 bp, Zea mays
accgggccgggatcgccgagttcgtggccaccttcctgttcctgtacatcagcatcctgactgtgatgggcgtgacaagtcgtccagcaagtgcgccaccgtgggcatccagggcatcgcgtggtccttcggcggcatgatcttcgcgctggtgtactgcacggcgggcatctccggcggccacatcaacccggccgtcaccttcggcctcttcctggcgcggaagctgtcgctcacgcgcgcgctcttctacatggtcatgcag

SEQ ID NO: 17328 - DNA, 270 bp, Zea mays
catcgacccacccaacccccccctccgccccgcgcttcgcctgggtaccggcgtccgccgcgccccgtcccgtccaggaacaggaagagcagtaacccatccatcggggatcaccaggggagcaagatgtcgactgccgccgccccaagattgcccgctcccagatccggggcaagctatcactatcagacgaccgcggctccggtggccaacaccctctccttcgccggccacgcgaggcaggcggcccgcgcgtccgggccacggctg

SEQ ID NO: 17329 - DNA, 267 bp, Zea mays
atgatatctcttgcccacaagttcacgaattgcaagttctcactctccggcaaaacaaacctcagcttgaagacagtgccgtagaggctgttgccaactactgccatgacctacgtgagttagacctcagcagaagcttcaggcttagtgaccgctccttgtatgcgctggcccatggatgcccacggcttacaagactgaacattagtggatgttccagtttcagcgacactgcgttgatttaccttacctgccgctgtaaaaacc

SEQ ID NO: 17330 - DNA, 267 bp, Zea mays
tgaatttctagcacaggtgtccgctgtttcaagattgaagcatgaacactttgtggacatgcttggttattgtatccaaggagatcaacgtctactggcttatgaattcgctacgatgggctctctacatgatattttgcatggaagaaaaggtgttgcaggtgcacaacctggacctgctcttgattggatgcaaagagtcaaaattgctgttgatgctgcaaaaggtcttgaatatcttcatgagaaggttcaaccttccatagt

SEQ ID NO: 17331 - DNA, 269 bp, Zea mays
ggacatttaccaaggtgtacaaacgtggagctgtaggtcggtccattgacattagtcagttcagtggatacgatgagttgaagcatgctctggctcgcatgtttagtatggaagggcaacttgaagaacggcagagaataggctggaaacttgtctacaaggatcatgaggatgacatcctacttcttggtgatgacccttgggaggaatttgtcaactgtgtgaagtgcattaggatcctgtcgcctcaggaagtgcagcagattagc

SEQ ID NO: 17332 - DNA, 267 bp, Zea mays
gagaatatgccatcagagaaagcacctcaaggataaagatttacagtaaaaatttccaggagaggaaaagtataagaccatcattttcggttgaacggatatttggtggtgtgttacttgctatgtgtacgaatgacttcatttgcttttatgattgggtggaatgcagattgatacgccgaattgatgtcaatgtgaagaatctttactgggctgacagtggtgatttagtaacaattgcaagtgatacgtcattctacattttga

SEQ ID NO: 17333 - DNA, 270 bp, Zea mays
cctccctttccccttccctccctccctctccccgcgggccgccagaggcaatttcgccctcgattcgaccccgattcgtccgcccgcgaccgggattccctccgccaagcgcggatctgaacgctgcgctccgtgtcgccgctcgaatccgccatgaagggggccaaatccaagggcgccgccaaggccgatgccaagctggcggtgaagagcaagggggcggagaagcccgccaagggcaggaaagggaaggccggcaaggaccccaac

SEQ ID NO: 17334 - DNA, 262 bp, Zea mays
cacaacctcatcctcaaggttgttgactccaagatggtcgtccagagaggccgcgagggagggccccagggaagacagatgaggattgcggagtgcttggttggtgatgaaaccggcatcattgtcttcactgcaagaaacgatcaagtggatgtaattaggcctggaacaactgttgaactgaggaacgcaaagatcgacatgttcaagggttcgatgcggcttgcagtggacaagtggggaattgtcaaagctgctgaaa

SEQ ID NO: 17335 - DNA, 264 bp, Zea mays
catcgtacagctctatgaggtcatggccaccaaaaccaaaatatactttgtgctggaacatgttaaaggtggagagctgttcaacaagattcagcgaggaaggctcaaggaagacgcagcgaggaagtacttccaacagctgatctgtgcggtggacttctgtcacagcaggggtgtctatcatcgagatttgaagccagaaaatcttttgctcgatgagaatagcaacctgaaggtatcagattttggtctaagcgcacttgc

SEQ ID NO: 17336 - DNA, 264 bp, Zea mays
gtcggtgttgatcgcaataagtaccagattcaaatccctcttccaccaaaaattgacccaagtgttaccatgatgactgtggaggaaaagccagatgtgacgtacaatgatgttggtggctgcaaggaacagattgagaaaatgcgtgaagttgttgaacttcctatgcttcacccagaaaagtttgttaagcttggtattgatcctccaaaaggcgtcctttgctatggcccacctggcactggcaagacacttcttgcaaga

SEQ ID NO: 17337 - DNA, 264 bp, Zea mays
attaactgttgctgtcaagacactcaaccatgatgggttgcaggggcataaagagtgggtggcagaagttgattttcttggaaaccttcagcatccacatctagtgaaattggttggctactgcattgaagatgaccagaggttgcttgtgtatgaatttatgccccgtggaagtttggagaatcatctttttagaaagtcattgcctctaccatgggccattagaatgaaaattgctcttggtgctgcgaaaggcctcgcttt

SEQ ID NO: 17338 - DNA, 264 bp, Zea mays
gaccaccaagaagattgttctgaagctgcagtgccagagctgcaacactactcacagcacgccatcaagagatgcaagcattttgagattggtggagacaagaagggcaagggcacatctcttttctaagcttctcgtccacctgtctggttgttgagttgaagctgtgggtctactactactgttataaaaacatgtcgccaaatttcaatgttaatgtagcaatgaaagcagaccatgctatgtatccaaattccaatgcct

SEQ ID NO: 17339 - DNA, 263 bp, Zea mays
atcccctttgcaagtatagtctctctgctaagcgacggagctcaagctagtctcggcggctctagaagacgatgggcaaggacgacgtgatcgagagcggcgctggcggcggcgagttcgctgccaaggactacacggaccctcccccggcgccgctgatcgacgcggcggacctggggtcctggtcgctgtaccgcgccgtgatcgccgagttcatcgccacgctgctgttcctgtacatcacggtggccaccgtgatcggg

SEQ ID NO: 17340 - DNA, 302 bp, Zea mays
gccttgggaagaccagtgcttggaatcagttttttgagtactcagagattatggagcagattgaccgcgatgtaaagcgcacccaccctgacatgcagttcttctgcggcgactcgtcttttgcaaagtccaatcaggaatctttgaaaaatgtactgttaatctttgccaagctgaatgctggaataagatatgtacaagggatgaatgaagttttggcacccctcttctttgtatttcggagtgatccggatgataaaaatgctgaattcgcggaacggattcattcttttgcttcgtcg

SEQ ID NO: 17341 - DNA, 304 bp, Zea mays
gaaggaggctccaaaggaggcccccaagccaaaggtggttgaggcaccagcagaagaggaagcaccaaagccaaagccaaagaatcctcttgacttgctgccaccaagcaagatggtccttgatgactggaagaggctatactcaaacaccaagactaacttccgggaggttgccatcaaaggtttctgggacatgtacgacccagagggctactctttgtggttctgtgactacaagtacaatgatgagaacaccgtctcctttgtgaccctgaacaaggttggtggattcctgcagcggatg

SEQ ID NO: 17342 - DNA, 304 bp, Zea mays
cggacgcgtggggcgcagtgcccgtgactcccacgttccggtgctagctcctctcccaattgggttcgccgtgttcatggtgcacctggccaccatccccatcaacaggcaccggcatcaacccggcgaggagcctgggagccgcggtcatctacaacaaggacaaggcctgggacgaccaatggatcttctgggtgggtccactgattggcgccgccatcgccgccgcctaccaccagtacgtgctgagggccagcgccaccaagctcgggtcctaccggagcaacgcctaagttccgcccgg

SEQ ID NO: 17343 - DNA, 296 bp, Zea mays
cccacgcgtccgcccacgcgtccggtgcgaaggtggagagctacttgacagaatactttccagaggcgggaagtactccgaggatgatgcaaaagctgtcctggtgcaaatattaaatgtcgtcgctttttgccacattcaaggagtggttcatcgagatctcaaaccagagaattttctttttacatcaaaagatgatgattcccatcttaaggccattgattttggcctatcagactttgtaaaaccagatgagaggctcaatgacatagttggaagtgcttattatgttgctc

SEQ ID NO: 17344 - DNA, 298 bp, Zea mays
aatccatcccgcctccaaacccgaactccaagtcgccccgcatcgatggcgcccaaggccgagaagaagcccgcggcgaagaagccggcggaggaggagcccgctgccgagaaggcgccggccgggaagaagcccaaggcggagaagcgtgtcccagcaggcaagtccgccggcaaggagggcggcgagggaaagaggggccggaagaagggcaagaagaacgttgagacctacaagatctacatcttcaaggtgctgaagcaggtgcacccggacatcggcatctcctctaaggcca

SEQ ID NO: 17345 - DNA, 150 bp, Zea mays
ctcatcacgccgccactgatctgctctgttgctggtgactaggagcagtagcgagagggattctggatggccaagtcgaagaaccacacggcgcataaccaatcgttcaaggcgcacaagaacggcatcaagaagcccaagcgccaccgc

SEQ ID NO: 17346 - DNA, 288 bp, Zea mays
cggacggtgggcggacgcgtgggttctaatcgtgttctaggactagttattagggttttgatggattggggtgagaaagagcatgggatgtacaatattgatcagctggatgtactacctgaagtcttcaagcctggttttatgtcaaagaagacccgtcaagaagcagtcaatttattttcatgcttggatgcttttctgaaggaggagcctctagggccagatgatatgtggtactgtcctgggtgcaaggaacacaggcaagctagcaagaaactggacttgtgg

SEQ ID NO: 17347 - DNA, 290 bp, Zea mays
aacgatgttgggcttgacgccgaccactgcaaggtgctcgtgaacattgagcagcagtcccctgattgctcagggtgtgcatggccacttcaccaagcgccccgaggagattggagctggtgaccagggacacatgttcgggtatgcgaccgatgagacccctgagttgatgcccctcagccatgtccttgccaccaagctaggtgctcgtctcaccgaggtccgcaagaacggaacctgcccctggctcaggcctgatgggaagacccaggtgacagtcgagtaccgca

SEQ ID NO: 17348 - DNA, 127 bp, Zea mays
caccgcgtgcgaaccaagcagaccacagcaagaagcgtagtcgtcgccggaaggaaaggcgcgacaagatgtcgtggcaggcgtacgtcgatgagcacctgatgtgcgagatcgaaggaccacatct

SEQ ID NO: 17349 - DNA, 278 bp, Zea mays
ggaaccctggctactgctgttaaatggctcaaccttcagtcattctagcaactgcaagttatgatcacacaatcagattttgggaagccaagagcggtcgctgttaccgcactattcagtatccagactctcaagttaatcgccttgagataacccctgacaagcggttcttagctgctgctggcaatcctcatatccgcctttttgacgtcaactcaaatagccctcagccggtaattagctatgattcacatactagcaatgtgatggctgtggga

SEQ ID NO: 17350 - DNA, 279 bp, Zea mays
ctacgaggtgaagctcgtcgacctcgacaacaagcccgaatggtttctgaagatcagcccagagggtaaggtgcctgtgttcaacggtggtgatggcgaatgcattgctgattctgatgtaatcacccaaaccattgaggagaagttcccaactccatctctggtcactcctgtagaatatgcatcagtgggatcaaagattttcccagccttcatcacattcttgaagagcaaggatgctagtgatggttccgagaaggcgcttctggatgagctgca

SEQ ID NO: 17351 - DNA, 279 bp, Zea mays
attatatggtataggacaccatggatcttccactgcaattgcttatggtggtacatacttgccatattcttcctcaactggacaatcgagcaataatcatcaagaacatggatttcctgagcgaccagggcagcctgagtgtcaatattatatgaggactggagattgcaaatttggaactacatataaatataaccatcctcaagattggagcactcctaagtccaattacatgttcagtcatctctgccttccgcttcgtccgggtgctcagccttg

SEQ ID NO: 17352 - DNA, 279 bp, Zea mays
cccacgcgtccggtcagcatggacggcgcgccctacctgcgcaaggtggacctgaagatgtacaacagctacacggagctctccgttgctctgaagaagatgttcagcaccttcaccacatccgggaacaacatgaatgagggaaaactggttgatccggtcagcggtgctgatgtggtcactacttacgaagacaaggatggcgactggatgctcgttggcgacgtcccgtgggagatgtttgtcgagtcatgcaggcgtctgaggatcatgaagagc

SEQ ID NO: 17353 - DNA, 279 bp, Zea mays
cttttgaccataatatgtatggccagaaccttactgttcagaatttcttcaacgcatcagttcctgtttctgtgcaagcaaccttcccttataaattcgttgtgagcaagttcttgcagcctggagcttatgatctggttggttacatagtgtatgagatcgaccagcacccttaccagaatgtattctacaatggcactattgaggtcgttgaggctggaggcttactcagtgttgagtctgtgttcctcatcacccttggaatcgctcttcttggtc

SEQ ID NO: 17354 - DNA, 281 bp, Zea mays
gcgccacgaactcgcgacgctctcgagagatccatggatcggcgcaagggcggcaaccgcgacaccaacggcagcctggtcgaggccacggcgtcgcggctgagggtcgaatccgacgaggaggcggaagaggtggggatggaggtggaagagagcttcgacgcgggggtggaagacgagcaggcggcggcggaggtgattggaagcgaaaagaccagcgccgactactacttcgactcctactcccacttcggtattcatgaagaaatgctaaaagatgt

SEQ ID NO: 17355 - DNA, 286 bp, Zea mays
cggacgcgtggggaggtaagaaggcccccatctcacggtcctcccgcgcgggcctccagtttcctgttggacgaatccaccgtcaagctgctagcaaaggactcaggcaaatggccgcgttggtgccactgcagccgtctactctgccgccatcctggagtacttgactgccgaggttctggagctggctgggaacgctagcaaggatctgaaggtgaagcgtatcacccctcgccacctacagttggccattcgcggagacgaggagctggacaccctcatcaag

SEQ ID NO: 17356 - DNA, 281 bp, Zea mays
atttaacagaacatttttcaggtggtactaaaattggaaagcaagcaaaccagccaattgttttgctgatcgatgaacttgatcttcttatgacaagaaaccaatcggtgttgtataacattcttgactggcctaccaaaccaaattcaaatctagttgttataggtatagcaaacacaatggatcttccagaaaagttattgcctcgtatatcaagtcggatgggtatccaacgactgtgttttggtccatacaattatagacaactgcaggaaattata

SEQ ID NO: 17357 - DNA, 262 bp, Zea mays
cttaaacagatacgataatattgtaggataagataatggtccacaacacatcctaaccgattacaaagttcaccctgagaaaattgcaaaccaaacgataattccaactcaaacgataagaactacttgttcctcactgctcctcttcgatcacacccttgtcgctcacatagataccatccaaaaacttcctgatatccttcttcttgacatggcatttctggttgatgagggaggcggacgtagagactaactcgacgtc

SEQ ID NO: 17358 - DNA, 272 bp, Zea mays
ggaccgtggtggcggcggcggcggcggcgagcgccttcccttgtcaaaatccacccggcggcagagcagagcctcgttgctgagctcgggagatggcaggcatgaccgatatgccgatgaggccggcgtcggcgggcccgccgatgcagcaccggggccctccgccgatggcgcgcctccgccccgaaccaatcgaccgcgagaagacctgccctctgctgctcagggttttcacaagggttgctggtcaccaccaaaatgaagagttttct

SEQ ID NO: 17359 - DNA, 267 bp, Zea mays
agctcaaccgcatccgcatcacactctcatccaagaacgtcaagaacttggagaaagtttgtgcggatttggtaaagggagccaaggacaagcatttgagggttaagggacctgtccggatccctactaaggttctccacatcaccactcgcaagtccccttgcggtgaaggaacaaacacatgggatcggtttgagttccgcattcacaagagggtgattgacctaatcagctcccctgatgtggtgaagcagatcacctccatca

SEQ ID NO: 17360 - DNA, 276 bp, Zea mays
gaactccctctccgggcccatcccgccgcagctcggccagctgcgcaactgcagacggtgctgctgtggcagaaccagctcgtcggcactatcccgccggagatcgccaactgcaaggacctcgtgctcatcgacctgtcgctcaactcgctcacggggcccatcccgagcagcttcggcacgctgccgaacctgcagcagctgcagctcagcaccaacaagctcaccggcgtcatcccgccggagctctccaactgcacgtcgctgaccgacgtc

SEQ ID NO: 17361 - DNA, 279 bp, Zea mays
gtcttgaaaggggagagagagagagagaagagagagagaagagagagagagagagaggagtgggagacccgcgagaggctgccgtgtagggaccgtagactcagcgactgcgaaggagggataaggggatggccgggatcggaccgatcaggcaggactgggagccggtcgttgtgcggaagaaggcacccaccgccgccgccaagaaggatgagaaggccgtcaacgccgcgcgccgcgccggtgcggagatcgataccatgaagaagtacaacgctg

SEQ ID NO: 17362 - DNA, 273 bp, Zea mays
cccacgcgtccgcagcgctctgaagaaatatggcgcagaagtaacttgtgctgatagcgggaagaaagcaatcacgcaactgaaacctcctcacagttttgatgcttgtttcatggacatacagatgcctgaaatggatggatttgaagccacaaaaaggattagagtgatggaaagagatctaaatgagcaaatagaacgtggagaagccccaccggaatgcgcagggctccggcagtggcgaactccaatattagccatgacagcagatgt

SEQ ID NO: 17363 - DNA, 273 bp, Zea mays
cgaagagagatcagcgacttaacaacaataatggccaccgccatagttcccacggacgccgagctgctgcaggcgcaggccgacctgtggcgccacagcctctactacctgacatccatggcgctcaagtgcgcggtggagctccacatcccgaccgccatccacaacctaggcgggtctgccacgctgccggacctcgtggccgcgctgtccctgccagcggccaagctcccgttcctcgggcgcgtgatgcggctgctggtcacgtcgggc

SEQ ID NO: 17364 - DNA, 271 bp, Zea mays
cccacgcgtccggttgcgctgtgtgttattttttatgaaataaaaatctagatggttgtgtttatgatagatgttactatacggtcgcacttgccgtcaattcaatttttatttgtgcaggaatcggggatgttgataccaaggagacacctctacccatggaggatgccttaaatgactacaaaaggctagattacatccagcgccacatcgctactcttaaggaatcaatagacttgggatcaaatgtgcaaggctacttcgcttggtc

SEQ ID NO: 17365 - DNA, 272 bp, Zea mays
gaaacaatcaaccagcaacactcttctcttataacatagtacagcgaaggtaactcacatggcaacttccatgggttgtctcgtcttgctctgccttgtttcttctctccttcccagtgccgtccttggccacccatggggtgccttgttcccacagttctatgaccattcgtgccccaaggcgaaggagattgtgcagtccattgtggcacaggctgtggccaaggagaccaggatggcggcatctttagtcagactgcatttccatgact

SEQ ID NO: 17366 - DNA, 272 bp, Zea mays
gagttgaacaccttctaagggatgtcaaggacacaacaataagcacacttgctacagagcaagcttgcagccttaaagggactcgatgcaaggcttagggagatccgaagctatttggatcttgtaattgacgggaagctcccactgaatcacgaaattttgtaccatttgcaggatgtctttaatctccttccaaatctgaacgtaaatgagctaattaaagcctttgcagtgaaaactaacgacatgatgttggtgatatacctgtcttc

SEQ ID NO: 17367 - DNA, 299 bp, Zea mays
gggagattgagatatctcactggggaaatgtacagattacggaacactacaacattgctcatggtggtgccagactcaagggtgaattttccaggattgattatcaatctagaccttacgtaaggggtgttcaatcttttagacatcttattgcaaaactgcctccaagggcacactctatttattaccgagatgagattggtaatatttccacatcacatttgtggagtgattctatgaagacccaactggaaatagaaccaaggtttccattgtttggtgggtggcaaacaaccttc

SEQ ID NO: 17368 - DNA, 298 bp, Zea mays
agggaagcagcaggccgctagactagggagcggtcgccggcctcggcggcggagggatggggcgtgggggtgcggtgatggaggacggcgacatggaggagggaagctatccgacgctgctgcagctgtggtcctcgtcgggtgtggggcagtcagcggcagcgggcgcctgctgtgggccgacaacgaggcgtggcgggcgcacgtcgggatggccctcgtccaggtcgcctacggctgctaccacgtcctcaccaagtccgtcctcaacgtcggcatgaaccagatcgtcttctgc

SEQ ID NO: 17369 - DNA, 296 bp, Zea mays
gcatggagatggagcagctctgctcgctgctccgcgacctcgacgcgctcaagcagcatcccgacgatctcacttccaccatcgatcggatgcgggacggctagtggcgatgatgaatccggcagccggtgccgcttctcgatccaagattaaggacatgagtgcagaagtggtggacaacaatccctacagcagacttatggcgttgcaacggatgggcgtagtggagaattatgagcgcatcagggactactccgttgccatcgttggcataggtggcgttggtagtgttgccg

SEQ ID NO: 17370 - DNA, 299 bp, Zea mays
cttctcttgccagttcacagctgaccttattgccatgaaccacaccgatttcatcatcaccagcacattccaagaaatcgcgggaagcaaggacaccgtggggcagtacgagtcccacatcgcgttcactcttcctgggctctaccgtgtcgtccatggcatcgatgttttcgatcccaagttcaacattgtctcccctggagcagacatgagtgtttactacccgtatacggaaaccgacaagagactcactgccttccatcctgaaatcgaggagctcatctacagcgacgtcgaga

SEQ ID NO: 17371 - DNA, 136 bp, Zea mays
tggacggctgggcgtgacgcgtgggcggacgcgtgggttcggaaacaaattcggtaatttttttaactttttgtgttgtagagagcaaataatacatagaacatcttatataatattttattcgtatttgtactaa

SEQ ID NO: 17372 - DNA, 291 bp, Zea mays
gcgcggacagcacaaccaggacgtgaactccctgggcctcgtctcggccaggaagaccgccgaggcgatcgacatcctgaagctcatgtcgtccacctacatcgtggcgctgtgccaggccgtggacctgcgccacctcgaggagaacatcaaggcgtcggtgaagaacaccgtgacccaggtggccaagaaggtgctgaccatgaacccctcgggcgagctctccagcgcccgcttcagcgagaaggagctgatcagcgccatcgaccgcgatgccgtgttcacgtacgc

SEQ ID NO: 17373 - DNA, 299 bp, Zea mays
cccacgcgtccgggagaggcaggcgatgacgatggcgacgaagcggcgtgcgtgctggcggtgtgggtgctcgtcgccttgggcctgtgcgacctgggctcaacgcgcgcgcccctgggcagcaagccgcagcgggagttcgactacttcgcgctctccctccagtggcccggcaccatctgcgcctccacccgccactgctgcgccaccaacggctgctgccgctcggagcctctccagacgttcacgatccacgggctatggccggactacgacgacgggaccctggcgtcgtgctg

SEQ ID NO: 17374 - DNA, 291 bp, Zea mays
gaagcacttgcctatgtatgacgagttggctagcaagagcaatgttgaatatattgccggaggagccacccagaactctatcagggttgcccaatggatgcttcaaactcctggtgcaacaagttacatgggatgcattggagaggacaagtttggtgaggaaatgaagaaaaacgctcaagctgcaggagttactgctcattactacgaggatgagactgctcctactggcacatgtgctgtatgtgttgttggtggtgaaaggtcattgattgcaaatctgtcagcggc

SEQ ID NO: 17375 - DNA, 292 bp, Zea mays
cccacgcgtccgcggacgctggccgccagtcctcactcctcaccatttcccaaaccctacccatacccccgccgccgccgccatgccgcccaagctcgacccgtcgcaagtggtcgaggtcttcgtccgggtgacgggcggcgaggtcggcgcggcgtcgtccctggcgcccaagatcggcccgctcggtctctccccgaagaagatcggcgaggacattgccaaggagacggccaaggactggaagggcctgcgcgtcaccgtcaagctcactgtccagaaccgccaggcc

SEQ ID NO: 17376 - DNA, 294 bp, Zea mays
ctgacacaagagagcacgctactactcatcactcgccaacgtgcagagatcagggaagcggcactccatccactgactgaccgctcatggcgaaggtccacctctacgtcgccgcggcctgcgccgtcgtcctcgcgctcgccaccccggccctcgccggtgaccccgacatgctgcaggacgtctgcccggctgactacgcctccccggtgaagctgaacgggttcgcgtgcaaggcgaacttttcggcggacgacttcttcttcgacgggctgaggaacccgggcaacacca

SEQ ID NO: 17377 - DNA, 295 bp, Zea mays
ctcttcttcttcttcctcctcctcctagcacagctagcgcctgctccccttcgcctgtgatcatgtcttgcagcagcggcaagtgcgactgtggctccagctgctcctgcggcagctcatgcaactgcatgtcccctaacgtggagaccgccgccgccagcagcatcaagaccacggtcctcgccgcgccgaccaccaaggccagcgccggcggcttcgaggcggccaccgagggcggcggctgcgactgcaacacctgcaactgcggcaccagctgcggctgctcctgctgcag

SEQ ID NO: 17378 - DNA, 295 bp, Zea mays
cccacgcgtccgcatttcttctctctctgctcctccgcctccgcctgatccatccaagacagggatcgccatgtcggactcggaggagcaccacttcgaatcgaaggccgacgctggggcgtccaagacctacccgcagcaggctggcaccgtccgtaagaacggcttcatcgtcatcaagaaccgtccctgcaaggttgtggaggtttctacctccaagactggtaagcatggccacgccaaatgccactttgtcgccatagacatattcaatgggaaaaagcttgaagatatt

SEQ ID NO: 17379 - DNA, 295 bp, Zea mays
gtgtgagtacgaccagaagatatccattgatttctacaaggaaggagatcccttgaaaccagctgtgacaggcgtcttagtgttcgtttccactccagatccaattggcaacaagtactatcttggccctgctcctttgcaggatatggcaaggcaaattgctacagccaatggccctactggctataatagggattacctgttctcaatggagaaggcattagccagcattagccacgaagatgattcgatcatagagcttgcaaacgaggtgaggaaggtgctcaacagaaca

SEQ ID NO: 17380 - DNA, 284 bp, Zea mays
gtctgtgtcgccacgctcacctcgttcctctttggataccactccggggtggtgaacgagcccttggaggtcatctccgctgaccttggcttcgccggcaacactcttgctgaagggctcgtggtgagtatctgtttgggaggagcttttgttgggtgcctcttcagcggctccatcgcagatggtattgggcgacgccgtgcgttccagctcagtgcgctgcctatgattattggtgctgccataagtgctctctccaatagtttggagggtatgctccttgg

SEQ ID NO: 17381 - DNA, 286 bp, Zea mays
cggacgcgtgggccgttgtcgtcgccagcggccagacatacgaccgggactccatctcccggtggttcgactccggcaagtcaacgtgccccaagacagggcaggatccttaccgttttggagcttgtgcccaacaaggcgctcaagaacctcatcgctaagtggtgccgggagaacggcgtcgccatggaaagcagcgcggcgagcaggagcgagccggcccaggcggtggccgcgaacaaggcggcgttggaggcggcgcgcatgacggcgtcgttcctcgtga

SEQ ID NO: 17382 - DNA, 287 bp, Zea mays
cccacgcgtccggttcttaatttcctgtgttcggtcccacagctctttcactttgttccttgcccaagacataggttgccgaggtttgatcctggagcgggtctgttgactggtaccaaagatgggaatctggttaacataattccttaggttatttggaaagtgctcagagagggccctttgcataaggctccttattttccaggctctatgttgcgtattctgcttctggctaaggcacatgctcaccggatggtacaagtgataacctgcaatcggctctccat

SEQ ID NO: 17383 - DNA, 288 bp, Zea mays
cccacgcgtccgagcgcactctagcaatggcttctgaggttgtccgccctagcgacgccgagctactaaaggcacaagccgacatatggcggctcagcctctcctacctcacgcccctgtcactgaggtgcgccgtggagcttggcatccctacggcgatctaccgccatgagcgggctgcctcagccgctgagctggtcacggcgctgtctctcccctccactaagctgccgttcctccgccgcctgctgcggctcctcgccgcgtcgggcgtgttcaccgtcgaca

SEQ ID NO: 17384 - DNA, 291 bp, Zea mays
cccacgcgtccgctgaagtatgctgacactcatgaatgggtgaaagttgagggtgattcagcaaccgtggggattactgaccatgcccaggatcatttgggtgatgttgtttttgtggagctaccagaagttggcatcagtgtatcccagggaaagaactttggtgctgttgagagtgtgaaggcaaccagcgatatcaattcaccagtgtctggagaggtggttgaagtgaacgagaaactaagtgaggagcctggattggttaatgcaagtccatatgagaagggatgg

SEQ ID NO: 17385 - DNA, 293 bp, Zea mays
cgcagcctttcgagctctactccaccccctcgatctcgaagcgcacagcagcagtcaggcggccatggacgcgagcgcagccggagccggcgggaaggcgaagaagggcgcggccgggcgcaaggactggcgggcgaggaagaagtcggtgacgaggtccgtcaaggccgggctgcagtttcccgtcggccgcatcgggcggtacctgaagaagggccggtacgcgcacgcgtcggcacggtcgcccccgtctacctggccgccgtcctcgagtacttgcccgccgaggtgct

SEQ ID NO: 17386 - DNA, 301 bp, Zea mays
gcccgacctcaggaagaaagtgatgcctgccgtcatcgtccgccagcgcaaccgtggcgtcgcaaggacggtgtctacatgtacttcgaagataatgctggagtgattgtgaatcccaagggtgagatgaaaggttctgcaatcactggacctatcggcaaggagtgtgctgacctttggcctaggatcgctagtgcagcaaatgccatcgtttgagagcttgttggaatgtgtttagacttgagtatgatcatctcaattgtgtgttgcagctgttgtaagggtgctattggacttgatg

SEQ ID NO: 17387 - DNA, 279 bp, Zea mays
cccacgcgtccgatcaagctcagagcctcagagcgccaccaagtcttgcggtcgcgaagagcaacgcaacaagatggtgaagctcgcattcggaagcgtcggcgactccttcagcgtcacctccatcaaggcctacgtggcggagttcatcgccatcctcctcttcgtcttcgccggcgtgggttccgccatcgccttcgggcaactgacgaatcgcggcgcgctggaccctgcgggactggtggcgatcgcggttgcgcacgcggtggccctcttcgt

SEQ ID NO: 17388 - DNA, 301 bp, Zea mays
  unsure (1)..(301): unsure at all n locations
acggaccctcccccggcgccgctgatcgacgcggcggagctggggtcctggtcgctgtaccgcgccgtgatcgccgagttcatcgccacgctgctgttcctgtacatcacggtggccaccgtgatcgggtacaagcaccagacggacgcgatcggcgtcgggcgccgaccngcgtgcggcggcgtgggcgtgctgggcatcgcctggggcttcggcgccatgatcttcgtcctcgtctactgcaccgccggcatctcggggggccacatcaaccccgccgtcaccttcgagctcttcctgg

SEQ ID NO: 17389 - DNA, 298 bp, Zea mays
cgttcgcctcttctcctccctcctgccgggtccttaataaagagcagcagcgcaagaggttggtagagcgagcgagaagaaggcaatggcggcggagagcttcctgttcacctcggagtccgtgaacgaggggcacccagacaagctgtgcgaccaggtgtcggacgcggtgctggacgcctgcctggcgcaggaccccgacagcaaggtggcctgcgagacctgcaccaagacgaacatggtgatggtgttcggcgagatcaccacaaggcgagcgtggactacgagaagatcgtgc

SEQ ID NO: 17390 - DNA, 320 bp, Zea mays
ggccgagcgacccgcccacgcgtccggctcaagaagatggctggcgctgtacgcaccggagggaagggcagcatgcgcaggaagaagaaggcagttcacaagaccacgaccacagatgacaagcggcttcagagcaccttgaaaaggatcggggggaacaccattcctggtatcgaggaggtcaacatcttcaaggacgatgttgttatccagtttcagaaccctaaagtgcaagcatccattcctgcaaatacatgggtggttagtggagtaccccagacaaaaagtctgcaagaccttctgccatcaattatcaacca

SEQ ID NO: 17391 - DNA, 302 bp, Zea mays
ctagtcgccactctgctcgcacacaagttgggagtcactcagtgtaccatcgctcatgccttggagaaaaccaaataccccaactcggacatctacttggacaagttcgacagccagtaccacttctcttgccagttcacagctgaccttattgccatgaaccacactgatttcatcatcaccagcacattccaagaaatcgcgggaagcaaggacaccgtggggcagtacgagtcccacatcgcgttcactcttcctgggctctaccgtgtcgtccatggcatcgatgttttcgatcccaa

SEQ ID NO: 17392 - DNA, 299 bp, Zea mays
ctgtttttgacaaacttgaagctgaactggcaaaagccatgctttctcttcctgcaagcaaggggtttgagattggcagtgggttcgctggtacggactttactggaagtgagcataatgatgagttctatatggatgaggctggaaatgtgaggacacgaactaatcgctcaggcggtgttcagggagggatatcaaatggtgaaattatttacttcaaagtggcttttaagccaacagcaactatcggaaagaagcaaaatactgtgtcaagggagcatgaggatgttgaacttttg

SEQ ID NO: 17393 - DNA, 297 bp, Zea mays
cccacgcgtccgcccacgcgtccgcggaaaacctccaaccctagccgcgatccgacaacgcctccatccctagccgactgctgcaacttcagagctcaagagtcagggcgccatggcgacagagacggagaccttcgcctttcaggctgagatcaaccagctgctctcactcatcatcaacaccttctattccaacaaggagatcttcctccgggagctcatttccaactcttccgatgcgttggacaaaatcaggttcgagagcctcactgacaagagcaagctcgatgcgcagcg

SEQ ID NO: 17394 - DNA, 296 bp, Zea mays
cccacgcgtccgatcacaacctctgttttgggctcttttcataagctttgttcttgggactgcatattcaatcaatctgccgtaccttcgatggaagagatttgctgttgttgcagcactgtgcatattagcagttcgtgcagtgattgttcagctggccttttttctccacattcagacttttgttttcaggagaccggcagtgttttctaggccattattatttgcaactggatttatgacgttcttctctgttgtaatagcactattcaaggatatacctgacatcgaagggg

SEQ ID NO: 17395 - DNA, 297 bp, Zea mays
ctcgcctgcgctccctcgccgccccagttccccaccccctgctcacccacccgtcccctcctgctcgcccatggctcccatcgctgtcggcgacgccctccccgacggccagctcgggtggttcgacgagaacgaccagctgcagcaggtctccgtccacgcgctcgccgccggcaagaaggtcatcctcttcggcgtccccggcgccttcaccccgacctgcagcaaccagcatgtgccaggcttcatcacacaggctgagcagctcaaagccaagggtgtagacgagatcctgct

SEQ ID NO: 17396 - DNA, 298 bp, Zea mays
ccaattctaagcgagacggggcacaggaagaggagagcctaaaaccctaaccccccgaatcggatccggccgccggagcgcggaaccccaccccggccgccatggagatgggagggatgagcgacgctgagcggctgttcttcttcgagatggcctgcaagaactccgaggtcgcgtacgagcagaaccccaacgacgccgacaacctgacgcggtggggcggcgcgctgctggagctgtcgcaggtccgaaccggccccgacagcctcaagcttcttgaagatgcggaagccaaact

SEQ ID NO: 17397 - DNA, 299 bp, Zea mays
cggacgcgtggcgtgacgcgtggggccagacatgttgcaagctaaagaatgtctgccaggtctgcctgctggatcttgaatatggtctgcctgttcaggtatatagatacagatctctctatcaattccaatgatgcaattccaaggagtgatgtcaatcgcgaatattttgcagaagagcatgataggagggccagagctggcatagactatgattcatcctatgggaaggctcgcccaaatgataccattctgaagcttcaaaggacagcaccatattacaagaggaacagagctca

SEQ ID NO: 17398 - DNA, 295 bp, Zea mays
cacaaaaccgtcagttctcttttcccctgtaaatcgcaaattcgtcttccctgcccatctatcgcttggacacctctgcaagggagcacatggctctcgagaaggccaaggagatcatcgcgtcctccccggtcgacctagctctccgaaaggccaaggagaccgtcgcctcccaccccgtcgtcgtcttcagcaaaacttactgtcctttctgcacccgagtgaaacaattgctagcaaagttgggggcaagttacaaggctattgagttggatgtggaaagtgatggcgctga

SEQ ID NO: 17399 - DNA, 297 bp, Zea mays
tgctgcagcgcctccgccgccgccgccgcatctaacgcattccctccgccgcagcccgaggcaagatggttctccagaacgacattgatctgctcaacccgccggcagaactcgagaagctcaagcacaagaaaaagagactcgtccagtcgcccaactccttcttcatggatgttaagtgccaggggtgcttcagcataaccactgttttcagccactcccagactgttgttgtgtgccctggctgccaaactgtcctctgccaacccacaggaggaaaggcaaggctcactgagg

SEQ ID NO: 17400 - DNA, 298 bp, Zea mays
gctagctaggtgcctgcggaggagagatagggatacgatggccggcggtggcatcgtgaacacgggcggtggcaaggactaccccgataagctcaccctcttcgtgttgctcacctgcatcgtcgccgccaccggcggtctcatcttcggatatgacatcggtatctcaggcggcgtgacgtccatgaacccgttcctggagaagttcttcccggaggtgtaccggaagaagcaggaggccaagacgaaccagtactgcaagtacgacaaccagctgctgcagaccttcacctcctcc

SEQ ID NO: 17401 - DNA, 291 bp, Zea mays
cccacgcgtccgcccacgcgtccgatcaggccgtatgagagctctactcaattatgaagcacctgaaatccatgaatctgagccttttactcgtcaaagcgacgtatatagtttgggtgtggtgatgctagaacttcttactggtcgtaagccatatgacagttctcgtccacgtgatgaacaacatcttgttcgatgggctaattctcagcttcatgacatggagtccctgtcaaagatggttgatccttctatccgaggagagtgttctgtgatactgttgtcacgttt

SEQ ID NO: 17402 - DNA, 290 bp, Zea mays
cacatgcgccacaaatttgatgttgacacccgtctggttgagggtctggtcctggaccacggttctcgtcaccctgacatgaagcgcagggcagagaattgttacatcttgacctgcaatgtctcattagaatatgagaaaagtgaaatcaatgcaggatttttttactcaaacgcagaacaaagagagaagatggttgctgcagagagacgccaagttgatgaacgtgtcaaacagattattgaattgaaaaataaggtttgtgctggaggcgataaaaactttgtggt

SEQ ID NO: 17403 - DNA, 290 bp, Zea mays
ccaggccccagaaaatgcactgggtggtatctacggtgttctgaaccagaagagaggtcatgtctttgaggagatgcagaggccgggcaccccgctctacaacatcaaggcttacctccctgtcatcgagtcctttgggttctccagccagctgagggctgcaacctctggtcaggcgttcccccaggctgtctttgaccattgggacatgatgggctctgatcctttggaggctggctcccaggctgctcagctggtgctggatatccgcaagaggaagggtctcaagg

SEQ ID NO: 17404 - DNA, 293 bp, Zea mays
cctatgttggatttagggttcaacatgataatgctaggggacctatgaagggtggaatcagataccaccatgaggttgatcctgatgaagttaatgccttggcacaattgatgacttggaaaacagcagtagctaacataccatatggaggagccaaaggtggtattggatgtagccctggagacctgagcatctctgagcttgagaggcttacccgagtttttactcagaaaatccatgacttgattggcatccatactgacgttccagctccagatatgggcaccaactca

SEQ ID NO: 17405 - DNA, 301 bp, Zea mays
cagacgcgtgggaccgtgtgctgtattcatcagttgtttaccctcacaactatggattcattcctcgcacgctttgtgaagacagtgatgctttggatgtaaatgttataatgcaggtatgcttcttttttatatatatcattgggattcacgaaatggtacatcagtagtgatctgagtatccttgggcataagttgagctaattttcaaatcttgtcattttccatttctgggaatggtcgagaacatgtctataaactgttacttccaagcatgtaggagccagtcattttccatttc

SEQ ID NO: 17406 - DNA, 301 bp, Zea mays
gagcgccggcgtggcgggcaaagacgacttccgcgaagaccccgcgctgggcaacctggacgagctcctcgccgacgaggccaacctcggcgccttcgacttcgccttcgtcgacgccgacaagcccaactacgtcaattaccacgagcagctgctccgcctggagcgcgtcggcggcaccatcgtgtacgacaacacgctctggtgcgggaacgtggccatgccgccggagacgcccatgtcggacatcgacaggaggttctcggccgccatcagggacctcaacgttcgcctctccgcg

SEQ ID NO: 17407 - DNA, 303 bp, Zea mays
atttgcgcacgagcgtaataatgtctacatgcaacaggatgcagaagaatgctggacacagttggtgtatacgctttctcaaactcttacctcagattcaagtgaatctgcagctcttccgatgaagcaactatttgggatagatctcgtgagcagggtccactgtgcagaaagtggtgaggagagcatggagacagaatcagtatattcccttaagtgtcatatatctcaagatgtgaaccatcttcatgagggaattaagcatggcttgaagacagaacttgagaaagcatcacctacact

SEQ ID NO: 17408 - DNA, 305 bp, Zea mays
acacacgcgtccgcggacgcgtggggcaacctccgccccatgtgcgacccctcggaggtgtcctacaccctgatgcccaacatgtgctacttcgagttcctgccgatggactccgatagcggcgtccatcggcgacgcgagccagctggtggacctcgcccgcgtggaggtcgggcgcgagtacgagctggtgatcaccacgtacgcggggctgaaccggtaccgcgtcggcgacgtgctccaggtgaccggcttccagaactccgcgccgcagttccggttcgtgcggcgcaagaacgtgctgc

SEQ ID NO: 17409 - DNA, 271 bp, Zea mays
cccacgcgtccgcccacgcgtccgcccacgcgtccgggagaaggaggtcaagaggcagacgctgctcgaactggtggactacatcacctccgccaccagcaagttcccggagcccgtcgtgcaggaggtcgtcaggatggtgtctgtgaatctgttcagggtgcccacccctgccccgagagagaacaaggcgctcgtgtcgttcgacatggaggaggaggagcccgtcatggaccccgcgtggtcgcacttgcagatcgtgtatgagctg

SEQ ID NO: 17410 - DNA, 291 bp, Zea mays
ggctcctgttgccacagctgaaacggcacctccaagtgtccaacctcaggctgctccagctgctacggttgctgctactgatgatgctgatgtgtacagtcaggcagcttcaaaccttgtatctggcaacaatctagaacagactatccaacaaattcttgacatgggtggtggtacatgggaacgtgatactgttgtttgtgctctacgtgctgcatacaataaccccgagagagctatagactacctgtattctggaattcctgagaatgtggaggctcagcctgttgc

SEQ ID NO: 17411 - DNA, 289 bp, Zea mays
ctcagtggcggtggccccggacggcaccaaggttgacgccgtcgaggcgttcaggatcgccggcattgagcacgggttcttcgcgttgcagcccaaggaagggctcgccatcgtcaacggcacggccgtgggctccggtctcgcggcgatcgtgctcttcgaggcaaacattctcgccgtccttgttgaggtcctctcggcactgtactgcgaggtgatggctggcaatccggagtacaccgaccacctcatccacgcgctcaagcaccaccctggacagatcgaagct

SEQ ID NO: 17412 - DNA, 292 bp, Zea mays
gtctgctcgcatttcctcccaatccatcccgcctccaaacccgaactccaagtcgccccgcatcgatggcgcccaaggccgagaagaagcccgcggcgaagaagccggcggaggaggagcccgctgccgagaaggcgccggccgggaagaagcccaaggcggagaagcgtgtcccagcaggcaagtccgccggcaaggagggcggcgagggaaagaggggccggaagaagggcaagaagagcgtggagacctacaagatctacatcttcaaggtgctgaagcaggtgcaccc

SEQ ID NO: 17413 - DNA, 290 bp, Zea mays
gcttcgggcaccacggccaccacggccagaacccgccggcgcacggcggcgtgcaccagcccaccttcaagatgttctgcaaggccgacgaggggtactgcctcaccgtccgcaacggcaacgtggtgctggcccccgccaacccgcgcgacgagcaccagcactggtacaaggacatgcgcttcagcacccaggtcaaggacgaggagggcaaccctgcgttcgccctcgtcaacaaggccactgggctcgccatcaagcactccctcggccagtcccacccggtgaag

SEQ ID NO: 17414 - DNA, 288 bp, Zea mays
cccacgcgtccggtgaccgagatcgaccccatctgtgccctccaggctctgatggagggtcttcaggtccttcccttggaggacgttgtctctgaagctgacatcttcgtgaccaccactggcaacaaggatatcatcatggttgaccacatgaggaagatgaagaacaatgccattgtctgcaacattggccactatgacaatgaaattgatatgctcggccttgagacctaccctggcgtcaagcgcatcaccatcaagccccagactgaccgctgggtgttcccc

SEQ ID NO: 17415 - DNA, 249 bp, Zea mays
cggaggaagaaggcgcagacgacaagcagaagcttgtgccatcggtcaatggcggcggtgacaaaggtgtgcgtcgtgtactactcgacgtacggccacgtggcgaggctggcggaggaggtcaagaagggcgccgactccgtggacggcgtcgaggcaaccatctggcaggtggcggagacgctgccggaggaggcgctggcgaagatgcgcgcaccggcgaggagcgaggagcacccggtgatctcg

SEQ ID NO: 17416 - DNA, 287 bp, Zea mays
cagacgcgtggtggaatttcagggcataaaaaagaattttaccatgcttcagacatggcctgtacgttcaccaaggcctgttgcgtcgaagcttgaatcggatacacctcttctgacagggcagcgtgtactggatgcactattcccctcagttctgggaggcacttgtgctattccaggggcatttggttgtggtaaaactgtcattagtcaggcactttccaagtactccaattctgaagctgtggtttatgtgggctgtggtgaacgaggaaatgagatggctg

SEQ ID NO: 17417 - DNA, 289 bp, Zea mays
gtagtacctcacaatggcagacaaaaagctaataccgttggggctcattatcctcatgagcataggattagccaatgctgttagggtggttagatactctaatgccgatggtactggcacaggacatgtagaaggtggtggatatgtgaatggcggaggatcaggatctaggtctggcaccggatcaggtgatagtggtccttatggtacacatgcaagcgctaggagaggtagtggagggggtggaactagccagtacggtgggtctggatatggttctgggtcgggg

SEQ ID NO: 17418 - DNA, 285 bp, Zea mays
cccaggtcttcgtcgggcgctttaccgctgaagagcgcccaccataccagattggccaccagaggattgctacatttgggaaggatgagcaaaggccctgttccattcgccaacattgggaagagagcaaaagatcacttgtacaaggactacaactttgatcaaaagttttttttgtcgacatgttctaactctggtttgaatctcacagccactggtgtgaagatcaatgaagacttcattggtgatatacggacacagcataaaagcagcagaaccactgtt

SEQ ID NO: 17419 - DNA, 285 bp, Zea mays
gtttctgagttatttcgtcggtccaggccatgccttaatgcactctctgcactaatgagatgcaagtaggatgctgagatttcgaccagggcatcatctctctaccatttgattgacttgcatggtaaaacagtttcctccattgtgaacaaagctgagcctcttgaagctcacctgacccttacaccagtaaagagggataatcaacatcaccgtgaggaaagcaataccagctcattggatagtgtcaagttggaaaacaagaatggttcaacatcacacaag

SEQ ID NO: 17420 - DNA, 283 bp, Zea mays
ggaaaatctgatattctaaactttgaaaatgtgggcatgattggtcaagtccacaggaaaggccttgatcttgatcagtttaaagactattttgttacactgagagcatgtaggctggatggccgccgtacagaattctgtgtgaaggcccatgccttgaagggccaatcttgtgttcaccggaggctaatcgtgggggatggatttgtgacaattacaaaaggtgaaagtattagaagtttctttgagcatgctgaagaagctgaggaagaggatgaagatg

SEQ ID NO: 17421 - DNA, 281 bp, Zea mays
cccacgcgtccgcatgacctacatgttcaagtatgacactgtgcacggacagtggaagcaccatgaggtcaaggtgaaggactccaagacccttctctttggtgagaaggaggttgctgtgtttggctgcaggaaccctgaggagatcccatggggttcggttggcgctgaatatgttgttgagtctactggtgttttcactgaccaggagaaggctgcagctcacttgaagggtggtgccaagaaggttgtcatttctgctcctagcaaggatgccccca

SEQ ID NO: 17422 - DNA, 281 bp, Zea mays
cagaccgtggcgtacggggggctccgcattggcctctacgagcctgtcaaatccttctacgtcggcaaagaccacgttggggatgtccctttgtccgagaagatagccgccggcttcacaactggtgccatcgctatcagcatcgccaaccctactgaccttgtcaaggtcaggctccaggccgagggcaagcttgcgcctggtgtgccacgccgctacactggcgcaatggatgcttattccaagattgctagacaggaaggggttgccgctctgtggac

SEQ ID NO: 17423 - DNA, 280 bp, Zea mays
cagacgcgtggtgcgccatggatcacatcctcgaggccgagaggaagggcgagatcaaccacgacaacgtcctctacatcgtcgagaacatcaacgtcaccagcgatcgagacgacgctgtggtcgatcgagtggggcatcgccgagctggtgaaccacccggccatacagcacaagctccgggaggagtcgcctcggtgctgggcgccggcgtgcctgtgacggagccggacctcgagcgcctcccctaccttcaggccatcgtcaaggagacgctccg

SEQ ID NO: 17424 - DNA, 282 bp, Zea mays
gtccatcaaagaatacgccttctgtgcctcaaattatcctcttgttattactcttgaggatcacctcacaccagatctccaagctaaagttgctacgatgctcactgaaacatttggagatcttcttttcgtccctaatccagacccgatgaaagagtttccttctccagcatctctaatgaagagaataatcatatcaaccaaacctccacaagaatataaggagtttctcaaagctgagaataatcgcagtggcagcggaaacatagctgagttgccaga

SEQ ID NO: 17425 - DNA, 317 bp, Zea mays
gagtaagagaagtagttcattcccttgcccaacacaagaaaacaagctctcctcatcaccctaatccaagcaactgcttgtgtgttgggaaattcttgtgacccctgttatattattatccgtgtagctactagcttcattcccccctttgtacccatcaaatggctggcatgtctctgcaacacccctgggcgtttgctttcggtctactaggtaacgtcatctcattcatgaccttcctggccccgataccgacgttctaccgcatctacaagagcaagtcgacggaaggcttccagtcggttccctacgtggtt

SEQ ID NO: 17426 - DNA, 232 bp, Zea mays
ttggcttctcgtccccctccggttcgggttggggttcgagaggttctcgggggttcggtttcgtgggtgagcggatagagatggcggcgacggatgttgagtaccgctgatacgtcaggagcgtcgcctgaaccacggacgcacagtccctccacaacgccttgagcagataccgcgaggtcgtccggtcgaaggtgatgctcggtgggtcgacacagaggtcccggggctt

SEQ ID NO: 17427 - DNA, 315 bp, Zea mays
cccacgcgtccgggggtgcagcagcggcgactctctggtgttccacttctctgggctgggcgcgcaggtcgccgacgcggactgcgacgagcaggacgggtacgacgaggccatctgcccggtggactcgttccagaagggccccatcctggacgacgagatcaacgagaccatcgtccggccgctggtgcccggcgccaagctccacgccgtcgtcgacgcgtgccacagcgattccgtcctcgacctccccttcctctgcaacatgtccaggaccgggaactggcagtgggaggatcaccgtccaccgtcggg

SEQ ID NO: 17428 - DNA, 313 bp, Zea mays
cgacaccatcgacaacgtgaaggcaaagatccaggacaaagagggcatccccccagaccagcagcgtctgatcttcgctggcaagcagctggaggatggccgcaccctagcagactacaacatccagaaggagagcactctccacctggtgctccgcctccgtggtggtcagtaagccatggttcatttaagctgctgctgtacctgggtatctgcgtcgtctggtgccctctggtgtacctctatatggatgtcgtcgtctaataaacatctgtggtttgtgtgtcatgaatcgtggttgtggcttcgttgg

SEQ ID NO: 17429 - DNA, 313 bp, Zea mays
cccacgcgtccgcccacacgtccgactaggttctagatcgcgatctagaactagtccggacgcgtggcacaaacacaagagatgctaaagcatttgcactcttatctgaggagggtattgcaaaagacagttaggaggataacagccgtgactgctggatgtgccacccaggctatggagactggcgtcatctatcgattctgatatcaataaagcatctcagttggagggagctttgttggaaaagaaaattgcttccatcaagagtgggctggatgcagctgctatccctgctgcgagaaaagctgatttg

SEQ ID NO: 17430 - DNA, 311 bp, Zea mays
ggtatctccaaggatggacagacccgcgagcatgctctccttgctttcacgcttggagtgaagcagatgatttgctgttgcaacaagatggatgccaccaaacccaagtactccaaggcccgttatgatgagattgtgaaggaagtctcttcctacctgaagaaggttggatacaaccctgacaagatccactttgttcccatctctggtttcgaaggtgacaacatgattgagaggtccaccaaccttgactggtacaagggcccaaccctacttgaggctttggacttgatcaatgagccgaagaggcc

SEQ ID NO: 17431 - DNA, 310 bp, Zea mays
gcgacgacgagttcggccgcatgctcgccgccatcctccgcgacaacggcgtcgacgacggcggcgtcgtcttcgactccggcgcgcgcaccggctcgccttcgtcaccctgcgcgccgacggggagcgcgagttcatgttctaccgcaaccccagcgctgacatgctcgtcaccgccgacgagctcaacgtcgagctcatcaagagggctgcggtcttccagtacggatcagtaagcttgattgctgagccttgccggacagcacatctccgtgccatggagattgccaaacaggcaggtgcactgctc

SEQ ID NO: 17432 - DNA, 308 bp, Zea mays
cagaccgtgggtcctcccccaagtccatagagtgatagagaatggaggatagtctaccagttaatgtccgggaatatcaggaacttgctaagaaagcactagcacagatgcactatgattatatcaacggaggagcagaagatgaatatacactgagggagaatattgcagcatatggaagaattctgttacggccacgagtccttatagatgtgagcaagatagacatgtcaacaagcttattaggatataatatgccatcgccaataattgtcgcacctacaggggcacacaaattagccaatccc

SEQ ID NO: 17433 - DNA, 304 bp, Zea mays
ccgacaggacgagactcgcagctagctgacacggccgagaagcagcttgcattgcaggcgtagtacgtacccagcagcagctagcactagcagtccatcggagcgacgatggtgagaacgacggtgctggcggcgctgctggtggccgccgccctcgccggcggcgcgcgggcgcagctcaaggaggggttctacgactactcctgcccacaggcggagaagatcgtcaaggactacgtgaaggcgcacatcccccacgcgcccgacgtcgcctccagcctgctccgcacccacttccacgact

SEQ ID NO: 17434 - DNA, 302 bp, Zea mays
accacgcgtccgcggacggtgggcgtacgtggatgtagtggccattcttcagggtcacccttgatttgcttgagatggttttcgcgaagggagacccgggaatcgcagatgtgtacgacaaattgcaagtggctgatgatttgcaatccttcggcgagcaactgaggaagaactatgaggagacaaaagagctactccttcaggttgctggtcacaaggacgtccttgaaggtgatccttatctgaagcagcgtctgcagctgcgtgagtcctacatcaccactctgaacgtgtgccaggcc

SEQ ID NO: 17435 - DNA, 304 bp, Zea mays
ctcggcggcggctcaggtccctctccatctccggcgtggcgcttggcgtctgacctcaacaagcaagaaagcaaatggcaggcggcagggttgcgcatgccaccctcaagggcccgagtgtggtgaaggagatcttcattggactgaccctgggtctgatcgcgggaggcatgtggaagatgcaccactggaacgagcagaggaagactaggtccttctatgacatgcttgacaagggccagatcagcgttgtcgtcgaggagtaaagagttcttcccagttattttcaaagaactctctcgag

SEQ ID NO: 17436 - DNA, 305 bp, Zea mays
cgtcaagtcaattgtggacatctgcatgaagtttgaagagggcaagtatgtgtttgtcaaagatccagcaaagccacagttgaggatctatgaggtaccatctgatgcgtttgagaatgattatgttgaagagccacttccagaggaggagcaggttcgcccgcttggagaagttgacgccactgcagaggaaatggatgcagttgctgaggcagaggccaacaatgtatcttctgctaatggtggtgagggtgggaagagtgcagaagcgacccttgcttgaagggaatagagggttcttttac

SEQ ID NO: 17437 - DNA, 301 bp, Zea mays
aaagggccagtaccactgtgacggatgtggaatatgtagaaccggcggcgtggagaactttttccactgtgataaatgtgggtgttgctacagcaatgtcttgaaggattcccaccactgcgtcgaaagagcaatgcatcacaactgccccgtctgctttgagtatctgttcgactccacgaaggacatcagcgtgctgcaatgtgggcataccatccatttggagtgcatgaacgagatgagagcacaccatcacttctcatgcccagtgtgctcgaggtccgcctgcgacatgtcggcc

SEQ ID NO: 17438 - DNA, 302 bp, Zea mays
aggctgcccaacccttgcgccggtagcggtggcggtgaggatagagggttacctgaggaggcagtgatggcggccacgattcagtacaaccggagcaacccggcggtgaagcggatcctgcaggaggtcaaggagatgcagtccaacccctcacccgacttcatgtccctccccctcgaggaggacatcttcgagtggcaatttgctatccttggtccgagagacagcgagtttgagggtggaatttatcatggcaggatccagctaccttcggattatccattcaagccaccgtccttcat

SEQ ID NO: 17439 - DNA, 298 bp, Zea mays
cccacgcgtccgcgagactctgttcaccatgtaccagatactcgagtcctggctccgcgtcgcgtcgcagctgctcacccgcctcgacgagcggatcgaagacaagtgctgggaggcggcggccggcgactgctggatcctggagcgcgtgtggaagctgctcgcggacgtcgaggacctccacctgctgatggacccggacgagttcctacggctcaagagccagctcgccgtacgagcggcgccggggtctgagtccgcgtccttctgtttccggtccacggcgctcctgcacgtc

SEQ ID NO: 17440 - DNA, 303 bp, Zea mays
cccacgcgtccgcggacgcgtgggcttgcaggtattcatcaagaagtatgtccaatgttatgggtgtggaaatcctgagacagagattctcatctcaaagacccagatgatatcactgaaatgtgcagcctgtgggttcgtctcagatgttgatatgagggacaagctcacaaccttcattctgaaaaacccaccagaacagaagaagggcggaaaagacaagaaggccatgaggagagctgagaaggaacggctgaaggaaggtgaggctgctgatgaggagcagaagaaactgaagaagga

SEQ ID NO: 17441 - DNA, 297 bp, Zea mays
actccttctgtcccaactgagcggtaaggacattaccgagctcattgctgctggcagggagaagtttgcttcagtcccatgtggcggtggcggtgtggctgttgcggcactgcccctgctgctggcggcgctcctgcagctgaggcgaagaaagaagagaaggtggaggagaaggaagaaagtgatgacgacatgggcttcagcctcttcgactaagcctgtgcaatagtcaagagtattgtttttgagtcgcggaagcagagggaagaaaaatcgtagtcatgtttggactttaac

SEQ ID NO: 17442 - DNA, 296 bp, Zea mays
cggacgcgtggggtcgtccatcgttggcacgctcctgccgggatacgcggcgtacacggcgaccaacgccgccgtggaggcgatgacgaagatcctggccaaggagatacgcggcgaagggggtgaccgcgaacgtggtcgcgccggggcccgtgcgcaccgagctgttcttggccgggaaggacgaagcgttcctgcggaaggtggagcagcagtccatgggccgcatcgccgagacgacggacgtggcgccggtggtggcgttcctggccagcgacgccgcggcttgggtcaac

SEQ ID NO: 17443 - DNA, 298 bp, Zea mays
cccacgcgtccgcccacgcgtccgcccacgcgtccgagcggttctacgtccgagtcgtcgcatcaggtcccctcgattcgccggcggcgccaccaaccaagctcatacatctgaattgactagtcaaactcagtgatctctttggggactaatcaaactcaagaactgagtttcatgtctgatcttgacgtccagcttccatctgcttttgatccgtttgcagaggcaaatgctgaggactccagtgctggtgctggatcaaaggactatgtgcacgtgcgtattcagcagcgcaacg

SEQ ID NO: 17444 - DNA, 299 bp, Zea mays
gtccgcgtccagtgtgtccgctactccgctccccctcagtcctcagttcctcacctagcggtagcgcgcgcgcgggagacgtagatggcggcttcggaggcggcagcggcggcggcaacaccggtgacgccgacagaggggacggtgatcgcgatccacagcctggaggagtggagcatccagatcgaggaggccaacagcgccaagaagctggtggtgattgacttcactgcaacatggtgtcctccgtgccgcgccatggctccaatttttgctgatatggccaagaagtccccaaa

SEQ ID NO: 17445 - DNA, 298 bp, Zea mays
cccacgcgtccgggttttttgattttagccgccgccgctgctcatctcacatccctcgagaagacgcctgctcctcgccgatcgatacgatggccgtcttctccgacctccacaccgccgacggcctcaagtccctcgaggctcacctcgccggcaaaacctatgtgtctggtgactccattactaaggatgacattaaggtcttcgccgcggtgccgtcgaagcctggcgctgagtttcctaatgccgcccgctggtacgagaccgtctctgcggctgtagcctcaagaatccctgg

SEQ ID NO: 17446 - DNA, 295 bp, Zea mays
gcccccaactacccccagcctcggaaggaaccttccagaagcgcaagactctaaaggccgtcgccttcccattcttcctcgccgcgggggtcgcctgagatcacataaacaatggtgaaggctgttgctgtgcttggtagcagcgatggtgtcaagggcaccatctttttcacccaagagggagatggccctaccgctgtcaccggaagtgtctctggcctcaagcctggcctccatgggttccatgtacatgcacttggtgacaccaccaatggatgcatgtcaactggaccac

SEQ ID NO: 17447 - DNA, 295 bp, Zea mays
ctgacaatgcgcacaaagggttatggttttgtgaagtttggtgatcctaatgagcaagctcgtgcaatgactgagatgaatggcatgctatgttcttctaggcctatgcgtattgggcctgctgcaaacaagaaagctactgttgttcaggagaaagtaccaagtgctcagggagttcagtctgacaatgatcctaacaatacaaccatttttgttggtggtcttgaccccaatgtcactgaagatatgttgaaacaagttttcaccccttatggggacgtagtccatgttaaga

SEQ ID NO: 17448 - DNA, 298 bp, Zea mays
cacaagcaaaacaaaaagctaagaagctccgtagctaaattcagatattacaaacacaaaaaaggagtgcagaaccaaaatggctgcctcgaccttccttctcattgcttttctagcattgatcacttctcaggccattgcctctgatcctagcccgctccaagacttctgtgttgccgataaagactctccggtgaaggtgaatggatttgtttgcaaggaccctatggctgtgaacgctgacgacttcttcaaggctgcaaaacttgaccagccaagggacaccaccaaaagcaag

SEQ ID NO: 17449 - DNA, 293 bp, Zea mays
cccacgcgtccgagccctaatacggatgatgctaaatatgttataaatgtaaaacaaattgcaaagtttgttgttggactgggggataaggtgtctccaactgatatcgaggaagggatgagggtcggtgttgatcgcaataagtaccagattcaaatccctcttccaccaaaaattgacccaagtgttaccatgatgactgtggaggaaaagccagatgtgacgtacaatgatgttggtggctgcaaggaacagattgagaaaatgcgtgaagttgttgaacttcctatgct

SEQ ID NO: 17450 - DNA, 290 bp, Zea mays
gatcgacatgtcagaactgcgcgatgctcttctcagtctcggatattctgtgtctccaactgtccttgatctgcttgtgtctaaatttgacaagactgggggcaagagcaaagcaatcgaatatgacaacttcattgaatgctgcctcactgttaaggggctgacagagaagttcaaggagaaggacaccgcctactctgggtcggcgactttcacctacgaggccttcatgctgaccgtgctgcctttcctcattgcgtagtggcagtccactccgccgctcaaaacaa

SEQ ID NO: 17451 - DNA, 291 bp, Zea mays
cccacgcgtccggccatctcccctgttcggttttaggagacctgcgccgctcctccggccacgcgagcacgccgaaatggtcgcccacaggttccatcagtaccaggtggtgggtcgcgcgctgccgaccccgaccgatgagcaccccaagatctaccgcatgaagctctgggccactaacgaggttcgcgccaagtcgaagttctggtacttcctgagaaagctgaagaaggtgaagaagagcaatggccagatgctcgccatcaacgagatcttcgagcgcaaccctac

SEQ ID NO: 17452 - DNA, 291 bp, Zea mays
cggacgcgtgggcggcacggactcgcgcttcaaccgcgtgttcaacgagggcatgaagaaccactcggtgatcatcaccaagaagctgctggacttctatcacgggcttcgagggcgtgtcgacgctggtggacgtgggcggcggcgtgggcgccacgctgcacgccatcacgtcccgccacccgcacatctccggggtcaacttcgacctgccgcacgtcatctccgatgcgccgccgttccccggcgtgcgccacgtgggcggggacatgttcgcgtccgtgcccgccg

SEQ ID NO: 17453 - DNA, 288 bp, Zea mays
cggacgcgtgggcgcatactagagaggaggttgagcggagtaggcggcggccagcaatgaaggtacagtgcgacgtgtgcacggccgacgcggcctccgtcttctgctgcgccgacgaggccgcgctgtgcgacgcatgcgaccgccgtgtccaccgcgccaacaagctcgcggggaagcaccgccgcttctccctcctgcacccgtgttcttcctcttcctcctccgccgcgcacaagccgccgctctgcgacatctgccaggagcggaggggcttcttgttctgca

SEQ ID NO: 17454 - DNA, 286 bp, Zea mays
cagagccgccgcgcgcctccctgtctcctccccagcgcctgccacggctggagcaggaggcggcgtgccgttctcgatccaggcgcccaaggagaagatcgagatgtactcgccggccttctatgccgcctgcactgccggaggaatcgccagctgcgggctcacccacatggccgtcacgcctctcgacctcgtcaagtgcaatatgcagattgacccagcgaaatacaagagtatctcatctggatttggtatcctgttaaaggagcaaggggccaggggtttc

SEQ ID NO: 17455 - DNA, 286 bp, Zea mays
ctccaaggccgaggaggcccaggcggactcccggactccacccacgacgtgcagcagctcatcgacaacttcgccaggaagaacttcaccgtggaggagctcgtcatcctcaccggggcgcactccatcggccagggccactgctcgtccttcactggccgcctctccgagccacccagccagatcaacccggcgtaccgcgacctgctcaactacaagtgcccccaggggtccaaccctcccgtggccaacaacgtccgcgacgaggactacggcgtggtggcga

SEQ ID NO: 17456 - DNA, 284 bp, Zea mays
aaaggaggggagaagatgtagtccacccacttaaagtttctctggaagatctttacaatggcacctcaaagaagctctctctttcgcgcaatgtcatctgctccaagtgcaagggcaagggctcgaagtctggtgcctcaatgaggtgccctggttgccaggggtcaggcatgaaagtcactattcgtcagctgggcccttccatgatacagcagatgcagcagccttgcaatgagtgcaaggggactggagagagcatcaatgagaaggaccgctgcccaggg

SEQ ID NO: 17457 - DNA, 282 bp, Zea mays
cttccacactcctgtccgcgctgtcaatgcactgggagctgccattgccatccttggcacattcctgtactctcaggcaaaggcgtgaggcgggccatgatgacgaacgtctgcagaatcagtagcaagcactaaatccaattttgcttgttccagtggcatgtagatatcgggttagttttccgtatgagagtttgtaataatggatgaatggctctgctgtttcgttcttgtttgttggccagactcaaatccataggccatgaactgcggtcgagtgta

SEQ ID NO: 17458 - DNA, 282 bp, Zea mays
gccagcggcctcgcccgccgctgcctcgtgcaggtgtcctacgccatcggcgtgccggagcccctgtccgtgttcgtcgactcctacggcaccgggaccatccccgacaaggagatcctaaagatcgtcaaggagaacttcgacttcaggccagggatgatcaccatcaacctcgacctcaagaagggcggcaacaggttcatcaagaccgccgcatacggccactttggccgtgacgacgccgacttcacctgggaggtggtcaagcccctaaagaaggca

SEQ ID NO: 17459 - DNA, 284 bp, Zea mays
ccgagctcttcttcccggccaccacctacggctgcgacccgcgggaccgggactgcggcatgggcctcgccttcagggccttcgtccacccgccccgcctcgcgcactccatgaccgacgacgagctcttctggcgggcctccctcgtgcctagggccgaggagttcccgttccagcgggtgcccaaggtcgccttcctcttcatggcgcgcggccccatccccttcgcgccgctctgggacaagttcttccgcggacaccaggggctctactccgtctacgtc

SEQ ID NO: 17460 - DNA, 286 bp, Zea mays
ctcgcttcagtcttaggtatttttatgtctctcttttatttcgagagttgcctgttccatatggaaaaaaaaaacgagagttaatgctgatcaaacagacgttgctgctgcgtttggcattcaggactccggacatctccgcgatgcaccatgacggcacgcctgacctgagagtcgtggcggagaagctggccgacaacctcagggtcagggacacgtccttggacacgaggaagatggtggtcgagatctgcgacatcgtcaccgggaggtctgcccggctggc

SEQ ID NO: 17461 - DNA, 280 bp, Zea mays
ggtagaagcacttgcctatgtatgacgagttggctagcaagagcaatgttgaatatattgccggaggagccacccagaactctatcagggttgcccaatggatgcttcaaactcctggtgcaacaagttacatgggatgcattggaaaggacaagtttggtgaggaaatgaagaaaaacgctcaagctgcaggagttactgctcattactacgaggatgagactgctcctactggcacatgtgctgtatgtgttgttggtggtgaaaggtcattgattgc

SEQ ID NO: 17462 - DNA, 310 bp, Zea mays
aagaaggtggacgccgccgaggcgttcaagatcgccggcatcgagggcggcttcttcaagctcaaccccaaggagggcctcgccatcgtcaacggcacgtctgtaggctccgcgctcgcagccaccgtgatgtacgacgccaacgtcctggccgtcctgtcggaggtcctgtccgccgtcttctgtgaggtcatgaacggcaagcccgagtacacggaccacctgacccacaagctgaagcaccacccggggtccatcgaagccgcggctatcatggagcacatcctggagggcagctccttcatgaagc

SEQ ID NO: 17463 - DNA, 316 bp, Zea mays
atcacatcctcgaggccgagaggaagggcgagatcaaccacgacaacgtcctctacatcgtcgagaacatcaacgtcgcagcgatcgagacgacactgtggtcgatcgagtggggcatcgccgagctggtgaaccacccggccatccagcacaagctccgggaggagctcgcctccgtgctgggcgccggcatgcctgtaacggagccggacctcgagcgcctcccctaccttcaggccatcgtcaaggagacgctccgcctgcacatggccatcccgctgctggtcccccacatgaacctcaacgacggcaagct

SEQ ID NO: 17464 - DNA, 315 bp, Zea mays
cgcagggcggcggcaacgacggcgggtactggctcgacctgccggcggacgggaaccagcgggagaaggtcaagaggggagacctcgccggcgcgaaggtgtacgtgcaggcgagcagatgctcggcgggacagtggccgacctcgcggtgtggatcttctacccgttcaacgggcaggcgcgcgccaaggtcggcctcatcccgtcgataccgctcggcgagatcggcgagcacgtcggcgactgggagcacgtaacgctgcgcgtcagcaacttctccggcgagctcatccggatgtacttctcgcagcacag

SEQ ID NO: 17465 - DNA, 314 bp, Zea mays
gcaaagatgaagaaaggtgtaattgttgtgaataatgctcgaggagcaatcatggatgctcaagcagtcgcagatgcatgttctagcggtcacattgctggatacggtggtgatgtgtggttcccacagccagcaccaaaggatcacccctggcgctacatgccaaaccatgccatgacccctcacatctctgggactacaattgatgcgcactgcggtatgcggatggtgtgagggacatgctgaataggtatttcaagggcgaggacttccccgtgcagaactacatcgtcaaggaaggccagcttgccagt

SEQ ID NO: 17466 - DNA, 313 bp, Zea mays
ggatcaggttgctgctctcaaggaaaatatgaacattgatctgcgtgtcattggaataactggctcaagtacaatgcttttgagcaacacgggaatagacttaacccagtggaaacaacttctaaaaaaggaagcagaaccagctgatattgatagttttgttcatcatttatccgataatcacgtatttccaaacaaagttttggtggactgcacagcagatacaagtgttgcatcccactattataattggttaaagaagggtattcatgtcatcacaccaaataagaaagcaaattctgggccacttgat

SEQ ID NO: 17467 - DNA, 310 bp, Zea mays
gggatatctcccccattctgctgcgccaccattgctgcaagggccaaggggagggggtgaacatatcaacataaactgcagggagaaatagctagtggcatatatatggacgcaggacatcacatggagatcaaggaggtagcagcagcggaggcgatgatgatgggcatgccgacggtgccctctcggttcaggaggatctgcgtcttctgcggaagcagccaggggaggaagaagagctaccaggatgctgccgtcgagctcggcgaggagctggtctcaaggaacatcgatctggtctatggcgggg

SEQ ID NO: 17468 - DNA, 315 bp, Zea mays
ctcgcatcttcctccgtgatccaagttctagcagcgcacgcacggtttcggcaatgtcggggcgcggcaaaggcggcaagggtctgggcaagggcggcgccaagcgccaccgcaaggtcctgcgcgacaacatccagggcatcaccaagccggcgatccggaggctggctaggaggggcggcgtcaagcgcatctccgggctcatctacgaggagacccgcggtgtgctcaagatctttctggagaacgtcattcgtgacgccgtcacctacaccgagcacgcccgtcgcaagaacgtcaccgccatggatgtcg

SEQ ID NO: 17469 - DNA, 313 bp, Zea mays
cagaccgtgggcccgaaccgaagctgtgcctcgtaccatttcgatccaatggcgccgacgtcgaagctgtcgacgggcatcaagcgcgcttcgcagtcgcacatagtaccatcgccgtgggctgtgggccatcaaggccaagaacggcggcgccttccccaaggccgacaaggccgccgccgccgtggaacccaagttctaccctgccgacgacgtcaagccccgcagttccagcacccgcaagcctaagcctaccaagctcaggtcgagcatcacgcctgggacggtgctgatcctcctcgcagggcgcttc

SEQ ID NO: 17470 - DNA, 311 bp, Zea mays
gaaggcactcaggaagaaggtccgaggtatcatggaaaaggaaatcgcgcccattatgactgagtactgggagaaggctgaattcccattccatgccattcccagccttgccagtcttggtttagctggtggtacaataaaggggtatgggtgccctggactctcgcttacagctagtgctatttcgatagcagaggttgcacgggtcgatgcgagctgctccacatttattctagtgcactcctcgttggctatgtccactattgccctttgtggatctgaggctcaaaagcagaaatacttaccatctc

SEQ ID NO: 17471 - DNA, 310 bp, Zea mays
gccagctctcgtacggcgcgtgggtcaccttcgggaaccagctggacgtgaaggaggccaaggagctactgcaggcgtgccgggacgctggcgtcaacttcttcgacaacgccgagaagtacgccaacgggcgcgccgaggagatcatgggccaggccatccgggacctgggctggcgccgctccgacgtcgtcatctccaccaagctcttctggggcggccagggccccaacgacaagggcctctcccggaagcacgtcgtcgagggcctccgcagctcgctccgccgcctcgccctggactacgtcga

SEQ ID NO: 17472 - DNA, 308 bp, Zea mays
gacattcaatgcaccagcaatgtatgttgctatccaagctgtcctttccctgtatgccagcagtcgcacaacaggtattgtgctcgattctggtgatggtgtgacccacaccgtgccaatctacgagggatacgcgctccctcatgccattcttaggctggatcttgctggtcgtgatctgactgactgcctaatgaagatcctcacggaaaggggttattccttcaccacgacggcagaacgggaaatcgtgagagacataaaggagaagctggcctttgtcgccctagactacgagcaggagctgg

SEQ ID NO: 17473 - DNA, 311 bp, Zea mays
cacaccggagcatccggcgaggacctgcacgcttgaaaccgacgacgaggccatatgctggggaattgcatattgtgtcaagggtggtccagaaaaaaagctaaaagcaatgcagtacttggagagaagagagtgtgagtacgaccagaagatatccattgatttctacaaggaaggagatcccttgaaaccagctgtgacaggcgtcttagtgttcgtttccactccagatccaattggcaacaagtactatcttggccctgctcctttgcaggatatggcaatgcaaattgctacagccaatggcccta

SEQ ID NO: 17474 - DNA, 307 bp, Zea mays
atactggcgcagaggagcaatgcccggcatggatgccttcgctgctgtgtcactactcgccacactctttctggttcgtgcggcactgcacatcctccggcggcggctgcggacgccatgacgccgacggactattggcgagcagtgcttcctgagaccccgatgccccgagccatactcgacctattgaccacatctacaggtgaggaaggctcaaggaaggtcaccacgtcaaatgggtaccaaggccatgacttaaggacggtcagcacatcatatgcatctcaagatggggacaactcatgga

SEQ ID NO: 17475 - DNA, 310 bp, Zea mays
atcagggggaagctcgtcaccgcgggggccatattcttcacgctcaacgtcgtcttcgccgccgtcgagctcggcttccgcgcctggatcgtcaggggatccggcgccgcgtcgtccaggctcttgctcggcctcatcatgctcgcagcgctctgctgcgtcgtcatgctcgcgctcgtcacgcagaacgtcgtctacctcgtgtgcaagagctaccaccacgagagcctcgacaaggccaacatctccgaccacctcgaggtctacctcggcgactacgtcccgctaaaggcgtccgacgtgcagatgg

SEQ ID NO: 17476 - DNA, 308 bp, Zea mays
cacacgcgtccggcgtctgcatcagccatgacatcgagacgaacgagtgcctgcacaggaacggcgggtgctggcgcgacgaggccaccaacgtgacggcctgccaggacacgtaccggggccaggtgtgcgagtgccccgtggtgaacggcgtccgctacgagggcgacggctacactgactgcaaagctattgggccgggcaggtgcgctctcaacaacggcgggtgctggtcggcgacgcgagggcaccagaccttctccgcctgcacggagaccgcgctgacagggtgccggtgcccgccgggg

SEQ ID NO: 17477 - DNA, 311 bp, Zea mays
ctccacttctcgctactgccatgaccatgaaccacgctggccatccaggaccaaatcatgagactttctcacggcaccacctattttgttcaccacaaaacagtaagccaaggtgtaatcttagcttcaggccacgagccgaaagggtaagcggtcagaataatggaagccaagtgctgagcgcaccggcggggatgtccctcaaagaagcatgttcccccctgacttcgtctttggtgcctccacttcagcataccaaattgaaggtggatggaatgaagatggaaaggggccaagctcatgggattact

SEQ ID NO: 17478 - DNA, 304 bp, Zea mays
gcagagcactggcatgagcatggaccgcatggagcggcgttccgtgtccttgctcctcgctctggctctcctggacgccgctgcgtcggcggactcgtggctgtacgataagttcacgacggatggcaacgttcgcgctgactacaacgcgcaggggcagcaggtgacgtctctgatcctgacgcagcagtccggcggcgccttcagctcgcggcagaagtacctgtacggggagttcagcatccagatgaggctgatcccggtcaactcctcgggctccgtgacctccttctacctgtcgtcg

SEQ ID NO: 17479 - DNA, 306 bp, Zea mays
  unsure (1)..(306): unsure at all n locations
acgagcttgttaggcatccaaacatcgtacagctctatgaggtcatggccaccaaaaccanaatatactttgtgctggaacatgttaaaggtggagagctgttcaacaagattcagcgaggaaggctcaaggaagacgcagcgaggaagtacttccagcagttgatctgtgcggtggacttctgccacagcaggggtgtctatcatcgagatttgaagccagaaaatcttttgctcgatgagaatagcaacctgaaggtatcagattttggtctaagcgcacttgctgaatgccatagacaagacg

SEQ ID NO: 17480 - DNA, 294 bp, Zea mays
  unsure (1)..(294): unsure at all n locations
ctcagagcctcagaacgccagcaaagtattgcggtcgcgaagagcagcgctacaagatggtgaagctcgcattcggaagcatcggcaactccttcagcgtcacctccatcaaggcctacgtagcggagttcatcgccaccctcctcttcgtcttcgcaggcgtgggttccgccatcgccttcggactgctggagactggaggcgcgctggaccctgcaggactggtggcgatcgcagtggcgcacgcgctggccctcttcgtgggcgtctccgtggccgcgntcacctccggcg

SEQ ID NO: 17481 - DNA, 305 bp, Zea mays
gagccggtacgcgcacgcgtcggcacgggcgcacccgtctacctggacgccgtcctcgagtacctggccgccgaggtgctggaactggccggcaacgctgccaaggacaacaagaagacacgcatcatcccgcgccacgtgctccttgccatccgcaacgacgaggagctcggcaagctgctgtccggcgtcaccatcgcccacggcggcgtcctccccaacatcaacccggtgctcctgcccaagaagaccgctgagaaggcggcggccaaggaggccaagtcgcccaagaaggccgccaagtc

SEQ ID NO: 17482 - DNA, 302 bp, Zea mays
gtagatgtcagcacaggacttctgattcttggtgtgctatgccactctctgccactgatgctgagatatgctgtgagctccggggagcacgcagaatcctcttgggattcaggactggagctgtcccgagcatgcagcattgtcatgctccttgcctatgtagcctaccttttcttccaactgaaaacccaccgccaactatttgaaccccaaccccaagaggttgaagatgatggtgatgattcggtctctcaagacgaggcagtactgggattttccagtgcaatgatttggctgggagt

SEQ ID NO: 17483 - DNA, 301 bp, Zea mays
  unsure (1)..(301): unsure at all n locations
cacacgcgtccgaactagaagcacccctctacctccctccctctctctctctctcttcgcagtccgaagctccgcacccaatctaatcgacacctcaccgagatgggccgcaagtacttcgtcggtggcaactgganatgcaatggaaccacagatcaggtcgagaagattgtcaaaaccctgaatgaaggacaggttcccccttcagatgttgtcgaggtcgttgtcagcactccttatgtcttccttcctgtggtcaagagccagctgcgccaagagttccatgttgctgctcagaact

SEQ ID NO: 17484 - DNA, 307 bp, Zea mays
ctgatgagcctcgtcattctggttctggcagcggcttccggtcatttctcaaagagactgtccgcgatgtgttcgagtctgaggggattcacatccctcatagtcgtcgccatggggatgatgaccaggacgacggttacgcacagccaactggaaatggccgcaccaaaaaccgctccctgccactctcgaccctgatagagatgctcaaggaacaaactggaaaggatgacattgatgtgggttctatccggatgacgctgttcaacatctttggtgatgatgccagcccaaagattaagaagtt

SEQ ID NO: 17485 - DNA, 304 bp, Zea mays
ctggaacctcttctcgggattcttaataccaagaactagaattccagtctggtggagatggttctactggatttgccccatcgcatggacgctcaacgggctggtcacttcacagtttggagatgtatccgagacgttcagtgacggtggggtgcgtatagctgacttcgttgaagactactttgggtaccatcacgacttgctgtgggtggtcgctgtggtggtggtcgcgtttcctgtgctctttgccttgctctttggtctctcgctcaagatattcaacttccagaagaggtaaataaaa

SEQ ID NO: 17486 - DNA, 310 bp, Zea mays
gaaggctagggatgtggagcccgagcccgaggcagagccgatggatttgactgatgaggaaaaggaccgcaagcagacgaaagctgctgctcagaaagagaaggagttaggtaacgcagcttacaagaagaaggacttcgaggtggcaatccagcattacaccaaagccttggaacttgacgacgaggatatttcctatctgactaaccgagcagcagtctacattgagatgggaaagtacgatgaatgcatcaaggactgtgataaggctgtggagaggggaagagaacttcgtgctgatttcaagatg

SEQ ID NO: 17487 - DNA, 314 bp, Zea mays
ggcttcccatcaacgagggtgtcggccatctgagcagctcccctgcccctcgcagcggctactctacaggtctagcgactctttcgccatccatagagggaggaggcgcggcggagatggtgggcggtggcggcggcgggccgctgcggcgggtgggcaagtacgaggtgggacgcaccatcggggaaggcaccttcgccaaggtcaagttcgcgcagaacaccgagaccggggagagcgtcgccatgaaggtgctcgaccgctcctccatcctcaagaacaagatggccgaacagattaagagagaaatatcc

SEQ ID NO: 17488 - DNA, 307 bp, Zea mays
cttgtgcgcagcgcagccgctgcttttcgttcgtcttcatcctacgcgagggcgaaacccacaaaccctctccctcccgtactccggcctacacatccaggggcgatgacgctgggtagctccggcgccggatcgagcgtcgtcgttccccgaaacttcaggctattagaggagctcgagcgtggagagaagggcattggtgatggaacagtgagctatggaatggatgatgccgatgacatctacatgcggtcatggactggtaccatcattggccctcacaatactgtacatgagggtcgcatct

SEQ ID NO: 17489 - DNA, 303 bp, Zea mays
ggagattttggctcagattaggaagaagaaggcattacttatccaagaacatagaatgaagaagagaactgcagaaagcagtggtatagtccctagaaagtttgacaaagataggaaattcacaactgataggatgggacgccagctttcatccatgggtatggatcctagtgctgccatgaatagaattcgcagtcagtctaggggtcgcaagcgtgagacgtcagtgagcagagctgcagcggatggtgacggtatggagatagatggccagcaaagcaacaagaaattgcgtcggacatc

SEQ ID NO: 17490 - DNA, 305 bp, Zea mays
ggtgaagttgttggtaagtttcttattggagaggagtttggaaattgttgtcgactcaagggcccagatgcattgacaaaattcatggttattattcacaacgctataggaggacaggattatgagaagttccctttttcattttttgacaagaatggaaagtatgtgcaggccttattgaccgccaatacaaggagcaaaatggatggtaaatccattggagccttttgtttccagcagattgcaagcactgaaatacagcaagcctttgagattcagagacaacaagaaaagaagtgttacgc

SEQ ID NO: 17491 - DNA, 95 bp, Zea mays
agctcccatatccgctcccctacctctccagcatctcccgtctccgtcgtctcgtctctgctcctcacctcgccgccagccatgggcaagatcaa

SEQ ID NO: 17492 - DNA, 309 bp, Zea mays
cagagtgcagactgcagatacagtccgtgctctgacggagcaacaggagaagcagagcgagccgaggcggagtcgacagcttggtgccttatcatggaggaagcggggaggggctgcggcttgctcaaggtggttgtgacgcacggccggaacctagccgtccgggatttcacgtccagcgacccctacgtcatcgtccacgttgccgacaagaccacaaaaacaaaagttatcaacagttgcctcaatccagtttggaatgaagagatgacattctccatgaaagaaccagtaggaataatcaaattt

SEQ ID NO: 17493 - DNA, 304 bp, Zea mays
cccagcgtccgcgccgtcgtctgctccgggctgctgttctgcgcctccacaaggctttggcctctgttgtaagttttaagcttcacctccagccatgggtaaggagaagtcccacatcaacattgtggttattggccatgtcgactctggcaagtcaaccaccaccggccacctgatctacaagcttggaggcattgacaagcgtgtgattgagaggttcgagaaggaagccgctgaaatgaacaaacggtccttcaagtacgcttgggtgcttgacaagctcaaggctgagcgtgagagaggt

SEQ ID NO: 17494 - DNA, 299 bp, Zea mays
ggaccgtggcgctacatggacaaggatgcaggattccagtcagctgaggaaggtggctctggaacgtttcggcagaagctcagctaatgccatagttgctccttcacctctggttggcctgcccgagttttcataccttggttggggtcactggtttacgctgagggatctggagcttgctaccaatcgcttttcaaaggacaacattattggtgagggtggatacggtgtagtttatcgcgggcagctaatcaatggctcccctgttgctgtcaaaaagcttctcaataacctaggtc

SEQ ID NO: 17495 - DNA, 301 bp, Zea mays
gccatcggcgtgccggagcccctgtccgtgttcgtcgactcctacggcaccgggaccatccccgacaaggagatcctggggatcgtcaaggagaacttcgacttcaggccagggatgatcaccatcaacctcgacctcaagaagggcggcaacaggttcatcaagaccgccgcatacggccactttggccgtgacgacgccgacttcacctgggaggtggtcaagcccctaaagaaggcatccgcttaagaatgtattgggaagttcactggacatgaggttcatcttcgtctggctctgc

SEQ ID NO: 17496 - DNA, 297 bp, Zea mays
cccacgcgtccgcccacgcgtccgctctgaatgagctgaagaactgcaccaacaatttttcagacacccatgagataggctcaggaggctatggaaaggtgtacaagggaacactcgttgatggaacgcgggttgccataaagagagcagagcgcggatcaatgcaaggtgtggtggagttcaagaacgagatcgagctgctgtccagggttcatcacaggaacctggtgagcctgattggcttctgctacgaacaaggggagcagatgctggtgtacgagtacgtctccagcggaa

SEQ ID NO: 17497 - DNA, 302 bp, Zea mays
caaaaagctaagaagctccgtagctaaattcagatattacaaacacaaaaaaaggagtgcagaaccaaaatggctgcctcgaccttccttctcgttgcttttctagcattgatcacttctcaggccattgcctctgatcctagcccgctccaagacttctgtgttgccgataaagactctccggtgaaggtgaatggatttgtttgcaaggaccctatggctgtgaacgctgacgacttcttcaaggctgcaaaacttgatcagccaagggacaccaccaaaagcaaggtgggatccaacgt

SEQ ID NO: 17498 - DNA, 305 bp, Zea mays
gtcgtgtcctgcagtggctcacattcgacgagacacagtagagggtagctagcagtggtgctcctggcctgtgacgatggtttcctcgtcgtcgtctccttccgccaccgccgccgccgtggtcctggcggtggccctgatgacgacgacgtgcttccatggcgcgacggcgcactgtgcgaggactactatgacagcacctgcccggacgcctacgacatcgtgaagcaggtgctcgtcgacgcagtgcagtcggacacccgcatcttcgccagcctcatccgcctgcacttccacgactgctt

SEQ ID NO: 17499 - DNA, 300 bp, Zea mays
cccacgcgtccggcctcccaaccctcctcccgttctcccgcctcctcctgtgaaccgcgcgagccaaggaccgcccgtcgtctctcgccgccatggggacggagcggaagcggaaggtgagcctgttcgacgtggtcgacgagacgtccgtctccgccaagctgcgcgccgcctccaacggtgccgccgccaccgcgactgggggcaacccgtctgtcaaccggtggaacgggcggccctacacggcacggtacttcgatatcctcgagaagcgccgtacgctccccgtgtggcagcaga

SEQ ID NO: 17500 - DNA, 302 bp, Zea mays
cccacgcgtccgcccactcgtccgcccacgcgtccgctgaacttcttgtgcaaatgcagggtgttggtcataatgatgataaagttcttgttcttgctgccacgaatacgccatatgctctggaccaggctgtgcggcgaagatttgacaagcgtatctacattccgctacctgacacgaaagcaaggcagcatatgtttaaggtccatctcggggatacaccacacagcttaactgaaagcgatttcgagagcttggcccgtcgaacagatggattttctggttctgatgttgctgtttgt

SEQ ID NO: 17501 - DNA, 273 bp, Zea mays
gtgggttggcttctcgtccccctccggttcgggttcgggttcgtgaggttctccggggttcggtttcgtgggtgggcggatcgagatggcggcgtcgggtgttgagtagcgctgcttcgtcgggaggctcgcctggaccacggacgaccactccgctccacaacgccttcagcacgtacggcgaggtcctcgagtccaaggtcatgctcgatctgaagacgcagaggtcccgcagcttgggcttggtcaccttctccacggagtaaggcgatg

SEQ ID NO: 17502 - DNA, 300 bp, Zea mays
ccttaatgtgctgcgtatcatcaacgagccaacagctgcagctatcgcctatggtcttgacaagaaggctaccagtgtcggtgagaagaatgtcctcatctttgatcttggaggtggtacctttgatgtctccctcctcaccattgaggaaggaatctttgaggtcaaggccacagctggtgacacccatcttggtggtgaggactttgacaacaggatggtcaaccacttcgtccaggagttcaagaggaagaacaagaaggatatcactggcaaccccagggctctccggaggctgag

SEQ ID NO: 17503 - DNA, 299 bp, Zea mays
gaacgctgatgaatgcatggttcttgacaacgaagcactttatgacatttgcttccgaactctgaagctgacgacccctagctttggagacttgaaccacttgatcagtgcaacatgagtggtgtcacttgctgcctccgcttcccaggacagcttaactctgacctgcgcaagcttgcagtcaacctgatcccgttccctcggctccacttcttcatggttggctttgcgccactcacctcgcgtggctcgcagcagtaccgtgcgctcaccgtccctgagctaacccagcagatgtg

SEQ ID NO: 17504 - DNA, 302 bp, Zea mays
gttcgactatgttccccggtatcgctgatcgtatgagcaaggagatcacttcccttgcaccaagcagcatgaagatcaaggtcgtcgcaccacctgagaggaagtacagtgtctggataggagggtcgatcctagcctcgctcagcactttccaacagatgtggatatccaaggaggagtatgatgagtctggcccggcaatcgtccacaggaagtgcttctaggttccgcaagttcctcattgttatctagtctcaagttatgcccccgtcatttctcgagatatgtgtggcagacttgcc

SEQ ID NO: 17505 - DNA, 309 bp, Zea mays
cccacgcgtccgcccacgcgtccgcccacgcgtccgagagagctagagtaagccgagctaagaagcacagcaagtctcaccagactagcggctagcgcgagaatggccaaggacatcgaggccgcggcgcacgagggcaaggactactcggacccgcctccggcggccgctggtggacgcggaggagctgaccaagtggtcgctgtaccgcgcggtgatcgccgagttcgtggccacgctggtcttcctctacatcacggtggccacggtgatcgggtacaagcaccagacggacgcggcggcgtcggg

SEQ ID NO: 17506 - DNA, 296 bp, Zea mays
ggactacaaggtcccgtcttgccgccgtgacggccgcgtgtccaaagaggatgaggtgctcgacaacaatgtccctgccccgactgacgaggtcgacgagctcatctagagcttcaagcgcaaggagctcaacgccgacgacatggtcacgctctctggcgcgcacaccatcgggcgctcccactgctcctcgttcacggagcgcctctacaacttcagcgggcagctggggcggacggacccgtccctcgaccctgcctacgctgagcacctcaagatgcgctgcccatggccgt

SEQ ID NO: 17507 - DNA, 295 bp, Zea mays
gctttgccaagtggcgcgctgttctcaagattggccctaatgagccatcacagcttgccatcgacctgaacgctcagggtctggctcgctatgccatcatctgccaggagaatggtctggtgccaattgttgagcctgagatccttgttgatggccctcatgacattgatcgctgcgcttacgtcactgagaccgtccttgctgcctgctacaaggcgctcaacgagcaccatgtcctcctggagggtaccctcctgaagcccaacatggtgactccaggctccgactccaagaa

SEQ ID NO: 17508 - DNA, 297 bp, Zea mays
cggacggtgggtgagatatccaaatgccgagatcgtgtggtgccaagaggagccgatgaacatgggagcatacagctacatcaacccgcggttgctgacggcaatgaaggttctgggccggggtggcatcgaggacatcaagtacgtcggcagggccccgtcggctgctaccgcgacgggcttctactcggtgcacgtgcaggagcagacggagctggtgcagaaggcgctgcagcgcgaccccctcaactaccctttctgaaagaaacgaggcccctgtagattcttggaattggg

SEQ ID NO: 17509 - DNA, 299 bp, Zea mays
cgacatccccgacccgatggcgcccaaggcggagaagaagccagcggagaagaagccggcggccgaggagaaggcggagaagacgaccgcaggaagaagcccaaggccgagaagcggctgcccgcgtccaagtcctccggcaaggagggcggcgagaagaaggggaagaagaaggccaagaagagcgtggagacctacaagatctacatcttcaaggtgctgaagcaggtgcaccccgacatcggcatatcctccaaggccatgtccatcatgaactccttcatcaacgacatctttga

SEQ ID NO: 17510 - DNA, 302 bp, Zea mays
cccactcgtccgcccacgcgtccggttaggctagggttcgaccagctagcggaaatggtggccttcaggttccatcagtaccaggtggtggggcgcgcgctgccgacgcccggcgatgagcaccccaagatctaccgcatgaagctctgggccaccaacgaggtccgcgccaagagcaagttctggtacttcttgaggaagttgaagaaggttaagaagagcaacggccaggtcctggccatcaacgagatctttgagcgtaacccgacgtcaatcaagaactacggcatctggctgcgcta

SEQ ID NO: 17511 - DNA, 293 bp, Zea mays
ggatagggaaactggtaactcaaaaggctatgcattctgtgtttaccaggacctcaccgtcactgacatcgcttgtgctgcactaaatggtatcaagatgggtgacaaaacccttactgtcagacgagcaaaccagggggcatctcagcccagaccagagcaggaaagtatcctattgcaggcacaacaacaggtgcagttgcagaaacttgtgtatcaagttggagcgcttcctacaaaggttgtatgcctcacacaggtggtaactgcagatgaattgaaagatgatgaag

SEQ ID NO: 17512 - DNA, 288 bp, Zea mays
aggaactatccaaaatctttccaggaactccttcgcaagcagaatggtgaccgtgcaatctgggagtatccatttgctgtcgctggtgtaaatataaccttcatgctcattcagatgcttgatctccaatcagttaaaccgaggtcattgttcggagcagttttcctaaagcttctttcagaaaacgatcaagcttttgacattctctactgcataaccttcaagctgatggatcagcaatggcttgacatgcatgctacttacatggacttcaacacggtcatgaag

SEQ ID NO: 17513 - DNA, 289 bp, Zea mays
acagcgcggacactacagcgagcgcaaggccgccgcgctcacaaggatcatcgtcggggtcgtcgaggcctgccattcgctcggggtcatgcaccgggacctcaagcccgagaacttcctgctcgccaacagggacgatgacctctcgctcaaggccatcgatttcggactctctgtctttttcaagcctggtcaagttttcaccgatgtagttggtagcccatattatgtagctccagaagttctgttgaaaagttatggaccagcagctgatgtatggacagccggt

SEQ ID NO: 17514 - DNA, 293 bp, Zea mays
cccacgcgtccgctccgctcggccaccagctttgaccgcctcccctcccccccgctcctgtccctccataccccacccccccgcaggaccggcgcggcggcggcgccggcaaagccaaaggcaagatgttcgggcgcgcgccgaagaagagcgacaacaccaagtactacgagatcctcggggtgcccaagtcggcgtcccaggacgacctcaagaaggcctaccgcaaggcagctatcaagaaccaccccgacaagggcggtgaccccgagaagttcaaggagctcgcacaa

SEQ ID NO: 17515 - DNA, 290 bp, Zea mays
ccctgatgaggctgttgcctttggtgccgcggtgcagggaagcatcttgagtggcgaaggtggtgacgagacaaaagatatcctcctccttgatgtggcccctctcaccctgggtattgagaccgtcggtggagtcatgaccaagttgatcccgaggaacactgtcatcccgaccaagaagtcgcaggtgttcaccacctaccaggaccagcagaccactgtctccatccaggtctttgagggtgagcgcacgatgaccaaggactgccgtcttctgggcaagttcgacc

SEQ ID NO: 17516 - DNA, 292 bp, Zea mays
ggataactaatcaagatcgatcgagaatggcgtttccgaagcctactagtcgtctagccgcgctactgccctcgctgcggccatggcggcggcgatgatggcctcgaccgcctcggcgcataacacgccgcaggacttcgtgaatctgcacaaccgcacacgcacgcgtgacggcgtgggcccggtggcgtgggacgccagtgtggccatgtactcgcattactactcggcggacgcgctcggggactgccgtctggtgcactcgggctgaccgttcggcgagaacatcttc

SEQ ID NO: 17517 - DNA, 293 bp, Zea mays
cgcaacaagcagtttggccaggaggatatgctgtgccctcttgtggctgatgcctgcattcaagtttgccccaaaaatcctgcaaactttaatgttgacaatgttagagtggctaagctacttggacgtggtttgcacaattcttctgtggtccgtgggatggttctgaaaaatgatgctgttggtagcatcaaaagggcggagaaggcaaagattgtcgtatttgctggtggtgtcgacacctcggcaactgaaacaaagggaaccgtgttgaatcattccgctgagcagct

SEQ ID NO: 17518 - DNA, 322 bp, Zea mays
gccgcttctgccgccgggagccgagcccaagcctaagcgaaagccatggcgattggatctctgatcgcctctactttcgccagatctagccatgccctccccgctgccgccgcttcggccatctctcaggctcccagatcccagcacaccgcatctcctctactctccggccttggagcagcggctcgtgctttcagctcaagggctctatggaagggagcattcgttgacgctttcctgtctagaattaagaagaacagagaaaatatgaatggcaagaagatttggtctcgtagatcctctattttgccggaatttgttg

SEQ ID NO: 17519 - DNA, 203 bp, Zea mays
caagaacgtcatcttcaaggtggacgacctcttcgtgcggtgcttcaagcggtacccggacctggcgtacccgggcaggaagcgggtgtcggtgcacgccacgctgtgggacggcagctactgggccacgcaacaggggaaagtgaaggtggacttgtccggcgctcccttcgccgtctcctaccgcggctactccgccgacg

SEQ ID NO: 17520 - DNA, 318 bp, Zea mays
ccggaccagacgcccaagtcgatcgccatggcgatgaagccggcggcggcggctccccctaccccggccgcggcgcacagcgtgttcgtctacggcagcctgatggcggacgaggtggtccgcaccatcctcaagcgcgtcgcgcccgccgccccggccctcctcccaaactaccaccggttcaacatcaagggccgcatttacccggcgatcctgcccgttgagagcaagagagttgctgggagggttatcatgggtgttactgatgaagagctccagcttcttgacgcgtttgaagacgtggagtacacgaggaca

SEQ ID NO: 17521 - DNA, 316 bp, Zea mays
cccacgcgtccgctctgctctcccccacctcccggtccggcagcagagagcgggggtgcagagagatcgagatccggaggccgcgagtgggagcgccaccaccagcgactgcagcaatggcgggcacggtgacggtcccggggtcgtcgaccccctccacgccgctgctcaaggacgagctcgacatcgtgatcccgacgatccgcaacctcgacttcctggagatgtggcggcccttcttccagccctaccacctcatcatcgtgcaggacggcgacccgaccaagaccatcaaggtgcccgagggcttcgacta

SEQ ID NO: 17522 - DNA, 308 bp, Zea mays
atccgcccttgggttttctatccgatagaccggggacgcacaggcctctcgccctccgcgcggctccacaggagagcaaaaatggcgaccctctccatggtctccgtccccatcgcaccctcctccttgtccctttccacccggggccgcagctcctccgcatccttccccgctaagaagggaggaatcggtcacggtggcttgcggatcgagtgcatccgtattggtggtgttgagattccaaaccacaagagggtggagtactcgctgcagtacatacatggcattggacgctcacgctcacgcca

SEQ ID NO: 17523 - DNA, 243 bp, Zea mays
gccaaggaggaagaggaggaagatgaagaggagtctgacaagtccaagtcggaggtcaatgacgaggatgatgaagagggtagtgaggaggatgaagatgatgacgagtgatggagctcctcgagacaatggaccgtgcttcatccaacaatggagcggctacacaaggccccgtggcgatcacaaaaaaggagcctatatccatgtactagaattattcagtttcactccacatcgtgatgt

SEQ ID NO: 17524 - DNA, 302 bp, Zea mays
ctgaccgtggtccacagccgccagcgccgccaccaccagcgatgctaaatagtagtggtggatctggttctaattactctggtggcgagatcctacctccaccatcccctggtgctgttcttggcttctcgaagagcacattcacctacgaagagttgttgagggcactgattgattctcggatgctaatctccttggacaaggtggttttggctatgttcacagaggattgctcgccaatggccaagagattgcttgtaaacaactgaaactgggaattggccaggggagcgtgagttcca

SEQ ID NO: 17525 - DNA, 317 bp, Zea mays
gccaccaccaccggccaggaagcaagctcaaaccctaaccgccggcgacgccagcacgatggcccgctacgaccgcgcgatcaccgtcttctcccccgacggccacctcttccaggtcgagtacgccctggaggccgtccgcataggcaacgccgccgtcggcgtccgctgcacggacaccgtcgtcctcggtgtggagaagaagtcaacccccaagctccaggactccaggtccgtgcgcaagatcgcgtgcctggacacccacatcgctctggcatgcgcggggctgaaggcggacgcacgcgtgctcatcaacc

SEQ ID NO: 17526 - DNA, 310 bp, Zea mays
ggacggggaagccgccggacttcgtgctgtgcatcggcgacgaccggtcggacgaggacatgttcgagagcatcgtgtgcccggcctccagcagcggcggcgtgaggctcccggccagcagcgaggtgttcgcgtgcacggtgggcaagaagccgagcatggccaagtactacctggacgacacggtggacgtggtcaagatgctggacggcctggccagcgcgccgtcgccgccacgacggcccgggccggcggcggcggtgcagctccgggtctcgttcgaaggctcgctctgatggggggaagggaa

SEQ ID NO: 17527 - DNA, 270 bp, Zea mays
gggctactctttgtggttctgtgactacaagtacaatgatgagaacaccgtctcctttgtgaccctgaacaaggttggtggattcctgcagcggatggacctgtgccgcaagtacgcctttgggaagatgctcgtgataggctctgagccacccttcaagctgaagggcctttggctcttccgtggccatgatgttcccaagtttgtaatggacgaggtctatgacatggagctctacgagtggaccaaggtggacatctctgatgaggc

SEQ ID NO: 17528 - DNA, 118 bp, Zea mays
cccttctcctccccctccggttcgggttcgggttcgtgaggttctccggggttcggtttcgtgggtgggcggatcgagatggcggctacggcggtggcaaccgtggcggcggctacgg

SEQ ID NO: 17529 - DNA, 220 bp, Zea mays
aacatccagaaggagagcaccctccacttggtgctgcgtctcaggggcggcatgcagatcttcgtgaagacacttactggcaagacaatcacccttgaggtggagtcctcggacaccattgacaacgtcaaggccaagatccaggacaaggagggcatcccaccggaccaacagcgcctgatcttcgccggcaagcagctggaggatggtcgcactcttg

SEQ ID NO: 17530 - DNA, 333 bp, Zea mays
ccgcggcgcccggcgaccccgccgccgcggcggccatggtggaccgcatgctccgcctgctcgcctcctacgacgtcgtccggtgccagatggaggaccgggacggccggtacgagcaccgctactccgccgcgcccgtctgcaagtggctcacccccaacgaggacggcgtgtccatggccgccctcgcgctcatgaaccaggacaaggtcctcatggagagctggtactatctcaaggacgcggtgctggacggcggcatcccgttcaacaaggcgtacgggatgacggcgttcgagtaccacggcacggactcgcgcttcaaccgcgtgt

SEQ ID NO: 17531 - DNA, 310 bp, Zea mays
gcagaccacagcaagaagcgtagtcgtcgccggaaggaaaggcgcggacaagatgtcgtggcaggcgtacgtcgatgagcacctgatgtgcgagatcgaaggacaacatctcagcgccgccgccatcgtcggtcacgacggcagcgcttgggcgcagtccgagagcttccccgagttaaagcctgaggaggttgctggtatcataaaggactttgatgaacctggtactcttgcaccaactggtcttttcgttggaggtacaaagtacatggtgatccaaggtgaacctggagttgtcatccgaggaaag

SEQ ID NO: 17532 - DNA, 310 bp, Zea mays
ccgatccagtcccgcagcaacgccgagggagagcgaggagagacagatacagatcgcgcgctcagatgtcgtcggactcctcgtcgtgggcgcgcgccctggtgcagatctcgccctacaccttctccgccatcggcatcgccgtctccatcggcgtctcggtcctcgccgcggcatggggtatcttcatcacggggagcagcctcatcggggccgccatcaaggcgcccaggatcacatctaagaacctcatcagtgtcatcttctgtgaggctgttgcgatttatactgtaattgtggcaatcatcct

SEQ ID NO: 17533 - DNA, 301 bp, Zea mays
atgactaaacatgcatcaaaggtgcatatcattgacttcggcatttatttcggcttccaatggccatgcctaatcaggcgtctctccaagagggaaggtggtccacctgttctgcgcattactggaattgatgtacctcagccaggtttccgacctactgagagaattgaagagactggacaaaggcttgcagaatatgctgagaagttgaaggtgccttttgagtatcagggaatagcatctaagtgggaaaccatccgagttgaggatctcaaagttggcaaggacgaagttgtgattg

SEQ ID NO: 17534 - DNA, 308 bp, Zea mays
  unsure (1)..(308): unsure at all n locations
acaatcctaaaaccatctgcttcagccttcagctagccccaagtttagtcggccgatcgatcactgaagtagtaatggcgtccgccaacagctggaccctcgagatcgcgtcgccggtggccccgcagcgcctgttccgcgccgccgtgatggactggcacaccctggcgcccaaggtcgcctcccacgtcgtcgccagcgcgcagccngtggagggcgacggcggcgttggcagcgtcaggcagttcaagttcacctcagtcatggcgttcagcttcatgaaggagcgtctcgagttcctcgacgcg

SEQ ID NO: 17535 - DNA, 309 bp, Zea mays
gaaggtagccatggcggggagaggtaaggcgatcggctcaggcgccgccaagaaggccacgtccaggagctccaaggctggcctccagttccccgtgggaaggatcgccaggttcctcaaggccggcaagtatgccgagagagtcggcgccggcgcccctgtctacctcgctgccgtgctcgagtatcttgctgctgaggttcttgagctggccggcaatgcggcacgtgacaacaagaagacccgcatcgtaccgcgccacatccagctcgccgtccgcaacgacgaagagctctcccgcttgctggg

SEQ ID NO: 17536 - DNA, 312 bp, Zea mays
atggagttaatgttgtagttgcaatcaacaaatttgcatcagatactgaggcagaaatgaaggcagtgcacagtgcagctatggctgctggtgcttttgacgctgttgtctgcacacaccatgcccatggtggtaaaggagcggttgagcttggacttgctgttcaacgagcatgcgaaagccaggcagaacctctgaagtttttgtatcccttggaatctagcataaaggagaagattgagtcaattgctaagttctatggtgctagtggcgttgaatattccgagcaggctgaggagcagattgagatgt

SEQ ID NO: 17537 - DNA, 301 bp, Zea mays
ggttgatggtggtctaggtccttcaaccatagacgtggccgcatctgctggggccaattgcatcgtcgctggaagctctatatttggcgctgcggacccaggagccatcatatctgtgctgaggaagagcgtcgagggctctcagaacaaaaactgattttggtgtttctgctgtaaagtactccctccgtttttttattcgtcgcgttttagttcaaacatgaactagcggacgactgatattcgagaatggagggattacttcgaccctgcacgtcagatgagctgatcctcacattgc

SEQ ID NO: 17538 - DNA, 292 bp, Zea mays
gaaaagggtcaaaagtctctctcactggagacttctattggaatgtggcagttgctatttgctgaaaggaactggcctcttctggatcattggtgtcagtttttacaggtcagacacaataaagccatatctagagacacatggtcacagctgctggaatttgtgaagacgaccgatccacagttatccaactacgacgacgaaagtgcctggccctacctcatagacgaatttgtgggttatctgactgagaacgggctcgtccaccgtagaagatgaacaacaggggggt

SEQ ID NO: 17539 - DNA, 208 bp, Zea mays
ccgtggtctgcgtggcaagggccacacccaccacaagaacaggccctcaaggagagccacctggaagcgcaaccagaccctctccctccgccgctaccgctgagcagctcgtcgggtgcttggatactgccactgtccgatcattcccaatcaagacaacaagcgtgcctgtctctggttggaatttcgaagatttgctaattgtggt

SEQ ID NO: 17540 - DNA, 299 bp, Zea mays
cccacgcgtccgactcctatgagcacctggccaaggtcgctgagaccgcgcgaaacttggcatattcgtcatagcagatgaggtttacgcacacttgacatttggagagaggaaatttgtgccgatgggtgtgtttggggctgtggctccagtgttaacactggggtccatatcaaagagatggatggtgcctggatggcggcttggatggattgttaccaatgatccgaatggtatttcagaggactaaggtagtgcacagcatcaagagctaccttgatatctcctctgatcctgca

SEQ ID NO: 17541 - DNA, 270 bp, Zea mays
  unsure (1)..(270): unsure at all n locations
cccacgcgtccggcttctcctccccctccggttcgggttcgggttcgtgaggttctccggggttcggtttcgtgggtgagcggatcgagatggcggcgtcggatgttgagtaccgctgcttcgtcggcggactcgcctggggcacggactaacagtccctccacaacggcttcagcagctacggcgaggtcctcgagtccaagatcatcctcggtcgggagacgcagangtcccgcagcttcggcatcgtcaacttctccacggaagaag

SEQ ID NO: 17542 - DNA, 298 bp, Zea mays
ctccctcactcccttcgcgacgactacgcccggtgctcttcttcggccccaggtagctttcgctgccgtcctacggcaggtgcccaagtcttcttcgggcccttcaacgacgacgagcactaccagtttgttgaagatggaaaataaagagttgttcaagatgggaagtgcagatacagatactgctgcactgcacaaggagtgggatgatgttctctgtccgatatgcatggaccatccgcacaatgctgtccttctgttgtgcagctcccatgacaaaggatgccgatcctatata

SEQ ID NO: 17543 - DNA, 297 bp, Zea mays
cccacgcgtccgcccacgcgtccgcccacgcgtccggcagaaccagcggctcaacgtcgtgccgacggtgacgatgctcggcgtcatgaaggctcggctcgtcggcgcgacccgcggccaccgctgctgaagaagaagtccgacgcgctgacggtccagttccgcggcatgctcaagaagatcgtcgccgccaaggagtcgatgggcgagacgatgcgcggctcgtcgttgtgggtcgccgaggccaagtacgtcgctggcgaatgcgtgcggcacgtcatgctccagtccgtccgg

SEQ ID NO: 17544 - DNA, 287 bp, Zea mays
cccactcgtccgcccacgcgtccgctctttgtacatattgtcggtggaatttgaattaggcagtgcctgaactgcacagggagccagagtacatatccaaagagaaagcacgaatcgctgcatctcaggtgaatgggcctgtactggtggaggacacctgcctatgttttaatgcgctcaaaggcctaccaggtgatttacaataactcaatgagaagaagaacgcaaataaatcagttatgcagaatttgacatgcacatctttctgctgcaggaccctacatgta

SEQ ID NO: 17545 - DNA, 295 bp, Zea mays
agatcatattgcatgagtccatcttcacacactggttggacaagggttattgttgaaaagccctttggaaaggatttgaacactgcagaggaactgagtactgaacttgggcagttgtttcaagaagaacaactctatagaattgaccactatttaggaaaagagcttgtccaaaacttgcttgtgcttcgttttgcaaaccgcttatttttgcctctctggaaccgtgataacatagctaacgtacagatcgtatttaaggaagactttggaactgaaggacgtggaggatatt

SEQ ID NO: 17546 - DNA, 281 bp, Zea mays
aaattcagatccacatgacataatgccagaggtctacaaaaatggtcctgtagaatttgctatcacatttaacgaggatttcgcacactacgaaatctggagtgtacaagcacatcaccggtggcattatcggtggccatgccgtcaagttgattggatggggaacagtgatgctggaaaagattactggcttctggcaaatcagtggaatagaggctggggcgatgatggatacttcaagatcttaaggggcaaaaatgaatgtggcatcgaggagggcg

SEQ ID NO: 17547 - DNA, 292 bp, Zea mays
cgcacgcgcgtggccctcttcgtgggcgtctccgtggccgcgaacacctccggcggccacctgaaccccgccgtgacgttcggcctggccgtgggcggccacatcaccgtcgtcaccggcctcttctactgggtggcccagctgctgggcgcgtccgtagcgtgcctgctcctcaggttcgtgacccacggcaaagccatcccgacgcacggcgtctccggcggcaccaccgagctggagggcgtggtgttcgagatcgtcatcagcttcgcgctcgtctacaccgtctacg

SEQ ID NO: 17548 - DNA, 189 bp, Zea mays
ggaagttctgtgggtagaggactagagactgcagatcgagggtctggcagcgggccgtggcagttgggtgattacgacgaagagagaagggcctcctcgacaagctgtgggacgacaccgtcgcaggcccgcacccggacaccgggctcggccgcctccgcaagcagcctgtgcgtcccgccggcgtca

SEQ ID NO: 17549 - DNA, 213 bp, Zea mays
atcttgatgacgagtagttctgatctactaagaggaatagaggaatacacacctttgttgttgttgctatcttcataccgtcgccctgcagagaagcagcaggcatcgggatccgagccgctgtaggttgtcgcgtttccaaacactccgacgcctaggcgatgggggcctcttgggactaggggtttggggtgatggacaaacggttttttt

SEQ ID NO: 17550 - DNA, 288 bp, Zea mays
cggaccgtgggcggacgcgtgggcagccacggcaacaccacggcggtgacgctgtcctcgttcagcagcgacaaccccggcctgcagatcctcgacttcgcgctcatcgccaacgacctgcccacggaggtcgtgaacaaggtgaccaacctggacgaactgcagatcgtcaagctcaaggcgctgttcggagggaggggctagacgcatatgtactccgtgtataggaacagtcaacggtattgagccttgaattgtgtgtattactctatactgcttgtgcattgt

SEQ ID NO: 17551 - DNA, 288 bp, Zea mays
tgctgaaggatctgaagcatgctgacactcatgaatgggtgatagttgagggtgattcagcaatcgtggggattactgaccatgcccaggaccatttgggtgatgttgtttttgtggagctaccagaagttggcatcagtgtatcccagggatagaactttggtgctgttgagagtctgaaggcaaccagcgatatcaattcaccagtgtctggagaggtggttgaagtgaacgagaaactaagtgaggatcctggattggtgaatgcaagtccacatgagaatggat

SEQ ID NO: 17552 - DNA, 287 bp, Zea mays
  unsure (1)..(287): unsure at all n locations
cggacgcgtggngattctccattcctctcatcagtttagcacaatggcactggctaataagcttggtggtctgctcaagaaagccacaagttcaaatctgtctgtcgtccaagcaatcagatgcatgtcatccaagctctttgttggagggatttcttatcaaactgatgatcacagtctcagggacgagtttgccaaatatgggcaagtcattgaagctaggattatcattgaccgtgaatctgggaggtctagaggttttggctttgtaacttacacgtcttctg

SEQ ID NO: 17553 - DNA, 289 bp, Zea mays
gcatgaaaggaagggttgaactatgagcgccgtggcggtttcgtcgtcgctgaacccggacgcgccgctcttcatcccggcggcgctgctgcaggtggaggacttctcgccgcagtggtgggacctcatcaccaccactgcctggttccgcgaccactggtcccgcgagctcgcccacctggacgagatggccgagcagatcgacgcggccggcctcctccccgacgacgaggacctcttctacgacgaccagctcgagcagggccccgtcgccgctcgccttaagaca

SEQ ID NO: 17554 - DNA, 211 bp, Zea mays
ccgcggacgctggggttggcgaggagaagactttaattacccctgtgcagtgcaaaaatttgtggaggcaattcagggcttgaactgactatacagtgactcaagccatagctgctcaggaagcagataagaaggacaaccactggctagcaactccaatgggcacttgctgcaatggctattcttggattcacgagttcatgacattact

SEQ ID NO: 17555 - DNA, 272 bp, Zea mays
agctcttatcttgtgcaatcgcagttacaagcagctgcgaactccagtgctctcttcttgacagcagctgcacagaacctgttgtgtctgaagttagcagaggagattggtgttagtatcggaaacccatgtattacttggttcaaggtttctagcgtgccagcagttcttgggcttttagtgactccttatttgatttacaaaatattcccccctgaaataaaggacactcctgaagccccagcattagctgccgagaagctaaagaacat

SEQ ID NO: 17556 - DNA, 104 bp, Zea mays
gttggcttctcctccccctccggttcgggttcgggttcgtgaggttctccggggttcggtttcgtgggtgagcggatcgagatggcggcgtcggatgttgagta

SEQ ID NO: 17557 - DNA, 273 bp, Zea mays
ccagcgtccggactgacgaaaaggggagagagagaggcgacgaaggagggagagagcacgggggcttgatcgaagatggatgccggagcaaaggtggtgaagaaggccgcggcggggcgtcgcggcggtgggcggccccaagaagaagccggtctctcgctccgtgaaggccggcctccagttccccgtaggccgtatcggccgctacctcaagcagggtcgctactcccagcgtgtcggcagcggcgcccccgtctacctcgctgccgtcct

SEQ ID NO: 17558 - DNA, 273 bp, Zea mays
ggcttcccatcaacgagggtgtcggccatctgagcagctcccctgcccctcgcagcggctactctacaggtctagcgactctttcgccatccatagatggaggaggcgcggcggagatggtgggcggtggcggcggcgggccgctgcggcgggtgggcaagtacgaggtgggacgcaccatcggggaaggcaccttcgccaaggtcaagttcgcgcagaacaccgagaccggggagagcgtcgccatgaaggtgctcgaccgctcctccatcc

SEQ ID NO: 17559 - DNA, 272 bp, Zea mays
cccacgcgtccgcagcttctctcttgttcgctagctcgtctcgcccggccggacgtggttcctgccttggcatatgcatagccacctggcctgcagcggctgcaacgtctcgtccagtaccgccggggagccgccggcgtccgctgcccaagctgcgacgctttcacggccgccgccaacccatcagggccgccggagatgtctgagctggtgtgcggcggctgcttcaccatgctggtgcactcccgcagcgccgccaacgtgcgctgccc

SEQ ID NO: 17560 - DNA, 274 bp, Zea mays
attcactcgcctgcgctccctcgcctccccagttccccaccccctgctcacccacccgtcccctcctgctcgcccatggcgcccatcgctgtcggcgacgccctccccgacggccagctcgggtggttcgacgagaacgaccagctgcagcaggtctccgtccacgcgctcgccgccggcaagaaggtcatcctcttcggcgtccccggcgccttcaccccgacctgcagcaaccagcatgtgccaggcttcatcacacaggctgagcagctca

SEQ ID NO: 17561 - DNA, 81 bp, Zea mays
cagaagtgggttggcttctcctccccctccggttcgggttcgggttcatgaggatctccggggttccgtttcgtgggtggg

SEQ ID NO: 17562 - DNA, 267 bp, Zea mays
ctattactagatcgctgcgattagactagggagaacaaggaggactacaacaagttctatgaggccttctccaagaacctcaagcttggcatccacgaggactcaactaactggaccaagattgctgagctcctgaggtaccactcgaccaagagcggggatgagctgaccagcctcaaggattatgtgaccaggatgaaggagggccagaacgacatcttctacatcactggtgagagcaagaaggctgtggagaactccccgttc

SEQ ID NO: 17563 - DNA, 269 bp, Zea mays
gtcccttgtttttttctcggtgtggaagcgccgcagtagcagccatggacgtgagcggacaggcggtaaggcgaagaagggcgcggcggggcgcaaggccggcgggccgacgaagaagtcggtgtcgcggtcctccaggggccgggctgcagttccccgtcagccgcgtcgggcggtacctcaaaaagggccggtacgcgcagtgtgaggcacgggtgcccccgtctacctcgccgccgtcctggagtacctcgcggccgaggtgctcg

SEQ ID NO: 17564 - DNA, 268 bp, Zea mays
cacgagtgaccgataatccgccggcgctaagatgttggtttatcaagatctcctatctggcgacgagctcctgtcggattcattcacctacaaggagctcgagaacggcgtcctgtgggaggtcgagggaaagtgggtcacccaaggtcctgttgatgtagacattggtgccaatccatccgccgagggtggtgaggacgaaagcgttgatgacacagccgtgaaggtggttgatattgttgacacattccgtctacaggagcaacct

SEQ ID NO: 17565 - DNA, 269 bp, Zea mays
ggaccgtggctccacaggagttggggctgtatggaacacagccaacgtttccgcgggctccaccgttgcgattttcgactttggcgctgtcgggctcgcggttgctgagggtgccaggctacgaggggcagctcggatcatcggtgttgacataaaccctgaaaagttcaccaaagggagagagatgggcgtcactgactttgtcgactccagggcctctgacaaaccggtgcacgaggtgatcagggagatgacccatggaggtgtcg

SEQ ID NO: 17566 - DNA, 266 bp, Zea mays
ccttccagtgtccgccgtcgtgcgctcgctacccctctccctcgaggcctttgccggcgaagagcgcccagtcgcccaccaggatgaagtttgttgctgcctatctgcttgctgtcctcgctgggaactccagcccctctgccgaggacttgacatccattctggagtcagttggctgtgaagttgacaatgaaaagatggaactccttctgtcccagctgagcggtaaggacattaccgagctcattgccgccggcagggagaag

SEQ ID NO: 17567 - DNA, 264 bp, Zea mays
cactgaatgtggcgaaaccagccaagggctcgacggtggcgattttcgggcttggggctgtaggccttgctgctatggaaggtgctagactggctggtgcatcaaggatcatcggcgtggacatcaacccagcaaaatacgagcaagctaagaaatttggctgcactgaattcgttaaccccaaggaccacgacaagccagtgcaagaagtgctgattgagctgaccaacggcggcgtcgaccgcagcgtggagtgcaccggta

SEQ ID NO: 17568 - DNA, 264 bp, Zea mays
gttggcttctcctcccccaccggttcgtgttcaggttctggttcgtgggcgatatgcgagagatggcggcgtcggacgttgagtaccgttgcttcgttggcggcctcgcctggtccaccgacgagcactccctcaacaacgccttcagcacctacggcgaggtcctcgagtcgaagatcatcctggatcgggagacgcagaggtcccgcggcttcggcttcgtcaccttctccacggaggacgcgatgcgcacgccatcgaggg

SEQ ID NO: 17569 - DNA, 265 bp, Zea mays
aagtgcaccgcctgcgacaagacggtgtacctcgtcgacaagctcaccgccgacaaccgcgtctaccacaaggcctgcttccgctgccaccactgcaagggcacactcaagctcgccaactacaactccttcgacggagtgctctactgcaggcctcacttcgaccagctcttcaagaggaccgggagcttggacaagagcttccaaggaaccccaaaggttgtcaagccagaaagaaacgttgggaatgagaatgctactaaag

SEQ ID NO: 17570 - DNA, 262 bp, Zea mays
cggacctggcagacagtcttcctgagctgccttcttgctcttgcagcacttgcaagctgcaacactgaaggtgacatcctgtacaagcaaagggcgacatggaaggacccaaacgatgtgctcgtgagctgggatccgactcttgccaatccctgcacctgggtccatatcacttgcaacaacgacaacagtgttattcgtgtagatttggggaacgcaggcctatcaggcactctgattccagatttgggaggactgcaga

SEQ ID NO: 17571 - DNA, 263 bp, Zea mays
ggaccccaccgtgagcgtcgccgtcgtggagcagtccgtgtccccgggcggcggcgcgtggctgggcgggcagctgttctcggccatggtggtgcgcaggccggcaccctgttcctggacgagctgggcgtgggctacgacgatgccgaggactacgtggtggtcaagcacgcggcgctgttcgcgtccgccgtggtgagccggctcctggcgcggcccaacgtgaagctgttcaacgccgtggcggtggaggacctgatcgt

SEQ ID NO: 17572 - DNA, 264 bp, Zea mays
catttgctcggaacgcacacaccgcccgtacccgatctccgatcccctcgtcgatccaaagatgcagatcttcgtcaagaccctcactggaaagactatcaccctcgaggtggagtcttctgacaccattgacaacgtcaaggccaagatccaggacaaggagggcatccccccggaccagcagcggctcatctttgctggcaagcagctcgaggacgggcgcacacttgccgactacaacatccagaaggagagcaccctcca

SEQ ID NO: 17573 - DNA, 296 bp, Zea mays
cccacgcgtccggatgaaactctgtccaagtgtttgcagtcagggaaaaaatctcgtcgttgtcggcctaaccgggttttctcgaaggactttctagatgcagtagattagtgccgtcttctgagtagtttccttgcaagtgtcgtcacgtccctggagtgaggcagtttagtttgtagtttcttcgcttcatcggcactcgaccgttgttggattgggatgtttagcctgcagtctgtacttaccccaagcatctatggtgcctgttttaaatctcagatcacaatagacgtttg

SEQ ID NO: 17574 - DNA, 298 bp, Zea mays
cgccaacgtctccaaggcggagttgaaggagaggcttgccaaggcgtacgaggtgaaggaccccaacaccatctttgtcttcaagttccgcacccacttcggaggaggaaagtccactggtttcggcctcatctacgacaacctcgaggctgccaagaagttcgagccgaaataccgcctcatcaggaatggtcttgctactaaggttgagaagtcccgcaagcaaatgaaggagcggaagaacagggccaagaagatccgtggtgtcaagaagaccaaagctggtgacgccaagaag

SEQ ID NO: 17575 - DNA, 293 bp, Zea mays
cccacgcgtccgctttctgagtacctagttaacgccattgagggagcatctgattcattgaacctaccggtggcttttatcagtgttattttgcttcctattgtgggcaatgcagctgaacatgcaagcgcaataatgtttgccatgaaagataagcttgacataacacttggtgttgcaattggttcatcaacacagatatcaatgtttgtgattccattttgtgttgttattggttggacgatgggacaaaagatggacttgaattttcagctatttgagacagcaactct

SEQ ID NO: 17576 - DNA, 293 bp, Zea mays
caagattgtgcctggcaccaaagttcctgttgacggcgttgtcataaaaggtcaaagccatgtcaatgaaagtatgataactggggaagcaaggcctattgcaaagaaaccaggcgacagggttattgggggtactgtaaatgataacggttgcataattgttaaggcgactcatgttgggtcagaaacagctttgtcgcaaatagtccagttggttgaagctgctcaacttgcaagagctccagtgcagaagttagcagacaagatttcacgtttttttgttccaactgtgg

SEQ ID NO: 17577 - DNA, 291 bp, Zea mays
ggcgatgaaccatgctatgctggtgtccctatgtctacaattattgaacagggttatggagttggtgatgttatttctcttttgtggatcaagcgcagccttcctcgctattgcactcagtttattgagatatgcgtcatgctttgtgctgaccatggtccctgtgtatctggtgctcataactctatagttactgctagggccggaaaggaccttgtttccagcttggtgtctggattattgacgattggaccccgtttcggtggagcaattgatgatgcagcccgatac

SEQ ID NO: 17578 - DNA, 292 bp, Zea mays
ctctaggttttttgattttagccgccgccgctgctcatctcacatccctcgagaagacgcctgctcctcgccgatcgatacgatggccgtcttctccgacctccacaccgccgacggcctcaagtccctcgaggctcacctcgccggcaaaacctatgtgtctggtgactccattactaaggatgacattaaggtcttcgccgcggtgccgtcgaagcctggcgctgagtttcctaatgccgcccgctggtacgagaccgtctctgcggctgtagcctcaagattccctggt

SEQ ID NO: 17579 - DNA, 224 bp, Zea mays
gggcgctgctgctggcatggatgaggatgccccgtctggtgggagcggtgctggtcccaagatcgaggaggtggattaagttggttagcgttcgaggtttggtttggtgaggtgtgaagtgcctgaactctgatggttgtttgtgaggtgtggtcgcaatagctgcggcctgtggtgaacttctcagaaataaataagttttcgttcctaatttgttttttttc

SEQ ID NO: 17580 - DNA, 288 bp, Zea mays
cccacgcgtccgtttccccctcccccgcattccacctcgcggagatccagtccagccctagggtttcgccagcgggagccaaactccacgagccggggaagaggggacagcagggacgacgagggggcagccatggggcagcagtcgctgatctacgcgttcgtggcccgtggcacggtcatactggccgagtacacggagttcaccggcaacttcaccaccatcgcctcccagtgccccatgaagctccccgcaagcaacaacaagttcacctacaactgcgacggt

SEQ ID NO: 17581 - DNA, 285 bp, Zea mays
caaactggaaaactatgaggagaaggtgaagaacttcttctgtgagcacatgcacgctgacgaagagatccgctattgcttggagggcagcgggtactttgacgtccgcgacaaagatgacaagtggattcgaattcggataagagaaggagacatgatcatcctaccagctggaatttatcatcggttcaccctcgacagcgctaaatacacgaagctcatgaggcttttcattggggaaccagtctggaccgcgttaaaccgccctcaggaggaccacccggc

SEQ ID NO: 17582 - DNA, 100 bp, Zea mays
gcccgcaacaagtacctcgccggggacgagttcacgctcgccgacgccaaccacgcgtcctacctgctctacctcagcaagtcccccaaggccgggctcg

SEQ ID NO: 17583 - DNA, 283 bp, Zea mays
gtcgcggcggaggccaagcggctgctgagcctggcggggccgttggtggccagctgcatcctgcagaacgtggtccagctggtttccgtgatgttcgtgggccacctcggcagactgcccctcgccggcgcgtccctggccagctcgctcgccaacgtcaccggcttcagcctcctcgtgggcatggcgagcgcgctggacacgctgtgcgggcaggccttcggagcgaggcagtacggcctgctcggcctctacaagcagcgggccatgctggtgctggcgc

SEQ ID NO: 17584 - DNA, 278 bp, Zea mays
gcactacccagttcactacgaccttgaaaggaagcatgggctacatggatcctgtatactttcacgaggggtgtctgtcgccgagaagcgatgtgtatagcttcggtatagtcctcttggagctactgactcggaagaggcgcaagtatggggacgtcaacctgatccctacgttcaacaaagcctgtgccaaggggaaagggctgagggagctgtttgatgcagcaatagctgagaaggacaacgtgaagatcctcaaagagtcgtggaagctagca

SEQ ID NO: 17585 - DNA, 283 bp, Zea mays
gtcatgggcggctcccacagccgcgaggacgtcgatctcacctcctccgacgaagaggaggaattcgaggacgactatgacgcccgatcacccatcgcggaggccgcagcgagcgcggggcagcgcgacgacgacctcctccgcaccgccacaccttcctcgcttgaggccatcgacgccaagctcaggtcgctggatctcaagtaccagagacctaccgccgccaagctctacctccacgtcggcggggcctcgccttccgcgcgctgggtgcccgccgagc

SEQ ID NO: 17586 - DNA, 281 bp, Zea mays
gcctctcgagtctcgtccacccgtcgtcctcctagctcctctactcgccagtcgccatgggcaagattaagatcggaatcaacggcttcggaaggatcggcaggctcgtggccagggtcgccctccagagcgaggatgtcgagctcgtcgccgtcaacgaccccttcatcaccacggactacatgacctacatgttcaagtacgacaccgtccacggccactggaagcacagcgacatcacactcaaggactccaagacccttctcttcggtgacaagccg

SEQ ID NO: 17587 - DNA, 280 bp, Zea mays
gacagaactctgccgcttcagcggccagaagatttatcctgggaaaggcatccgatttatccgtgctgattctcaggttttcctttttgccaactcaaaatgcaagcgctacttccacaaccgcctgaagcctgcaaagcttacctggacagcaatgtacaggaagcagcacaagaaggtatgtgatatttcccagtcaactttaagaatgtcatccattcacttctcttgtgattccatgcttttttggttatatattagctacagcttttcttgtatg

SEQ ID NO: 17588 - DNA, 274 bp, Zea mays
cggacggtgggtgcaagtgcgcattggtgtcatctacttgatatctggctttgggggcagtgtgttgtctgcacttttcttacacagtaactacgtctctgttggtgcctctggggctttgtttggcctccttggatctatgcctttaagagcttattataaattggactatctattccaacaaggcagcggcaatcataactctactttttataattgtaattaatctggccattgggatattacctcatgctgataattttgcccacattgg

SEQ ID NO: 17589 - DNA, 278 bp, Zea mays
ctcgatagttgaaagggaaatgtgcccttgggccatttctagtatattttggtgattaagtgtccaacacatattaagtgggttattatatgccaaatgatgaatgaagtgaaatcaacaaagaaggtatgtttctagacttagtacatttgttatgggtactaatgaagttacctaagtgctagaaacagaaaaagaaaaagattggaagagagtgcctgtgtgcagccaatactcagcacagtctggcacaccggactgtccggtgcgccagactg

SEQ ID NO: 17590 - DNA, 280 bp, Zea mays
gagcagagcggcagggcgccatggcggcatcggtggcgctgagcagcgggcaccggatgccggcggtggggctgggcgtgtggcggatggagaaggcggacatccgcggcctcatccacacagcgctccgcgtcggctaccgccacctggactgcgccgctgactaccagaacgaagctgaagttggtgacgcgctcgcagaggcattccagaccggactcgtcaagcgggaggacctgttcatcacaaccaagctgtggaactcagaccatgggcatgt

SEQ ID NO: 17591 - DNA, 313 bp, Zea mays
ctcgacctcaccggcgtccggcggtggtatcacgatggtggcgttgctgggccggcggatcggggtggctgcggcactagcgcgattcatcgccctcgtggcgttcggatccgcctcatcctcgcccaagtccttcgtgaagtccaccgtctccgcccacgacgtcgtcatcttctccaagtcatactgcccgtactgcaaaagagcaaaggccgtgtttaaggagcttgagttgaagaaagagccatatgttgtggagcttgatcagcgagaggatggctcagagattcaggatgccttacttgagatagtt

SEQ ID NO: 17592 - DNA, 318 bp, Zea mays
ggaagcatgcgccctcctcagctcttccacacaccactatctggatgtcaggatgtgggaggattttgacaaacggccatgtcgccggtgctcggaatgttccctactacctctccgtcactccgcatgggaaggagaagaatccccagtttgtggaacaggtttccgcgctctacgccaaggaccaaaacttgattgtgggttgccgctctggcatccggtccaaactcgccactgcagacctcgtcaacgcgggcttcaccaacgtgaggaacctacaaggcggatacctttccttgctccgaagcgcaaactagc

SEQ ID NO: 17593 - DNA, 314 bp, Zea mays
cactgattgattatgcccatattgagcagtggatggactttgctgcgacagaggttgatgccagcattggaaagtggttgtacccacgtatggggttttatccctatgctgctgtgacagaagaatcagccattgctgctttgaagagagcattcggttccctgaacacccatcttgcatcaaacacattccttgttgggcattcagtgacacttgcggatattgtgctgacatgcaatctttatatgggctttagccgtatcttgactaagagttttacctcagagttccctcatattgagaggtacttctgg

SEQ ID NO: 17594 - DNA, 311 bp, Zea mays
agacgagcgacgagaaggctggcgagcacgaggggaactcctccgcgccggagctgtcgccgtcggagaggcaggacctccagaacaaagtgtcggcactgatggcgctgctggatcaggtggaccggaagtacaggcactaccaccaccagatgcagatggtgatgtcgtccttcgacgcggtggccggcgccggcgcggcgaggccgtacacggcgctggcgctgcagaccatctcgcggcacttccggtcgctgcgcgacgctgtcggcgccaggtgcagtcgctgcggcggagctgggcgagaagga

SEQ ID NO: 17595 - DNA, 315 bp, Zea mays
tgcgcaatattattcacttcaacacattggcaaatcaggctgtggagcgggcagctggtactgatggccaaaagataacatacggtgtcataaaacaccgtttgggcgatctattttatcgcctagtatctcaaaagttcgaggatcctgccgaagtgaagaagctttggtcggcaaatttaagaaactgtatgatgacctcaccactggtttccgcaatctcgaagacgaggcacggtgaactagtgtagattctgtgtaaacaaggactgccaaatgttttataagatacataaattgtagattgagatcatc

SEQ ID NO: 17596 - DNA, 314 bp, Zea mays
  unsure (1)..(314): unsure at all n locations
cggacgcgtggcggnacgcgtgggcggacgcgtgggcggacgcgtgggcacggagcaaagctcagctacttgcaacattcaatagctagcaggatcagtagactcatgcaatccacaaggatctgaaagctgaccccaaggatgagtttctttcaacactgcgggcgatcatccggtgcttcacctgccctgacagatacttcgagaaagtcattcgactggctcttggaggcatgggcactgatgaggatgacctcaccagggtcgtaactacgcgccgaggtcgacctgaagctgataaaggaggcttatca

SEQ ID NO: 17597 - DNA, 309 bp, Zea mays
gcgaccgctaccctcctcggataccgtccactgccctccccgcatcccggccggccgctgctctcccgtcgcaggctcccgtccggccgctgctctcccgtcgcaggctcccgttcgacggcccgtgctccccgcgaacggcggctggcagcaagccgctggcgacgcacggcatctccacgtccatgtggcacgacgcgcgtctccgcgacgtgctgctccgatgcggcgtcatgggtgccgcggacgacgtcaccaacatgtgatttgtgggcgccgaggacctccccgacggggtcggcgacaact

SEQ ID NO: 17598 - DNA, 309 bp, Zea mays
agtttccgctcctatccaagtgtgctcgcttccagaagttgattccaacaactggcgatgaaaatattgagatccacatccatgatattcctggtggtgccaaggcttttgagatctgtgccaagttttgctatggcatgattgtcacactcaatgcctacaatgtgattgctgcccgctgtgccgctgagtacctggagatgaacgagactgttgacaagggcaatctgatctacaagatcgatatcttcctcagctcaagcatacaccggagctggaaagactccataattgttcttggtacaacaa

SEQ ID NO: 17599 - DNA, 308 bp, Zea mays
cccacgcgtccgcccacgcgtccgccagtttttcatcaatccagctactagtcagcctaatgttgcaggattgattcttgccggttctgcagattttaagactgagctgagccaatctgacatgtttgatcagcgactccaagccaagatacttaatgtggttgatgtttcgtatggtggcgagaacggtttcaaccaagctattgaattatctgctgagattctagcaaatgtgaaattcattcaagaaaagaagttaattggcaagtattttgaagagatcagtcaggatactgggaaatatgtct

SEQ ID NO: 17600 - DNA, 297 bp, Zea mays
gacagcgtcgacaaggtccgggaccgggctccgcggggcgctactccagaccggtccgaagcgcagtgcgcatcgatcgagcgcctcaccaactcgctcatgatgcacgggcgcaacaacggcaagaaggtcatggccgtccgcatcatgaagcacaccctggagatcatccacctgctcactgacgccaatcccatccaggtggtcgtggacgcgattatcaacagtggaccacgtgaggatgccacccgtattggttccgctggtgttgtgagaaggcaggctgtggatatctca

SEQ ID NO: 17601 - DNA, 307 bp, Zea mays
gttgaagttgaaaaggtcggcctgcgcggcgatggatgtcaagtgccggcgtctggaggggaaggtggccatcgtgacggcgtccacgatggggatcggcctcgccatcgccgagcgcctcggtctggagggcgccgccgtcgtcatctcctcccgcaagcagaagaacgtgaacgaggcggtggaggggctcagggccaagggtatcaccgcggttggtgccgtctgccacgtctccgacgcacagcagcgcaagagcctcatcgagacggccgtcaagagctttgggcacatagatattcttgtc

SEQ ID NO: 17602 - DNA, 308 bp, Zea mays
cagaccgtggcaccacaccccccgagctcagcttagctccactccagctccaatcacagtcgtgaccagagcgcgagagctagctagagcgccgtgaaaatgccgatcaataggatcgccctggggagccaccaggaggtgtaccacccgggcgccctcaaggcggcgttcgctgagttcatctccaccctcatcttcgtcttcgccggccagggctccggcatggccttcagcaagctgaccggcggcggcccgacgaccccggcgggcctgatcgcagcggcggtggcgcacgcattcgcgctgtt

SEQ ID NO: 17603 - DNA, 306 bp, Zea mays
cgaaaacatacacagctgctagctaatcctgccgtgagtgcaatgcatgcaaagatgacgaagcccgcagccatcgttgttgctgctatcgccgtcctctccgtcagcctgctggctgggtcgtcgtgccttgcccttgcgcggcccagcggcgacttctccatcgtgggctactcagaggaggacctgtcgtcgcacgagagcctggcggagctgttcgagcgctggctgtcccgccaccgcagggcgtacgccagcctggaggagaagctccggcggttccaggtgttcaaggacaacctgcac

SEQ ID NO: 17604 - DNA, 302 bp, Zea mays
gaccgggacccagtatttacaagccagttttggaccactctctttaagcttgctggtaccgagctgcgcctgaattcagcatatcaccctcaatcagacggccagacggaacgtgttaatcaatgtcttgagaccttcttgggatgcttcgtcagtgcctgcccgaagaaatggtctgcttggctttccgcagcagaattttggtacaacacaagctgccattctgctcttggtcgttctccattcgaagtgttgtatgggcgcaaacctcattcgctggggttatccatgaatgctacagc

SEQ ID NO: 17605 - DNA, 304 bp, Zea mays
atcgccttcaactcaagcgactacagcaaacttgctgagactgcagctgatcatggggtcgacgacatggttggcggccgtgctggcggcactcgtggtcgccgcctcctcaacggtggcatcacacgcctcgctgccggggaaacttgaggtcggtttctacgagcactcgtgcccacaggcggaggacatcgtgcgcaacgccgtccgccgcggcatagcccgcgagcccggcgtcggcgcggggctcatccgcatgcacttccacgactgcttcgtccggggctgcgacggctccatcctc

SEQ ID NO: 17606 - DNA, 300 bp, Zea mays
cccacgcgtccgcccacgcgtccgcccacgcgtccgcccacgcgtccgcagcttttgaacttgatgaagcaactgagaaagaactgcttgtgaagctggagaagcatggaaggagtgttgttgagtcaaaggcaaaagaagaagctggaagggttttgattcgcatgaaggacaggttttcaatgctgttcagccgagatgctgactctatgcccagggtgtggacaggaaaggaggacataaaagctataactaaaaccgctcgctcagcttccatgaagttgctttctacaatggctg

SEQ ID NO: 17607 - DNA, 301 bp, Zea mays
tgagcttccaatcaaacatccggaactgtttgagagccttggaattgcacaaccaaagggtgtccttctttatggacctccgggcacaggaaagacattgttggcacgtgcggttgctcatcacactgactgcaccttcatcagggtgtctggttctgagttggttcagaagtatattggtgagggctcccggatggttagggaactctttgttatggccagggaacatgcaccatccattatatttatggatgaaattgactctatcggatctgctagaatggagtctggaactggcaac

SEQ ID NO: 17608 - DNA, 302 bp, Zea mays
gggttctcgggcgaggagctggacgacgtgcactgctacgacccggccacccgggagtgggccgcggtccagaccacgggcgacaggcccagcccccggagcgtgttctgcgccgccgggttcgggaggcacgtggtactgttcggcggcgaggtggaccccagtgacctcggccacctcggcgccggcaagttctcggccgaggcgttcgcgctggacacggagaccggcgcgtggacgcggctggacgacagggcggaggccgagcaccacccggggcatcgcgggtggtgtgcgttcac

SEQ ID NO: 17609 - DNA, 273 bp, Zea mays
ccacgcgtccgtgttctcgtgcatgattgctaaggccacagtcctagaggaggtgacatctggcattgcaggaagtaggaatggtgcgctgctgctgatgaaggctgagctacaggtgctctcacctctagtgcccatcagggaggtcacatttctcaggttttgcaagcagctggctgagggtgcatgggcagtagtggatgtgtccattgacggattggtgagagatcacaactctggaacagcatccaacgccggaaatatacggtgcag

SEQ ID NO: 17610 - DNA, 270 bp, Zea mays
ccctcatcctcatggtgctctgctccgtcgcgtccggcctctcgttcgggcatacgcccaagggcgtcatcgccacgctctgcttcttccgcttctggctcggcttcggcatcggcggcgactacccgctgagcgccaccatcatgtccgagtacgccaacaagaagacccgcggcgccttcatcgccgccgtgttcgccatgcaggggttcggcatcctcttcggcaccatcgtggcgctcgccgtctcggcggcgttccggaacgcgt

SEQ ID NO: 17611 - DNA, 268 bp, Zea mays
cccacgcgtccggcaaaactctccgattttgggcttgcaaaagacggacctgtaggtgataaaactcatgtctctactcgagtaatgggaacctatggatatgcagcaccagaatatgtcatgactggtcatctgacatcaaagagcgatgtctacagcttcggggtcgtgcttcttgagatgatgtcggggcgcaggtcaatggacaagaatcggcccaacggggagcacaacctggtggaatgggcacggcccctcctaggggaga

SEQ ID NO: 17612 - DNA, 269 bp, Zea mays
ctttcgagttaatctctacgtctcagggcctcaatctcgggacgctcttcgagaagcaaacgggttctgttaagcgagaaacaaggtttgcgtcaaggcttcctgcaaatgagatactgtcgaagatcgaagcagcagcgggacccatgggcttcaacgttcagaagcgcaactataagctgaagctgcaaggggagaaccctggaaggaaaggtcagctggccatcgcaacagaggttttcgaggtcacgccttccctgtacatggtt

SEQ ID NO: 17613 - DNA, 262 bp, Zea mays
ctgcttggcaggacgattgggaggccttatgttctttcgaaatgcaaagattaccctaagtttcaagcagtagctattgccatccaaagatctggcttcaagatcgtgttgctactaaggcttgtacctttacttccgttcaacatgttgaactacctgttatctgtcactcctgttggtgttggagaatacatgctggcttcttggtttggaatgatgccaatcactcttgctttggtgtacgttggaacaacactgaaag

SEQ ID NO: 17614 - DNA, 273 bp, Zea mays
ctcttttatgagcacaccctgtctctgaccgaagctctatgtgggttccaatttgttcttacacatctggacaacaggcagcttctgatcaaatcaaaccccggcgaagttgttaaacctgaccaattcaaggcgataaacgacgaggggatgcctatttaccagaggcccttcatgaaggggaagctctacattcatttcacagtggagttccccgactcgctggcgccagagcagtgcaaggctctcgagtcggtacttccgccaaagcct

SEQ ID NO: 17615 - DNA, 280 bp, Zea mays
cccacgcgtccgcagaacagagcgaggcgacgccgcggcacctcttctccggcgaagggaaatggcaaccgttccaggggatctgatctggcaggttgtgaggaagaacaactccttccttgtgaagcagttcggcaacggcaatgccaaggtgcagttcaccaaggagccgaacaacctctacaacatccactccttcaaacactcgggtttggcgaacaagaagactgtgacgatccagccagctgcaaaggactcggctgtggtcctctctactacc

SEQ ID NO: 17616 - DNA, 270 bp, Zea mays
ccccgtgcttctccgccgtcgacgccgcgtcccagtgcgaagagaccacgactcacatggccagccgctgggtccggcccgacgtgtacccgctgttcgccgcaacgggcgtcgccgtcggcatctgccgatttcagctcttccggaacaccaccggcaacccggaagtcagggtaaacaaggcagggagggcagctggtgtgcttgacaaccatgaggaggggaggcgttacgccatgcatggcctaacacgctttgtgcacgacaaga

SEQ ID NO: 17617 - DNA, 266 bp, Zea mays
gagtcaccgcggcgagttcaaatcccacaatcttcttgtagcacaccactgtcttcgtccaactcggcggcgatgtctgggcgcggcaagggcggcaaggggctgggcaagggcggcgcgaaacgccaccgtaaggttctccgcgacaacatccagggtatcacgaagccggcaatccggaggctggcgaggaggggcggcgtgaagcgtatctccgggcttatctacgaggaaacccgcggcgtgctcaagatcttcctcgagaa

SEQ ID NO: 17618 - DNA, 272 bp, Zea mays
cccacgcgtccgcccacgcgtccgggacgcgtggaggagatgcggatcctcatggtcggcctcgacgccgccggtaaaaccaccatcctctacaagctcaagctcggcgagatcgtcaccaccatccccaccatcggtttcaatgttgaaactgttgagtacaagaacattagcttcactgtctgggatgtcgggggtcaggacaagatcagacctctttggaggcattacttccagaacacccagggtcttatctttgttgtggacagcaa

SEQ ID NO: 17619 - DNA, 269 bp, Zea mays
cccacgcgtccgttttttttttttttttttttttcaataacaatatttagctttaacaagcaatccaatcttggacagttttttcttaaaaaaaacctgagttcagttcaggcagggcagctatagttgtggctataacaatagaacatatatagtacccaacatgggtaactaatctagcacttgatctccttaagaccatgagagaaatagaggaatgtcggattagtggcaccatccttgtaataggcgaataccacggacgcttc

SEQ ID NO: 17620 - DNA, 264 bp, Zea mays
tgtccttcttgatagagaagcacatataactgacttgccactggacaatggggttcgtgctttgcttagaggttgcaccaaactcaggaggtttgcattttatgtgagacctggggtcctatctgatgttggtcttggctatgttggagaatttagcaagagcattcgatatatgttgcttggcaatgttggtgaatctgataatggaattatacaattatcaaaaggctgcccaagcttgcaaaaactggagctgaggggttg

SEQ ID NO: 17621 - DNA, 256 bp, Zea mays
cccacgcgtccgggctatggttctattgagttttactctcgagctgctgcagaacatactctgatgaacttcaatgggcagatgatgccgaatgttgacatgacttttaagctgaactgggcttctgctagcactggtgataagcgtggagatagtggttctgatcgcacaatatttgtcggtgatttggctcatgatgttactgactccatgttggaagatgtgttcagagctaagtacccttcagttagaggag

SEQ ID NO: 17622 - DNA, 261 bp, Zea mays
cccacgcgtccgcccacgcgtccgatcaagctcagagcctcagagcgccaccaagtcttgcggtcgcgaagagcaacgcaacaagatggtgaagctcgcattcggaagcgtcggcgactccttcagcgtcacctccatcaaggcctacgtggcggagttcatcgccaccctcctcttcgtcttcgccggcgtgggttccgccatcgccttcgggcaactgacgaatggcggcgcgctgcgaccctgcgggactggtggcga

SEQ ID NO: 17623 - DNA, 260 bp, Zea mays
cggacgcgtggcgcgacgcgtgggcggacgcgtgggcggacggtggggaaagatgttcctgccaacgtgtatgttggaatgcggtattggcatccctatcactgaagaagccatagaacaaacaaaacgggatgcaatcacgaaacttgttgtgttgcctctataccctcagttctccatatcaactagtggttcaagtctccgtttattggagagcatattcagagaggatgagtatctcgtgaatatgcaacatacag

SEQ ID NO: 17624 - DNA, 256 bp, Zea mays
gcaaaaacaaatgaggtgtacaaggttgatgaaagaggcatgcgatggttctactctggcgacattgggcgcttgcacccagatggatgtcttgaaattatcgaccgcaagaaggatatagtcaagcttcaacacggtgaatatgtttctctaggaaaggtggaggctgctttgagtgtgtgctcatacgttgaccagatcatgatccatgctgaccccttccacagctactgtgtcgcacttgttgtagctgcac

SEQ ID NO: 17625 - DNA, 258 bp, Zea mays
ccgacgctgggttgggacggtgctcggccctggttcccagcgtgcaaacgagtgcaggatggctgccttgtttgctggattccctgacaccgtcccacttagaactgtcaaccgccagtgttcatctgggctacaggcagtagccgatgtcgcagctgctataaaggctggttactatgacatagggattggtgctggtttggaatccatgtccataaattccattgcttgggaaggacaagttaacccaaaaataag

SEQ ID NO: 17626 - DNA, 260 bp, Zea mays
ggaatggcgagtacagcatgctttgtaattgtcagtaagaatgatatcccaatctacgaggcagaagttggatctgcacccacaaaagaggatttgtcttatcaccatcagtttatcctgcatgctgcgttagatgttgttcaggacctagcatggaccacaaataatgcaatgtccctgaagtcagttgatagactcaatgaccttgtggtgtctgtctatgtaactgctggtcataccagactcatgttgcttcatga

SEQ ID NO: 17627 - DNA, 267 bp, Zea mays
ctttccccttccctccctccctctccccgcgggccgccagacgcaatttcgccctcgagccgaccccgattcgtccgcccgcgaccgggattccctccgccaagcgcggatctgaacgctgcgctccgtgtcgccgctcgaatccgccatgaagggggccaaatccaagggcgccgccaaggccgatgccaagctggcggtgaagagcaaggcggcggagaagcccgccaagggcaggaaagggaaggccggcaaggaccccaacaa

SEQ ID NO: 17628 - DNA, 267 bp, Zea mays
ccaaggaccttcggcgcccgttcaggatccacatcttcccgagcgagttcttggttgacctcttcccccttcggaccacctccaaggctcttggtgtagcttgccactctcaccaatcaagttttcatgtctgatctcgacattcagatcccaactgccttcgatcccttcgctgaggccaatgctggggactctggtgcggcacagggtcaaaggactacgttcacgtgcgcatccagcagcgtaatggtcgcaagagcctgacta

SEQ ID NO: 17629 - DNA, 316 bp, Zea mays
gcagatcgagtcatcaagctagctagcccggagcacgcctagacacgccagcagcaatggcggctcagctggccgtcgcgtttctcgccttgttgtcctcctctgccttcttggccgtgtctggccagaagttcaacgccatcttcagcttcggcgactccatgtccgacaccggcaacctgtgcgtgaacggtccccccgccggcctgacgctcacccagccgccctacggcgagaccttctttggccgcgccacctgccgctgctccgacggccgcctcgtcgtagacttcctggccgagaagttcgggctgcc

SEQ ID NO: 17630 - DNA, 318 bp, Zea mays
ctcagtgtgtcattgacaatcaagcacttccatgccttttgaacctactgaccaccaaccacaagaaaagcatcaagaaagaagcatgctggacaatctcaaacatcacagctggtaacagggaacagattcaggccgtgattaatgcaaacataattgcacctctggtgaacttctgcaaactgctgaatttgacatcaagaaagaagcagcctgggcaatttcaaatgccacttctggtggcacacatgatcagatcaagtaccttgttgcccagggttgcattaagccactctgtgatctgcttgtttgcccgga

SEQ ID NO: 17631 - DNA, 319 bp, Zea mays
gtcaagggaaactcacaagcagcccatggtcagaattggacggtcttcaaccagagacaaagattatcgatgaccagttggtgaatattaaccagaagggtttccttacaattaacagccaacctgctgtaaatggagagaaatccgactcgcctactgttggttggggtggtcctggaggctacgtttatcagaaggcctacctcgaattcttctgcgcaaaggagaagttggaccaactaattgagaagatcaaagcattcccttctctcacttacattgctgtgaacaaggatggagaaacattctccaatatttc

SEQ ID NO: 17632 - DNA, 317 bp, Zea mays
ctatccgaagtgttaggttattcgttcttcgacagtgataagttggtagagaaggctgttggtatttcatctgttgctgagatctttcagctccatagcgaaacattcttcagagataatgaggagttacatgaagaaagggctgaccgtatggttagatgtcccactggatgcacttgcaagaagaatcgctgctgtaggaaccgcgtctcgaccactcttgcatcaggaatccggtgatccttatgcaaaggcttatgcaaaacttacgtcactttttgagcaaagaatggactcgtatgctaatgctgatgcca

SEQ ID NO: 17633 - DNA, 107 bp, Zea mays
cggacactgggcgagacgcgtgggtgaagtttcggcgagatgttgatagacttcgtgcccaccgtggcgggggtctcgctagcggaagtgccggccttactcaaggc

SEQ ID NO: 17634 - DNA, 313 bp, Zea mays
gcgaacacctccggcggccacctgaaccccgccgtgacgttcggcctggccgtgggcggccacatcaccgtcctcaccggcctcttctactgggtggcccagctgctgggcgcgtccgtggcgtgcctgctcctcaggttcgtgacccacggcaaggccatcccgacgcacggcgtctccggcggcaccaccgagctggagggcgtggtgttcgagatcgtcatcaccttcgcgctcgtctacaccgtctacgccaccgccgccgaccccaagaagggctccctcggcaccatcgcgcccatcgccatcggct

SEQ ID NO: 17635 - DNA, 306 bp, Zea mays
cacgcgtccaaacatacagctagctagcctctgcatgcctacgtacagcatggccaaggccgagctgctgctcctcgccctcgtggcttcgctctccgtgctgccattctcctccctcgccgtgtaccaggacttctgcatcgccgacctatccgccgccgccacgccgggcggctacccgtgcaagcccccgaaggacgtgaccgccgacgacttccactacggcggcctcgccacccccggcacggcgctgaaacccttcaagatctccctgggctcggccgtcgtcaccacgttccccggcct

SEQ ID NO: 17636 - DNA, 136 bp, Zea mays
ggcggcgtcggatgttgagtaccgctgcttcgtcggccgcctcgcctgggccacggacgaccactccctccagaacgccttcagcacctacggcgaggtcctcgagtccaatatcatgctctatcgggagacgcag

SEQ ID NO: 17637 - DNA, 309 bp, Zea mays
ctcctttccagcgaaaatgccgaacctcgagtgccggatgtatgagcagcggttcccggaggtggacgccgcggtgatgatccaggtgaagcacatcgctgacatgggcgcgtacgtctcgttgctcgagtacaacaacatcgagggcatgatcctcttctccgagctctcccgccgtcgtatccgctccatctcctccctcatcaaggttggccgccaggagcccgccatcgtgctccgtgtcgaccgcgacaagggctacatcgacctttcgaagcgtcgcgtctccgaggaggaggcgcacgcatg

SEQ ID NO: 17638 - DNA, 308 bp, Zea mays
ggcgacggagctgtacgagagacatcccagcgcgcacatgctccagcagttccagaaccctgccaacgtcaaggtgcactacgacacgacgggaccggagatctgggaggacacgcttggccaggtcgatatcttcgtcatggggatcgggagcggcggcaccgtcacgggagtcggcaagtacctcaaggagaaaaaccctaacgcaaagatctatggagttgaacctgccgaggcaaatgttctgaatggtggaaagccaggacctcacctcatcactggaaacggagtagggttcaagccagata

SEQ ID NO: 17639 - DNA, 306 bp, Zea mays
cggacgcgtggtgctagctggtgcagctttaatggatgaggaaacccggaacactgtggttaaagaaaatccagcagcattgcttgcattatactggtattgggcatcagaagggataggcaataaggatatggttgtacttccttacaaggatagtttgttgcttttgagtagatatttgcaacaacttgtcatggaatctcttgggaaagaatttgatctggatggcaaccgggtaaatcaagggctatctgtatatggaaacaaaggaagcactgaccagcacgcttacattcagcagctgag

SEQ ID NO: 17640 - DNA, 309 bp, Zea mays
tgcagatctttgtgaagacactcactggcaagacaatcacccttgaggtggagtcttcggataccattgacaatgtcaaggccaagatccaggacaaggagggcatcccacccgaccagcagcgcctcatcttcgccggcaagcagctggaggatggccgcaccctggcggattacaacatccagaaggagagcactctccacctggtgctccgcctcaggggtggcatgcagatttttgtgaagacattgactggcaagaccatcaccttggaggtggagagctctgacaccattgacaatgtgaagg

SEQ ID NO: 17641 - DNA, 245 bp, Zea mays
gaaaccccattgtttaaattcttaacaaagcacaaaagaactaaaacttagggaattcgttacaggacggcagcagataagttaaacccaaaaaggcaaccgtgtccaaaaccagcatggatccagcgtccaggggcaccgttcacatttattctcagcatagacaagcagcaaagatggtctgcgaccaaaggccatcggggacgaccctcgatagggaggcagaaatatctctctctactggg

SEQ ID NO: 17642 - DNA, 301 bp, Zea mays
ggcggatcgagatggcggcgtcggatgttgagtaccgctgcttcgtcggcggcctcgcctgggccacggacgaccactccctccacaacgccttcagcacctacggcgaggtcctcgagtccaagatcatcctcgatcggtagacgcagaggtcccgcggcttcggcttcgtcaccttctccacggaggaggcgatgcggaacgctatcgagggcatgaacggcaaggagctggacggccgcaacatcaccgtcaacgaggcccagtcccgcggcggccgtggaggcggcggcggcggcta

SEQ ID NO: 17643 - DNA, 304 bp, Zea mays
gtgcggcacagggtcaaaggactacgttcacgtgcgcatccagcagcgtaatggtcgcaagagcctgactaccgtccagggattgaagaaggagttcagctacagcaagatcctcaaagatctcaagaaagagttctgctgcaatggtacagtggtccaggacccagaacttggacaggtcattcagctccagggtgatcagaggaagaacgtctcgaatttcctcgtccaggccggcattgtgaagaaggagcacatcaagattcatggtttctgagcaaccgccgggtccatagcaaaccaa

SEQ ID NO: 17644 - DNA, 302 bp, Zea mays
cggacgcgtggtgcaaacagaagcttggagcaaatgccatccttgcggtttcacttgctgtgtgcaaagctggagctatggtgaagaagattcctctttaccagcacatcgcaaatcttgctgggaacaaaactctggtgctccctgtacctgcctttaatgtgattaatggagggtcacatgctggaaacaagcttgccatgcaggagttcatgatcctcccaactggtgcctcctcgttcaaggaggccatgaagatgggagttgaggtgtaccacaacctgaagagcataatcaagaag

SEQ ID NO: 17645 - DNA, 300 bp, Zea mays
cggacgcgtggtgctagctggtgcagctttaatggatgaggaaacccggaacactgtggttaaagaaaatccagcagcattgcttgcattatgttgctattgggcatcagaagggataggcaataaggatatggttgtacttccttacaaggatagtttgttgcttttgagtagatatttgcaacaacttgtcatggaatctcttgggaaagaatttgatctggatggcaaccgggtaaatcaagggctatctgtatatggaaacaaaggaagcactgaccagcacgcttacattcagca

SEQ ID NO: 17646 - DNA, 302 bp, Zea mays
ccatcttcgtctactaccacgggggcggcttctgcctcggttccgctttcaaccccaccttccactcctacttcaacagcttcgcgggccttgccaacgttctcgtcgtctccgtcgagtaccgcctggcccccgagcaccccgtccccgccgtctacgccgattcctgggaagcgctagcctgggtcgtgtcccaccttgccgccgccggcgacaacgtccgggacccatggatcgcgggccacgccgacttctcccgcctctacctgggcggtgagagtgcgggctccaacatcgcgcac

SEQ ID NO: 17647 - DNA, 301 bp, Zea mays
cggacgcgtggcggacgcgtgggcggacgcgtgggcgcttatcatccgcgcctctacatttcttctctctctgctcctccgcctccgcctccgcctgctccatccaagacagggatcgccatgtcggactcggaggagcaccacttcgaatcgaaggccgacgctggggcgtccaagacctacccgcagcaggctggcaccgtccgtaagaacggcttcatcgtcatcaagaaccgtccctgcaaggttgtggaggtttctacctccaagactggtaagcatggccacgccaaatgccact

SEQ ID NO: 17648 - DNA, 304 bp, Zea mays
gccctcgattcgaccccgattcgtccgcccgcgaccgggattccctccgccaagcgcggatctgaacgctgcgctccgtgtcgccgctcgaatccgccatgaagggggccaaatccaagggcgccgccaaggccgatgccaagctggcggtgaagagcaagggggcggagaagcccgccaagggcaggaaagggaaggccggcaaggaccccaacaagcctaagagggctcccagcgctttcttcgtgttcatggaggaatttcgcaaggagttcaaggagaagaaccctaagaacaagtctgt

SEQ ID NO: 17649 - DNA, 320 bp, Zea mays
ctacaaggagctcgagaacggcgtcctgtgggaggtcgagggaaagtgggtcacccaaggtcctgttgatgtagacattggtgccaatccatccgccgagggtggtgaggacgaaagcgttgatgacacagccgtgaaggtggttgatattgttgacacattccgtctacaggagcaacctccttttgacaagaaatcatttgtctcttacattaaaaaatacatcaagaatctcactgctgtgttggagccagagaaagcggatgagttcaaaaagggtgtcgagggtgcaacaagtttctccttagcaagctgaagga

SEQ ID NO: 17650 - DNA, 319 bp, Zea mays
cgcagatcgagtcatcaagctagctagcccggagcacgcctagacacgccagcagcaatggcggctcagctggccgtcgcgtttctcgccttgttgtcctcctctgccttcttggccgtgtctggccagaagttcaacgccatcttcagcttcggcgactccatgtccgacaccggcaacctgtgcgtgaacggtccccccgccggcctgactctcacccagccgccctacggcgagaccttctttggccgcgccacctgccgctgctccgacggccgcctcgtcgtcgacttcctggccgagaagttcgggctgccgc

SEQ ID NO: 17651 - DNA, 322 bp, Zea mays
cccacgcgtccgcccacacagaagcggcggcggcggagcaaacgcaggcgaaggcgagggtgtgagggaaggagcaccagccatggtgcacgtcaacttataccgcaactatggtaagacgttcaagaaaccaaggcgtccttatgagaaggagcgtcttgatgctgaactgaagctggttggtgagtatgggctgaggtgcaagcgtgagctttggagggtccagtatgcactgagcaggatccgtaatgctgcaaggcacttgctcacccttgacgagaagaacccccgtcgtatctttgagggtgaggcacttcttcgc

SEQ ID NO: 17652 - DNA, 319 bp, Zea mays
aaaggaggctgagaactgcgactgcctccaaggcttccaagtctgccattcccttggaggaggcactggatctggaatgggcacgcttctcatttcaaagatcagagaggagtaccctgatcggatgatgctgacattttctgtgtttccctcgcccaaggtgtcagacactgttgttgagccatacaatgcaaccctgtctgtccatcagttggttgagaacgctgatgaatgcatggttcttgacaacgaagcactttatgacatttgcttccgaactctgaagctgacgacccctagctttggagacttgaaccac

SEQ ID NO: 17653 - DNA, 300 bp, Zea mays
acagaagttccaatgtcttcttaatttctgaaagcaggaaaagaaagtataaggctattatacaacgatatatgagtgactgaaacaggtacaacaaagaggtacactagacattgttaacagctgtcttccaaggaactttacagcagagaatccgtctttgcaggtagcctcctgaagaagtttgctggtgctgatggcaccttgtggcgaaaccgaggatgcctcatcgagaagaacccaaggcagagtgcaatcgcttggaatggtgtcacatatagtataatggcagtaatcaag

SEQ ID NO: 17654 - DNA, 317 bp, Zea mays
ggacgcgtggcagattctgatgttgagggaagcaaacactctcaaaagtctggggtgacatcaatttctacatgcgagcaccagtcatcttataacctcaaggctgcaagtatgaaaagtagcaggatgataaggctgtgtggaaatatcgtaaggaagctcatcgatcacaaatgtggctggcttttcaaagaacctgttgatccagatctatatgggattccagactactttgatgttatccgcagtccaatggatttgggcactattaagaataaactcacaaaaaagaaatatgtaagcattgaggagtttgc

SEQ ID NO: 17655 - DNA, 319 bp, Zea mays
caccggcgcgatccccgacaaggagatcctgaagatcgtgaaggagaacttcgacttcaggcccggcatgatcatcatcaacctcgacctcaagaaaggcggcaacgggcgctacctcaagacggcggcctacgggcactttgggagggacgaccccgacttcacctgggaggtggtgaagcccctcaaggcggagaagccgtcttctgcatgaggcgcctcctctgttttggaagaagcttttggtctggtctggtctggtctggtgtgcctgcgctctatcatgcttttttatggctcctacttgtgattcttgatc

SEQ ID NO: 17656 - DNA, 312 bp, Zea mays
gggcgcgtggccctggtgaactacggcaaagactatggccgcctcgtcgtcatcgtcgatgtggtcgaccagaacagggcactactggacgcccctgataatgtcaggtgccagattaacttcaaacggctctcacttactgacatcaagattgacatcaaacgcgttcccaagaagtcaaccctgatcaaggctatggaggaagctgatgtgaagacgaagtgggaaaacagctcatggggcaagaagctgattgtccagaagaggagggctgcgctcagtgactttgacaggttcaaggtcatgctggca

SEQ ID NO: 17657 - DNA, 311 bp, Zea mays
cactgggacacgcctcaagcactggtagacaagtacggtggctttttagatcggaggattgtaaaagattacacagatttcgctatggtgtgcttcgagaacttcggtgacaaagtgaaaaattggttgacatttaacgagccccaaacgttttcttctttttcctatggaatcgggttgtgtgccccagggcggtgctccccaggacaaaaatgtgctaacccaattggaaactcacttatcgagccatacattgttggtcacaaccttctcctagcccatgctgaggctgttgatctttacaacaagca

SEQ ID NO: 17658 - DNA, 309 bp, Zea mays
acgggattcaactgccggtgtgggaacttgtactgcgcactccaccgctactccgacaagcacgactgcaagttcgactaccggactgctgccagggacgccattgccaaggctaatccggtggtgaaggcagacaagctcgacaagatctagggggggttccctacggttgggtatcaggaagattgtaaaccgcggtaactcgtcatgcggaactgctgccttgccccccgcgcctttctcttccatgtttgctgctacaatcttgttgttgggcattgcagtgcacggtgcacacttgtgtagccc

SEQ ID NO: 17659 - DNA, 312 bp, Zea mays
  unsure (1)..(312): unsure at all n locations
gcaaagcgaagcngcgcacagagatctagctgaggctgagagctactagctagcagctgctgcaggtctcctgacatggcgaacaggacatcgaagcatcggggcccgaagccggcgagttctcggccaaggactacaccgaccctccgccggcgccgctaatcgacgcggatgagctcaccaagtggtccctctaccgcgcggtcatcgccgagttcatcgccacgctgctcttcctctacatcaccgtggccaccgtcatcgggtacaagcaccagacggacgcggcggcgtcgggccccgacgcggcgt

SEQ ID NO: 17660 - DNA, 312 bp, Zea mays
aagaaattgatgatctgcttcccattgaggtcaaggagcagcgcttgagcaacttgctacaggcttccatggtgggtggttgtgtcgctgctatgccactactcaagaagatccctacatctgtcctctggggctattttgccttcatggccattgagagcttgcctggtaaccagttttgggaaaggatcttgctgctcttcactgctcccagcagaagatacaaggtgcttgaagagtaccacaccacgttcgtcgagacagtgccattcaagacgatagccatgttcacaatgttccagacagcgtacc

SEQ ID NO: 17661 - DNA, 304 bp, Zea mays
tggagaccaccacccaaggccatgacgaccttggcaagcgctgcgccaagtactacgaggcaggtgcccgctttgccaagtggcgcgctgttctcaagattggccctaatgagccatcacagcttgccatcgacctgaacgctcagggtctagctcgctacgccatcatctgccaggagaatggtctggtgccaattgttgagcctgagatccttgttgatggccctcatgacattgatcgctgtgcttacgtcactgagaccgtccttgctgcctgctacaaggcgctcaacgagcaccatgt

SEQ ID NO: 17662 - DNA, 303 bp, Zea mays
ctcctcgagcacactgatgttgctgtcctgctcgacaatgaggccatctatgacatctgccgccgctcccttgacattgagcgcccaacctacaccaacctcaacaggcttgtgtcccaggtcatctcatccctgactgcttccctgaggttcgatggtgctctgaacgttgatgtgaacgagttccagaccaacctggtgccctaccctaggatccacttcatgctttcgtcctacgctccagtcatttctgctgagaaggcctaccacgagcagctgtccgtggccgaaatcaccaacagc

SEQ ID NO: 17663 - DNA, 301 bp, Zea mays
gcggcggcggtggcgcacgcgttcgcgctgttcgtggcggtgtctgtgggcgcgaacatctccggcgggcacgtgaaccctgccgtgaccttcggcgccttcgtgggcggcaacatcaccctgttccgggggctcctgtactgggtggcgcactgctggggtccaccgtggcgtgcttcctgctccgcttctcgacgggcgggcaggccacgggcaccttcgggctgacgggcgtgtcggtgtgggaggcgctggtgctggagatcgtgatgaccttcgggctggtgtacacggtgtacgc

SEQ ID NO: 17664 - DNA, 287 bp, Zea mays
ctccaatccgccgctccactccaagtcacacggaggcagccatcgtagcctcgcccgactccgcttcccctgttctttgggcatggagctgatcacaaatgtcaccgagtacgagaagctcgcgaaggagaggctgccgaagatggtgtacgactactacgcctccggcgcagaagatcagtggacgctcaaggagaaccgggaggccttctccagaattctgtttaggccacgggtactgatcgacgtctcccgtatcgacatggccacaaacattctgggcttca

SEQ ID NO: 17665 - DNA, 113 bp, Zea mays
ctggcttctcctccccctcttaccaagtcctcctcgggttagggttccttagggttttgtggaggtgcgatggctgcggctgatgtggagtaccgttgcttcgtcggctggct

SEQ ID NO: 17666 - DNA, 289 bp, Zea mays
caagataccaccccgacaagggcggtgaccccgagaagttcaaggagctcgcacaagcctatgaggttttgagtgatccagagaaacgtgagatttatgatcagtatggtgaagatgcccttaaggaaggaatgggtggtggtgggtcccatgctgatccatttgacattttctcatcattctttggaccctcttttggaggaggtggtggaagcagcaggggaagaaggcaaaggaggggagaagatgtagtccactcacttaaagtttctctggaagatctttacaa

SEQ ID NO: 17667 - DNA, 118 bp, Zea mays
ctcacgcgtccgaggacgcaggatggcattctcctccccctccggttcgggttcgggttcgtgaggttctccggggttcggtttcgagggtggaccgatctatatgacgctgtcggat

SEQ ID NO: 17668 - DNA, 279 bp, Zea mays
gttggcttctcctccccctccggttcgggttcgggttcgtgaggttctccggggatcggtttcgtgggtgatcggatcgagatggcggcgtcggatgttgagtaccgctgcttcgtctgcagcctcgcctgggccacggacgaccactccctccacaacgccttcagcacctacggctaggtcctcgagtccaagatcatcctcgatcgggagaagcagatgtcccgctgcttcggcttcgtcaccttctccacggaggatgcgatgctgaacccatcg

SEQ ID NO: 17669 - DNA, 291 bp, Zea mays
cggacgctggacgtgacgcgtgggcggacgcgtgggcgacacctccgatgcctacgggccccgcaccaacgagaccctcctggggaacgctctcaagcaggctccgagggaacacgtgcaggtggccaccaagttcgggataggtcagggcgccgctggcatgaccgtgtgcggcacgcccgagtacgtacgcgcctgctgcgaggccagcctgcgccgcctcgacgccggctacatcgacctctactaccagcaccgcgtcgacaccaccgtccccatcgaggatacgat

SEQ ID NO: 17670 - DNA, 284 bp, Zea mays
cccacgcgtccggtccgacgcgctccgttcccctttccctttccgaagcttctcgaccccccatcccctccctgacatggccgacaacgcgaaggccgcggcggcgcatgcgaggccggagtcgtcgcaggaggaggaggaggactggaaggaggccgagggggacgtcgccgaagtcgaccgcgccgccaccaatggcgccggcgaggggggcgtgcccacagacaggccgatccgggtctacgccgacggcatctacgacctcttccacttcggccacgcca

SEQ ID NO: 17671 - DNA, 284 bp, Zea mays
cccacgcgtccgctatgatgaagcaggcaatccgcggagaattcaatgcctaaaatatcttgtccttgccaatatgttgatggagtctgaagtgaatccttttgatggacaagaggccaagccgtacaagaacgatagtgaaatccttgcaatgacaaacctgattgcagcgtaccagaagaacgacatcatggagtttgaaaagatcctgaagagtaatagaagaacaataatggatgatccttttatccgtaactatattgaggatctgttgaagaacatca

SEQ ID NO: 17672 - DNA, 288 bp, Zea mays
cggacggtgggctgtctccctcttgccggtcccgaataaagagcagcagcgcaagaggtcggtagagcgagaagaaggcaatggcggccgagagcctccttttcacctcggagtccgtgaacgaggggcaccccgacaagctgtgcgaccaggtgtcggacgccgtgcttgacgcatgcctcgcgcaggaccccgacagcaaggtggcctgcgagacctgcaccaagaccaacatggtgatggtgttcggcgagatcacgaccaaggcgatcgtggactacgagaaga

SEQ ID NO: 17673 - DNA, 287 bp, Zea mays
gccggctccgctgccaccgccgcgactccacctctgtcgccaccatggtcaagtccaaggccatcagggtccacgagctgggcggccccgaggtgctgcggtgggaagaggtggaggtcggggagcccggtgaaggggagatccgcatcaggaccaccgccgtcgggtcaacttcatcgacatctactttcggaagggggtctacgccgcgcccaccatgcccttcaacccaggaatggaagccgttggcgtcgtcaccgctgttgggcctggcctcactggcagga

SEQ ID NO: 17674 - DNA, 287 bp, Zea mays
gttatggacacactaagcagattgagtcatgatgcagacgccgatgtgtcgatggctgcaattatctcattgggtttgattggtgctggcacaaacaatgccagaatagctggcatgcttcgcaatctttcaagttattactacaaagaagctgctcatctgttttgtgttagaattgcccagggccttgttcacctcggaaagggcttgttgaccctttccccataccattccgatagatttcttctctccccgatggcacttgggggccttgtaaccgttctcca

SEQ ID NO: 17675 - DNA, 288 bp, Zea mays
agagcacgcagtagtgcagcagcactgaagcactacttcctgcactcactgtgctagctgctcaaaccgtagtagtaacagtccatcaccatcaccatcaccaccaatggcttccaaggttgcgctcttccttgccctaagcctcctgttcgctgccaccgcgcatggctgcgaaccctactgttccggcccagtcgtcccaacaccaccagtcgtgccgactccgtcgtcgcatagccacgggcgctgcccgatcgacgcgctcaagctcaaggtgtgcgccaatgt

SEQ ID NO: 17676 - DNA, 265 bp, Zea mays
cggacgcgtggcgtgacgcgtgggtagatgttcatgagacagctgcaggggcactatggaatcttgctttttattctggtaatgctctccgcatagtctgaagaaggtaggcttgcctgttcttgtaaaaatttgctcatcatcagggtccaagatggcacgcttcatgtctgcactagcactagcatatatgtttgatggaagaatggatgaagttgctttggttggagcatcctcagctagcagttccaagagtgttaatatt

SEQ ID NO: 17677 - DNA, 277 bp, Zea mays
ctccgcactctccccgatccagcttgttcgcagtaacagccgtcgttttatgccttctcaagctgatgaagaaattcatcagttgtcctatctgcaaaagcatatggcgaatattcttactctcttggcagattctgttgagggtgatggtgatgattcactggtgttgacaatggagacttttgagcaccttggatttctagttcaattctcagaaggaacttctttaagccaggctgctacattttttgcatgctcagatccagacatgcctgat

SEQ ID NO: 17678 - DNA, 279 bp, Zea mays
cccacgcgtccgatgggtcaaggtgcgtcaagcctccgatcatctacggtgacgtgagccgccccaaccccatgaccgttttctggtcgaagaggcgcagagcatgacgtctcgcccaatgaaggggatgctgactggcccagtcacaatcctcaactggtccttcgtccggaatgaccagccgaggtttgagacttgctaccagatcgctcttgcgatcaagaaggaagtcgaggatctcgaggctggtggtattcaggttatccaaatcgacgaggc

SEQ ID NO: 17679 - DNA, 279 bp, Zea mays
cccatctcccagatccaattcgcgagttctccctcctctgccgccatggcgctctctgtggagaagacctcgtctggacgggagtacaaggtcaaggatctctcgcaggcggacttcggccgcctcgagattgagctggccgaggtcgaaatgcccggcctcatggcgtgccgcgccgagttcggcccgtccaagcccttcgccggcgctaggatctcggggtctctccacatgaccatccagaccgccgtcctcatcgagaccctcaccgcgctcggc

SEQ ID NO: 17680 - DNA, 336 bp, Zea mays
caccgagctgcctgctacacccctgccaagatccatctttccggttccgccgcctgatcgaagtgaacaagcaaggaagagccatggcgagcgagcacgcggcggggggcgatgctaagcatcaccagaagcagagcctgatggacaaggcgaaggggttcgtcgcggagaagatcgcgcacatccccaagcccgaggccacgctggacggcgtgacgttcaagggcctgagccgggagtgcatcacgctgcacagcagcgtgatacgtgtccaacccctacgaccaccgcctcgccatctgcgaggtgacctacacgctccggtgcgccggcaag

SEQ ID NO: 17681 - DNA, 130 bp, Zea mays
cagacgcgtgggtgcatgccgaagcgggcggcgttcaaggggtcggcgccgatcaacctgtccgaccgtctcaaccaggtgctccggtgggcgctggggtccgtcgagatcttcttcagccggcacagcc

SEQ ID NO: 17682 - DNA, 131 bp, Zea mays
atgagattggaagcatggaaaatattccagatttcattgtaggagtgaagaacaggaagaggaagatgtccggttttgggcaccgtgtgtataaaaactatgaccctcgtgctaaaagtcataaggaaatt

SEQ ID NO: 17683 - DNA, 121 bp, Zea mays
cccgctacccgagcttctactacggctgcggccaggacaatgaggggctcttcggccgctcggcggggctcatcggcctcgcgcgcaacaagctctcgctgctctaccagctcgcgcccag

SEQ ID NO: 17684 - DNA, 330 bp, Zea mays
cccacgcgtccgcccacgcgtccgcccacgcgtccgcccacgcgtccgagaaaatcgaccagcaccagactggccccaagttggcagggtggaccttaaagatttgaagattagatacagacgaagatgctcctcttgtattacatggaatcacctgcagtttccacggtggagataagatcggtatagttgggcgaacaggaagtggaaagacaactttaattggtgcactgtttcgtcttgttgagccaactggagggaaaataattatagactctatagacatcaccacaataggcttacatgacctgcgttcacgtttgggtatca

SEQ ID NO: 17685 - DNA, 322 bp, Zea mays
cgccgccccgagctcttcgccaagctcgtactcatcggcgcgtcgcccaggttcctgaacgaccacgactaccacggcgggttcgagctgccggagatccagcaggtgttcgacgcgatggcggccaactactcggcgtgggcgaccgggtacgccccgctggcggtgggcgcggacgtgccggcggcggtgcaggagttcagccgcaccctgttcaacatgcggccggacatctccctccacgtgtgccccaccgtgttcaacaccgacctccgcggcgtgctgggcatggtgcggtccccctgcgtggtggtgcagacca

SEQ ID NO: 17686 - DNA, 325 bp, Zea mays
ctgacgcttctgctggcgtgctcccgttctcggaggatgacttgcccaagataccctacctgagagcggtggtgctggagggtctccggcgccatccgccggggcaccagatgccggcacgcaagggtgagggaggacgtggaggtgggtgactacgtggtgcccaagggctcagcgatcaacttcatgctgtacgacctgggcatggacgacgccacgtgggaccgcccagcagtgttcatgccggagaggttcctgcccggcggggaagccgaggcgctggacatcaccggcaccaaggagatgaagatgataccgtttgggg

SEQ ID NO: 17687 - DNA, 126 bp, Zea mays
acaaagcctgcgcaacccaagctatcgtttcggttctcttgaactctcctggcattacccttagtgatgagcttaaaaagctcaaggaatttgcaaaggatttgccacctgagctcaaaggactgg

SEQ ID NO: 17688 - DNA, 322 bp, Zea mays
gggagcgggccatgcaccctgtccagacctacgccatgtactactggtgcttccactacttcaagcggatcatggagacattcttcgtgcaccgcttcagccacgcgacgtcgccgctctcgaacgtcttcaggaactgtgcctactactggaccttcggcgcctacattgcttactactgcaaccacccgctgtacaccccagtgagtgatctgcagatgaagattgggtttggttttggggtcgtctgccaggtcgcgaacttctactgccacatcctgctgcggaacctcaggagcccaagcggcagcggcgggtacca

SEQ ID NO: 17689 - DNA, 321 bp, Zea mays
gaggagcatcagcagttccaaggtccaatcggagcccagcaacgtgaggattttcgcgcaggaggagctgaaagaagtcacgcacaattactcttgtctactcggtggaggtctttcaaggaaaagtctacagagggacactcgaggacaacgcagtggtcgcggtgagagtgttctctgaagtgctcgagggcttcgaggaagcgtttgtcaatggcgggatgatcctgtctcagatatcccacaggaacgtcgtcaaactcttgggatactgcttggacggcgattgcccggcgttcgtgtacgagtacgcagctagag

SEQ ID NO: 17690 - DNA, 321 bp, Zea mays
caattctcacgcgctcgccgcctaggagcattcacgttggtggcgggcggtggctcggttcctctcctccaccgcacctccaagaatccacctccacgactgagctgacggctcggcggcgcgatggcggttcaccggctccaaccttccctctctggcctacagtgctccaccgcccggtcgccagtgctcctccatgggccacggctgacgggtgcacgcaccgatggttggtgcaggcaggagaggtggatttggtggacctagattcgatgtgcagagagcgacttggaggtggctgacatcttcaagcactgcaac

SEQ ID NO: 17691 - DNA, 323 bp, Zea mays
gagaactactgcctggccgtccgcgacggcgccgtcgtgctggccccggtcaaccccaaggacgaccaccagcactggtacaaggacatgcgcttcagcacccgggtcaaggacgacgaaggcatgccggcgttcgcgctcgtcaacaaggccacggggctcaccatcaagcactccctcggccagtcccacccggtcaagctcgcgcctttcaacccggaccaggaggacgcgtcggtgctgtggacggagagcaaggacgtgggcaagggcttccgctgcatccgcatggtcaacaacacccgcctcaacttcgacgcctt

SEQ ID NO: 17692 - DNA, 102 bp, Zea mays
cggacgcgtgggctccgccgcgtcgtccgtcgacgtaaggtaaggtcagcatggtgagggtcagtgtgctcaacgatgcgctcaagtccatgtacaacgctg

SEQ ID NO: 17693 - DNA, 317 bp, Zea mays
cacgcctccggcgccacctccaccatggccccgaagaaggagaaggccccgccgccatcgtccaagccggccaagtccggaggcgggaagcagaataagaagaagtggagcaagggtaagcagaaggagaaggtctacaacgctgtgctcttcgaccaggccacctacgataagctgctctccgaggtgcccaagtacaagcagatcagcccatgcatcctatctgagcgcctcagggttaatggatccttggcacggagggccatcaaggatctgatggcaaaggggctcataaggaaggtctctgttcattctag

SEQ ID NO: 17694 - DNA, 315 bp, Zea mays
ggcgaatgtcttcttgggagagtgcgcgttctacaggctgacgccttgaacttggtccaaggtggactcactgctggcagcaccgcttctgaatctagctgcgcacgaccctccaggcatgcgatacgctgtacgataggttaaagctagtcttggacaggatgcagcagcgatcagaaaacgtctcgtgggataccttggtttcgcaggcctatgaagacgatgtcgatatgtccgcgagtgcgtactgggtacctggtcaagtttctaacaagtaccttaactacggagctggtataagcgaggtggaggttg

SEQ ID NO: 17695 - DNA, 316 bp, Zea mays
gcaccacacctcttcctcctcttcctcctcctagcacagctagcgcctgctccccttcgtctgtgatcatgtcttgcagcagcggcaagtgcaactgcggctccagctgctcctgcggcagctcatgcaactgcatgtcccctgacgtggagaccgccgccgccagcagcatcaagaccatggtcctcgctgcgccgaccaccaaggccagcgccggcggcttcgaggcggccaccgagggcggcggctgcgactgcaacacctgcaactgcggcaccagctgcggctgctcctgctgcagctgcaactgagccgg

SEQ ID NO: 17696 - DNA, 317 bp, Zea mays
ggccgagtacacggagttcaccggcaacttcaccaccatcgcctcccagtgcctcatgaagctccccgcaagcaacaacaagttcacctacaactgcaacggtcacactttcaattacctcgtggaagacggattcacatactgtgttgttgctgttgaatcggtggggcaacaaattcctattgctttcatggatagggttaaggaggatttcacaaaaaggtatggtggtgggaaagctgctactgctgcagctaacagcctcaatcgagagtttggatcaaaacctaaagaacacatgcagtattgtgtggatc

SEQ ID NO: 17697 - DNA, 290 bp, Zea mays
agccattactaaatcctgctgctgaggcacaagctatcagcaggatccatagagttggacaagacaaaagcacatttgttcaccgttttatagtgaagaaaacaatagaagagagcatctacaaattgaacaggagcagagctgtctgctctactataaaccgtaaatccaaaaacttcaaagatgagcctgttttgacgctgaaggatgtggagtcgctattcccgatggcaggacctgatgaacccctagaacaggcagatcaaaattacggcgataccttgaggagt

SEQ ID NO: 17698 - DNA, 291 bp, Zea mays
cccacgcgtccgaccacgcgtccgcccacgcgtccgcggacgcgtgggggcttgtctggcagctacaaaccacccaaaagccacccccagaaaccggcggtccttgggtgttccggatctgagccagcagctgagcagaggatgagcgccgtggccgccatggcgacgtcgtcctggaaccccaacgcgccgctcttcatcccggcggcgtaccggcacgtggaggaattctcgcccgagtggtatgagctcgtcaacaccaccgcctggttccgggaccactggttccgc

SEQ ID NO: 17699 - DNA, 242 bp, Zea mays
  unsure (1)..(242): unsure at all n locations
cggacgcggacggnacgcgtgggcagcgacacccgaccccgccgtcgcgatgaggccggcgctgctcaagcccacggccaagctcctccgccgcagccgggctacggctcctcggccaacccggaacggaaggtggccatcctgggcgctgcgggcggcatcgggcagccgctctccctcctcatgaagctcaacccgctcgtctcctccctctccctctatgatatcgccgggagccccgg

SEQ ID NO: 17700 - DNA, 288 bp, Zea mays
gcagtagtgcagcagcactgaagcactacttcctgcactcactgtgctagctgctcaaaccgtagtagtaacagtccatcaccatcaccatcaccaccaatggctcccaaggttgcgctcttccttgccctaagcctcctgttcgctgccaccgcgcatggctgcgaaccctactgttccggcccagtcgtcccaacaccaccagtcgtgccgactccgtcgtcgcatagccacgggcgctgcccgatcgacgcgctcaagctcaaggtgtgcgccaatgtgctgggc

SEQ ID NO: 17701 - DNA, 264 bp, Zea mays
gcccgatactggtgacttactgggcttagatgatacaaatcctgctgtatcagctatagaggaaagcaatgctcttgccttggctattgttccaacagatggcgcttcaacaactggtaacactgcatttcaagaaaaggggtttgatcctacaggatgggaacttgcccttgttactgcaccaagcaatacaacttcatctacttctgttagtcaattgggtggtggactcgacaagctcattttggagagcctttatgatga

SEQ ID NO: 17702 - DNA, 289 bp, Zea mays
cactgacacaagagagcacgctactactcatcactcgccaacgtgcagagatcagggaggcggcacactccatccactgaccgctcatggcgaaggtccacctctacgtcgccgcggcctgcgccgtcgtcctcgcgctcgccgccccggccctcgccggcgaccccgacatgctgcaggacgtctgcccggctgactacgcctccccggtgaagctgaacgggttcgcgtgcaaggcgaacttttcggcggacgacttcttcttcgacgggctgaggaaccccggcaa

SEQ ID NO: 17703 - DNA, 287 bp, Zea mays
ggttttcctagctcttgcaatggcggcaattggagtgtcgcaatcaagtacccttacatcagattcttccaaagcaaaatcagctgcatcttctatatttgcaattgtagatcgaaaatcaaggatagacccaagtgaggatgcaggggtaactgttgaggcactacaaggaaacatcgtattccagcatgttagcttcaagtatcctaccaggccagatgttcagatattccgggacctttgcttgacaattcatgctggaaagactgttgcactcgttggagaga

SEQ ID NO: 17704 - DNA, 289 bp, Zea mays
cggacgctgacgtacaggaggacgtagccgatgacaaggccgtcatccccgcgaccgacccgccgccgcagctgccgccggccgacgactccaaggccctggccatcgtcgagaaagttgcagatgaacctgctcccgagaagcctgcccctgcgaacaagggggctccaatgacagggatctcgctcttgcaagggtggaaacagagaagaggaactctttgatcaaagcttgggaagagaatgagaagacaaaagctgagaacaaggctgctaagaaagtatccgct

SEQ ID NO: 17705 - DNA, 287 bp, Zea mays
aaggcggctgccttcagggaattgagagaagagactggtgtcacatccgcagagatcgtggctgaggctcccgtctggttaacatatgatttcccgccagatgtcagaaccaaactgaatgccaggtggggaaccgattggaaaggccaagctcaaaaatggtttttatttagacttactggaaatgacgatgagattaaccttaatggtgatggatctgagaagccagagtttggtgaatggacatggatgacacccaaggaagttatcgaaaaggcagttgattt

SEQ ID NO: 17706 - DNA, 286 bp, Zea mays
ggcgctgcagctgctcccaaggaagaagagaaggctgcggacctgaagaggagtcggacgaggaaatgggcttcagctcttcgacgactagagctgctgttttcgtcaaactgctgcaaattttggcttttttttatcatctacaagtactgtttcctatattttttagcagacaaattatcgtgtgtaatcgacaatgatatctccttaaattttaaaaaaaaaaaaaaaaacggacgcgtgggcggcttcgaaggattcggacaccactacagcagagcgtcca

SEQ ID NO: 17707 - DNA, 262 bp, Zea mays
tgcgaaaatgtcatggctgcctgtggtcacggtggcctccatggggatgcaagagaagttcttgaatatatgaccagagaaggaatggtgcctactgcagatgcctacactggcctggttgaggcccttggccacgcagctatgtatgaggaagcctatgttgctttcaacatgatgactgacatcggtagcttgccaactcttgagacctacaatgctcttgcatttgcatatgctaggggtgggctcttccaggaggctg

SEQ ID NO: 17708 - DNA, 286 bp, Zea mays
gtgattgtgatcaacacacctcttacggagaaaacaagaggcatgtttaacaaagagaggattgcaaagatgaagaaaggtgtaattgttgtgaataatgctcgaggagcaatcatggatgctcaagcagtcgcagatgcatgttctagcggtcacattgctggatacggtggtgatgtgtggttcccacagccagcaccaaaggatcacccctggcgctacatgccaaaccatgccatgacccctcacatctctgggactacaattgatgcgcactgcgtgtatg

SEQ ID NO: 17709 - DNA, 284 bp, Zea mays
ggcggcatgatcttcgtcctcgtctactgcaccgccggcatctcggggggccacatcaaccccgccgtcaccttcggcctcttcctggcgcgcaaggtctccctggtgcgcgcgctgctctacatcgtggcgcagtgcctcggcgccatctgcggcgtcggcctcgtcaaggcgttccagagcgcctacttcgacaggtacggcggcggcgccaactcgctcgcctccggctactcccgcggcaccggcctcggcgccgagatcatcggcaccttcgtgctcgt

SEQ ID NO: 17710 - DNA, 283 bp, Zea mays
ggaagcgcgaaagctcgcctcccgccgctctcgcatcgtctccagagcgcacgtcagatcaggtgcgccgcgcccccctcgcctaagctgcgacgaccatccatcgaacaggaaggatgacgggctccatggatctcccggccaagggcgggttcagcttcgacctgtgtcgccggaacaacatgctggagaagaacggactcaaggtcccgggattcaggaagaccgggacaaccatcgtcggcctcgtctttcaggatggggttgttcttggggcagacac

SEQ ID NO: 17711 - DNA, 281 bp, Zea mays
cgagctgtctgtaggggtgcagcacgactggagctaccgcccattggtgcacgacgtgttggcttgaagcagaacaagctgaagttgccggcagagaagtacgaattggatgactctgataaattctgggtggcaaacagctggtctccattccccaaagttgctgaggaaatcgaagcgcagctgccaagtacaagcaggatgtggatgaggtgaaccagcatactggtggtggcaaggttggggttgagtttgatggtactgatctaattggcaacact

SEQ ID NO: 17712 - DNA, 258 bp, Zea mays
agagcttccactgaccaaagtgaggtggacaccggcatcgcataccagatgggttctgttgcatttgctgtcatacaacttgttggaatcattgccgtgatgtctcaggttgcatggcaggtgttcgttgttttcaatcccgtggctgctacgtgtttctggtatcagcgatactacattgataccgcccaggagatgcaaaggctagtaggtgtctgcaaagctcctatcatacagcattttgccgaatcaataaca

SEQ ID NO: 17713 - DNA, 278 bp, Zea mays
cctgttcattgtcctcttcctgctggtcatagtctgtggtgaggtttctctggtcctgacctacatgcacctttgcgtggaggactggaaatggtggtggaaggccttctttgcttctggctctgtcgcattctatgtgttcctctactctattaactacctggtgttcgatctcaggagcctgagcggaccagtttctgctacactctaccttggctattccctgatcatggcccttgcaatcatgctctccactggcgccattggtttcctgctct

SEQ ID NO: 17714 - DNA, 282 bp, Zea mays
ctccgtcacctgactcacacctccactcacctccggtccaccaacccctgccggccatggcggctgcggcggcgcagaagctcctcgaggcgagcacgaagatcatcggcgtcgggcgcaactacatcgcccacgccgaggagctcggcaacccggtccccaaggagcccgtactattcctaaagccgacctcgtcgttcctccacgctggcgtggccaccgccgccgtcgagatcccggagccgctcgaatcgctacaccacgaggtcgagctcgccgtcg

SEQ ID NO: 17715 - DNA, 277 bp, Zea mays
gggttatggagaatcttctaatgctggtggttctggtggaggtgggggtggagggcaagctggaggttatgggaattccaatgctcaaggatctggtagtggcaccggttctggctctagctatgctaacaggtattgggatggatcaagtgaaggaggtgcaaatgctaatggcaatggtggtggcacaggaaatagtcaaaatggtggcggtggcggtggttcaggtgaggggattggatatggcaatgcctacccatgaacttgacatcagtcg

SEQ ID NO: 17716 - DNA, 280 bp, Zea mays
cccacgcgtccggttgggcgcagagaatccccaagcaaacaaacagggtagagggagaggagaggagaggagaggagaggttgggtctgggacaccatggctccgatgaagctgtacggggcggtgatgtcgtggaacgtgacgaggtgcgcaacggcgctggaggaggctggctccgactacgagatcgtgcccatcaacttcgccaccgccgagcacaagagccccgagcacctcgtccgcaacccgtttggtcaggttccagctctgcaggatggtg

SEQ ID NO: 17717 - DNA, 258 bp, Zea mays
  unsure (1)..(258): unsure at all n locations
ggacgtgtacgtgacgcgtgggtgaaatttctgtgatgaagcttgttaggcatccaaacatcgtacagctctatagctgcatggccagcttaaccanaatatactttgtgctggaacatgttaaaggtggagagctgttcaacaagattcagcgaggaaggctcaagggagacgcagcgaggaagtacttccaacagctgatctgtgcggtggacttctgtcacagcaggggtgtctatcatcgagatttgaagccag

SEQ ID NO: 17718 - DNA, 293 bp, Zea mays
cggacgcgtgggcgagggaccgagaaagataagaaaggcggtggtcaacttgtgtcctgaggtgcccgtagaagcccaaggacaagaaacaaggagaagaatagatctacatctactccaccgatgaacgcgtctcggttcatcaagtgcgtcaccgtgggggacggtgccgtcggaaagacctgcatgctcatctcctacacatccaacactttccccactgactaagttccaactgtgttcgacaacttcagtgccaatgttgtggttgacgggagcactgtcaacttggg

SEQ ID NO: 17719 - DNA, 287 bp, Zea mays
cccacgcgtccgatccactgcggcctggacgcgtgcgagagacttgaccaagcagcagcagcagggatggcgcctctgaagctgtacgggatgccgctgtcccccaacgtggtgcgcgtggccaccgtgctcaacgagaagggcctcgacttcgagatcgtccccgtcgacctcaccaccggcgcccacaagcagcccgacttcctcggcctcaaccctttcggccagatcccggctctcgtcgacggagacgaagtctcttcgggtcccgtgcgataaccggtaca

SEQ ID NO: 17720 - DNA, 291 bp, Zea mays
atcctggaccaccacgacaacttcatgccgttcctggtcagggtgaacagcctggagggcaacttcatctacgccaccaggaccgtgctgttcctgcgcggcgacggcacgctggtgccggtggccatcgagctgagcctgcccgagctccgggacggcctgaccaccgccaagagcaccgtgtacacgcccaagtcgaccaccggcgcggaggcgtgggtgtggcacctggccaaggcctacgccaacgtgaacgactactgctggcaccagctcatcagccactggctc

SEQ ID NO: 17721 - DNA, 253 bp, Zea mays
cgagcggctgctgaagctggtgaagctgggcggcctcatcggctacgacaacacgctgtggaacggctccgtcgtgctccccgacgacgcgcccatgcgcaagtacatccgcttctaccgcgacttcgtgctcgtcctcaacaaggcgctcgccgccgacgaccgcgtcgagatctgtcagctccccgtcggcgacggcgtcaccctctgccgccgcgtcaagtgaaaacatgccctggcctgggctggccca

SEQ ID NO: 17722 - DNA, 139 bp, Zea mays
gatttatccgctgcagccatgagtaagttgcagtctgagtctgtcaaggatgccatctcccagattgttggggattccaaggagaagaataggaagttcactgagactgtggaacttcagattggtctgaagaattatg

SEQ ID NO: 17723 - DNA, 286 bp, Zea mays
gatggaaccaaactaaagcacagagctgacctcaagctggacaggtgcacactttgtcatgatataggagtcactccaaagcacaatgtaatcatggacataccacttaccatggacgtcggtagaatcgtcaaaggcggacagctgattcagttcgagaaggaaagctatgcgagaatcggggtgatgccccgctatggcgacgcagattcagctgtctggtttgatgtagaaccgttctgcatgttccatcttgtgaactgcttcgaagaaggcgacgaggtcg

SEQ ID NO: 17724 - DNA, 288 bp, Zea mays
gtccctcacacactcactatacactgctctgctgcagcaagaaggaagaagctagcgcctccctagctctcgttgtcagcaatggccaccaccgccgcgtccagcctcctcaagtcgtccttcgcgggctcccggctcccttcggccacgcgcaccaccaccccgtcgtccgtggccgtggccaccccgcgcgccggcggctgccccatccgcgcgtccatctcctcctcttccaccccgccctacgacctgacgtccttccggttcagccccatcaaggagtccatc

SEQ ID NO: 17725 - DNA, 267 bp, Zea mays
gacacagagcgtcagagcccgatcccgatccagcgaggcggcgaccctccctcctccccttgcttcgctcgtccagccctgaccacccgcatccccgtcagtcatggcagcggcagcaggcggaggcgcggtgcgtgcgctgtcccagaaggagcaggacatacagatgatgctcgccgccgacgtccaccttggcaccaagaactgcgatttccagatggagcgctatgcctttaagcgccgcaccgacggcatctacatcatcaa

SEQ ID NO: 17726 - DNA, 207 bp, Zea mays
cttcgttatggcatgcgagtcggcgacgcagctgaggagcaccggcgacgtgaaggtgagggaggccaccctgaagcggctgggcgcgacgcacgccagggcgggcgtcggcgacgcgcatttcgaggtcgtcaagacggcgctgctggaacacatcaaggacgcggtcccggacatgtggaccccggagatgaaggcggcgtggga

SEQ ID NO: 17727 - DNA, 280 bp, Zea mays
ctccggatgcacccgccggggcccctcctgtcgtggcgccacagggccatatccgacacgtacgtcgacggccacctcgtcccggcgggcaccacggccatggtgaaccagtgggccatcagccgcgatcccgaggtgtgggacgcgccgctcgagttccggcccgagcggttcctccccggcggcgagggccaggacgtgtccgtgctcggcgccgacggccgcctcgtgccgttcgggtccgtcaggaggagctgccccggaaagtccctggccatga

SEQ ID NO: 17728 - DNA, 260 bp, Zea mays
gattattatctatctagcttgtggtggtggttgaacaataataagcgaggccgagctggctgccatacataggtattgtgtggtgtgtgtgagagagagagaaacagagttcttcagtttgctatctctctctgcatgtttggcgtcagtctttgtgctcatgtacgtacgtgtgtctacctgcatgttggttgatccgattgcatctgctgtaaccatatattaattggtccacgatgatatgatttgatactatatat

SEQ ID NO: 17729 - DNA, 277 bp, Zea mays
ccagaaacaattgctgctttcattgctgaacctgtgatgggtgctggtggtgtcatccctcctccaaagacctattttgacaaggtccaagcaatcgtcaagaagtatgacattcttttcatagcagatgaggtgatcactgcatttggaaggctgggaactatgtttggatgcgattactataacatcaagccagatctagtttcactggccaaggctctttcaaacgcctacgtacccatcggggcaactcttgttagcccagagatatcagatg

SEQ ID NO: 17730 - DNA, 280 bp, Zea mays
gcggaaggagtcggagggaaccgaaaactcagggtctcgaatttcctaggagcggaggcgatggctgggaagggaggaaaaggattgctcgccgcgaagacgacggcggccaagtcggcggagaaggacaaggggaagaaggcccccatctcacggtcctcccgcgcgggcctccagtttcctgttggacgaatccaccgtcagctgaagcaaaggactcaggcaaatggccgcgttggtgccactgcagccgtctactctgccgccatcctggagtact

SEQ ID NO: 17731 - DNA, 275 bp, Zea mays
ctcacgcgtccgcggacgcgtgggcgaccgtggacgtgacgcgtgggcactgctctgttatctgaacccagaacttcgtgtactcctgtaccgagctgtgtgtatgttttttttacttccatcgtgtttgttgcaagtgaagagagatggaagattcagcagagaaactaggcgtgggcagacaatacattccccacatgtctcagcacacccgcggcagcttaagacctgctcttgaacgggatggccctgatgatcaccctagttctagatcg

SEQ ID NO: 17732 - DNA, 222 bp, Zea mays
cccacgcgtccggggcgccggtggaggcatgggcggtggtgccaatggtgcatatggttctggtgctggtggaggcgttggcaagggcgagggtgtgagtggtgtggcactcgcaccatcgtccaacggctactacaatggcggtgccgccgatgctaccggtggcggttccggcgccggcggtggacatggtggtggcgcacctggagctccaagctatgg

SEQ ID NO: 17733 - DNA, 307 bp, Zea mays
gcagatcaacaaggaggtgaactcgattctgcgaggggtggtcgggaagaggatgcgggctatggctatgagagaaggcggcgaaagcaccaccggcgccgacgatctcctgggcctgctgctggagtccaacaacacgaggcacgaaggcgagaccggccacggccagcagtccgcccctgggatgacgatcgaagatgtcatcgaggagtgcaagctgttctacttcgcagggatggagacaacgtcggtgctgctgacatgggccatggtcctgctgagcatgcaacgcgagtggcaggaccgt

SEQ ID NO: 17734 - DNA, 317 bp, Zea mays
cccacgcgtgggcagcaatccctagcagaagccttccatcctcactcgctcgatggcccgcacgaagcagacggcgaggaagtccaccggcggcaaggcgccgaggaagcagctggcgactaaggcggcccgcaagtctgcccctgcgaccggcggagtgaagaagccccaccgctttcgccccggcaacgtcggggtccgggagatccgcaagtaccaggagagcacggagctgctggatcgcaagctgccgttccagcgcctggtgcgggagatcgcgcaggacttcaagaccgacctacgcttccagagctctg

SEQ ID NO: 17735 - DNA, 125 bp, Zea mays
cggacgcgtgggcgctgaaggtgctgtacggcaaccacgacgacgcggtgcggcggcagatcacgcgcgagatcgccatcctccgcaccgccgagcacccggcagtggtgcggtgccacggcatg

SEQ ID NO: 17736 - DNA, 249 bp, Zea mays
gtccatgaacgtcaggacactgcagaagtggacatcctcaccaaaggtgacaataattttggggatgaccgactattatatgcacatggccagctttggctccagcaacaccacattatggggcgtgcggtgggctaccttccatatgttggctgggttacaattatcatgactgagaaaccatttattaagtacctgctgattgcccacctgggctgctggtcatacgtcgaagaatagtgatgtcaa

SEQ ID NO: 17737 - DNA, 321 bp, Zea mays
gacacaagagagcacgctactactcatcactcgccaacgtgcagagatcagggaagcggcactccatccactgactgaccgctcatggcgaaggtccacctctacgtcgccgcggcctgcgccgtcgtcctcgcgctcgccaccccggccctcgccggtgaccccgacatgctgcaggacgtctgcccggctgactacgcctccccggtgaagctgaacgggttcgcgtgcaaggcgaacttttcggcggacgacttcttcttcgacgggctgaggaacccgggcaacaccaacaacccggcgggctccgtggtgacggcg

SEQ ID NO: 17738 - DNA, 301 bp, Zea mays
cccacgcgtccggcttgccaggcacaagtaacttccaagaaggctacccttacaagacttgaaactactgttgtggcagacgcccagacagaggacactaggtttcccaaggtctacatagacgggccatacggtgcaccagcacaaaattacaggaaatatgacattcttctgcttattggccttggaataggagcaactcctttcatcagcatactgaaggatatgttgaacaacctaaaatccaacgaagaggtggaaagcatccacggctctgagataggcagcttcaagaacaatg

SEQ ID NO: 17739 - DNA, 314 bp, Zea mays
cccgcctccaaacccgaactccaagtcgccccgcatcgatggcgcccaaggccgagaagaagcccgcggcgaagaagccggcggaggaggagcccgctgccgagaaggcgccggccgggaagaagctcaaggcggagaagcgtgtcccagcaggcaagtccgccggcaaggaaggcggcgaaggaaagaagggccggaagaagggcaagaagagtgtggagacccacaagatctacatcttcaaggtgctgaagcaggtgcacccggacatcggcatctcctctaaggccatgtccatcatgaactccttcatc

SEQ ID NO: 17740 - DNA, 311 bp, Zea mays
ggtgtagcttgccactctcaccaatcaagttttcatgtctgatctcgacattcagatcccaactgccttcgatcccttcgctgaggccaatgctggggactctggtgcggcacagggtcaaaggactacgttcacgtgcgcatccagcagcgtaatggtcgcaagagcctgactaccgtccagggattgaagaaggagttcagctacagcaagatcctcaaagatctcaagaaagagttctgctgcaatggtacagtggtccaggacccagaacttggacaggtcattcagctccagggtgatcagaggaa

SEQ ID NO: 17741 - DNA, 312 bp, Zea mays
acacgcccgtccgtcagccggaagccgatgccggcgccgggcagcgacgagtacgcggactggagcgcaaccggagaaggtgttcgtgcgcaccatcaccagccagttccaggccctcgtcggcatctcgctgctggagatcctgtccagccactcctccgacgaggtgtacctcggccagcgcgacaccaaggagtggacgtcggacgccaaggcgcaggaggcgttcaagcggttcggcgcgcggctgaccgagatcgagaaacgcgtcgtcaccatgaacgcggaccctcgcctcaagaaccgaaacgg

SEQ ID NO: 17742 - DNA, 312 bp, Zea mays
cattggacgcgctgtctgtatgcatgactgttaacgggtgggtgttcatgatcgcagtagggttcaacgccgctgccagcgtgagagtgagcaatgagctcggcgccggccaccccaagtccgcgtatttctcggtgtgggtagtgaccgcgctgtcgacgctcatatctatcatgctcggcgttctggtcctctgcctgcgcaactacatcagctacttgttcacggagggcgaggtggtgtccaacgcggtggcggatctcctgccgctgcttgccgtcacgctcgttctcaacgggcatccagcctgtg

SEQ ID NO: 17743 - DNA, 309 bp, Zea mays
cggacggtgggtgtcgtgccactacatccagaaggggctcttcttcccggcacccgacctgcccatgtcctcggtcgtgtcgctgctcctgtcctcgctgtcgcgggcgctcgccgtcgtcccggccctcgccggccgcttcgtcacgctgcccgacgaccgcatcgtcatccgctgcaacgacgcgggcgtggacttcctccacgccgtcgcacccggcctgtcgcttgacgaccttctcgtccctgacgccgacgtgccgaccaagcacactaaggacctgttccccatggaccggaccgtgagcta

SEQ ID NO: 17744 - DNA, 312 bp, Zea mays
aacgcacacacagcccggtccccgatctccgatcccctcgtcgatccaagatgcagatcttcgtcaagaccctcactggaaagactatcaccctcgaggtggagtcttctgacaccattgacaacgtcaaggccaagatccaggacaaggagggcattcccccggaccagcagcggctcatcttcgctggcaagcagctcgaggacgggcgcacacttgccgactacaacatccagaaggagagcaacctccaccttgttctccgcctcatgggaggcatgcagatcttcgtcaagaccctcactggaaaga

SEQ ID NO: 17745 - DNA, 306 bp, Zea mays
gacgtagccgatgacaaggccgtcatccccgcgaccgacccgccgccgccgccgccgccggccgacgactccaaggcactggccatcgtcgagaaagttgcagatgaacctgctcccgagaagcctgcccctgcgaacaagggggctccaatgacagggatctcgctcttgcaagggtggaaacagagaagaggaactccttgatcaaagcttgggaagagaatgagaagaccaaagctgagaacaaggctgctaagaaagtatccggtattctttcatgggaaaacacaaagaaagcaaacatag

SEQ ID NO: 17746 - DNA, 113 bp, Zea mays
cggacggtgggcgtacgcgtgggcggacgcgtggagtccacctagctgaccttgagacacaggtcgaccagctgcgaggcgagaacgcgtcgctcttcaagcaactgacggac

SEQ ID NO: 17747 - DNA, 305 bp, Zea mays
cccacgcgtccggtgaagtcagcatatctttgacactggatccatcgaaactatggagttgtgaattggttcagcacaaaaatgaacttgatgatgtcattgaagagcttgagaagatagcagttgttcatctactgcagaacaggtcaataatatctttaatttgaaatgtgcagaggtcgtctttgattcttgaaaaggctttcaatgttctacgaagaaacggtgtcaatgtccagatgatatcgcaaggggcgtccaaggtgaacatttccttggtggtccatgacagtgaggcaaaacag

SEQ ID NO: 17748 - DNA, 304 bp, Zea mays
tgtgccttgaccgtatccgcaagcttgctgacaactgcaccggcctccagggcttcctggtcttcaatgccgttggtggtggcaccggctctggccttggttctctcctccttgagcgcctgtctgtggagtacggcaagaaatccaagctgggcttcactgtgtacccatctccccaggtgtcaacctctgttgtggagccttacaacagcgtgctctccactcactcactgctggagcacactgatgtctccatcctgctcgacaacgaggccatctatgacatctgcaggcgctccctcga

SEQ ID NO: 17749 - DNA, 306 bp, Zea mays
gcaaagcgaagctgcgcacagagatctagctgagctactagctatagcagcagctgctgcaggtctcctgacatggcgaacaggacatcgaagcatcggggcccgatgccggcgagttctcggccaaagactacacggaccctccgccggcgccgctcatcgacgcggatgagctcaccaagtggtccctctaccgcgcggtcatcgccgagttcatcgccacgctgctcttcctctacatcaccgtggccaccgtcatcgggtacaagcaccagacggacgcggcggcgtcgggccccgacgcgg

SEQ ID NO: 17750 - DNA, 190 bp, Zea mays
tctcaatattcctaagcttattcgagcctgtgatgaacagcagcactggaaagaacttacctacctgtacatacagtatgatgaatttgacaatgcagtcaccactattatgaaccactctcctgatgcatgggatcatatgcagttcaaggatgtttgcgttaaagttgcaaacgttgagctatattac

SEQ ID NO: 17751 - DNA, 311 bp, Zea mays
cgtggacgcatcgtcatcattcgagcagaggggagagagagagagagagagagagagatgaaggagggcacggcgaactgcatcgacatcctcatcgccatcatcctcccgcctctcggcgtcttcctcaagttcggctgcaaggtcgaattctggctctgcctcctgctcaccttcctcgcctatctccccgggatcatctacgcgatatacgttatcaccaaggactagccagctagcgccgtaaaccgggacaaggtgagagagctagctgatcagccagcggaggtaatggagatgaactgctgaga

SEQ ID NO: 17752 - DNA, 182 bp, Zea mays
cgagttgccactgataacacgatttttgcaatgccagacacagctctaggcctctttccagatgtaggggcctcttattttctatctcggctaccagggttctatggagaatatgttggtctaactggtgccagattggaatgttgcggaaatgcttgcctgtgcgctggcaactcattttg

SEQ ID NO: 17753 - DNA, 142 bp, Zea mays
ctttattatgagatgactgatgagtcactgaagaactacaagggtgagagggatggtaaccaatacttgatcaaccttattgactcacccgggcacgtcgatttttcttcggaagtcacagctgctcttcgcatcaccgatg

SEQ ID NO: 17754 - DNA, 307 bp, Zea mays
cccctcgcctcacctcacctcacctcgccgactagggttttgtaccgccgtggatctcgccgtccccgccatggacgtctcgcacgccggatcctccgtcgccggcgaggctccgacgaccggggagcaccggatggggactaccatcgtcggggggtgctacgaagggggcgtcgtcctgggcgccgattgcaggaacagcactggaatgtatgtacgcaaccgtgcttcagacaagattactcaactgacagacaatgtgtatgtctgtcgctctggatctgctgctgatacacaagtcatttcg

SEQ ID NO: 17755 - DNA, 136 bp, Zea mays
gcttattggcaatcttgatccggatgttgatgagaagctcctctatgataccttcagtgcatttggagtgattgtcactaatcctaagataatgcgagaccctgacacaggaaattctagaggctttggccttgtg

SEQ ID NO: 17756 - DNA, 102 bp, Zea mays
  unsure (1)..(102): unsure at all n locations
ccccacgnctccgacgacggtggncgaaccagtgggcgcgcatctcgtcgctgctcgtccgcaagtccgccaagcagtgcaaggcccgctggtacgagtggc

SEQ ID NO: 17757 - DNA, 206 bp, Zea mays
gccgcacccaacccctccctccgccccgcgcttcgcctgggtaccggcgtcagacgcgccccgtcgcgtccaggaacacgcagagcagtaacccatccatcggggatcaccaggggagcaagatgtcgactggcgccgcccccaagattgcccgctcccagatccggggcaagctatcactatcagacgaccgccgctccggtggc

SEQ ID NO: 17758 - DNA, 230 bp, Zea mays
acctgccatgtcatgtaagtccagacatccttgccttggctgttgaagatttctgttcttctcaatccatttaccaggacgaactacagaacatcattagttgggagacagagaataggatggaccagctacaatttgtgcggcaaaggctggcatattgctatctcgctgctgctaccaccatatcccctcacgaattgtctgatgctcgccttgcatgtgccaaaagc

SEQ ID NO: 17759 - DNA, 290 bp, Zea mays
acgatagaattataggggctcactttttcagccctgctcatattatgcccttgcttgacattgttcggacggagaagacatcaccacaagctatccttgatctcatcaccattgggaagataataaagaaagtcccccatttggggtgggcgaaagccccggggttggtgttgaaagggagaattttttccttaaaaagggggttcatccttcaggtaggccgggaatgatggttcagaattgatcgagtaatagccctttggcatgcaatgggacttttcaatcaagat

SEQ ID NO: 17760 - DNA, 137 bp, Zea mays
cctcgcgcggcgaccacccgattcgaagcgtgcggagagaccgaagaagcgggagacatggctcgtaccaagcagactgctcgcaagtccacgggagggaaggctcccaggaagcagcttgccaccaaggctggccg

SEQ ID NO: 17761 - DNA, 123 bp, Zea mays
cccaactcgccgccgccgctgccaacgccgcctgctgccgcagccgccatgggggcgtacaagtatgtgtcggaactatggaggaggaagcagtcggacgtgatgcgcttcgtgcagcgcgtg

SEQ ID NO: 17762 - DNA, 307 bp, Zea mays
cccacgcgtccggcaggatggcagggtcctcaagttcattgggatgcaagtggaagtaagtaagtacacggaaggtaacaaagatactgctcttcgtccaaatggattgccagagtcactcatcaaatatgatgcaaggcagaaggatcatgctcgtagctcagtctcggagctcctacttgccctgaaggatccacggtcactgtcagaatcaagaaacaataccttaaaaaggagatccaggaatcagcaggttcagctctagttcccggcaagagaagctccgaaactggatcccgtcgtaact

SEQ ID NO: 17763 - DNA, 332 bp, Zea mays
cacaaacacaagtcgtcgtaggcagcgagcgtctctcctctcccacgcatcgcgccaaggaagagagagagatcgccgctccccttctcggcgtcggtggtgcgggtgccctccctcctcgagcgagatctgtctggtcacagatctatctgacaaaatggtgaagatctgctgcatcggtgctggctatgtcggtggcccaaccatggccgtcattgccctcaagtgcccagacattgaggtcgtcgtcgttgacatctccaagccccgcattgaggcctggaacagtgacaccctgccaatctacgagcctggtctcgatgatgttgtga

SEQ ID NO: 17764 - DNA, 331 bp, Zea mays
tcgacgcgtggcgcgacgcgtgggccctcaaggactccaagacgcttctcttcggcgagaagccggtcaccgtctttggcatcaggactcccgaggagaccccgtggggtgaggctggtggtgagtatgtcgtggagtccaccggtgtcttcactgacaaggacaaggctgctgcacatctgaagggtggtgccaagaaggttgttatctctgtcccaagcaaagatgcacccatgtttgttgttggtgtcaatgaggacaagtacacctccgatgttaacattgtttccaatgctagctgcaccacaaactgccttgctccccttgctaa

SEQ ID NO: 17765 - DNA, 207 bp, Zea mays
gtgtttcctcagtggactagtgtgaagctgtgcttagcgtacggatagggaggaaggacaaggcaaggcaactgatggcggcgggcggcggaggcggctcggcggcgccgttcgtgtggaagacgtacacgatggtggaggaccctgggacggcaggggtgatcggctggggcagcggcaacaacagtttcgtcgtcgccgacccct

SEQ ID NO: 17766 - DNA, 304 bp, Zea mays
gcagcctccaaagccactcccaaacccccgcttccagaaccttctcgaagctccccgccgcctcctccactcgcaccgatggcgaaggaaccaatgcgcgtgctcgtcactggcgccgcagacaaattggatatgccctggttcccatgattgctaggggtgttatgcttggtgcagaccagcctgttattctgcacatgcttgacattccgccagcagctgaagcccttaatggtgttaagatggagtgggtgatgctgggttcctcttctgaagggagttgttgctacaactgatgttgtgg

SEQ ID NO: 17767 - DNA, 328 bp, Zea mays
cccacgcgtccgcccacgcgtccgcccacgcgtccgaaattgaccatctgtgaaggagaagatggcactgaatcatcaaatggagatgtgttgatctttccagatatgatcagatataaagggctgacccattttgacgtggacaactttgttgaagaagtgcttgtgaaggatattgactggcttcctagatctcctgagcctatgagtggttcctatatttttgtttgctcccatggaagcagggacaaaaggtgtggtgtttgtggacctgctttgattaaaaggttcaaggaagagataaatgaactgggacttgatgatcagg

SEQ ID NO: 17768 - DNA, 321 bp, Zea mays
cggacgcgtggctccaactacaacagggccatagtcgagactgtccaaatgggctatggcctcgctgaagtgatctatgccgtgacgaacaacggcgtccaaggccgggtcgctgtcaaacttgctcgcctgccggtgtccaaagccggagaagaagacgccaccgccattctcgggaggatcgttgctcgcagcaagctgttcgacgtcggctgcgtgctcttctacaaagagggtgacaatggagtgagcgtgcgaccgggggggctgattcagctggcgagggaagcgctcgccgtgccgctgcacatgccgctgacg

SEQ ID NO: 17769 - DNA, 301 bp, Zea mays
atatgagcaagcagcccagattgaagtacccatggtggcccgtcttatgcgttactatgctggttgggctgataagatccatgggctcattgtgccggctgatggcccacaccatgtacagatcttgcatgagcccattggagttgcaggtcagatcatcccatggaactttcctcttctgatgtttgcctggaaagttggccctgctttggcatgtggaaatactctcgtgctcaagactgctgaacaaacccctctatcggctttgtatatctccaaattgttgcatgaggctggactg

SEQ ID NO: 17770 - DNA, 326 bp, Zea mays
cccacgcgtccgcccacgcgtccgcggacgcgtggtgccgccgccaccccacgcctgcagccatgccgcccaagctcgacccgtcgcaggtggtggaggtgttcgtccgtgtgaccggactcgacgtaagcgcggcgtcttcgctggcccccaagatcggtccgctcggtctttctcccaagaagatcggagaggacatcgccaaggagacggccaaggactggaagggcctccgcgtcaccgtcaagctcactgtccagaaccgacaggccaaggtctccgtcgttccctctgccgcggccctcgtcatcaaggcgctcaaggag

SEQ ID NO: 17771 - DNA, 323 bp, Zea mays
cccacgcgtccggcagccgccgttgctgctgccgcgtccacagaatggggggtttcgtgaagacccataagaccaatgcgtatttcaaacgtttccaagtgaaattcaagagaaggcgggcttgcaagacagactacagggccaggataaggctgattaaccaagacaaaaacaagtacaacacacccaaatacagatttgttgtgcgatttaccaacaaggacatcactgcacaaatcatatctgctagtatagcgggtgatatggttcttgcttctgcctactctcatgagttgccacgatatggtcttgaagttggtctg

SEQ ID NO: 17772 - DNA, 325 bp, Zea mays
cggacgcgtggcgtgacgcgtgggggcaggttctgctggtaacaagttccggatgtcactgggtctaccagtggcagccactgtgaactgagctgataacacagtagccaagaacctttacatcatttctgtgaagggaatcaaggggcgccttaacaggcttccttctgcctgtgttggtgacatggttatggcaactgtgaagaagggaaagcctgaccttaggaagaaggtgatgccagctgtcattgtgaggcagcgcaagccatggcgccgaaaggatggtgtctacatgtactttgaagacaatgctggagtgattgtg

SEQ ID NO: 17773 - DNA, 324 bp, Zea mays
gcttgaggagagtgatcacatacgtcacggtcgccacacatgctccatctgcctgtaccctatcattggttcacggtttaaggaaacaaaacactccttcagcctgtgcaaccggtgctacagtgaagggaaggttccgtcagcgttcaagttggaggagtacaggttcaaagaatacggtaacgaatccgaggccctcattgataagtgcatgtgcttcaatttgcattctaagaagctggaagctgatgcttgatcattcaaactttgatctcgagtgctcaagcatgaatctgtgtatttacctaggtgcaaagatgtcta

SEQ ID NO: 17774 - DNA, 320 bp, Zea mays
cttgattgttccaggtattagcagtcgaccggttcctcggagcacgatgaagtttgttgctgcctacctgcttgctgtcctcgctgggaacgccagcccctccgctgacgatttgactgccattctggagtcagttggctgtgaagttgacaatgaaaagatggaactcctgctgtcccaactgagcggtaaggacatcaccgagctcattgccgcgggcagggagaagtttgcttcagtcccatgtggtggcggcggtgtcgctgttgcggcagctgcacctgctgctggcggactgctcctgcagctgaggcaaagaa

SEQ ID NO: 17775 - DNA, 320 bp, Zea mays
cggacgcgtggcgtgcccgtctggtccacggggatcatctactacgtcgccgtggtgcagcagtccacgtacgtggtgctctcggcgcagcagtccgaccgccacctcggccgcgccggttccagatccccgccgcgtccttcaccgtcttcgccatgctcgcgcagacgctgtggatccccttctacgaccgcctcctgctgcccaagctccggaagataaccggcaaggaggaggggttcacgctgctccagcgccagggcatcggcatcgcgctctccactgtcgccatggtcatctcggccatcgtcgaggaccgg

SEQ ID NO: 17776 - DNA, 323 bp, Zea mays
aacaagggcctgaacccaggaatggtggttctgcttgtggttgcaagcttcctgctgatcttctttgtggggaactatgcgctgtatgtgtatgcgcagaagacgctcccgccaaagaagaagaagcccgtgtcgaagaagaagctgaagaaggaaaagctgaagcagggggtctctgcgccgggagagtaaacggccatgctgccgatcctcccgtccagagctcctattcacatgattattagagaaaaaaattatatatatataccagatggagccgtagtgttggagtaactttgttctgtagatgctctgtctttaat

SEQ ID NO: 17777 - DNA, 251 bp, Zea mays
ctcaagtggctggagcgcttcgcctacatcaacaccaccatctaccccttcacctcgctcccgctgctcgcctactgtaccctgccagccgtctgcctcctcaccggcaagttcatcatgccgtcgatcagcacgttcgccagcctcttcttcatcgccctcttcatgtccatcttcgcgacgggcatcctggagatgcggtggagcggggtgagcatcgaggagtggtggaggaacgagcagttctgggt

SEQ ID NO: 17778 - DNA, 315 bp, Zea mays
gattctattgacagaattgtagctggtatggaagggactgtgatgacagacgggaagagcaaaagtcttgttgcttaccatgaagttgggcatgcaatttgcggaactttgacgcctggccatgatcctgtccaaaaggttaccttagttccaaggggtcaagctcgtggtcttacgtggtttatcccgatggatgacccaacactcatctccaggcagcaactttttgccagaattgttggcggccttggtggtagagctgctgaggaggtcatatttggagagcctgaggtgaccactggagctgctggtgac

SEQ ID NO: 17779 - DNA, 319 bp, Zea mays
cccacgcgtccgcccacgcgtccgcccacgcgtccgcccacgcgtccgcgagcacgtcatgagcgcgctgccgccggacatcggccgcgaagactggctgcaggcgctgccgcgcgcgctcgtcgccggcttcgtcaaggccgacatcgatttccagcgcaagggggaggtgtcgggaaccacggcgacactggtggtcatcgatgggttcacggtcacggtggcgtcggtgggtgactcgcgctgcatcctggacacgcagggcggcgagttgcagctgctaaccgtggaccaccacctggaggagaatgcagaggag

SEQ ID NO: 17780 - DNA, 303 bp, Zea mays
cccacgcgtccggcaggctcgtggccagggtcgccctgcagagcgaggatgtcgagctcgtcgccgtcaacgaccccttcatcaccacggattacatgacctacatgttcaagtacgacaccgtgcacggccaatggaagcacagcgacatcaccctcaaggactccaagacgcttctcttcggcgagaagccggtcaccgtctttggcatcaggaaccccgaggagatcccgtggggtgaggctggtgctgagtatgtcgtggagtccaccggtgtcttcactgacaaggacaaggctgctg

SEQ ID NO: 17781 - DNA, 306 bp, Zea mays
ataggaatgatatgtgcctgcctcaatgtgctcatgtacgggtcaccccttgcttctatgaaaacggtgatcacgacaaagagcgtggagttcatgccattcttcctgtccttcttcctcttcctcaacggaggcgtctgggcaacgtacgcggtgcttgaccgcgacatcttcctcgggatccccaatgggataggcttcgtgcttggcaccatccagctgatcgtctacgcgatctacatgaacagcaaggcctcccaatgcagcaaagaaacagcgtcctcgcctcttctggcctccgaccgg

SEQ ID NO: 17782 - DNA, 302 bp, Zea mays
  unsure (1)..(302): unsure at all n locations
cccacgcgtccgcggacgcgtggggagtggnctcaccgagatgggccgcaagttcttcgtcggtggcaactggaaatgcaatggaaccacagatcaggtcgagaagattgtcaaaacactgaatgaaggacaggttcccccttcagatgttgtggaggtcgttgtcagccctccttatgtcttccttcctgtggtcaagagccagctgcgccaagagttccatgttgctgctcagaactgctgggtgaagaagggaggtgctttcactggtgaagtcagtgctgagatgctcgtcaaccttg

SEQ ID NO: 17783 - DNA, 311 bp, Zea mays
gctggagctcaattccccaagagaccagagaaacctgcacctttgtttaatggtcagtctcaagcagcaaggaatatgcgtagtcctgaccaacaggatgatgcagaatcttctactgccaatgatttccctgctttgagcatgtcagagattcagaatgctcgtggtattatggatgtacttgccgagatgctgaatgctttaggccctggaaacagagagggattaaggcaggaggtaattgtggaactcgtggaccaatgccgcacttacaagcagagagtagtgcagctagttaattctaccacgga

SEQ ID NO: 17784 - DNA, 315 bp, Zea mays
  unsure (1)..(315): unsure at all n locations
ctcctggtgggcgtgaagagggcgatgacgttcgtgccccgccgccggaagaagacggcggcgttgccgtcgtcggcggccctgaagaccggctgggtcatgcacgagtaccgcctcgccgcgccgctgcacaagaacggctgcagcctggctcaggcgcaaggagagtgggtcgtctgccgcatcttccagaagagcgngcaacaggccgaggaggaggcagcgagaagcgtcgccgccgtccgctagcagcagctgcgtcacggatgcgtcgagctcggacctggacgaggtcagcagctagctagctagcta

SEQ ID NO: 17785 - DNA, 292 bp, Zea mays
cccacattctgggcaaaaacggaacagggtgttgctcaggcaatcattcgatctgtcattgatttcaagagatatccatggccaaaggtgtctgataatggcaaagagcttgtcagaggaatgctggatccggactcaaaacgacgactgacagctcaccaagtgcttggtcagccatggttgcagaacattaaggaggctccaaatgtcaatttgggtggaactgtataaggccagactccaacaattctctgagatgaacaagttcaagaagcatgcacttagggttata

SEQ ID NO: 17786 - DNA, 300 bp, Zea mays
gtgatccctggatgcccaaatgccgcgtgtggtcaaggcctcagtgaccgctgtgtgaggcatggtggtggcaggagatgtagattcgaagggtgtgcgaagggcgcacaggggaacaccgattactgcataaggcacggtgggggaaggcggtgcaagtttgaaggttgcacgaagagtgcgcagggacggacagatttctgcattaagcatggtggtggcagccggtgcaagttccaaggatgcggcacgagcgcaaaatggggaacagatttctgctctatccacaggaaggctttg

SEQ ID NO: 17787 - DNA, 297 bp, Zea mays
tccacgcgtccgcggacgcgtgggtgtacccaggtctgcgtcgggcccttgccggcgatgagaacccgtcagttccaaagatggctcgtcgtggattgatggcacaggccttaagcaaactggatgtgacgaagcttcaccccctgtcacctgaagttatctcacgccaagcaacaatcaatatgggtacattggccatgtggctcatggaaagtccactgttgttaaagctatatctggtgttcagactgttcggttcaagaatgagctggaacgtaacattactataaagctggg

SEQ ID NO: 17788 - DNA, 300 bp, Zea mays
ggatatgccctggttcccatgattgctaggggtgttatgcttggtgcagaccagcctgttattctgcacatgcttgacattccgccagcagctgaagcccttaatggtgttaagatggagttggttgatgctgcgtttcctcttctgaagggagttgttgctacaactgatgttgtggaagcctgcactggggtcaatgtggccgtcatggttggtggattccccaggaaggagggaatggaaaggaaagatgttatgtcgaaaaatgtttcaatctacaaatcccaagcatctgccctt

SEQ ID NO: 17789 - DNA, 311 bp, Zea mays
actcgaaaccttttcttgtgctctgtctgtgtgtttccaaagcaaacgaaagaggtcgaggatgtcttgcagctgcggatcaagctgcaactgcggatcaagctgcaactgcggcaagatgtaccctgacctggaggagaagagcggcgggggcgctcaggccagcgccgccgccgtcgtcctcggcgttgcccctgagacgaagaaggcggcgcagttcgaggcggcgggcgagtctggcgaggccgcccacggctgcagctgcggtgacagctgcaagtgcagcccctgcaactgctgatcctgctgcg

SEQ ID NO: 17790 - DNA, 294 bp, Zea mays
cgagttcagatcgagcgcgcgccaagcaagtcttccggccggccgcgaagagcgcaatcaagcaagacaagatggtgaagctcgccttcggaagcgtcggcgactccttcagcgccacctccatcaaggcctacgtggccgagttcatcgccaccctcctcttcgtcttcgccggcgtcggttccgccatcgcctacgggcaactgacgaatggcggcgcgctggacccggcgggcctggtggcgatcgcgatcgcgcacgcgctggcgctgttcgtgggcgtgtccgtcgcgg

SEQ ID NO: 17791 - DNA, 286 bp, Zea mays
tttcacactttttcagagaagattacacatactttgctaaggtgtgctttgataacttcggcgacaaggtgaagaattggttgacctttaatgagccccagacatttacttccttttcctacggaactggggtctttgccccaggtcggtgctcacctggactagactgtgcctacccaactgggaattcactcgtcgagccttacactgctggccataacattctcctagcccacgctgaggctgttgatctttacaacaagcattacaagcgcgacgacacccg

SEQ ID NO: 17792 - DNA, 293 bp, Zea mays
cggacgcgtgggcggacgcgtgggcggacccagagatttggaagaaggggccagcatttggaatgcctggggtgcatgttgatggtatggatgtcctgaaggacagggaggttgctaaggaggcaattgagagggcaaggagaggtgaagggccaaccctagtcgagtgtgaaacatacaggttccggggtcactcccttgcagacccagatgagctcaggaagcctgatgagaaaacacactacgccgcaagggattctatcacggccttgaagaagtacatcatagagcag

SEQ ID NO: 17793 - DNA, 297 bp, Zea mays
  unsure (1)..(297): unsure at all n locations
cggacggtggngctgacgcgtgggtgaggaactaattgctaagaggcagcagcttgatgctgtgaattttgcttacgaggctgggcttcaggagaagttccctccagttcctcttctggagtcctacctggaggactctaagaagacgtggaccgctgcttcagataattcaagcactagcagcagcgggcaatcagggagcaacgcgaacaagaaagagcagtctgcactgagagctgtcatcaagtgtgtcgaggaccgtaatcttgaagccgagtttccactggaggatctccg

SEQ ID NO: 17794 - DNA, 304 bp, Zea mays
cgcacctctctccatctccctgctcctccgcctccttcttgatccagccaagccagggatcgccatgtcggactcggaggagcaccacttcgaatcgaaggccgacgccggagcgtccaagacctacccgcagcaggctggcaccgtccgtaagaacggcttcatcgtcatcaagaaccgcccctgcaaggttgtggaggtttctacctcaaagactggtaagcatggccatgccaaatgccactttgttgccatagacatattcaacgggaaaaagcttgaagatattgttccttcatcacac

SEQ ID NO: 17795 - DNA, 304 bp, Zea mays
ggaccgtggggtgcacagtgtaggtcttcggctaaatgccgtggaggccgtgagccactccatcgcccccaggcctgcagcactgttcgacgaaattcctgttagggacgtggtcacctgctcagctgcaatttaccgacatgcgaggagcgggctgttccatgagtcagctgagctgtttgttggcatgatgagggcagttagaataatgtatgacaaaaactctggaaggtcaagaggctttggatttgttcatttctcaaatgataatgaagctaagtgtgccaaggatgctatggatggg

SEQ ID NO: 17796 - DNA, 301 bp, Zea mays
ggaccgtggtctgaatgtactgctgaagaagcatataactggactcatggtcgtgtaatatttgccagtggcagtccattacgccctgtggagtacgatgggaaggtttttgtacctggacagtcgaacaacgcctacattttccctggatttggcctcggtcttgttatctctggagccatccgtgtccacgaggacatgcttcttgccgcctcggaagcactagctgctcaggccacacaggagaacttcgataagggatcaatcttcccgcccttcaccaacattagaaagatctctg

SEQ ID NO: 17797 - DNA, 302 bp, Zea mays
ggaccgtggcatctacaggcatcacaaagcaatcctgtcatgccttctgatgccacaaatgccggttccgaagaaataatacccttccgtggcgtgaacattgtgacaccatcgcaaaagctattggctagccaactgtcttgtgatgtatctcaagggaaaagccttcttgtgactggtccaaatggtagcggaaagagttccatctttagggtgcttcgaggcttgtggcccattgcttctggtagtcttagcaagccatctgaaggaatttttaatgttcctcaacgtccatatacttg

SEQ ID NO: 17798 - DNA, 305 bp, Zea mays
gcgcgacgcaaaaccctagcccatccaccgatccttgtcatggcggccaccaccagccaggcgagcctcctcctgcagaagcagctcagagatctcgccaagcacccggtggatgggttctcggctgggctggtcgacgatagtaacgtattcgagtggcaggtcaccatcatcggcccgcccgataccctatatgatggagggtacttcaatgcaataatgagcttcctagaaaattacccaaacagcccgccatcagtcagatttacctctgaaatgtggcatccaaatgtttattcagatgg

SEQ ID NO: 17799 - DNA, 306 bp, Zea mays
gcaggacaggtacgcgctccgcacgtcgccgcagtggctgggcccccagatcgaggtcatccgcgccgccaccaagtccatcgagcgcgaggtcaactccgtgaacgacaacccggtcatcgacgtccaccgcggcaaggcgctgcacggcggcaacttccagggcacccccatcggcgtgtccatggacaacgcccgcctcgccatcgccaacatcggcaagctcatgttcgcgcagttctccgagctcgtcaacgagttctacaacaacgggctcacatccaacctggccggcagccgcaaccc

SEQ ID NO: 17800 - DNA, 295 bp, Zea mays
ctcctctccgccgcccgccgcccgccgcagcagcacccaccgggcaagatgaagacgatcctggcgtcggagacgatggacatcccggagggcgtcacggtcacggtggccgccaagctggtcacggtggagggcccccgcggcaagctcacccgcaacttcaagcacctcaacctcgacttccagctgcaggaggccggccgcaagctcaaggtggacgcctggttcggcacccgccgcaccatggccgccatccgcaccgccatctcccacgtccagaagctaatcaaggggg

SEQ ID NO: 17801 - DNA, 214 bp, Zea mays
accagcgtccgggacctggtgcgcctctacatttcttctctctctgctcctccgcctccgcctgatccatccaagacagggatcgccatactggactcagcggagcaccacttcgaatcgaaggccgacgctggggcgtccaagacctacccgcagcaggctggcaccgtccgtaagaacggcttcatcgtgatcaagaaccgtccctgaaagg

SEQ ID NO: 17802 - DNA, 300 bp, Zea mays
caagctctactcttcttctgtactgaacgtgtgactagataacaataagcgtgaaccatggcggacgagtacggccgcagcggctacggcaggtccggcgccggcgacgactacgacagcggctacaacagcaagtccggcactgatgactacggccgtggcgaaggtggctacaacaagtcgggcggcgatgacgactacggccgcagcggcggcgactgggtacggcaggtccggcggcgacgactacggccgtggcaccggcggcggtggctacaacaagtccggcggcggcgatga

SEQ ID NO: 17803 - DNA, 302 bp, Zea mays
taccacgcgtcctatcagcgtccgggacctggcccccaaccgcggatcaatccgcagcatcgatggcgcccaaggcggagaaaaatcctgcggcgtagaagcccgcggaggatgagcccgcgaccgagaaggcggagaaggctccggcagggaagaagccgaaggtatgaaacgcctccccgcgggcaagtccggcgccggcgagggcaagaagggcaagaagaaagccaagaagagcgtggagacctacaagatctacatcttcaaggtgctcaagcaggtgcaccccgacatcggcatct

SEQ ID NO: 17804 - DNA, 301 bp, Zea mays
cgcagcctttcgagctctactccaccccctcgatctcgaagcgcgcagcagcagtcaggcggccatggacgcgagcgcaccggagccggcgggaaggcgaagaagggcgcggccgggcgcaaggccggcgggccgaggaagaagtcggtgacgaggtccgtcaaggccgggctgcagtttcccgtcggccgcatcgggcggtacctgaagaagggccggtacgcgcagacgtcggcacgggcgcccccgtctacctggccgccgtcctcgagtacctggccgccgaggtgctggatctggc

SEQ ID NO: 17805 - DNA, 301 bp, Zea mays
cgtcacctgactcacacctccactcacctccggtccaccaacctctgccggccatggcggctgcggcggcgcagaagctcctcgaggcgagcacgaagatcatcggcgtcgggcgcaactacatcgcccacgccgaggagctcggcaacccgatccccaaggagcccgtactattcctgaagccgacctcgtcgttcctccacgctggcgtggccaccgccgccgtcgagatcccggagccgctcgaatcgctacaccacgaggtcgagctcgccgtcttcatctcccggcgtagtcgtga

SEQ ID NO: 17806 - DNA, 298 bp, Zea mays
  unsure (1)..(298): unsure at all n locations
aataccacaacctcttcaatttcatcaatggaaagaacattaaaataatgaaccttggaggagatggtcaaggtgcaagtggtgtagttacagatgttctacgagacacnnnnnnnnnnnnnnnnnnnccacatctagagcgtattaagaatcaggccggggatgaggaaagcgatgaagaggatgaagattttgttgcagacaaggatgatagtggatctcctactgatgactcaggtgatgaggaatcagatgctagtgatagtggtggtgaaaaggagaaatcatccaagaagga

SEQ ID NO: 17807 - DNA, 298 bp, Zea mays
cacacggtcacaccgcctcaaactcgcgctgcccgtcgcccccaagcctcggttccgccggcgcgcgagaggattcgagctgggtcttgggtagcctctcaccgtctcacgatgccgccagcacccaagtccggcgacgccctcttcgccagcgtggatcgcgtcaatgcggagtgttcacgctcacgtacggcgccatcgtgcggcagttgctcacggatctggaggaggtcgaggaggtcaacaagcagctcgaccagatgggttacaacgttggaacacgattggttgatgagtt

SEQ ID NO: 17808 - DNA, 275 bp, Zea mays
ccacagatacgtgagcacgcacgacgtcgggtactgggcgaacagcttcttgcaagatcttgagcggatttgcctcgaccataacaggaggcgttgctggggcataggatttgggctgaagttcagggttgtggccctcgacccaaacttcaagaagcttgcggtggagcacttggtctcggcctaccggaggacgaagaagcgcgtcattctcttagactacgatgggacgctgatgccgcagacttggctcggtaagagtcctacctcaagga

SEQ ID NO: 17809 - DNA, 294 bp, Zea mays
cccacgcgtccgcccactcgtccgcccacgcgtccgcccacgcgtccgcccacgcgtccgcaaggtgtgaaggttgaatcgtcagcagttccttcagccccaactccagatgttgctgaagcacaggccccagttgctgaggaggacgacgacgatgatgttgacctttttggtgaggagaccgaagatgagaagaaggctgctgaagagcgtgctgcagctgccaaggcttctggcaagaagaaagaatctgggaagtcatcagttttacttgatgtgaagccatgggacgat

SEQ ID NO: 17810 - DNA, 293 bp, Zea mays
atcatcaacaccttctactccaacaaggagatcttcctccgcgagcttatctccaactcttccgatgcgctggacaagatcaggttcgagagtctcactgacaagagcaagctcgatgcgcacctgagcttttcatccaccttgtcccagacaaggccacgaacacgctctccatcatcgacagcggcatcggcatgaccaagtccgaccttgtcaacaacctcggtaccatcgccaggtccgggaccaaggagttcatggaagccgttgctgcaggcgctgatgtgtccatg

SEQ ID NO: 17811 - DNA, 290 bp, Zea mays
gtcaagctcctgctctcccgcggctacgcgtgcacgccactgtccgcgacccaagtaagtaacaagcatgcacaccccatgccgctctccagctgcttctgcgtttgcgtctgcgtgaacacgcgctgggagttggggccgggggactcatgcatgtcggccggctctctgcttcaaggtgatcccaagaacgcccacctgcaacagctggacggggcccgggagaggttgcgcctgttcaaggccgacgtgctcgaccgcgacggactggcgaccgcggtcgtagcgtg

SEQ ID NO: 17812 - DNA, 257 bp, Zea mays
caccatcacgggcgggctcgtcctcgtcaccatgctcatcggcaacatcaaggtgttcctgaacgcgaccacgtccaagaagcaggccatgcacacgcggctgcgcggcgtggagtggtggatgaagcgcaagaaactgccgcggagcttccgcggccgggtgcgccagttcgagcgccacgcatgggccgccacgcgcggcgtcgacgagtgccagatcgtgcgcgacctccccgagggcctccgccgggacatca

SEQ ID NO: 17813 - DNA, 295 bp, Zea mays
cttctacctcaagatgaagggtgactaccacaggtaccttgctgagttcaagtcaggtgcagagaggaaggatgctgcggagagcaccatgaatgcctacaaagctgctcaggtttgaccattgtgttcatactgataggatgacagtgcatatattgttaattgtggttctttcttgttggcttttggattgtaggatattgctcttgctgatctggctccaacccaccccatcaggctcgggcttgctctcaacttctcagtgttctactacgagatcctcaactcccctgac

SEQ ID NO: 17814 - DNA, 298 bp, Zea mays
gagcctcaagatgcctatggcttggagaagcttgcaaccgaggagctgtgcaagcactacaccaaggactttggcatcgagtgccgcgtcggccgcttccacaacatctacggccctttcggaacatggaaaggtggccgcgagaaggcaccggctgccttctgcagaaaggctcagatatccacggagaggtttgagatgtggggcgatggtctccagaccaggtccttcaccttcatcgacgagtgcgtggagggtgttctgagattgaccaagtcagacttccgcgagccagtga

SEQ ID NO: 17815 - DNA, 100 bp, Zea mays
cggacgcgtgggcggacgcgtggggtcgtggaacgtgacgaggtgcgcaacggcgctggaggaggctggctccgactacgagatcgtgcccatcaacttc

SEQ ID NO: 17816 - DNA, 292 bp, Zea mays
gtgtcatcacattggatcgtgtatctctgaaacaaaaggtggtagatgcaccagaaatcctggctgtaattggcaaagtacctcacctctccgagtttctcaactccctgtacaactgccagtataagtcgttcttcgttgcattttctggtctgacagagcaaatcaagttagaccgttatcttcagcctcatttccgctactacatgagggaagtgcgcaccgtggtatactcacagttcttagagtcatacaagagtgtgacaatggaagcaatggccactgcgttcgg

SEQ ID NO: 17817 - DNA, 292 bp, Zea mays
ggctcgtacgaagcagaccgcccgcaagtccaccggaggcaaggccccgcgcaacagctcgccaccaaggcggcgaggaagtctgcgccgacgaccggcggcgtgaagaagccccacaggtacaggcccgggacggtggctctgcgcgagatccgcaagtaccagaagagcacggagctgctgatccggaagttgcccttccagcgcctggtccgtgagatcgctcaggacttcaagacggatctgcggttccagagccacgccgtcctggccctccaggaagccgccgagg

SEQ ID NO: 17818 - DNA, 271 bp, Zea mays
tgcaatggtgcatgacaatgagatgatcgatggcaatggggtgatccatggtagcgagatgattcatggtagtgtgatgatacatggagatgagatgccccatggcaatgagatgatccatggaaatgagatgatccatgggactgagatggttgaaggcagtgagatgatccatggtcatgagatggttcagtgtaatgatctcatccacggtaatgagatggttgccgttaacgtcatggttaatggtgatgagatgcccatgttaatg

SEQ ID NO: 17819 - DNA, 207 bp, Zea mays
ggaccgtggtctggaccttggtcacatttcctttgcttgttttgggaggtattgctggcaaaaacagcaaaagtgaattccaagctccttgccgtaccaccaaataccccagggagattcctccacttccgtggtaccggagaactattccacagatggctatggccgggtttttgcctttcagtgccatatacatcgagctgtact

SEQ ID NO: 17820 - DNA, 291 bp, Zea mays
gtccagagccaccgtgagatctgcccgattccgccgcccggacccggggactccctcccctcctcgatccgttcgggcggccggccggcctagcttcaagtgcggggatggtgttctacttcaaggcgcggcccgaggccggcgactacaccatcttcatgggtcttgacaagtacgagaacgaggacctcatcaaatacggcttccccgaggacatctggttccatgtagataagatgtcctctgcacatgtgtatgtgagattgaatagaggtcaatcaatggatgaca

SEQ ID NO: 17821 - DNA, 289 bp, Zea mays
cggacgcgtgggcggacgcgtgggtcctgatgtcatggctatctatgatttcatttttctatgggatgaagaccttggagtggagaacttcaaccctagaaggtttcttgataactggtgtcgaagcttggaaataacacaacctgctctggaccctgatctatcaactgatatccaccatcgaatcacaatccgtaataagatggcaaaagttcacaggagaatatacgacaatcggcctagtatgaattgttctgacgagagctaaggacctccatgtacagggtgg

SEQ ID NO: 17822 - DNA, 276 bp, Zea mays
ggtgggttggcttctcctccccctccggttcgggttcgggttcgtgaggttctccggggttcggtttcgtgggtgatcggatcgagatggcggcgtcggatgttgagtaccgctgcttcgtcagcggcctcgcctgtgccacggacgaccactccctccacaacgccttcagcacctacggcgaagtcctcgagtccaagatcatcctcgatcgggagactcagaggtcccacggcttcggcttcgtcaccttctccacggaggaagcgatgctga

SEQ ID NO: 17823 - DNA, 285 bp, Zea mays
gttggcagttcccattcatcaagagacaagagatcaaggtcggggaagggaaaacataacattcgattctctcaactaccatctgatactggtagccagaatggtgacagcggaggtataaagtttagatccaagtacatgtcatctgaagagatcgaatcaatcttaagaatgcagcattctgcaagccacagcagcgatccttatattgttgattactatcatcaagcttgtatggcaaaaaggggtgccacttctaagcaaaagaccaatttctccccaaca

SEQ ID NO: 17824 - DNA, 284 bp, Zea mays
gctccgctcacgctgtggctcttctggacagccttcgacatcggcgaccctgacggggagtacaaggccccctttgccatcatgttccgggagatggccatcctcgggatggagggcttctccgcgctgccactgcactgccttgacatctgctatgccgccttcttcctcgccttggccaccagtctcctcaaggacgtggcgcccgcaaacgtgtccaggttcatccccataccgatcgctatggctgcgccgttctacgttggcgcctactttggcgtgga

SEQ ID NO: 17825 - DNA, 284 bp, Zea mays
cgttttctggtcgaagaggcacagagcatgacgtctcgcccaatgaaggggatgctgactggcccagtcacaatcctcaactggtccttcgtccggaatgaccagccgaggtttgagacttgctaccagatcgctcttgcgatcaagaaggaagtcgaggatcttgaggctggtggtattcaggttatccaaatcgacgaggctgcactgagagaagggctgccgctccgcaaggctgagcatgcattctacttggactgggctgtccactccttcagaattac

SEQ ID NO: 17826 - DNA, 288 bp, Zea mays
aaataattgacgagtgtgaactgccagaatttcttggtggcaaatgcaattgtattgaaggttgccaaagatctgacaaaggtccttggaaggatcccaacataataaagagagtcctcaatgacgaggcaaactacggcagacaaattgtgaccatatccagcattgatggaaaaataatacgttatgctaggccagatcacccaactagaaaagggagtgatgcatctgccgagtctggatctgaagtggaagatgtaacatctcctactgcatcaaggaacctga

SEQ ID NO: 17827 - DNA, 292 bp, Zea mays
cttcgagcggcactggggcatcttcacctacgacggcctgcccaagtaccagctgaacctggggtcgtcgaacgcgggcggcggtggcctcgtgagagccaagggcgtgaagtacctcgagaggaagtggtgcgtgctgaagccttctgtgaacctcaacgacccgaagctggccgacaacgtgggatacgcgtgctccatggcggactgcaccagccttggctacaagacgtcgtgcgggatgctggacatccgcggcaacgtctcgtacgcgttcaacaactacttccag

SEQ ID NO: 17828 - DNA, 290 bp, Zea mays
gattgaacatcagagaagcacatgttttctctacccatgatggctattctcttgatgtttttgttgttgatggctggcctgttcaggatgctgatggtttgcacaaagcactggaagcatccattctaagaaatgagggttcatggtctggttcatctcattcctcagccgctgaaagaacactgcccttccaagttaaaggtggtgagtgggaaatcgacaaacgacttctgaagatgggagggatggttgcttctggttcttgtggggacttgtatcacgggacttac

SEQ ID NO: 17829 - DNA, 325 bp, Zea mays
ggaggaggtggagaaatggcagcgagagggtgtgcgcatagtataccggcaccgggtgatccgggatggctacaaggctggaaacctgaaatcagccatgaactgcagttacgtgaaagactatgagttcgttgtcatcttcgatgctgatttccaaccacaggcggacttcctgaagcgcaccgtgccccatttcaagggaaaggatgacgtcgggttggttcaggcgagatggtcgttcgtaaacaaggatgagaacttgctgaccaggcttcagaacataaatctttgcttccacttcgaggtggagcagcaggtgaacggg

SEQ ID NO: 17830 - DNA, 326 bp, Zea mays
gagtacctcttcttcaccgtcggcctcggcctcttcaactgcaagccgggccagctctgcgccgggcccaacaacaacacccgcttcgggccagcatgaacaacgtctccttcgtcttcccgcagaccgactccctcctccacgcgcactactacaagatccccggcgtcttcaccaccgacttcccggcatacccgccggtgcagttcgactacacggggcagaacgtcagccaggccctgtggcagccggtccccgccaccaagctgtacccgctcaggttcggctccgtggtgcagctcgtcctgcaggacaccagcatcgtc

SEQ ID NO: 17831 - DNA, 324 bp, Zea mays
gcgcaccatccagttcgtggactggtgcccgactggcttcaagtgcggaatcaactaccagcctcccagcgtcgtccccggcggtgacctggccaaggtgcagcgtgccgtgtgcatgatctccaactccaccagtgttgtggaggtcttctcccgcattgaccacaagttcgacctcatgtacgccaagcgcgccttcgtgcactggtacgtcggtgagggtatggaggagggcgagttctccgaggctcgtgaggatctggctgcgctcgagaaggactacgaggaggtcggtgctgagtttgacgagggtgaggacggcga

SEQ ID NO: 17832 - DNA, 324 bp, Zea mays
gaagcagcagccaattcgctcgagttcagatcgagcgcgcgccaagcaagtcttccggccggccgcgaagagcgcaatcaagcaagacaagatggtgaagctcgccttcggaagcgtcggcgactccttcagcgccacctccatcaaggcctacgtggccgagttcatcgccaccctcctcttcgtcttcgccggcgtcggttccgccatcgcctacgggcaactgacgaatggcggcgcgctggacccggcgggcctggtggcgatcgcgatcgcgcacgcgctggcgctgttcgtgggcgtgtccgtcgcggcgaacatctc

SEQ ID NO: 17833 - DNA, 325 bp, Zea mays
cgcccgacggccgcctggactggggcccccacatgatctgccgcgacgacaccatatactcggacggcacggccaacctcgacaccggcgccgacttcgccgcggcgcccgacatcgaccacctcaacgaccgcgtccaggggagctcaccgactggctgctctggctcaagtcgtccgacctgggcttcgacgcctggcgcctcgacttcgccaagggctactcccccgaggtcgccaaggtctacgtcgacgccacggccccgaccttcgccgtcgccgaggtatggaacagcatggcgtacgacggggacaacaagcccgag

SEQ ID NO: 17834 - DNA, 324 bp, Zea mays
aaattacaatgtatcagtggctgaagtgcttattcctggtagcgaattgtcacagcatattagtactgctggtatggaagcaagtggaacaagcaacatgaaattctctctgaatggttgtgttatcattggcacccttgatggagctaatgttgaaataagagaggaggttggagaagataatttcttccttttcggtgccaaagccgatgaagttgctgggctgaggaaggacagagaaaatggcctgttcaaaccagacccacgttttgaagaagccaagcagtttataaggagtggcgcttttggcatctatgactatga

SEQ ID NO: 17835 - DNA, 321 bp, Zea mays
atcatcatatgcacacgcagccctatcaacgggaagctcactcctctccgtctgcaactgccaccaaacaatgcagcgatgcatattgtgctcgtccaggagtcctcaaaggtggctagatcatttgcacggccgtacggttcataaatcacaaacctttggcgaagacacggggggccttgagttctggtggagtgtgcttgtgcgtgtcgctcgaagcccgtacatcattggatcaggtcatgccggttgtgcggtcacgctgggtgtcagaagcaacctatcttaaacctcattcgtgtacatgtaaaaggatccccc

SEQ ID NO: 17836 - DNA, 320 bp, Zea mays
gtgggcaatggcaggagcaactgtgttcggtggtttttatgctttcttcatccaccaggaaaaaaccgcccagctggaacccccaaaaccataacgagggtgcccgtcctgctagccggtgtgcttgctgtgcgatcgtttggcatgtgcttgttgaggggttgctaggggattggagaggattgaagggattaaatctcctcctattcaattttgaataggaggggatttaatccccttcaatccccctcaaaccactagtaaccgaacgtggcctgagggggcgggcgagtctttatattgaatgaaactacataaaa

SEQ ID NO: 17837 - DNA, 320 bp, Zea mays
cccacgcgtccgcgtcctctcctctcctccccgggcccttcactccaccaacgaaccccacgcaggcagcagcacgcgcaagccgcaaggcaaggcacaaacactatgggccgggcatggcgacgcgggcggacgtggagaagggcgggccggcgaggaaggagcccggcaaggtgccgtcgccgctgtacccgcagcacgatggggagcgggagtgggtgccctggctcgtccccgtcatcttcgtcgccagcatcaccgtcttcgtcgtcaccatgtacgccaacaactgcccagcgcggcgcgacgccaagtgcgtc

SEQ ID NO: 17838 - DNA, 320 bp, Zea mays
gtcaccaggagttggggaggggcggaccccatgacgccggggagtacaagcagatgcccgacgacacgggcttcttccggcgcgagggcacttggagcaccgagtacgggcatttcttcctggcgtggtattcaggcatgctgctggagcacggcgaccgcgtccttgccgcggccgaggccgtgttcggcggcacgggcgcaacgctctccgccaaggtcgccggcatccactggcactaccggactcggtcccatgcggcggactcacggccgggtactacaacacgcgggaccgcgacgggtacgcgccgatcgcgc

SEQ ID NO: 17839 - DNA, 314 bp, Zea mays
ctattgcgcaagtgtgccctcgtcttctttgatgatatacttatttacagtgcaccttggaagaccatcttaaacatttacaacaagtgttcgagctgttgtccagagatgcctggaaggtgaagatgaacaagtgttcttttgcacaaaatcaggtttcttatttgggacatattgtgtctgctgctggtgtcgctacagatcctgccaaaatccaagctatagctgactggccaaaaccagcaaatgtcaaggaattacggagttttctgggccttgctggatactataggaagttcatccgtcactttggg

SEQ ID NO: 17840 - DNA, 316 bp, Zea mays
atctcgcgcacgctactgccggctgtcccgagtcccgaccaccgtcctccgctcccggacgtgaatccttcctcctaccgcgatggagaccttcccgtcggtgaagaacatcctcctactggactccgaggggaagcgcgtcgccgtgaagtactacagcgatggctggcctactctctccgcgaactggccttcgagaagtcggtcttcgccaaaacccagaaagcgaatgctggaacggatgagattgtaatgtttgatggtcaaattgtggtatacaagttcatccaagacctgcacttttttgttactggag

SEQ ID NO: 17841 - DNA, 307 bp, Zea mays
gacgaattggaatacggaaagcgaaagatgatggatctcgccgacccccagcagcagcagcggctcatcgccggcgcggcgctgctgctggccacagcggccttcctcaggctcatcctgggctcccgctccgggggcggcaagcgcctgccgcccaccatcccgggggcgccggtggtcggcggcctcgtcaagttcatgcgcgggcccatccccatgatccgggagcagtacgcccgcctcggcagcgtcttcaccgtccccatcatcacccgcaggatcactttcctcgtcggccctgaggtgt

SEQ ID NO: 17842 - DNA, 314 bp, Zea mays
cccacgcgtccggctaagtgatcatattgagcaaagactttcagagaggcttgagcaggacaggcaacagagggcgagcgcctctggaaaagttgctgaagaggtaccaggtgtgaaagggcttacagttagagtagtttcttcagccgaaagattactgcaagtccaaccacgttttcgtggtttttttaaacaaggaaagtatcctggggaatttccatacaaatcgaaggccattctcttgtttcaaaagatcgaaggtgtggatgtttgcctctttgccatgtatgtacaagagtatggctcagattgcc

SEQ ID NO: 17843 - DNA, 315 bp, Zea mays
caatgtttttggtactatggttgcatcttctctaatggacaaacaaggaaggaaaagccttctgataacaagcttttctggaatgggtgcttcaatgctactcctagcattgtccttcacctggaaagctctggcaccttattctggtactcttgctgttgttggcactgttctgtacgtgctgtcatttgctctaggagcgggccctgttccagcgctacttcttcctgaaatatttgcctcgagaataagggccaaggctgtcgcattatctctaggcatgcactgggtatctaactttttcattggcctgta

SEQ ID NO: 17844 - DNA, 308 bp, Zea mays
atacggacacgcgtccgcggacgcgtggcgaccgtggcggacgcgtgggatcttcgtttccgctccgccgccgtcgatggagttctggggtctcgaggtcaaacatggatccactgtcaagtgtgacagtggacatggctttatcctgcacgtttcccaggctgcccttggggaatcaaagaaaagtgacagtgccttaatgtatgtcaaagttgatgacaagaagcttgccattggaacgctctctatcgacaaatacccacagatacaattcgatttggttttcaataaagagtttgagctgtcac

SEQ ID NO: 17845 - DNA, 310 bp, Zea mays
ggtttacagcaatagggctgcctgctacaccaagttaggagccatgcctgaaggtcttaaagatgcagagaagtgtcttgaactagaccccaccttcactaaagggtacacaaggaaaggtgcaattcaattcttcatgaaagaatatgacaaggccatggaaacctatcaggctggcctgaagcatgacccgaaaaaccaggaactgcttgatggtgttaggaggtgcattgaacaaattaacaaggctaacagaggtgaaataagtcaggacgaattgcaagacagacagaacaaagctatgcaagac

SEQ ID NO: 17846 - DNA, 307 bp, Zea mays
cccacgcgtccgcagagcattcgagaagccgaagaaaattcgaagacgaggagcagctacactgcggacggacttcgggcatggagggccagttccaggttggcaaggaggaggtcatccaagcatggtacatggacgacagtgaagaggaccagaggcttcctcatcatcgcgagcccaaagaattcatccctctcgacaaactttccgaactaggaatattaagctggcgcctaaatgctgatgattgggagaatgatgagaacctcaagaaaattcgtgaagccaggggttactcttacatgga

SEQ ID NO: 17847 - DNA, 184 bp, Zea mays
gtggagacatgactgctgaaactggtacctacagatggatggcacctgaggtaataaaccataagccgtacgatcacagggcagatatcttcagctttgctgtggttctgtgggagctggtcacttcaaagataccatacagaaatctgacacccttgcaagctgcacttggagtaagtgcagg

SEQ ID NO: 17848 - DNA, 308 bp, Zea mays
gaagaaggggtccctgggcaccatcgcgcccatggccatcgggttcatcgtcggcgccaacatcctggccgcaggccccttcagcggcggctccatgaacccggcccgctccttcggccccgccgaggcggccggcaacttcgcaggctactgggtgtactgagtcggcaccctcgtcggcagtggcctgacggggctcgactacggcgacgtctacatcgactcctaccagccggtcggccagcaggagtacccatgaagtccggagctagcccgatcgatccgactgagatgaatacaccatcgac

SEQ ID NO: 17849 - DNA, 241 bp, Zea mays
aattgataaagccccaatgtcttgacaattcatctgaagcgcttcagccctttcaatcctcgtgagaagattgacaaaaaagtggacttccaatcaattcttgatttgaaaccatttgttagtgactctaaaggaacagattttaaatacagcctttatggtgtcctagtccatacaggttggagcactcaatcaggccattactattgctacgttcgtacatccagcgggatgtggcaca

SEQ ID NO: 17850 - DNA, 305 bp, Zea mays
gtctgacattaacattgtctccaatgctagctgcacaaccaactgccttgctcctcttgctaaggtcatcaatgacaagttcggtatcgttgagggtctgatgaccactgtccatgccatcactgctacccagaagactgttgatgggccctcatctaaggactggaggggtggaagggctgctagtttcaacatcattcccagcagcactggagctgctaaggctgttggcaaagtgcttcctgtccttaacggaaagttgactggaatgtctttccgtgtcccaaccgtcgatgtttctgttg

SEQ ID NO: 17851 - DNA, 300 bp, Zea mays
gttgccccatttaatacttattatccacaactcggggaacatttggcacaagttggtgtggatcctaatgtcaacaagtgggaccaaccttttgtgttgggagttgttgatctgcatgactcattatctcatcctgccggggtttctgatgtccaggctgagtccaccacttgtctagatcctgatctatttacgaactttttgattcctagttggtttgaagtagaaggacctaccaaatacaatccatttaccctgcctgaagtttattgggcgtcccaaggaaaaagcatgcttctc

SEQ ID NO: 17852 - DNA, 289 bp, Zea mays
  unsure (1)..(289): unsure at all n locations
gttggcttctcctccccctccggttcgggttcgggttcgtgaggttctccggggttcggtttcgtgggtgagcggatcgagatggcggcgtcggatgttgagtaccgctgcttcgtcggctgactcgcctgncttcacggacgaccactccctccacaacgccttcagcacctacggcgaggtcctcgagtccaagatcatcctcgatcgggagacgcagaggtcccgctgcttcggcttcgtcaacttctccacggaggatgcgatgctgaacgccatcgagggcatg

SEQ ID NO: 17853 - DNA, 315 bp, Zea mays
  unsure (1)..(315): unsure at all n locations
agcacacaagtccgatccacgacgtcgcgcgagacgcgtggggcgacgcgtggcggtggttcacgtgaaatcgaagagacgttgttggaacaccttggagttaaaccgaaaccaangtgaccaagttgatgggttttaaacttcctgtttgggactaaatgggnagtgcatggggttgctgtgtgaatgctcctatgattgctgtggctgactactcgaaaggctcagagggttacacatataactactatgaggacctcactccaaaacgagttgttgagattgttgagatgcttagaagaggtgaaacacccc

SEQ ID NO: 17854 - DNA, 299 bp, Zea mays
agtcagcgctaccaagaagattgctgatgcaaagctagctaaagatttccaagcagtcctaaaagaattccagaaagcccaacgattagcagcagagagagaagctgcatatgcaccttttatttctcaagcgggcttgccacagagctacaactcaagtgaagtgaataatggtgctgataggttggcagagcagcgcacacagcttctagaatctagaagggcagagttggtcctcttggataatgaaatcgtgttcaatgaggccatcattgaggagagggatcagggaatacaag

SEQ ID NO: 17855 - DNA, 296 bp, Zea mays
cccacaccgggctcctgtactgggtgagcgcagctgctaggggtccaccgtggcgtgcttcctgctccgcttctcgacgggcgggcaggccacgggcaccttcgggctgacgggcgtgtcggtgtgggaggcgctggtgctggagatcgtgatgaccttcgggctggtgtacacggtgtacgcgacggcggtggacccgaagaagggcagcctgggcaccatcgcccccattgccatcggcttcatcgtgggggccaacatcctggtgggcggcgccttcgacggcgcgtccatga

SEQ ID NO: 17856 - DNA, 292 bp, Zea mays
cacaactgatgagaatgagccgttacaggcaatgatgaaagaccagttcgcaaactatgtggtgcagaaggttctggagatatgtgatgaccagaaccgtgaattgattctttcccgtatcaaggtccacttgaatgcactgaaaagatacacctatgggaagcatatcgtggcacgtgttgagaagcttattgctgcaggagaacggcgcattggtgccccatcctcttgctgagatggcaataaagctatatacaggtcgcagaataacacctgtacagacagacaggga

SEQ ID NO: 17857 - DNA, 290 bp, Zea mays
cccacgcgtccgccagttttggtgggtccaatatcgatcctactgcatgggaggataagaagtgtaaaggtgaatctagattcccagcgcaggtgaggatctgcattaggaagctgtgcaagccgttggaagaggattccttcaggccagttttgcaccattatgatgggccaaagttccgccttgagctctccatcgcggagacattgtcactgctagacctatgcgggaaggaaggcatctgagctgtcgaggaggtggtggtggttgccttgtgagcttctagtaaa

SEQ ID NO: 17858 - DNA, 291 bp, Zea mays
cccacgcgtccgccagttttggtgggtccaatatcgatcctactgcatgggaggataagaagtgtaaaggtgaatctagattcccagcgcaggtgaggatctgcattaggaagctgtgcaagccgttggaagaggattccttcaggccagttttgcaccattatgatgggccaaagttccgccttgagctctccatcgcggagacattgtcactgctagacctatgcgggaaggaaggcatctgagctgtcgaggaggtggtggtggttgccttgtgagcttctagtaaat

SEQ ID NO: 17859 - DNA, 297 bp, Zea mays
acgaacaagagcctagtctctcggcacgcagcgctacgggtctgctcgtcgaggcgctcgatccgtagcctggtcgttaaggctgcaactgtcgtcaccccaaagtacacttcactgaagcctctgggagatagggtgcttgtgaagcttggtgccgcagaggagaagacagttggtggcattttgcttccatctactgcccagactaaaccacaaggaggtgaggttgttgctgttggagcaggaaggaccatcggggacaagaaaatagctgtggatatagagactggagcacaa

SEQ ID NO: 17860 - DNA, 292 bp, Zea mays
cggacgcgtgggtgttctcgtttagaacctctaaaatttcccccactcgccagtcgcagcagcacctgtagcagccatggacgccagcggaccggtagcaaggggaacaagggggcggccgggcgcaaggcaggcggccccaggaagaagtcggtgacgcggtccgtcaaggccgggctgcagttccccgtcggccggatcgggcgctacctcaagaagggccggtacgcgcacgcgtgggcactggcggccccgtctacctcgccgccgtcctggagttactcgccgccga

SEQ ID NO: 17861 - DNA, 288 bp, Zea mays
cccacgcgtccggtggaggtgaatccatccgatgcatctttggcatcctcaacagagcaacaagaatcgagcctgacgatccagagtcagagagggtcaccaccatccgaggtgacattgagttgcggcatgtcgacttttcgtatccagcacgcccggacatccaaatcttcaaggacttcaacctgaaaatccaagctgggcgcagcaggcgctagtcggagccagcggctcagggaagagcaccatcattgctctcatcgagcggttctacgacccgtgcggagg

SEQ ID NO: 17862 - DNA, 286 bp, Zea mays
agggaatggttcagaaagtattgctttcagcaaatgatgaagggaagaattttgctgtggttactctaagacaggttcggacaccttgccttggagataagttttccagcatgcatggccaaaaaggtgttgttggttttctagaatctcaagagaacttcccatttactcacgaaggtatagtcccggatattgtgataaatccacatgccttcccaacacgtcaaactcccggacagctgcttgaagctgctctggggaaggggatagcctgcaaaggtacaat

SEQ ID NO: 17863 - DNA, 283 bp, Zea mays
agctcccccgtctccgtcctcctccgcctctgtcagggtcccggtcggacttcctcacgaccgccgcgccaaatcccgtctcgttcctccgttccgctgcgcatcctcaggaatggaacttggcgccaccactgccctgtaccctctgcaccgctgcaaaaccatttacctggtcaggcatgcccagggcattcacaacgtcgcaggcgagaaggacttcggcgcctacatgtcacatgaactgttcgatgctcagctcacccctttgggttggaaccaagtc

SEQ ID NO: 17864 - DNA, 282 bp, Zea mays
agaacctaaaaaccagcgacgccgagcggatctacagccaccttgatcaccggcggcgatggcgagttccaagtccggcatccctatcaaggcagaacagagattcggatggctcggcacaaagcacagctgatatgacggcttttgtgcaaaaccttcttatgcagatgcaaaccaggttccaagctatgtcggagaacatcatttcaaagatagatgaaatgggtgcgagaattgatgaattggaacagagcctcaatgacctcaaggctgagataggcg

SEQ ID NO: 17865 - DNA, 287 bp, Zea mays
cggacggtgggctctcggcaacaactgacggccggaggaagaaggcgcagacgacaagcagaagcttgtgccatcgatcaatggcggcggtgacaaagatctacgtcgtgtactactcgacgtacggccacgtggcgatgctggcggatgagatcaagaagggcgccgactccgtggacggcgtcgaggcaaccatctggcaggtggcggagacgctgccggaggaggcgctggcgaagatgcgcgcgccggcgaggagcgaggagcacccggtgatctcgggcaag

SEQ ID NO: 17866 - DNA, 326 bp, Zea mays
gcgcctccatttcggcctctgtcccttgcaagttcaatctcacctccaaccatgggtaaagagaagtcccacatcaacattgtggttattggccacgttgactctggcaagtcgaccaccacaggacacctgatctacaagcttggaggcattgacaagcgtgtgatcgagaggtttgagaaggaggctgctgaaatgaacaagcggtccttcaagtacgcatgggtgctcgacaagctcaaggctgagcgtgagagaggtatcaccattgatatcgctctgtggaagtttgagaccaccaagtactactgcacggtcattgatgc

SEQ ID NO: 17867 - DNA, 322 bp, Zea mays
aagagaatcctgaattttaatcaacgtatagtgattgcccttgatattgctattgcattgacttatctccatttgtgttctggggacgctttaatctgttacaacttgaggacgtcaaacatcctactgacagagagctaccgagccaaagtgtgctgttctgaactgtcaaaaagtggtaatatcgtgctattaaagggaacagggggctacattgatccagagtacttggagacctcagagctcactgccaaatctgatgtctactcttttggaataatactcttagagatcatatcttctcatgggccacaagactggg

SEQ ID NO: 17868 - DNA, 317 bp, Zea mays
atccggagcagccgcagtcccaccgaccccgccgccggtcgccctccatctcctcgccgctgcctctcgtttctcttttcaataatcaagatgagccgtggtggtagtgccggtggtggtcaaagttctctgggttatctctttggaagcggtgagccccccaaaccagcagtggcaccagctgcaagtgctccacctgttgagaaaccatctgctgcaaagactgatgcggccaagcaggttgctgctggggttaccagccaaaccaataactaccacagggctgatggtcagaacactggcaacttccttacgga

SEQ ID NO: 17869 - DNA, 212 bp, Zea mays
acacacgcgtccgcggacgcgtgtgcaacatacacacaagcacaacaaagctaagaagctccatagctaaattcaaatattacaaacacaaaaggggagtgcagaaccaaaatgactgcctcgaccttccatctcgttgcttttctagcattggtcacttctcaggccattgcctctgatcctagcccgctccaagacttctgtgttgccga

SEQ ID NO: 17870 - DNA, 324 bp, Zea mays
cccacgcgtccgaacagagcgaggcgacgccgaggcacctcatctccggcgaagggaaatggcgaccgttccaggggatctgatctggcagattgtgaggaagaacaactccttcctggtgaagcagtttggcaacggcaatgccaaggtgcagttcaccaaggagcccaacaacctctacaatgtacactcctacaagtactctggcttagcaaacaagaaaactgtaacgatccagccagctgctggaaaggactcggctgtggtcctctctactaccaagaccaagaagcagaacacacccgcgaactcagccacaagtct

SEQ ID NO: 17871 - DNA, 213 bp, Zea mays
cccacgcgtccgcaaaattgtacggaagtcctccacatgtagatgagcgtcatcgtcatagatacgaggtcaatccctcttttgttcccatgcttgaaagtgctggtcttcattttgttggttgtgacgaaagtcgaaaccggatggagattgtggagctacaagatcatcccttctatgtaggtgttcagttccacccggagttcaaatcaa

SEQ ID NO: 17872 - DNA, 304 bp, Zea mays
ggaagttggatgctatcgaggagaaggatggagtgcttgatgagtaagacgggtttctggtgtcgatttgcttctgagtttttttccttttatatcgttgcgatctcgtggttgtcgtttggttagcagccaagccaggctattagtacgaagaatgtcgtctataaacatgtgttcctacgttgccacatgctgagtcaatctgtatacagctagctctaggtggtcagctgcgtctaccacaatgagcatacatgtatggataaatcttctgtgaaagcattcgatgaataagggttgtttt

SEQ ID NO: 17873 - DNA, 327 bp, Zea mays
agcgacacgatcgcgagcgcacgcacgtaagcacgttgtcggaagctcaagttagaagaagcaccagtgcctgatcgatggcggcccaggctctcctctccggccggcagctgctgggccgccccgtgcagtcggccgtctctaggtcgtcggcgaggaaggcgcccttcgtcgtcagggccagctccagccctccagccaagcaaggtgccgacaggcagctgtggttcgcgtccaagcagtccctctcctacctcgatggcacgctgcccggcgactatggcttcgacccgctgggcctctcggacccggatggcaccggggggc

SEQ ID NO: 17874 - DNA, 328 bp, Zea mays
cccacgcgtccggtcaagtgtgtagacgagagagagagactgagacagcgccatggccagcctccaagtgactcctacttcatcgttcactcagtggaacgagctgaagttcgaaggcctgtacctgttccacacacccctgggctcaggcgccaaccaagctcaggtcatagacaacaaggcgccgattggcatcggtgccaccgtagttaacaactgggcagtgtacgacgggccagggccgaacgcaaagctcgttgcccgtgcacagggcttgcatatccaagccggcaactgggtcaactccttcagcctagtgttcgtggat

SEQ ID NO: 17875 - DNA, 319 bp, Zea mays
cccacgcgtccgtgttccaggtattagcagtcgaccggttcctcggagcacgatgaagtttgttgctgcctacctgcttgctgtcctcgctgggaacgccagcccctccgctgacgatttgactgccattctggagtcagttggctgtgaagttgacaatgaaaagatggaactcctgctgtcccaactgagcggtaaggacatcaccgagctcattgccgcgggcagggagaagtttgcttcagtcccatgtggtggcggcggtgtcgctgttgcggcagctgcacctgctgctggcggactgctcctgcagctgagg

SEQ ID NO: 17876 - DNA, 318 bp, Zea mays
agagaataacaatccctgaaatactggaggatgagtggttcaaaaagggctacaagcgcccggagtttgacgagaaatatgacacgccattggatgatgtggatgctgtcttcaatgactcagaagagcaccacgtgacagagaagaaagaagaagaacccgtagctctcaatgcatttgaactgatttcaaggtcagcaggcctaaatcttgggaacctatttgactcggagcaggaattcaaaagagaaacgaggttcacgtcaaaatgtccaccgaaagacatcattcgcaagattgaggaagctgcaaaacctc

SEQ ID NO: 17877 - DNA, 318 bp, Zea mays
  unsure (1)..(318): unsure at all n locations
ctgggtaggcgtggcctnggataaacatcttgatgctgatgaagcaattgttctcggagcttcacttcatgctgctaacctgagtgacgggattaagttgaaccgtaagttgggaatgattgatggctctacttatgcttttgtacttgagatagatggcctagattatgtcaaggatgaaagtattgaccaaattttggttccaagaatgaagaaaatgccaataaagatgtttagatccatcagacatacaaaggacttcgatgtctctctcaactatgacaaagcttatgaactgcctccaggcattccatcaca

SEQ ID NO: 17878 - DNA, 321 bp, Zea mays
gttccactaaaactggcggttaagcaagcactggatgttgcaagggggatggcgtatgttcatggtcttggcttcattcatagggatcttaagtcagataacctcttgatatctggtgataaatctatcaagatagctgactttggagtagctcggattgaagtaaaaactgaggggatgacacctgaaacgggaacctatcgttggatggcaccagagatgattcagcacaggccatatgaccaaaaagttgatgtctacagctttggcattgtgctgtgggagctcataactggcatgctcccttttgctaatatgaca

SEQ ID NO: 17879 - DNA, 323 bp, Zea mays
gccgaggttccccaaacacgcacagcacacgaacacacaccgcgcccagctccgaggtgatcttccggcggccggcgagatgagccgtggcacaggcgcgggctatgaccgccacatcaccatcttctccccggagggacgcctgtaccaagtcgagtacgcgttcaaggcggtgaagtcggcgggtgtcacgtcgatcggcgtccgcggcgcggactccgtctgcgttgttacgcagaagaaagtcccggataagttgctggatcagacgagcgtgacacacctgttcccgatcaccaagtacgtcggattgcttgccactg

SEQ ID NO: 17880 - DNA, 316 bp, Zea mays
cccacgcgtccgcgatcatcagcaagaaaaaatcgaagcggggaaagtcaaagcacgcaaagctctctggccaagtaacaaatggaggcaaccagacaaatcagaagttagacggcccttcttcaagtagtgaggaccacgaagacaatgcagcactagaggaatgggctgctactcgcattcagaatgcgtttcggaaatacaaggcaaggaagaccctgcgttgtctcaagggagtcaaaagattgcgcgttgtgggtcaggcgaatccggttaagaagcagactgctgccacgctgagttacatacagtcttg

SEQ ID NO: 17881 - DNA, 306 bp, Zea mays
ctatacgctggcaatcaagctttgaagccacagcacgtcgtcctcgaccacctgttcatcgagaaacgctgggggtcgcagtcgctgctcgccctcggcgtcacccaccggtttgagtccaagtacgtgagctttgtgctctacaagccgctggagaggtgatggtggtactgttgtctaccgtgtgtgagtggaagaacagagtggtctggtggaggtgattaatgtaataaatctgaatgtttcgacgaaagtaataaattagttgaccatgcatgcatgcaaaaaaaattataatattgaaag

SEQ ID NO: 17882 - DNA, 310 bp, Zea mays
cccacgcgtccgggcacgaggtggtcggcgaggtggtggaggtcgggcccgaggtggccaagtacggcgtcggcgacgtggtaggcgtcggggtgatcgttgggtgctgccgcgagtgcagcccctgcaaggccaacgttgagcagtactgcaacaagaagatctggtcatacaacgacgtctacactgatggacggcccacgcagggtggattcgcctccaccatggtcgtcgaccagaagtttgtggtgaagatcccggcgggtctggctccggagcaagcggcgccgctgctgtgcgctggcgtgac

SEQ ID NO: 17883 - DNA, 315 bp, Zea mays
acacacgcgtccgcggacgcgtgggcttcgctccctccctagcagcaaaaacctccacgaatcgccgacactccaacccggaagagccaacgaggtgactccgcgccccggtcatgggtgactaccaatactacttctctcttaccactttcagcccgtcgggaaagcttgtgcagatagagcacgcgctcacggctgtcggatccgggcagacctccctagggatcaaagctgccaacggtgtagtgattgccaccgagaagaaactgccttctattttagtggatgaaacatctgtgcaaaagattcaggcac

SEQ ID NO: 17884 - DNA, 115 bp, Zea mays
cggacgcgtgggcggacgcgtgggcggacgcgtgggcggacgcgtggggttggcttctcctccccctccggttcgggttcgggttcgtgaggttctccggggttcgacttcgtgg

SEQ ID NO: 17885 - DNA, 301 bp, Zea mays
aatgtactgcagccgcactatttttgaggatgctactcctgaactggttagagatttcttctgggatggtgattttcgtctaaagtgggatcccatgcttgcatattgcaaatctttggatgagttccctcagaatggagcaacaattgtccactggataaaaaagttcccgttcttttgcagtgaccgtgaatacatctttggaggacgcatatgggaatctgggaagacttactattgtgttactaagggtgttccatatccatcattgcccaagaaagaaaaaccgaggcgtgtggag

SEQ ID NO: 17886 - DNA, 300 bp, Zea mays
  unsure (1)..(300): unsure at all n locations
gcgaaatccaatctagaagctcccctctccctccctccctctctctctctctcttcgccgtccgaagctccgcacccaatctaatcgacacctcaccgagatgggccgcaagttcttcgtcggtggcaactggaaatgcaatggaaccacagatcaggtcgagaagattgtcanaaccctgaatgaaggacaggttcccccttcagatgttgtcgaggtcgttgtcagccctccttatgtcttccttcctgtggtcaagagccagctgcgccaagagttccatgttgctgctcagaactg

SEQ ID NO: 17887 - DNA, 302 bp, Zea mays
ggagcattcgagaagccgaagaaaattcgaagacgaggagcagctacactgcggacggacttcgggcatggagggccagttccaggttggcaaggaggaggtcatccaagcatggtacatggacgacagtgaagacgaccagaggcttcctcatcatcgcgagcccaaagaattcatccctctcgacaaactttccgaactaggaatattaagctggcgcctaaatgctgatgattgggagaatgatgagaacctcaagacaattcgtgaagccaggggttactcttacatggacatttgtg

SEQ ID NO: 17888 - DNA, 296 bp, Zea mays
aaaccccaacaatccttgcggcagtgtctacacccgtgaacatttagccaaggttgcagaggtagcaaggaagcttggaatactaatcatcgctgatgaagtgtatggaaacctggtgtttggggacaccccttacgtcccaatgggtgtctttggccacattgcccctgtgttgagcataggatcactatcgacgagatggatagtgcctgggtggcgacttggttgggtagctgtatgtgatcccaacaagattctgcaagacaccaagatcattgcatcaataacaaacttcc

SEQ ID NO: 17889 - DNA, 297 bp, Zea mays
ccctgcactgcagcgggatggcgtccccgccgccaccacgcgtatggtaaccggtggcggcgggtacgtcgcctcatggctcgtcaagctcctgctctcccgccgctacgccgtgcacgccactgtccgcgacccaagtgatcccaagaacgcccacctgcaacagctggacggggcccgggagaggttgcgcctgttcaaggccgacgtgctcgaccgctacgccctggcgaccgtggtcgtcgcgtgcgaggtcgtcttccacgtcgcctcccctgtgtccgccgacaaagtcct

SEQ ID NO: 17890 - DNA, 290 bp, Zea mays
ggcaatccttgactggcaaaggagaacaatggatatgatgtacactgacatcacacaagctctcgaagccaatggaatccaaacaaaccccaaggactatctcactttcttctgcttaggtaaccgtgaggtgaagcaggagggagaatatcaacctgaggaacacccagaacctggcactgattacatccgggctcaagaggctaggaggtttatgatctatgttcatgccaaaatgatgatagtggacgatgaatacatcatcattgggctccgcaacatcaaccaga

SEQ ID NO: 17891 - DNA, 268 bp, Zea mays
ctggcttctcctccccctcttatcaagtcctcctcgggttagggttccttagggttttgtggaggggcgatggcggcggctgatgtggagtaccgttgcttcgtcggcggacttgcctgggccagcagcaacgagtcgctggagaatgccttcgcctcctacggcgaatgctcgactccaaggtcatcaccgaccggtatatggggaggtcccgctgcttcgacttcggtaccttctcctccgagaactccatgctcgatgctatcga

SEQ ID NO: 17892 - DNA, 267 bp, Zea mays
ggtttcgtgggtgggcggatcgagatggcggcgtcggatgttgagtaccgctgcttcgtcggcggcctcgcctgggccacggacgaccactccctccacaacgccttcagcacctacggcgaggtcctcgagtccaagatcagcctcgatcgtgagacgcagaggtcccgcggcttcggcttcgtcaccttctccacggaggaggcgatgcggaacgccatcgagggcatgatcggcaaggagctggactgccgcaacatcaccgtc

SEQ ID NO: 17893 - DNA, 287 bp, Zea mays
  unsure (1)..(287): unsure at all n locations
gctccacaggatcctctgcgccaccgcaaccgtgtgaccgcccgtcccgccggcgatcccgatccgccgacccgtcccagccccgctcgcagccatgtcgccgtcggagccgacgcgggaggagagcgtgtacatggccaagcttgccgacaggcggacggtacgaggagatggtcgagtcatggagcgcgtcgccgntacgccgggcgcgccggcggcgnggaggagctctcggtggaggagcgcaacctgctgtccgtcgcctacaagaaagtcatcggcgcccg

SEQ ID NO: 17894 - DNA, 290 bp, Zea mays
ggaccgtgggcggacgcgtgggcttgatatgggttttgagccacagatacgtaaaattgttgagggcatggacatgcctcaacgtggtgagaggcagacaatggtgttcagtgcaacattcccaaaagagatacagaggatggccgcagatttccttgctgattacatctttcttgctgttgggagagttggttcaagcaccgatttgattgttcagagggtggagtttgtcctcgattcagacaaacgaagctacctcatggatcttctgcatgcacaaaaggctaatg

SEQ ID NO: 17895 - DNA, 284 bp, Zea mays
  unsure (1)..(284): unsure at all n locations
cccacgcgtccgcggacgcgtggcgacgtggncgtcgtcaacgacaccttctggcggaggccccgccgcggcggcggcggcggcgccgggccgctgttcgtgtatacgggcaacgcgggcgacatccagtggttcgccaccaacaccgggttcatgttcgacatcgcgcccaagttcggtgcccttctcgtctttatcgagcatcggttctacggcgagtcactgccgtttggggacgactcctacagctcagcggagacggagggttacttgacgtcgacgca

SEQ ID NO: 17896 - DNA, 286 bp, Zea mays
gggcagagagcatgattctcatcacgcagccagtcaaggacaggaacatggagatgtggcctacaaatccacccacgttcagggacgcgctcgacgtctactcggtagagatgatcggcctcgcaatgcggctcctggggttcatggcggccgacctcggggtggagccggagccctcgcaggacgccttcacggggaagcggcagagcatggcggtccaccactacccgccctgccgccagcgggagaaggtgatgggcatcacgccgcacacggacgggctggg

SEQ ID NO: 17897 - DNA, 285 bp, Zea mays
ctacgtttgcttttctacagaagtatggtcttaccggagagttcaagattaatgttgagtgcaccatgctactctatctggacatagctgccatcatgaactggagactgcacgcattaatgggctgcttgggaacattgatgcaaacactggtgatcctcaagttggctgggacacggatcagttcatgacagacattgcagaggctactttggttatgtcaactgtggttaagaatggtggacttgcacctggtggcttcaactttgacgccaaattgcggag

SEQ ID NO: 17898 - DNA, 289 bp, Zea mays
gtcggatctgagacgagacgagtcccctccccccacctcgcctcacccaaccggaacgaacaagttacaatctcatcccaaccccgcctcgaccggatctcgtcggactcggatccgcccgaccaccccgcgccgccgcagatcaaagaagatggcagctgtcgacacattcctcttcacctcggagtctgtgaacgagggacaccctgacaagctctgtgaccaggtctcagatgccgttcttgacgcttgccttgctgaggaccctgacagcaaggttgcttgtgag

SEQ ID NO: 17899 - DNA, 283 bp, Zea mays
gcaagaacttctacacccggagcgcgttcctgagcgccgtcaacgcgtacccgggcttcgccatggcgggacggaggtggagggcaagcgcgagatcgccgccttcttcgcgcacgtcacgcacgagaccggacatttctgctacatcagcgagatcaacaagagcaacgcctactgcgacgcgagcaacaggcagtggccgtgcgcggcggggcagaagtactacgggcgcggccgctgcagatctcgtggaactacaactacgggcccgccgggagggaca

SEQ ID NO: 17900 - DNA, 285 bp, Zea mays
ggacgcggtgcttagggagacagttggaagaaagaacaaatctgcaatagttagaacacatagttttgtagcctctgagctaagtgctatttttggagggcagctacagagcgttgtgaaagctgcaggtaacaaagcatcagctactgttcaacccttcctactgctccatcttgatatattcccagatgctgttcagacacttaatgatgcacttcgtctgttctctacccccgaatctttggaaggatacagaacaactgctggaaaggctggtttggtgac

SEQ ID NO: 17901 - DNA, 288 bp, Zea mays
attcagcgtcttttctgtgtggtctgaaattagtgttgtgcattcaccgaccgatcacttttcaaaatggtagtttactctaagatcactaaggacgctctttttgagtgtgtcaactatgttgtcgaaaaatctcaagaaaaaaaacgtaactttgtagaaaccgttgaattgcaggtcggtttgaagaattacgatccacaacgtgataagcgtttctctggtactgttaaattacgtaatattcctcgaccacgtttcacagtctgcattcttggagatcaacag

SEQ ID NO: 17902 - DNA, 284 bp, Zea mays
ggacgctgtggtgttcgtgaggttctccggggttcggtttcgtgggtgagcggatcgagatggcggcgtcagcatgttgagtaccgctgcttcgtcggctgcctcgcctggtccacggacgaccactccctccacaacgccttcagcacctacggctaggtcctcgagtccaagatcatcctcgatcgggagacgcagaggtcccgcggcttcggcttcgtcaccttctccacggaggaggcgatgcggaacgccatcgatggcatgaacggcaatgagctgga

SEQ ID NO: 17903 - DNA, 286 bp, Zea mays
gttgggcgcagagaatccccaagcaaacaaacagggtagaggtagagggagaggagaggagaggagaggagaggagaggttgggtctgggacaccatggctccgatgaagctgtacggggcggtgatgtcgtggaacgtgacgaggtgcgcaacggcgctggaggaggctggctccgactacgagatcgtgcccatcaacttcgccaccgccgagcacaagagccccgagcacctcgtccgcaacccgtttggtcaggttccagctctgcaggatggtgacttgta

SEQ ID NO: 17904 - DNA, 283 bp, Zea mays
gtgaccgctgtgtgaggcatggtggtggcaggagatgtagattcgaagggtgtgcgaagggcgcacaggggaacaccgattactgcataaggcacggtgggggaaggcggtgcaagtttgaaggttgcacgaagagtgcgcagggacggacagatttctgcattaagcatggtggtggcagccggtgcaagttccaaggatgcggcacgagcgcaaaatggggaacagatttctgctctatccacaggaaggctttgttgggaggcgacaatgccgccgtccc

SEQ ID NO: 17905 - DNA, 280 bp, Zea mays
ggcttctcctcgccctcttaccaagtcctcctcgggttagggttccttagggttttgtggaggggcgatggctgcggctgatgtggagtaccgttgcttcgtcggcgggcttgcctgggccaccagcaacgtagtcgctgtaggatgcctgcgcctcctacggcgagattctcgactccaaggtcatcaccgacctgtatacggggaggtctctcgtcttcggcttcttgaccttctcctccgagaactccatgctcgacgctatcgagaacatgatcgg

SEQ ID NO: 17906 - DNA, 237 bp, Zea mays
  unsure (1)..(237): unsure at all n locations
aggcgccgccgaggtccgcgacggggcncngtataatttgctgcttgatgctgcaggaaatctcaaagtttcgacctggagcaaggagctacgacaaatgtagctgaggtcgcttcataaacatgtggaaccccaattagttgccctgaggtgatcgaggatgaggctagatgtgcaatgagatatctggtctgcgagaatcccttgttctctgcggaattactttcgaggatgcac

SEQ ID NO: 17907 - DNA, 270 bp, Zea mays
  unsure (1)..(270): unsure at all n locations
ctaaggtccgggacgcggggcnacagacccaggccttgaaggttgccaaggctgtgaagtctggggcagccaagagcgtagacagctggatccgcacgtctgtgacatttcaccgccccacgaccctgaagaaggctagggaccccaagtacccacgaatcagcactaccggaaggaacaagcttgatcagtaccaaattctcaagtacccccttaccacagaatcagcgatgaagaagattgaagataacaacactctggtcttcattg

SEQ ID NO: 17908 - DNA, 283 bp, Zea mays
ctccggacctcgccgtcgccgcagccttggccatgtcgatcttcgagtataatgggtccgccgtggtggcgatggtggggaagaactgtttcgcgatcgccagcgaccggcggctgggcgtgcagcttcagaccatcgcgacagacttccagcgggtgttcaaggtccacgacaagctttacatcggcctctctgggctcgccactgacgcccagacgctgtaccagcggttggtgttcaggcacaagctgtatcagctgcgggaggagagggacatgaagcc

SEQ ID NO: 17909 - DNA, 284 bp, Zea mays
gtcgaactggcgcaaccgaccgccgccgcggctgcgttgaccaccgctgagcaggctcaggatctcatcgacgccgctagtatgacgacttggaggacgtcgtcgccctgttctccgctggtgtctcgctggactccacagattcgcaaggccgcacagctcttcacatggcttctgccaatggtcaccttgctatggtggaatacttgattcaaaatggagcgaatgttaatgccaccaacatggagaagaacacaccactccactgggcatgccttaatgga

SEQ ID NO: 17910 - DNA, 284 bp, Zea mays
ggacgtggtcccacccgaccagcagcgcctcatcttcgccggcaagcagctggaggatggccgcaccctggcgagctacaacatccagaaggagagcactctccacctggtgctccgcctcaggggtggcatgcagatttttgtgaagacattgactggcaagaccatcaccttggaggtggagagctctgacaccattgacaatgtgaaggccaagatccaggacaaggagggcattcccccagaccagcagcgtctgatctttgcgggcaagcagctggagg

SEQ ID NO: 17911 - DNA, 287 bp, Zea mays
gtgaaagcagccatcaagacggcatcagagggtgcactcaaaggtattcttggctacacagacgaggatgttgtttccaatgattttgttggtgattcaaggtcaagcatctttgatgccaaggctggtattggactgagctcttccttcatgaagctcgtgtcttggtatgacaacgagtggggctacagcaaccgggttctggatctgatcgctcacatggctcttgtgagcgccaagcactgatgttcgtactcgttcctccagtaccagtagtagcctagata

SEQ ID NO: 17912 - DNA, 278 bp, Zea mays
cccacgcgtccgcccacgcgtccgcctcgccttcccttccccaccagcccccgtctctctctctctctctctgtctctctctcgtagccgcgtccatctcgcagcagcaagcaagcgcgaccaaatggcgcctctaggagacggcggactgctgccgcggcggcgtccaacaacctggtggtgtcgttcggcgagatgctgatcgacttcgtccccgacgtggccgggctgtcgctggccgagtcgggcggcttcgtcaaggcacccggcggcgcgcc

SEQ ID NO: 17913 - DNA, 276 bp, Zea mays
aaaccgctccaatccggaagctgaaaatagcagaagaatccagaggcgactccaggtttgttggcgatgctgcgagcgggaggcaggcggctcctcgccccggggctccgtcggctcggcctgggcacaggcgcctccggcgaggcgggccctgcggtcgcggcggcgggggtgagggcgtaccacgagcgggtggtggaccactacaacaacccgcggaacgtaggttccttcgacaaggacgaccccaacgtcggcactgggttggttggtgcg

SEQ ID NO: 17914 - DNA, 276 bp, Zea mays
gcggcaacttcctcacggaccgcccgtcgaccaaggtgcacgccgcgccgggcgcgctcgtcgctcggctacctcttcggcggcggacctcccgggagcaagtgatgtgatgggcaccttctccgcccagacttttcggagcaccgcctgcttgggaagcttgatttttactaagtccatcgtgacctgctggatgtgaagttaatttccatgaagaaatgtatgttcatgtgtacctctgtaatctagaaatgtttatgtgtatctctgcaattt

SEQ ID NO: 17915 - DNA, 283 bp, Zea mays
aaatctccaaacgcagcagagcccctcgcgccgccgacctcttcagcctcgcagcacaccgccgccagcccgagtgaccgctgcagcctagggtttccggcggcgatggcgggtaatggagggaagggtctgctggcggccaagacgacggcggccaagagcaccgacaaggacaaggacaggaagaaggcccccgtgtcgcgctcgtcccgcgccggcctccagtttccggtgggtcgtatccaccgccagctcaagtcgcgtgcctctgcgcacggccgcg

SEQ ID NO: 17916 - DNA, 133 bp, Zea mays
cccacgcgtccggccaaagccaccagcgctcgtcacctccaatcaacaaattcccaatccgccgcttcccatcccgcgttcgccgctccatttgatcgaattcccgatggcgcccaaggccgagaagaagccc

SEQ ID NO: 17917 - DNA, 281 bp, Zea mays
ctgggatgtcgggggtcaggacaagatcagacctctttggaggcattacttccagaacacccagggtcttatctttgttgtggacagcaatgaccgtgaccgtgttgttgaagccagagatgagctccacaggatgctgaacgaggatgagctacgtgatgctgtgctgcttgtttttgccaacaagcaagatcttcccaatgccatgaatgctgctgagattactgacaagcttggattacactccctgcgccacgacactggtacatccagagcacttg

SEQ ID NO: 17918 - DNA, 312 bp, Zea mays
cccacgcgtccgagcaattgacctagtggaaaagatgctaacttttgatcctagacagagaataactgttgaaggcgcacttgcacacccttacttggcatcacttcatgacataagtgatgagccagtctgctcaatgcccttcagcttcgacttcgagcagcatgcattatctgaagaacagatgaaggatctgatctaccaagaggctcttgcattcaacccagattaccagtagccaaagttcggttccagccggtgattgcgttcattgacatggagatttttatcccacctgatgtcactgcaaaa

SEQ ID NO: 17919 - DNA, 309 bp, Zea mays
cgtgaccgtggtgagttctagatcgcgagcggccgccctttttttttttttttattaacatcaaattttatacatatctattttaaaatattaaatttatcctaataattcagatatccgtttacacctaaagaaagcctcagatcgaagcagcagaacaaccagacgtacaatggggataaacattgccacgcaagagtccatgaagctcaaagcatcaagtacgaatcactataacaccaccctattttgggacaaacaggtccgggcagcagagacatggatctcaaattaaggagtcttcttaac

SEQ ID NO: 17920 - DNA, 302 bp, Zea mays
gcgttcacgacctgctaccacttcttcttcaacctgggcatgttcatggcggacatggtgaactacggcaccaactccatcccgaggtggggctggcgcctctcgctcggagtcggcctcgtcccggccgccgtcgtcattgccggcgctgcggtcatccccgacacgcccagcagcctggtgctgcgtgggaggctcgacgacgcccgcgcttcgctgcggcgcatgcgcggggctggggcggcgtcggccgataccgatgcggagtcaaggacatcgtcgcgcagtgagcaagacgcaga

SEQ ID NO: 17921 - DNA, 306 bp, Zea mays
gtcgaccatgagatgccgaaccagggatcccagcaaaggaggatagtcagcttcattggtggcattgacctttgtgatggaagatatgatacccagtaccactccttgttcaggacgcttgacactgtccatcacgatgacttccaccagccgaactttgagggtggatcaatcaagaaaggtggcccaagggagccatggcatgatatccactcacggttggaagggccaatcgcttgggatgttctttacaactttgagcagagatggagaaagcagggtggtaaggacctccttgtgcgtctc

SEQ ID NO: 17922 - DNA, 317 bp, Zea mays
gcctcttgctgctgtgaagtactcccgcgggacgttcatctttcctggcgcacagccagccccccaccggagcttctccgaggaagttgctgtacttaaccgatactttgggggcctgaagtctggtggcaatgcttatgtgattggagatgcagcaagaccaggacagaagtggcacatctactacgccactgagtacccagagcaaccaatggtcaaccttgagatgtgcatgactggtctggacacgaagaaagcttcagtcttcttcaagactaatgctgatggcaacacaacatgtgccaaggaaatgacga

SEQ ID NO: 17923 - DNA, 283 bp, Zea mays
cggacggtggctgcagatcgctgctgacctgaaggagcatgtcatcaagcctgtcatccctgagcagtaccttgacgagaagaccatcttccaccttaacccatctggccgctttgtcattggtggacctcacggcgatgctggcctcactggccgcaagatcatcattgacacctacggtggctggggagcccatggtggtggcgctttctccggcaaggacccaaccaaggttgaccgcagcggagcctatgtcgcaaagcaagctgccaagagcatcgtc

SEQ ID NO: 17924 - DNA, 287 bp, Zea mays
cggcataccccttcagcctcagggagggtgctcacaccgccgtctcccacggcctgtggctgaacatccctgactatgatgctcccacacagctggtcaagcccaaggagaggaatgagaggtatgttgatgctgtcatgacaatccccaagggaaccttgttccccatgtgtggcatgaaccttgccttcgacagggatctcattggccctgctatgtactttggtctcatgggtgatggccagcccatcggtcgctacgacgacatgtgggcaggatggtgtgtg

SEQ ID NO: 17925 - DNA, 301 bp, Zea mays
aaatcctgaagtcactgcttaatgctgatctcattggtttccaaacatttgactatgcccgccacttcctatcttgctgtagcagattgctaggcctgcattatgagtcaaaacgtggttacattggaatagagtattttggccgaacagtgagcctgaagatcctttccgtgggtgtccatattggtcggcttgaatctgtcttaaaattgcctgctacagttagtaaggttcaagaaattgaacaaaggtataagggcaagatactgatgttaggtgtagatgacatggacatcttcaa

SEQ ID NO: 17926 - DNA, 144 bp, Zea mays
aatgaaatactcgtcacatatgccatggctggcatatcaagcggtgcaggtgaaacaaagtctttgtggtagcatacagcatgctacgcacgaaggtactactacataccgcataacttgagcgaatacaacaagcaaaccata

SEQ ID NO: 17927 - DNA, 315 bp, Zea mays
caaacctagcgcaacaagcaatcgaaaaagagatttggctacaaccaattaaccattggccagcagtgtacgtgggaacgatggccctcatgcaggagagtagtagccaggatttgctccaagctcacgacgagctcttgcaccattccctgtgcttcgccaaatcgctcgcgctcgccgtggcgctggacctccgcatccccgacgcgatccaccaccacggggccggcggcgccacccttctccagatcctcgccgagactgcgctccacccaagcaagcttcgcgcccttcgccgcctcatgcgcgtgctca

SEQ ID NO: 17928 - DNA, 299 bp, Zea mays
caaacatctgcaacgctggcatccttcctgaagcagtgtcgaaggtcgctgctcaggcttgcaccagtattccttccaacccctggagttctatccacaagggttttagcgcctaagaatcgtaaggtgaggcgaaatatttcagccgctccaccgcaacgaactggtttacattaccagtcctcaggggggtcctagttcttgaaccactattatagctgttccaccgttccagattacatagctatgcccaatttccggtgtacatattatagtcggaaagttatttggccattgta

SEQ ID NO: 17929 - DNA, 300 bp, Zea mays
cacacgcgtccgcacacgcgtccgcggacgcgtgtgtgaaaatttgctgggtgagggtggatttgggcatgtgtacaagggccagctcaaggatggtcaggtcattgcagccaaggtgcacaaagaagctagctcacagggttatactgaattcttctcggaagtgcaagttctcagttttgctcgacaccgacatattggcattctgcctcggtactgctgcaaaggaagctataacatcttggtgtatgagtatatatgcaacaattctctcgagtggcatttatttgacaagtcggc

SEQ ID NO: 17930 - DNA, 317 bp, Zea mays
cacgctcaagagctaccccgcggactgtcgctgacggcgctcatctgcctcatggggtcgctcatgagcggctccgtcgcgctcgtcgccgagcgccgcaacacccaggcctgggtcatcggcttcgacacgcgcctcttcaccgccgtctacgccggcatagtgtgctccggcgtggcatactacgtgcaaggcatcgtgtccaggcaacgaggcccggtgttcgtcacggccttcaaccctctctgcatgatcatcaccgccgtcatgggctccatcatactcaaagaagagatcactctcggaagcgtgattgg

SEQ ID NO: 17931 - DNA, 204 bp, Zea mays
cagcttagctccactccagctccaatcacagtcgtgaccagagcgcgagagctagctagagggccgtgaaaatgccgatcaataggatcgccctggggagccaccaggaggtgtaccacccgggcgccctcaaggcggcgttcgctgagttcatctccaccctcatcttcgtcttcgccggccagggctccggcatggccttca

SEQ ID NO: 17932 - DNA, 324 bp, Zea mays
atcgcggacagccggtcgttcccgctgtaccgcttcgtgcgcgaggagctcggctgcgtgttcctgaccggcgagaggctcaagtcccccggcgaggagtgcaacaaggtgttcgtcggcatcagccagggcaagctcgtggaccccatgctcgagtgcctcaaggagtgggacggcaagccgctgcccatcaacgtcaagtaaagaacgccaaggagaagatgagggaggggaggaaatacgtgaaaaaaaataaaacctgtacacgtgtatgtccagatcgtgtgtcgtcgatcgttcttcgttgttgatttttggttgtat

SEQ ID NO: 17933 - DNA, 261 bp, Zea mays
acgagcaaaggacaaatatcctcgctcgcagtcgcagctactacgccgccgcacctccgtccgccaccttcttcccggctccagcgatgtcgggggcgatcgggggcgccgaggtccacggcttccggggcgcacggcgcagctcccgcggtcccgggtgctcgggaggccgatccgggtggcgccacccgccgcggcccggccgggcggtgcgtccgcgggtagcatacgcgccgtctccgcgcctgcgaagaaggacgc

SEQ ID NO: 17934 - DNA, 277 bp, Zea mays
gctccatcttgattcttgaggcgaagcccggtgcgtaagagtctgccatggccagcgagaataaggtctttgggttcgaggaagtcgccaagcacaacgtcaccaaggactgctggatcatcatcgccggcaaggtgtatgacgtcactccgtttatggatgagcatcctggtggagacgaggttttgctagctgtaactgggaaagatgctacagctgatttcgaagatattggccacagtgattccgcacaggacatgatggagaagtaccacat

SEQ ID NO: 17935 - DNA, 314 bp, Zea mays
cggacgcgtgggcggacgcgtggggaaattttcttcagcaagcactgcccactttggtacggatacggcggcgggctaaaattcctggaaaggttttcttatatcaactccaacgtttatccctggacgtccattcctctcctggcttactgtaccttgcctgccatctgcctgctcacggggaagtttatcacaccagagcttaccaatgtcgccagtatctggttcatggcacttttcatctgcatctccgtgaccggcatcctggaaatgaggtggagtggcgtggccatcgacgactggtggaggaacga

SEQ ID NO: 17936 - DNA, 312 bp, Zea mays
gcttcctccaaagccactccaaacccccgcttccagaaccttctcgaaactctccgcctcctcctctactcgctccgatggcgaaggaaccgatgcgcgtgctcgtcactggcgccgcagggcaaattggatatgctcttgttcccatgattgctaggggagttatgcttggtgcagaccagcctgttattctgcacatgcttgatattccgccagcagctgaagcccttaatggtgttaagatggagttggttgatgctgcatttcctcttctgaagggagtcgttgcgacaactgatgttgtggaagcgt

SEQ ID NO: 17937 - DNA, 331 bp, Zea mays
  unsure (1)..(331): unsure at all n locations
cccacgcgtccggcaaagcgaagcngcgcacagagatctagctgaggctgagagctactagctagcagctgctgcaggtctcctgacatggcgaacaggacatcgaagcatcggggcccgagtgcggcgagttctcggccaaggactacaccgaccctccgccggcgccgctaatcgacgcggatgagctcaccaagtggtccctctaccgcgcggtcatcgccgagttcatcgccacgctgctcttcctctacatcaccgtggccaccgtcatcgggtacaagcaccagacggacgcggcggcgtcgggccccgacgcggcgtgcggcgg

SEQ ID NO: 17938 - DNA, 314 bp, Zea mays
ccaattaacccaaaggatttcaagtatgttttcctggcagcaagcagctcactgaaggggcaaagtgacaaagagaagtatgagaagtccagaaaattgaagggtcatatacaaagaattcgtgagaattatacaaaagatttcaaaaacaaagatgtgacgaggaggcaaatagctgtggcaacataccttatcgataaactagcccttagggctggcaatgaaaaggacgacgatgaagctgatactgttggttgctgtacgctgaaggttgataatgttacatgtatgcctccaaatcagattcagtttga

SEQ ID NO: 17939 - DNA, 308 bp, Zea mays
ggcatctcactggagagtttgagaagaaatatgaaccaaccattggtgtggaagttcatccgttggatttcaccactaactgtggtaagatcaggttctactgctgggataccgcaggcaagagaagtttggtggcctcagggatggatactatatccatggccagtgtgcgatcatcatgtttgatgtaacctcaaggcttacttacaagaatgttcctacgtggcatagggacctgtgcagggtctgtgaaaacatccccattgtcctctgcggtaataaggttgatgtgaagaacaggcaggtca

SEQ ID NO: 17940 - DNA, 306 bp, Zea mays
gtctgctgcacacaacctgtggaactcccaactatgttgctcccgaggttataaacaataagggctatgatggagctaaggctgatctgtggtcatgtggagtgattctctttgtcctcatggcggggtacctcccatttgaagattcgaacctgatgtcgctctacaagaagatcttcaaagcggatttcagttgcccgtcctggttctccacaagcgcaaagaagctcatcaagaagatacttgatcctaatgctaacaatagaataactattgcagagctcattaacaacgagtggttcaaga

SEQ ID NO: 17941 - DNA, 307 bp, Zea mays
cggacgcgtgggccggcatgtggccaaggtcgctctcggcggggacccccaagtggcactgtttggtgtgttcgatggccacggcgggaaaaacgcggcagagttcgccgcggagaacatgcccaagtttatggccgaggagttgacgaaggtaaacggcggagagatcgaaggagcggtgaagaggggttacctcaagacggacgaggagttcctcaagagggacgagagcgggggcgcgtgctgcgtcacagccgtcctccaaaagggtggactggtcgtctccaacgctggagactgccgtgcg

SEQ ID NO: 17942 - DNA, 308 bp, Zea mays
cggatgcctgctcctgctcgtcttccttctggcagacgtatcaggcagccgtgctgaaactgccgtcgatctgggtccagactcggaggacggcagcaagaggaggtcgctggccaccgccatgttctgtgtggcgaaacagggcgcggacgcggcggcgctgcaggcagggctcaactgggcgtgcgggcagggccgagcgaactgtgcgcccatccagcccggcgggccgtgctacaagcagaacgacctggaggcgctacgtcctacgcctacaacgactactaccagaagaactttgctaccgg

SEQ ID NO: 17943 - DNA, 313 bp, Zea mays
gttggctgtctcggtgtcatcgtctcctctcgtctcgttctcttctcctcacctccttcgtttcgcggacagagcgagcagccggcaccggacctccaaggagcgcaccgcggaggccagcgaagatgcccgggctcacggcaccgtccgactacgcggaggagccgccgcgtcacccggccctcaagatcaactccaaggagccattcaatgctgagcctcaccgatcagagctagtcgcatcttacatcaccccagtggatttcttctacaagaggaatcatggacccatccctaaagtcgaggacctctc

SEQ ID NO: 17944 - DNA, 311 bp, Zea mays
atcatgatgatcaggatacaaaagctgaaagtgagggcgaggcagaaggaacaactgagacacatgatgtggaaggaggaatatcactaccactttcagaacgctctctgtactcagtaaaaccacttgccaagcatgtacctacagctttacatgatcgagagaagttctcacgtatattttatggaaacgattcattttatgtcttgttcaggctacatcagatcttatatgagagactactttcagcaaaaactaactcttttaccgctgaaaagaaatggaggaattccaaggatacaaaccctcct

SEQ ID NO: 17945 - DNA, 114 bp, Zea mays
atcaaaagtatagaatgtgcaatcatagacaaaggtttcgaagagggatggatgattccacgacctccacttcaaagaacaggaaggaaggtggccattgttggcagtggacca

SEQ ID NO: 17946 - DNA, 236 bp, Zea mays
gaggaacgtcaagggtcctgttcgtgagggtgacatcctcaccctgctcgagtctgagagggaggccaggaggctgcgctgaagccctggtggccttggatgtaattctgttaattttgttctatgtttgtcgaacttgccgtgtgacccttgcaacatctgctttgagatttactgagcctggattgcacttttattttatgttcctgccggaaagtgcacatgccgagacatag

SEQ ID NO: 17947 - DNA, 236 bp, Zea mays
gtggaacatgtggatcatgctcggaagtccgcacaccactgtatagagacgctcctaacatcccagacaaaagcgtatgactaccttccatacttctactcgagggtttttgagtacgagggaagttcgaggaaagtctggtggcagttttatggcgacaatgtcggcgaagagtcgaagtagggaactttgatccaaaggttgcgactttctggatcgactctgatagccggctg

SEQ ID NO: 17948 - DNA, 234 bp, Zea mays
ctatctcaagatgaagggtgattactacagataccttgctgagttcaagactggagctgagagaaaggacgccgctgagaacacgatggtggcatacaaggctgcccaggacattgctctggctgagcttgctccaactcaccctattaggcttggactggcacttaacttctcagtgttctactatgagattctgaactcacctgatcgcgcctgcagtcttgcaaagcaggc

SEQ ID NO: 17949 - DNA, 237 bp, Zea mays
cctgaaggtggacgtggacgaatgaaggaagtcaccgcggcctacgaggtcgaggcgatgccgaccttccacttcgtcaagaacggcaagacggtcgcgaccatcgtgggtgccaagaaggacgagctcctggccctgatcgagaagcatgccgcgcctgcgcctgcgtctgcgtctgcctaaaggagatcagatcagtcgtcgccgtcaataagggccagcacgtatggctgtaga

SEQ ID NO: 17950 - DNA, 241 bp, Zea mays
tggcggagctggacgcgccgctgcacgccctcgggttcgagatggaggagctctccccgtcgcggctcaccggccgcctcgccatcactcccatctgctgccagccgttcaaggtgctgcacggcggcgtgtcggcgctggtggcggaggcgctggcgagcatgggcgcgcacatggcgtcggggtaccgccgcgtcgccggcgtgcagctcagcatcaaccacttccgcagcgccgccct

SEQ ID NO: 17951 - DNA, 241 bp, Zea mays
ggacgaggcaagggaggttggtcctcaggcgctggacttgaagcttccgttcggagagatggatgttctccgggagaacttggagctgatcaagaggcagctgggccttgagcaagtcgaggtgctctccgcgtcggacgaagctgctcgcgctaaggctggtgaacatgcttcgctgctggagaagaacccaccattacccggcgaccccatcgccatcttcctcagcaaacagagctga

SEQ ID NO: 17952 - DNA, 243 bp, Zea mays
atctgcttcagctagccccaagtttagtcggccgatcattcactgaagtagtaatggcctccgtcaacagctggaccctcgagatcgcgtcgccggtggctccgcagcgcctgttccgcgccgccgtgatggactggcacaccctggcgcccaaggtcgcctcccacgtcgtcgccagcgcgcagcccgtggagggcgacggcggcgttggcagcgtcaggcagttcaacttcacctcagtca

SEQ ID NO: 17953 - DNA, 242 bp, Zea mays
aattctagggttttgctgctctccgaccccgagctccgaaggccgcagcatcaggcgcggcccccctcgcgtgtgaccgagatggcgctgccgaatcaggggaccgttgattaccccagcttcaagctcgtcatcgtcggcgatggtggaactggtaaaactacatgtgtgaagaggcatctcactggagagtttgagaagaaatatgaaccaaccattggtgtggaagttcatccgttgga

SEQ ID NO: 17954 - DNA, 229 bp, Zea mays
ctaagttcagaaccatcaatcagtgtgcaaccactacaaccacacgaccagtttctcatatttgcatctgatggactttgggagcagttaaccaaccaagaggcagttgatattgttcgaagtagcccccgcagtggctgtgctaggaggctgataagagcggcactgcaagaggcagccaagataagagagatgaggtactcggacctcaagaagattgaccgcggtg

SEQ ID NO: 17955 - DNA, 227 bp, Zea mays
acaagctgcaccgcacaacgaacacgaaccttggcagaacgaagctgcagtagttcgctgtgaacccagtatggcaaacgcaccgaggatcctggcactcggactgctagcgatcctgtgcactgccgccggcccggccgacgcgcagaactgaggctgccagccaaacttctgctgcagcaagttcggctactgcggcacgaccgccgcctactgcggcgacgggt

SEQ ID NO: 17956 - DNA, 231 bp, Zea mays
gccgcttcgcagctcctctctctgttcttcctcctcctcctccctgcttgtgatgccatctactgcgacgaagacgactgctacgacctcctaggggttaagcaggacgcgaacgcgtcagacatcaagaaagcgtactacaagctctctctcaaacaccacccggacaagaatcccgatccggagtcgcggaagctcttcgtcaagatcgccaatgcttacgagattctg

SEQ ID NO: 17957 - DNA, 234 bp, Zea mays
gcgaatcgttatttgatagaagcatgtgtgaagtatgatgtgaaatgtccacctccccaaacgacatcgcggttgcttgacaagttggttggccatttcttggaggagacatgtgtgaatccaacatttatcatcaatcatccagagataatgagtccattagcaaagtggcataggtcccgacctggattgactgagaggttcgagttttttgttaacaaacatgaggtgtgc

SEQ ID NO: 17958 - DNA, 226 bp, Zea mays
cactacgacgggttcatgaacttcatgcaccgccacgaggaggtcgactacttcccctccaggtacgacgccgccaggaacgcgcccaggtaccccatcccgaccgcccacattgccggccgccgagagaagactgtgattagcaaggagaacaacttcaagcagcccggggagaggtaccgcgcgatggacccagcaaggcaagagcggttcatcaccagatggg

SEQ ID NO: 17959 - DNA, 226 bp, Zea mays
gatccaagttctggatgacaagaatgtccgacgtcgatttcgagcatcaaattttcaatctgtcacaagggtgaagccatatatctgcacgatgccgttgaaactcgacgatggctggaacaacatccagttgaaccttgctgatctgacaaaaagggcgtacggcacaaattacgtcgagacgctgcgggtgcaagttcatgcgaactgccggctccgcagaatc

SEQ ID NO: 17960 - DNA, 227 bp, Zea mays
gatccaagttctggatgacaagaatgtccgacgtcgatttcgagcatcaaattttcaatctgtcacaagggtgaagccatatatctgcacgatgccgttgaaactcgacgatggctggaacaacatccagttgaaccttgctgatctgacaaaaagggcgtacggcacaaattacgtcgagacgctgcgggtgcaagttcatgcgaactgccggctccgcagaatct

SEQ ID NO: 17961 - DNA, 232 bp, Zea mays
ggtcaacacgatgcccgaccaagctttgcaggcattcatagaccacggcactgtttcgaggacagttgatgcgaatgtgtccgaggcggaaggtgtatacagcgccttggagaagcttggcattgactggggcgaggtcggaaagcagcttgagctggaaggtgtggactccttcaagaagagctttgacagcctactcgtgagcctgcaggagaagggcaactagcctcaa

SEQ ID NO: 17962 - DNA, 231 bp, Zea mays
caagggcaggcggtggtggcgatggcgtccgctgacgcgcgcttggcggggatcgcctcctccatccgcgtcatccccgacttccccaagccagggatcatgttccaggacatcacgacgttgctgctcgatcccaaggcgttccgtgacaccatcgacctctttgtcgagcggtacaaggatcaagggatcaccgtggttgctggtgttgaagctagagggttcattttt

SEQ ID NO: 17963 - DNA, 247 bp, Zea mays
cagatactctttctttggaacgaaggaggcatttggctttgcgccttcctggttattatggcttaggtacagcacctttatgttgttgtatcctactggtatctctagtgaagttggtctgatctacattgccttgccttacatgaaggcatcggagaaatactgtattaggatgcccaacaaatggaacttctcatacgattacttctattcatctgtccttgccctcctgatctatgttccagga

SEQ ID NO: 17964 - DNA, 246 bp, Zea mays
ggagtcgaggagcaggaggctagggtttaaggtgccaggctgagctcgctccccagcgagatctccttcccctgcggcctcccctcgctccgcttcttcatcgacgacgttgaggatcctgttgctaatgaccctctccagttgcttccgaaaagaacttaccagcccagtaccatcaagcggaaaagaacccatggattccttacacgtaaatcgaccaagggtgggcgcaaggtgattgcccgg

SEQ ID NO: 17965 - DNA, 248 bp, Zea mays
aggcaccacacctcttcttcttcttcctcctcctcctagcacagctagcgcctgctccccttcgcctgtgatcatgtcttgcagcagcggcaagtgcgactgtggctccagctgctcctgcggcagctcatgcaactgcatgtcccctaacgtggagaccgccgccgccagcagcatcaagaccacggtcctcgccgcgccgaccaccaaggccagcgccggcggcttcgaggcggccaccgatggcg

SEQ ID NO: 17966 - DNA, 250 bp, Zea mays
gaggaacaccgggcgtgtaggtgtgatcaagaacagggagaagcacaagggcggcttcgataccatccacgtcgaggactccatgggccaccagttcgccacccgcatgggcaacgtgttcaccattggcaagggcaacaagccgtgggtgagcctgcccaaggtcaagggtatcaagctcagcatcatcgaggagcagaggaggcgcgactttgctgcccaggctgctgccaaggcataagttctctga

SEQ ID NO: 17967 - DNA, 250 bp, Zea mays
cccacaccccccgagctcagcttagctccactccagctccaatcacagtcgtgaccagagcgcgagagctagctagagggccgtgaaaatgccgatcaataggatcgccctggggagccaccaggaggtgtaccacccgggcgccctcaaggcggcgttcgctgagttcatctccaccctcatcttcgtcttcgccggccagggctccggcatggccttcagcaagctgaccggcggcggcccgacgacc

SEQ ID NO: 17968 - DNA, 249 bp, Zea mays
accttctcaaccttctcatcggtttcctctcccccatggtcgaccccgagctcgacccctccgccgcctccgaggggccagcgctgcccacccgggggtccgacgagttcaagccattcatcaggcgcctccccgagttcaagttctggtatgccatcacaaaagcttttgttatagcttttgtgatgactttcttctcagtgtttgacgttcctgtcttctggcctatactcctctgctactggattg

SEQ ID NO: 17969 - DNA, 248 bp, Zea mays
ctttgaggtgcctactggatggaagttttttgggaatttgatggatgctggaatgtgctcaatctgtggtgaagaaagctttggcactgggtctgaccacattcgtgagaaggatggcatctgggctgtgcttgcatggctttcaattattgctttcaagaataaggacaaccttggaggagataagcttgtcactgtcgaagatattgtccgtcagcactgggccacatatggtcgccattactaca

SEQ ID NO: 17970 - DNA, 248 bp, Zea mays
ggtgtcgctgtcggagcaggagctgatcgactgcgacacggacgagaacgggtgacagggcgggctcatggagaacgccttcgagttcatcaagtcccacggcggcatcaacaccgagtccgcgtacccgtaccacgcctccaacggcacctgcgacggcgcgcgggcccggcgcgggcgggtcgtggcgatcgacggccaccaggctgtgccggccggcagcgaggacgcgctggccaaggcggtgg

SEQ ID NO: 17971 - DNA, 248 bp, Zea mays
cccaatcagaagagcggcggcgcgggcggacaaggagcaggcggaggaggagttgtgccaagccacaatgggtatctcgcgtgactcgttgcaccagcaccatcggcacagatgatacacacagcaagcgcgagcatatgaggattgccattagagagtagcgacattaaccatgttccccacttctttcccctcccgttcaatctcactggtctttgattgtattatatgtgagcatccatcattct

SEQ ID NO: 17972 - DNA, 241 bp, Zea mays
ctttgtcttcacatcgttctggaactataaggtctactatgtttacgggttcatgttgctggtctttctgatactcatcattgtcaccatatgtgtaacaattgtcggtacatatttcttgctaaatgcggagaactaccactggcaatggacttcattcttctctgctgcttccactgcggtgtatgtttacctatactccatatattattaccacatgaagaccaagatgtctggattc

SEQ ID NO: 17973 - DNA, 242 bp, Zea mays
gcgctgaagccgtcggaggtggcgccggccacgtcgctgctgctggccgacctgctgccgcgctacgtggacccctcgtgcgtcaaggtcgtgcagggcggcatcgcggagaccaccgcgctgctggagctccagtgggacaagatcttctacacaggtaacagcagagtaggacgcatcgtcatgtcctacgctgccaagcacctgacgcccgtggtcttggagctcggtggcaaatgccc

SEQ ID NO: 17974 - DNA, 242 bp, Zea mays
gcgtcacccgcctagatcttggtaatttgaacttatctggtcatctggtgcctgagcttgggaaactggagcatcttcagtatctggaactttataagaataacattcaaggaacaatcccttctgagcttggcaacttgaagaatctaataagcttcgacttgtacaagaacaacatttcggggacaatacctcctgcccttggaaagttgaagtcccttgtattcttgcgtctcaatggc

SEQ ID NO: 17975 - DNA, 242 bp, Zea mays
attgagatttttgaggctagcaaagatgataacagagaggcttcaccagaatgctctatttgccttgatggattttacgacggagatgagctgataaggttgcactgtggccacaggttccactcaacatgcttggagccatgggtgaggaaatgttcagactgcccatactgtcggacaaatatacggtcacgatcctgatggcaaacccttagttctgaacaaattataaccaccgcgaa

SEQ ID NO: 17976 - DNA, 241 bp, Zea mays
cgtctcaagaaagtcgttcctgggcgccattgttcccttggatttgttgttggtcgtcgtgtgtatccctgatccatctaggatcatcgtattgtattgtagtgtatgtatatcgtcggcctaccatcgttgccattcaccatagtgaggtggttggacatgcttcgcctatatgcacctgtgcttgccgtccttcgggtcggtgctctttggttaatgttcatcgaagacgttgatttga

SEQ ID NO: 17977 - DNA, 233 bp, Zea mays
ctagtgtgtttttagggtgagcccgtccaagatgcccatgcgtccccgcgcccctcggcagctgatgtcgtactacgctaggggattgaagaagcacttgaagatgctcgatgcgccgaagcaatggatgctcgacaagcttggcggagcttttttcatgctctgcaaggtgaggtctgttcagtttggccagaaaggtatgccctacctgaacacctacgatgatcgcacca

SEQ ID NO: 17978 - DNA, 234 bp, Zea mays
tgcgtataagtcggtacaggcgtacagttcttaggaatgctgcttgtcaccttgctgtttgccatcctcagccacatttcacctgcgaatcgcggaaggctcatgacagcaatgctcctcctctgggtcttcatggggctgtttgcaaggtacgcctcatcgcggctttacaggatgttcaagggctcgcagtggaagaatgtcaccatcaagaccgcgctgatgttccctggc

SEQ ID NO: 17979 - DNA, 228 bp, Zea mays
gacatattgatatgcaattggtttggtatttgggctggaatgcaaaccgtgcagtacttcgatgggaggacatacgaatgggctggtttgagccgccaacccaacattatcagtaaggtaaaaaggatgctgggacagttcacaccagcacagtgggacaacgacgagtggcaacctacgctgggtccttggagattcatccaggtgctgagcccttgtgttgttttc

SEQ ID NO: 17980 - DNA, 218 bp, Zea mays
tggtaaaactacatttgtgaagaggcatctcactggagagtttgagaagaaatatgaaccaaccattggtgtggaagttcatccgttggatttcaccactaactgtggtaagatcaggttctactgctgggataccgcaggccaagagaagtttggtggcctcagggatggatactatatccatggccaatgtgcgatcatcatgtttgatgttacct

SEQ ID NO: 17981 - DNA, 235 bp, Zea mays
ctatcagctgcctggaagaggtcgtcagggaagcgaaaggccggctaccggtgttcctcgacggcggcgtccgcgtggcacggacgtcttcaaggccctggcgttgggagcttcaggagtgttcatcggccggcccgtgctgttctcgctggcggtggacggcgaggccggcgtgcggaaggtgctgcagatgctgaaggacgagctggagctcaccatggcgctcagcggctgc

SEQ ID NO: 17982 - DNA, 183 bp, Zea mays
cgcgattctatttacgagcatgtcggcctcttccaatattagcgaataagtttgtcatttcaaattctctcgctgtaccattgacgattgtatttgtgtggagttatatttgaaattttaatgatcaaaaaaaaaaaaaaaaaaaaaaaaaaaaaaaaaaggcgaaaaaaaaaaaaaatcaaa

SEQ ID NO: 17983 - DNA, 201 bp, Zea mays
ccgacttcatcaaggtcagcgacgacgaggtggccttcctcacgcgcggggacgccaacgacgagaagaacgtgctgtccctgtggtttgaagggctcaagctgctcgtcgtcaccgacggggacaagggatgcaggtacttcaccaaggacttcaagggcagcgtgcccggcttcaaggtcgacaccgtcgacaccaccg

SEQ ID NO: 17984 - DNA, 248 bp, Zea mays
ggagtcgaggagcaggaggctagggtttaaggtgccaggctgagctcgctccccggcgagatctccttcccctgcggcctcccctcgctccgcttcttcatcgacgacgttgaggatcctgttgctaatgaccctctccagttgcttccgaaaagaacttaccagcccagtaccatcaagcggaaaagaacccatggattccttacacgtaaatcgaccaagggtgggcgcaaggtgattgcccggag

SEQ ID NO: 17985 - DNA, 240 bp, Zea mays
agcatcgatccgccattgctcaccgcacaagtgcacgctcacctcacacacgcagctaagtagctaacgccgtaagcagaacaagaaaaggctcgacatggccgaggagaagaagcagggcctgcagctgctggacttctgggtgagcccattcgggcagcgctgccgcatcgcgctggacgagaagggcctggactacgagtacctggagcaggacctggggaaaaagagcgagctgct

SEQ ID NO: 17986 - DNA, 247 bp, Zea mays
ctgcgcctctacatttcttctctctctgctcctccgcctccgcctgatccatccaagacagggatcgccatgtcggactcggaggagcaccacttcgaatcgaaggccgacgctggggcgtccaagacctacccgcagcaggctggcaccgtccgtaagaacggcttcatcgtcatcaagaaccgtccctgcacagttgtggaggtttctacctccaagactggtaagcatggccacgccaaatgcc

SEQ ID NO: 17987 - DNA, 246 bp, Zea mays
ggttgctacacgtatatattctgaagaagagatcgagatgaccagcgtgtggaagaccaaggttctgcctggcctcaacaagatctttgacaaggatggcaagaaggctgcagctgcaggcttcttgaagtccttcaacaaggaggagattgacaaggagattgaggacaagaagacagagctggagcccaaggtcgtggaggcctacgaagcatctcctcctgaggtcaaggctctgttcaagga

SEQ ID NO: 17988 - DNA, 247 bp, Zea mays
ggagggcatcccgccggaccagcagcgcctcatcttcgccggcaaacagctcgaggatggccgcaccctcgccgactacaacatccacaaggagtcgacgctgcacctggtgctccgcctcaggggaggcgccaagaagcgcaagaagaagacgtacaccaagcccaagaagatcaagcacaagcacaagaaggtgaagctggccgtgctccagttctacaaggttgacgacgccaccggcaaggtc

SEQ ID NO: 17989 - DNA, 205 bp, Zea mays
accgctgttaggttctaccaggagaccttcggcgtccctccggccacgcgagctcgccgaaatggtcgcccacaggttccatcagtaccaggtggtgggtcgcgcgctgccgaccccaaccgatgagcaccccaagatctaccgcatgaagctctgggccaccaacgaggttcgcgccaagtccaagttctggtacttcctgaga

SEQ ID NO: 17990 - DNA, 242 bp, Zea mays
  unsure (1)..(242): unsure at all n locations
atgagggagttccggtctggctcctcccgtgtgctcatcaccaccgacctgcttgctcgtggtantgatgttcagcaagtgtccctggtcatcaacaatgatctcccaaccaagccagagaattacctgcatcgcattggtcgaagtggtcgtttcggtaggaagggtgttgccatcaactttgtgacccgcgacgacgagcggatgctgttcgacatccagaagttctacaacgtgttgat

SEQ ID NO: 17991 - DNA, 243 bp, Zea mays
atttgtatggtaacgttgtcctcagtgggggatctaccatgttccctgggattgccgatcgtatgagcaaggagatcacgtccctggctcctagcagcatgaaggttaaagtgattgcgccacctgaaaggaagtacagtgtctggatcggtggctcaattttggcttctctcagcatttttcagcagatgtggatctccaagggagagtatgacgaaactggtccgggcattgtccacatga

SEQ ID NO: 17992 - DNA, 241 bp, Zea mays
caaggagaaattgcaaacctgtcactagcgaagagtacttcgtcgagcacactcttgcaattaatccaccgagttcggtttagtagcatagcatcgacaataaatgtcgctcgtgagtcggcgcagagcaacgtgttcgaccccttctccctcgacctctgggaccccttcgacatgttccgctccatcgtcccgtcggcggcctcctccggcggcggttccgagaccgccgccttcgcca

SEQ ID NO: 17993 - DNA, 240 bp, Zea mays
cagcaacaaggcaccacacctcttcttcttcttcctcctcctcctagcacagctagcgcctgctccccttcgcctgtgatcatgtcttgcagcagcggcaagtgcgactgtggctccagctgctcctgcggcagctcatgcaactgcatgtcccctaacgtggagaccgccgccgccagcagcatcaagaccacggtcctcgccgcgccgaccaccaaggccagcgccggcggcttcgag

SEQ ID NO: 17994 - DNA, 171 bp, Zea mays
gcccttctccgcgaaatagccgtcgccgcactgccgcagctccggctatgtcaatcttcgagtacaatgggtccgccgtggtggcgatggtggggaagaactgcttcgcgttgccagcgaccggcggctcggcgtgcagcttcagaccatcgcgacagacttccagagggt

SEQ ID NO: 17995 - DNA, 117 bp, Zea mays
cggacgctggggtacctagtgacagtggtattacattcaatgttgcacccaatatgaaggcgcttgaaattgactgagaaagccagggatgctctcctaagtggaaagtttgaccag

SEQ ID NO: 17996 - DNA, 243 bp, Zea mays
tgagttcttccgtgatgcccaagagaaggtcctcccgtatgctgactacatcttcggcaacgaaactgaggcaaagatctttgccaaagtcagaggatgggagactgagaatattgaggagattgctttgaagatctctcaacttcctttggcttcaggcaagcaaaagaggattgctgtgattactcaaggtgctgatccagtggttgttgctgaggatgggaaggtgaaaacgttccctgt

SEQ ID NO: 17997 - DNA, 243 bp, Zea mays
atgtgaacaagaagttcagcaaccagtacaaggctacgattggggcggatttcctcaccaaggaggtgcagttcgaggacaggctcttcactctgcaaatatgggacactgctggtcaggaaaggtttcagagtcttggcgttgcattctaccggggagcagattgttgtgtcctagtctatgatgttaattctatgaaatcgtttgataatcttcacaactggcgtgaagagtttctaattc

SEQ ID NO: 17998 - DNA, 238 bp, Zea mays
ctggaatccaaggtgaatgagacgaaggctacagtcaagtttcaactgaagaaagtcctttgcatgggtgtcgcggtcggtaacctgtctatggaggagaagcagatccaacagaacatccagatgagcatcaacttcctcgtgtctcttctgaagaagaactggcagaatgtaagatgtctctacatcaagagcaccatggggaaaccattcaggattttctaagtctgtttttttg

SEQ ID NO: 17999 - DNA, 231 bp, Zea mays
gcggacgcctccgcgcgggcgcactcccgcgcctactcccaggcgctcaagctggagggcatcgacttcgccgagctggtgcggaggcaccagctccggctcgggtacggcagcaagggcgaggagttcgaggacctggacgacacccagaagctggaggtgtacaacagcatcatcgtcgagtcggggcgggcggggctaccggtgcggatgttctcgtcgggccgctct

SEQ ID NO: 18000 - DNA, 252 bp, Zea mays
ccagaggcgcacgtgttcaaggccgacgtaccggggctgaagaaggtggaggtcaaggtggaggtcgaggacggcaacgtccttcagatcagcggcgagcgcaacaaggagcaggaggagaagacggacacctggcaccgcgtggagcggagcagcgggaggttcctgcgcaggttccgactgcccgagaacgccaagacggagcagatcacggccgccatggagaacggcgtgcttacagtcactgtgccg

SEQ ID NO: 18001 - DNA, 236 bp, Zea mays
aattagagaaggttatcaagagcgaaacttctggaaactttgaatttgcacttttgactatcctcagatgtgcggaaaacccagcaaagtattttgctaagctcttacgaaaggccatgaaaggtttaggcactgatgacatgacacttataagggtggtggtgacgaggaccgagattgacatgcaatatatcaaggcagagtacttgaagaagtacaagaagccattagctgag

SEQ ID NO: 18002 - DNA, 112 bp, Zea mays
ccaagggaaagaagggtggcaagaaaaagaccgtcgaccctttctctaagaaggattggtatgacatcaaggcaccgtcggtgttcagtgtgcgcaacatcgggaagactct

SEQ ID NO: 18003 - DNA, 237 bp, Zea mays
gcgacgacggcacgccctactggatcgtcaagaactcgtggggcccttcctggggagagggcggctacatccggatgcagcgcggcaccggcaacggcggcctctgcggcatcgccatggaggcgtcctttcccatcaagacctcgcccaacccgtcgcgcaaccccgccgcgcgctcatcaccagggacgcctcttcccagtgacaggctgatccatctcggcgtcgaactcgtac

SEQ ID NO: 18004 - DNA, 233 bp, Zea mays
gcgacgcgtcgttgctgctggacgacacgcccagcttccagggcgagaagatggccaagcctaacaacggctccgtcagaggcttcgaggtcatcgacgccatcaagtccgccgtcgacaaggcctgccccggggtcgtctcctgcgccgacatcctcgccatcgccgccagggacagcgttgtcaccctcggaggtccgaactgggacgtcaagcttggccggagggactcc

SEQ ID NO: 18005 - DNA, 229 bp, Zea mays
caggtattagcagtcgaccggttcctcggagcacgatgaagtttgttgctgcctacctgcttgctgtcctcgctgggaacgccagcccctccgctgacgatttgactgccattctggagtcagttggctgtgaagttgacaatgaaaagatggaactcctgctgtcccaactgagcggtaaggacatcaccgagctcattgccgcgggcagggagaagtttgcttcagt

SEQ ID NO: 18006 - DNA, 233 bp, Zea mays
catagtgcgagtgagctatgcagcacatgtcatgcttgtctttcccattgtcttctttgccctccggctcaacttggatgggttgctcttccccacgtcaaggcacatctctcgtgacaacaagagattcgccatcatcaccgtctctctcctcgcagtaatttatcttgctgccattctcataccaagcatctgggacgcgttccagtttactggtgccacagctgctgtcc

SEQ ID NO: 18007 - DNA, 231 bp, Zea mays
gttctaccaagttctgttgtacgaacttgatgccattagaaaggcctgtgcatcattggagtctgattaccagcctccagttacttttgtcgtggtccagaagcgtcatcacaccaggttgtttgttaataatcacaatgatcagcgtgctgccgatagaagtggcaacatactgccgggcactgtggtggactcaaagatttgccatccaaccgagtttgatttctacct

SEQ ID NO: 18008 - DNA, 237 bp, Zea mays
gtcgcaagatcctgactaccgtccagggattgaagaaggagttcagctacagcaagatcctcaaagatctcaagaaagagttctgctgcaatggtacagtggtccaggacccagaacttggacaggtcattcagctccagggtgatcagaggaagaacgtctcgaatttcctcgtccaggccggcattgtgaagaaggagcacatcaagattcatggtttctgagcaaccgccgggt

SEQ ID NO: 18009 - DNA, 230 bp, Zea mays
gcagcaaccagcatgtgccaggcttcatcacacaggctgagcagctcaaagccaagggtgtagacgagatcctgcttatcagcgttaacgaccccttcgtcatgaaggcgtgggcgaagacctaccccgagaacaagcacgtgaagttcctcgccgacggatctggagcgtacaccaaggcgctcgacctcgagctcgatctcacggacaaagggctgggcgtgcgctcg

SEQ ID NO: 18010 - DNA, 225 bp, Zea mays
tggactccgcgcacttcgccgtgccccagggcgcgcgcgccgtcgagctggtgggcggccgggagagcgcgctcgtgcaggaggtgcgcaccgtgcccgggtggacctaccgcctcgccttcgccgtgggagactcgggcgacggctgcgcgggctccatggccgccgaggcctacgcggcgcgcgccacggtcaaggtgccctaccagtccaggggcaccggag

SEQ ID NO: 18011 - DNA, 230 bp, Zea mays
gcagcgcctcaaggtaccaccggcgctcaaccagttcacccgcaccctcgacaagaacctcgctacgaacctgtttaagatgcttctcaagtaccggcctgaagacaaggctgccaagaaggagaggcttctgaagagggcccaagctgagaatgaaggaaaaactgttgagtcgaagaaaccaattgttgtgaagtatggccttaaccatgtgacttacctcattgagc

SEQ ID NO: 18012 - DNA, 229 bp, Zea mays
gggaagaccatcaccctcgaggtcgagagcagcgacaccatcgacaatgtcaaggccaagatccaggacaaggaagggatcccgccggaccagcagcggctgatctttgccgggaagcagctggaggatggccgcacccttgcggactataacatccaaaaggagtctacgctccacctcgtgcttaggctccgcggtggaatcattgagccctctctgcaggcgctcg

SEQ ID NO: 18013 - DNA, 226 bp, Zea mays
aacgaggatggaggatgactcgccgctgacgaagacgatgaagggtgcggtgacaggactcgccgcggggaccatctggggcaccgtcgtcgccacctggtacgacgtgccccgtgtggagcgccacgtcgcgctccctggccttatccggacgctcaagatgtgcggcacctacggggccaccttcgccaccatcgggggcctctacatcggcgtcgagcagctc

SEQ ID NO: 18014 - DNA, 227 bp, Zea mays
gccagggatcgccatgtcggactcggaggagcaccacttcgaatcgaaggccgacgccggatgcgtccaagacctacccgcagcaggctggcaccgtccgtaagaacggcttcatcgtcatcaagaaccgcccctgcaaggttgtggaggtttctacctcaaagactggtaagcatggccatgccaaatgccactttgttgccatagacatattcaacgggaaaaag

SEQ ID NO: 18015 - DNA, 228 bp, Zea mays
ggcagcgatggagaagttatacgactctggcaaagctcgtgcaatcggcgtgagttacttctcttgtaagaagctgcatgatttgcttgccgttgcacgagtgcctccagcagtcaaccaggttgagtgtcatccggtttggcagcaagacaagctccggaagctatgccaatccaatggtgttcatctttctgcattctcgcctttaggctcacctggatctccttg

SEQ ID NO: 18016 - DNA, 228 bp, Zea mays
ggacattcctggacctggagtgaaggaacagctccagaacctttgcaatgtctatgccctctacattctccacaagcacctgggcgacttcctggcaaccgggtgcatcacacccaagcagggagcgctggcaaacgagcagctgggcaagctttacgcacaggtgcgtccaaatgctgttgcgctggttgatgccttcaactacacagaccactacctggggtctgt

SEQ ID NO: 18017 - DNA, 227 bp, Zea mays
ggcgtcctcaccaacatcatcaacggcggcctcgagtgcggccacggcgccgacgctcgtgttgccagccggatcggcttctacaaacgctactgcgacatgtttggtctcagctacggcgacaacttggactgctacgaccagagccccttcggaaacacaatcttaagcaccaccaataataccacctcatatcacgttgacgcctaataagtaacaagagctac

SEQ ID NO: 18018 - DNA, 226 bp, Zea mays
cgaaatgatgacgcacgagaacgtctccagagctgtgctggttctccagcagaacctaactccgtttgcgaagtcgtttctcatagagctggagccgaagatccatctggaaattttccaggaggccgagatgcttataaacatcaaggaacatgtccttgttcctgagcatcaggtgctcacaaacgaggagaagaagacgcttctggagcggtacaccttgaag

SEQ ID NO: 18019 - DNA, 223 bp, Zea mays
gccgggaggtgagcgtgcagggcgtgacgctgcagaacgcgcacagttccagctgacgttcacgcgctgctcctgcgtgaaggccagcttcctccgggtggtggcgccggcggacagccccaacaccgacggcatccacctcaacgacacctcccacgtccgcatcacggacaacctcatctccacaggggacgactgcgtcatccatggtcggcaattgctc

SEQ ID NO: 18020 - DNA, 223 bp, Zea mays
atggacgcagatgtgatcaccatcgagaactcccggtccgacgagaagctactgtccgtgttccgcgagggtgtgaagtacggagctggaatcggtccaggtgtctacgacatccactcgcccaggatcccctccaccgaggagatcgcggaccgcgtcaacaagatgctcgccgtgctcgacaccaacatcctctgggtgaaccctgactgcggtctcaaga

SEQ ID NO: 18021 - DNA, 179 bp, Zea mays
ctggtactgtggttgcagttcccacgttggttggctgccgtgtccttccttgggctaaggcgaatctcaactacactgcacaagcactcattatatctgcagcctgtattgctggcttcttcatcactgctgacaaaaccattctacggaacgcacgacaaaacaccatcgggaagctt

SEQ ID NO: 18022 - DNA, 223 bp, Zea mays
cccacgcgtccgcttcgaggagaccctgtaccagaagaccaaggatggcaagccttttgttgatgtcctcaaggagggaggcgtcctccctggcatcaaggttgacaagggcaccattgaggttgttggcactgataaggagaccaccacccaaggccatgacgaccttggcaagcgttgcgccaagtactacgaggcaggtgcccgctttgccaagtggcgc

SEQ ID NO: 18023 - DNA, 225 bp, Zea mays
atgaaacactgagagccagtccgcagtggaacgagacggccctgattatcacatatgatgagcatggtggattctatgaccatgtacctacgccggtcgttggagtgccccagcctgatggaatagttgggcctgatccatactacttcaagttcgaacggcttggggtgcgagttcccacctttctcatctcaccttggatagagaagggcactgtgatccatg

SEQ ID NO: 18024 - DNA, 225 bp, Zea mays
gacatgcttctggcagcatcggaggctctggcccagcaggtcacagaagaaaattttgagaaggggctgatttatcctcccttctcaaacataaggaagatctctgcccacattgcagccagcgttgcagcaaaggcatatgaacttggtttggcaagtaggcgccctcggccaaaggacctggtgaaatatgcagagagctgcatgtacagccccatctaccgc

SEQ ID NO: 18025 - DNA, 163 bp, Zea mays
cccacgcgtccgcccacgcgtccggtaaagagctacagcagatgtgaaataaaagtaattgatcttgggagcacctgttttgagactgatcatctatgttcatatgtgcaatcacgatcttaccgtgcacctgaggttatacggggcttgccttatgacaaaa

SEQ ID NO: 18026 - DNA, 208 bp, Zea mays
tgtcacatttgtggtgaatgccaatgttggtagtgatcctttgtactcgattgaacgtctacgttctgaaaatgatgcggttattttggcttgtggagcaacaaaaccgagagatctcaccatccctggacgcgagctatctggagttcatgttgcaatggaatttctccatgcaaatacgaaaagtttactcgacagcgacctggag

SEQ ID NO: 18027 - DNA, 266 bp, Zea mays
cactagaggaaatatgcagaattgtgcctggtggtgctctagtgttttttcctagctacaagttgatggacaaattgcaagtgcgctggtctcagacaggtcaatgggcacggcttaatgctcaaaaacatgtgtttgttgagcctaagggaagtagtgaggaactggatcctgttttaaaagggtactatgacgcaatccttggtaaagctcctgtcaagaaaggcagatgtggttcaaaacaaatagcgaagattcgagtgaca

SEQ ID NO: 18028 - DNA, 167 bp, Zea mays
cgacctggcgtgagcaagacctatctgttatcaacttggtgattgtgaagaagggtgagaatgatctgcctggtctgactgacactgagaagccaaggatgaaggggcccaagagggcctccaagatcagaaagctgttcaaccttaacaaggatgatgatgtacgc

SEQ ID NO: 18029 - DNA, 214 bp, Zea mays
cggacgcgtgctgcgcctccacaaggctttggcctctgttgtaagccatgggtaaggagaagtcccacatcaacattgtggttattggccatgtcgactctggcaagtcaaccaccaccggccacctgatctacaagcttggaggcattgacaagcgtgtgattgagaggttcgaaaaggaagccgctgaaatgaacaaacggtccttcaagta

SEQ ID NO: 18030 - DNA, 267 bp, Zea mays
acgagttccatagctggttcacatattcgatcgttctcctgtttctgtgtactgctggattttggatggcaagactgaatgaggggctgtcattatttgatgcaatactgattgttccaatgtttcaaattgcttggaccttcttctctatttgtacaggatttgtttactttcaagaatatcaagtatttgatacgctcaggataattatgtttgtgttaggcatgacatttgtctttgttgggatttcttgctaccaccgatgaa

SEQ ID NO: 18031 - DNA, 184 bp, Zea mays
gaactgcagaaagccgtcctattgtccctagaaagtttgacaaagataggaaattcacaactgataggatgggacgccagctttcatccatgggtatggatcctagtgctgccatgaatagaattcgcagtcagtctaggggtcgcaagcgtgagaggtcagtgagcagagcggcagcggatgg

SEQ ID NO: 18032 - DNA, 179 bp, Zea mays
ggacgcgtggtgaaggttgttttcttcacaaattcaggcacggaggcaaatgagcttgcactgatgattgcacagctttacactggttgcaatgacattatctctcttaggaatggagaccattggaatgctgcgggaacaaggggtgctactgctcaatccaattggaaattcaaggt

SEQ ID NO: 18033 - DNA, 161 bp, Zea mays
ggcaaggaagacgcagctaacaactttgcccgtggccactacactgttgggaaggagattgtcgatctatgcctggaccgtgtgcgcaacttgcagacaactgcactgggctgcagggattcttggtgttcaatgctgttggtggtgggactggctctgga

SEQ ID NO: 18034 - DNA, 188 bp, Zea mays
ccaagatcgacaggcggtctggcaaggagcttgagaaggagcccaagttcctgaagaacggtgatgctggtatggtgaagatgattcccaccaagcccatggtggtggagacattctcgcagtatcctccccttggtatgtttgctggccgcgacatggggcagacagttgcgtgttggagtcatcaa

SEQ ID NO: 18035 - DNA, 225 bp, Zea mays
ggactggataatggagcagtgggagaaaagctactacataacaacaattgctggatcatccaacgggagctcattggttgtcatgtccaaaggtcttgatttgaccttttcttgtcattgctcaggcttgcatattgatcttccatttcctcactactttcccgttagcagtgcaaaatcctattgtttctcttgtatgtcataatgcaatctctatgttaagcc

SEQ ID NO: 18036 - DNA, 253 bp, Zea mays
cccacgcgtccgggctcgaggaaggtcaccacatcatatccgtaccgaggccaggacttaaggatggtcagcacatcatatgtatctcaagatgaggacaactcatggaaggtctcgatgccatctaggttccaagttggtgagggctcaaggaagctcaccacaccattcgaatcacaaagggaggactcaaggaaggccaccgcatcagatggagtccaagatgatgaggacacagggagggcattacttc

SEQ ID NO: 18037 - DNA, 163 bp, Zea mays
cccacgcgtccggcattcgttccaactcctgagcactttctcctcgtccccgacaagccaatctaagccgagatacggccatggactccaccggcaccggagcatgtggtaaggggaagaagggagctgccgggcgaaggtcgcggggccaaggagaagtcgg

SEQ ID NO: 18038 - DNA, 244 bp, Zea mays
agcagctagctagctagcatggccgggaaagagcttacgctgctggggttatgggcgagcccgttcgtgctccgggcgcgcatcgcgctcagcctcaaaggcctcacctacgcatactccgaggagaacctcgacgacaagagcgagcttctcctcagctccaaccccgtgctcaagaaggtgcccgtgctcatccaccacggcaagcccgtctgcgagtcccagatcatcgtgcagtacgtcg

SEQ ID NO: 18039 - DNA, 237 bp, Zea mays
gtcgcaatttcgtggttgtcgtttggttattctgtgaagcagccaagccaagctattgttatgaaaatttgtcgtctgtaagcatgtgaacttccgacgttgccacatgctggatcagtctgaataagtaagtatgcagctctaggtggtcagctgcgtctaccacaatgagcatgtacgtatggagaaatatctgtgaacccattttgtttatgaataagatttgttttttcgagt

SEQ ID NO: 18040 - DNA, 236 bp, Zea mays
gcttgttgacaagtacatgaaaaaggaaattaaggtggacgagtacattacgcacaacatgaacctggctgacatcaacgacgccttccacctgctgcacgaaggtggctgtctgcgttgtgtgctggcaatgcagatttgaaattcctaagctaagcagtttttgttttggaactagaactcctttttgcctcgttaggcctggacccgctgtataatgctatgttgtgttggat

SEQ ID NO: 18041 - DNA, 234 bp, Zea mays
cacagaaaaccctagccgccgccaccgaagcggcctcccaggtaagcaggagcgtccaccccgccgccgtcatgaagcgcaatccccgcgtcacgagctcccgccggaagtgccgcaagcgcactttacggccccgtcctccgtccgccgcgttctcatgtccgccgggctgtcgacggagctccgccacaagtacaacgtgcgctccatcccgatccgcaaggacgacgaggt

SEQ ID NO: 18042 - DNA, 235 bp, Zea mays
tgacatgcgtaacaagctatatgacaagtacagtgattttgtcacacctgaggacaaggaaggtttgatcggtaaacttcaggaggttgaagactggctctatgaagatggcgaggatgagaccaagggagtttatattgctaaactagaagaacttaaaaaggttggtgatcctattgaggtgcgcttcaaagaatgggagattagaggttctgctgttagccaactgctatac

SEQ ID NO: 18043 - DNA, 235 bp, Zea mays
cattggtcgagtcagaaatattttgtttgcatggtggattatcgccatccattgagaccctcgacaacatccgcaacttcgaccgtgtccaagaagttcctcatgaaggtccaatgtgtgatcttctgtggtctgatccagatgatcgatgtggttggggtatttctccacgtggtgctgggtatacctttggacaggatatatcagagcagttcaaccataccaatagcctaag

SEQ ID NO: 18044 - DNA, 229 bp, Zea mays
gcgcctctacatttcttctctctctgctcctccgcctccgcctgatccatccaagacagggatcgccatgtcggactcggaggagcaccacttcgaatcgaaggccgacgctggggcgtccaagacctacccgcagcaggctggcaccgtccgtaagaacggcttcatcgtcatcaagaaccgtccctgcatagttgtggaggtttctacctccaagactggtaagcat

SEQ ID NO: 18045 - DNA, 228 bp, Zea mays
tcatcgatctcgtttcaaatccatccatcctcgtttcctccgtcccgcagcatctcaaccccatggccaagatcaagatcgggatcaatgggttcggcaggatcggaaggctggtggccagggtggccctgcagagtgacgatgtcgagctcgtcgccgtgaacgaccccttcatcagcaccgactacatgacctacatgttcaagtacgacactgtgcacggacagt

SEQ ID NO: 18046 - DNA, 229 bp, Zea mays
gttcggagcgcacacacacgcaaccagatctcccccaaatccagccgtcggcacctccgcttcaagatgcagatctttgtgaaaaccctgactggcaagactatcaccctcgaggtggagtcgtctgacaccattgacaacgttaaggccaagatccaggacaaggagggcatccccccagaccagcagcggctcatcttcgctggcaaacagcttgaggacgggcgca

SEQ ID NO: 18047 - DNA, 228 bp, Zea mays
ggtcgatttctaattctcctcgcgagcccaaaccctaaacctaaacctttcacccgccgccgccgccaccaccagcactgccactccgccaccaccgtcccgaagccccctcccagcgccatcgacttcatctcggattgaagcaatgtcgtcggacgatgaggtcagggaggagaaggagctcgacctctcctccaacgacgttgtcaccaagtacaaggctgccgc

SEQ ID NO: 18048 - DNA, 228 bp, Zea mays
ctcttggaagcatgttcttgggtacattctggttagggagaagaatggttctcgggtgattgccgggccaggccacagcatcattatcacctcaaatggagatgtatattcgtttggagcaaactgctccggtcagcttggccttggggattcagaagaccggttcaagccatgtgttattaggtctctacaaggcatcagaatcacacaagctgcagttggttcgag

SEQ ID NO: 18049 - DNA, 149 bp, Zea mays
cccttacccggcggcttaaaccctagttctcactcccatcgccgcttcagctccgccgcagcagatggagttctggggtctcgaggtcaagcctggttccactgttaagtgtgagcctggatatggctttgtgctgcacctttcccagg

SEQ ID NO: 18050 - DNA, 167 bp, Zea mays
gagaaacagagttcttcagtttgctatctctctctgcatgtttggcgtcagtctttgtgctcatgtacgtacgtgtgtctacctgcatgttggttgatccgattgcatctgctgtaaccatatattaattggtccacgatgatatgatttgatactatatatatact

SEQ ID NO: 18051 - DNA, 117 bp, Zea mays
gccactcccaaacccccgcttccagaaccttctcgaagctccccgccgcctcctccactcgcaccgatggcgaaggaaccaatgcgcgtgctcgtcactggcgccgcaggacaaatt

SEQ ID NO: 18052 - DNA, 236 bp, Zea mays
attgactacatagaattcattgctgcaactttgcatctcaataagctggagcgtgaggaacatctcgtggcagccttttcatatttcgacaaagatggtagtggctatatcacagtggacgaactacagcaagcttgcaaagagcataacatgccggatgcttttcttgatgatgtcatcaacgaagctgatcaggacaatgatggccgcattgactatggagaatttgttgccag

SEQ ID NO: 18053 - DNA, 219 bp, Zea mays
attgactacatagaattcattgctgcaactttgcatctcaataagctggagcgtgaggaacatctcgtggcagccttttcatatttcgacaaagatggtagtggctatatcacagtggacgaactacagcaagcttgcaaagagcataacatgccggatgcttttcttgatgatgtcatcaacgaagctgatcaggacaatgatggccgcatggactat

SEQ ID NO: 18054 - DNA, 241 bp, Zea mays
tgctgacacacctactgttgcaacaccattccgtgaacctcgttattcattgggtggtgaaactccaatgcacccgtctcgaacaccacatcatgcttatcagactccaatgcgggaccctggagcaacaccaatacatgaagggatgcggactcccatgcgaagtcgagcctgggctcctatgagccctccgagggataattgggaagatggaaatcctgctacttggggtagcagtcca

SEQ ID NO: 18055 - DNA, 228 bp, Zea mays
cctaaacaatccagagaaccaccccatccctctagagagaaccatatccatcgctcttgatgtcgcccgtggcttggagtacatacattctcaggggatcgttcaccgtgacatcaagcccgagaacattctcttcgacgagaacctctgcgtgaagatcgctgatttcggcattgcctgccaggaggccttatgcgatgtgctcgtggaggacgaaggcacttacag

SEQ ID NO: 18056 - DNA, 228 bp, Zea mays
cccacgcgtcggctgcgagacctgcaccaagaccaacatggtgatggtggtcggcgatatcacgaccaaggcgaccgtgggctacgagaacatcgtgcgcgacacctgctgcgagatcgcggtcacctcgcgactacgtggggctctacgccgaccgctgcaatgtgctggtgaacatcgatcatcagtcctccgacatcgcgcagggcgtgcactggcacttcacga

SEQ ID NO: 18057 - DNA, 229 bp, Zea mays
aggagaactagatgacacagctgctttcaaaaacttcaataagtggggcaatattgtgtttcccctaccatttggaagagttctcagtccctccgaaagttttatccatgaactggatgagaagacaagtgcttctctgaaattcacggtactgaacccaaaaggacgcatctggacaatggttgcaggtggtggtgctagtgtcatatacgcagacactgttggtgat

SEQ ID NO: 18058 - DNA, 230 bp, Zea mays
gattgctgaagcttaccttggtagcacgatcaagaatgctgtggtcacagtccctgcctacttcaatgactcacagaggcaggccacaaaggatgctggggtgattgctggccttaatgtgctgcgtatcatcaacgagccaacagctgcagctatcgcctatggtcttgacaagaaggctaccagtgtcggtgagaagaatgtcctcatctttgatcttggaggtggta

SEQ ID NO: 18059 - DNA, 231 bp, Zea mays
cgactaaatccttctgtgattcagagcttcagagtcttcaggggggtaaaggcgaaaagcttgcttgtgcttcctggctttccatgttcctgtctgctgaggttttcactataaagtgcgacgtgaattcaggtcgtcagggaagcgaaaggccggctaccggtgttcctcgacggcggcgtccgccgtggcacggacgtcttcaaggccctggcgttgggagcttcagga

SEQ ID NO: 18060 - DNA, 231 bp, Zea mays
gccgcggggaggaatgcgggcgtcctcgcgctcttcgacgtcgacggcaccctcacagcgccgcgcaagggggtgacgccagagatgctagagttcatgaagcagctgcgccacatgtgacagtgggcgtggttggcggatccgatctggtgaagattaccgagcagctcggcagtacagttattactgattatgattacgtcttctccgaaaacggcctggttgcacaca

SEQ ID NO: 18061 - DNA, 234 bp, Zea mays
gtctgtcactctctgcctgttcgctacgccctacgcatctgtgctcgacgcctacccgcatgtgaaggcctggtggtctggtctgatggagaggccgtctgtccagaaggtcgctgccctgatgaagccatctgcttgaaacggttgccctgtcaatcggtgaatggaataagccaagtctgttctgggttgtttgcttgttcagtgatgtgtcttctatgacgaaagttgagt

SEQ ID NO: 18062 - DNA, 235 bp, Zea mays
cgattctcaaacagacgcggctatccagaagatcatccgcgaggagttcactgaatgtaccgtcatcagcgttgcacatcggatcccgactgtcatggacagtgaccgagtcctggtgctggacgcaggtcaagtggcagaattcgacgcaccctccaagttgatgcggaggccatcactctttggtgcgatggttcaggagtacgcaagtcgctcatctaacgtgaaggaaacc

SEQ ID NO: 18063 - DNA, 221 bp, Zea mays
gttcggagcgcacacacacacaaccagatctcccccaaatccacccgtcggcacctccgcttcaagatgcagatctttgtgaaaaccctgactggcaagactatcaccctcgaggtggagtcgtctgacaccattgacaacgttaaggctcagatccaggacaaggagggcatccccccagaccagcagcggctcatctttgctggcaaacagcttgagga

SEQ ID NO: 18064 - DNA, 221 bp, Zea mays
cccacgcgtccgcccacgcgtccgtgcaggaagtgaagaaaaactagcagcctgcaaagctttgggtgccgatgtatgcattaactacagaactgaagacttcgttgaacgtatcaaacaggaaaccaacggaaagggaactacttcgatgctctcttttttggcagctagtatgtatcgagcattatcatcaaatagcgcaacatccctgactgtaatct

SEQ ID NO: 18065 - DNA, 222 bp, Zea mays
gccggatatgctctgttcgtacttgtatatgcaggattggaggttctcgctattcccgcaatacctttaaccatgtcagctggtctattatttggtagtgtgaccggtacaattattgtttcaatcagtggaacactagctgcagcggtggccttccttattgctagatacttcgccagagagagaattcttaaattggttgaaggatataagaagtttctg

SEQ ID NO: 18066 - DNA, 221 bp, Zea mays
ggttgctgtcaggcccgtcgagttggagaaggcaaaggagtcactgctccacctgtactaaccaaaggatccttactcggccacgatcgtctctgtcgataggcttgtaggactcagagctcctggcgatacatgccacgttgtcattgatcatggcggcaatgttccgtactgggaaggacagagttacggcgtcattcctcctggagagaatccaaaaa

SEQ ID NO: 18067 - DNA, 222 bp, Zea mays
agactaggagtttctgctatgttgccgatatggttgatggtcttattaagctgatgaatggaaacaagactggaccgattaacttggggaacccaggtgaattcaccatgctggaacttgctgagaatgtgaaggagttgatcaacccagatgtgacagtgacgatgaccgagaacactcctgatgatccccgccagaggaagccggacatcacaaaggcga

SEQ ID NO: 18068 - DNA, 225 bp, Zea mays
gggttttgctgctctccgaccccgagctccgaaggccgcagcatcaggcgcggcccccctcgcgtgtgaccgatatggcgctgccgaatcaggggaccgttgattaccccagcttcaagctcgtcatcgtcggcgatggtggaactggtaaaactacatttgtgaagaggcatctcactggagagtttgagaagaaatatgaaccaaccattggtgtggaagttc

SEQ ID NO: 18069 - DNA, 82 bp, Zea mays
gggtcaaccaacaaggttcatttcatccttaagcacaagaatcctaagactggaaagtatgttgagcatcacctcaaattcg

SEQ ID NO: 18070 - DNA, 134 bp, Zea mays
cccacgcgtccgccagccgccgtcatgtcgaagcgaggtaggggaggttcggctgggaacaagttccgcatgtcactgggtctaccggtgtcggccacggtgaactgcgcggacaacacgggcgcgaagaacct

SEQ ID NO: 18071 - DNA, 156 bp, Zea mays
gttgagaagcgtgaagtgctaaaaaggcaaggtcatggtgaatacagggagataactgaaggggacttcctcggggaggttactggcagtgaaaaagtcatatgccatttttaccaccgtgagttttaccgttgcaagatcatggataagcatttg

SEQ ID NO: 18072 - DNA, 147 bp, Zea mays
ggaggacgaggagaaggcccccaaggccatcgacctcggtcccatggtcagcatcaaggagcagctcgagaaggacaaggacgacgagagcctgcggcgatggaaggagcagctcctcggcggcgtggacttgaactccgtgggaga

SEQ ID NO: 18073 - DNA, 74 bp, Zea mays
gctgccttctataagagcttgacaaatgactgggaggagcatctggctgtgaagcacttctctgtggagggtca

SEQ ID NO: 18074 - DNA, 231 bp, Zea mays
cccacgcgtccgatcgcgtctgtccgctacccctccccgaccagatcgctacgagacgccgcgcgatcggacccaggccgacgccgacgacccctctcgccgccggcggccatggcgtacggcgaccgcgtcaccaccttcgaggactccgagaaggagagcgagtacggctatgtccgcacagtctctggacctgtggttgtggctgatggaatgggtggtgctgccatg

SEQ ID NO: 18075 - DNA, 118 bp, Zea mays
cggacgcgtggattcgtcctcagtggagggacgaccatgttccctggcatcgctgacaggatgagcaaggagacttactgccctcgcgccgagcagcatgaagatcaaggtcgtggcg

SEQ ID NO: 18076 - DNA, 226 bp, Zea mays
ctctcgtagaagcaaagctcgacagtagctaccacaccacttgacttcaccatggcactcgccggcatcaccaaccaggacttgctcgacgcacaggttgagctatggcacagcaccttcgcctacatcaaatccatggcactcaagtccgccttggaccttggcctcgccgacgccatctaccaccacggcggcagcgccacgctgccgcagatagttgacaggg

SEQ ID NO: 18077 - DNA, 229 bp, Zea mays
caagaataagatcgattactgccgcctccatggcatcgagatcgtccacaacctcgcgcaccttgacaacgagctcgccggatactgggccaaattgccgctgctccgccgcctcatgctctcccacccggaggtcgagtggatctggtggatggacagcgacgcgctcttcaccgacatgtcgttcgagctgcccctgtcacgctacgacggccacaacctcatcatc

SEQ ID NO: 18078 - DNA, 268 bp, Zea mays
gagacgagacgagttaccatctcatcccaactccggaacgaacaagttaccatctcatcccaactccgcctcgaccggatctcgtcggactcggatccgcccgaccaccccgcgccgccgcagatcaaagaagatggcagctgtcgacacattcctcttcacctcggagtctgtgaacgagggacaccctgacaagctctgtgaccaggtctcagatgccgttcttgacgcttgccttgctgaggaccctgacagcaaggttgcttgt

SEQ ID NO: 18079 - DNA, 257 bp, Zea mays
ccccaacaacagtcttctggacggattatgttgcaacaaggtggtacagagctccggagctctgtggatccttcttcaccaagtatacaccagctattgacatttggagcattggatgcatatttgctgaggtgttgacagggaagcctttatttcctggtaaaaatgttgttcaccagctagatttgatgactgatcttctaggcacaccatcaacggacacaatttctcgggttaggaatgagaaagcaagaagg

SEQ ID NO: 18080 - DNA, 261 bp, Zea mays
cttccctttctagccttccacccttcatccacccgccgctcctcgagcacccccgtcccgcgccgcctccggctccggcgagatgtcacgcttcggtcgatccggcccgccgccgccgatccgcgacacgtactcactcctcgtcctcaacatcaccttccgcacaactgctgatgacctcttccctctcttcgacaagtacggcgagattgtcgacatctacatcccaagggaccgccggactggtgactcgcgcggatt

SEQ ID NO: 18081 - DNA, 261 bp, Zea mays
cccacgcgtccggcgaggcaaaagcgcaaacgcgaccacagacagagcgcgcttcaaggccttttttttttgagataacaaggaggagaggaggagatggcggtcacgatcacctgggtgaaggcgaggcagatcttcgacagccgcggcaaccccaccgtcgaggtggacgtgggcctcagcgacggcagctacgcgaggggggccgtacccagcggcgcatccactggaatatatgaggccttggagttgagggatgga

SEQ ID NO: 18082 - DNA, 260 bp, Zea mays
caccgcgtgcgaaccaagcagaccacagcaagaagcgtagtcgtcgccggaaggaaaggcgcggacaagatgtcgtggcaggcgtacgtcgatgagcacctgatgtgcgagatcgaaggacaacatctcagcgccgccgccatcgtcggtcacgacggcagcgcttgggcgcagtccgagagcttccccgagttaaagcctgaggaggttgctggtatcataaaggactttgatgaacctggtactcttgcaccaactgg

SEQ ID NO: 18083 - DNA, 261 bp, Zea mays
cccacgcgtccgtgcagcgccgccagacactccgtagtctgtaccccaagcaccggcgcggcggcggcggctaccatggcagtcgggaagaacaagaggatctccaagggaaagaagggtggtaagaaaaagaccgtcgatcccttctctaagaaggactggtatgacatcaaggccccatcggtcttcagtgtgcgcaacattgggaagactctcgtgtccaggacacagggtaccaggattgcctctgatggtctgaag

SEQ ID NO: 18084 - DNA, 258 bp, Zea mays
gcgagagacagacgcgtatacccaggcggcggttgaggaggaggagaagaagaagaagaagatggcttcctccgcgtacgcctcatggtccaagcggtggatccgtcccgaggtgtacccgctgttcgtgccgatggccgtggccctgggtatctgctcgtaccagcttgtgcgcaacatcacgggcaaccccgaggtgcgggtgaccaaggagaagagggcggccggcgtcctggacaaccacgacgagggcgagag

SEQ ID NO: 18085 - DNA, 120 bp, Zea mays
ggctactggaaggccacgggcgctgacaagcccgtggagcacgatggccggacggctgggatcaataaggcgctcgtgttctaccactgcaagccgccgctcggtgtcaagacggagtgg

SEQ ID NO: 18086 - DNA, 256 bp, Zea mays
ctggatgcactaaatgagattcttaaagaacctgtaccaatgaaccgcttcagaccaaatattttagtggatggatgccacccatactcagaggacctgtggaaaaccataaagataaacaacctaacattcctaggtgtgaagttatgcaaccgctgcaaggtgccaaccattaatcaagaagatggagtacctggtactgaaccaactgaaactctacagacttttcggtccgaccaagtgcttcgtccaagcc

SEQ ID NO: 18087 - DNA, 254 bp, Zea mays
cacactcaagacgccttgtcgtagactctgattcacctcaagaagtagatgccaacaaagagatcattttcacctatgatattaactttgaggaaagtcctatcaagtgggcatcacgctgggacacctaccttctgatggcagacgaccaaatccattggttttctattgtcaattcactgatgatagtcctcttcctctctgggatggttgccatgatcatgctccgaactctttaccgcgacatctccaag

SEQ ID NO: 18088 - DNA, 254 bp, Zea mays
gtcaagatggtgaagaaattgttgttatggattctatagagaagcttgaaaaattatctggagtcaaggtcactgatcttcaccgacactatgttgatgatattacaattccctctaagagaggacctgagtttggggtgctcaaacgtgttgatgatgttttcgactgctggttcgagagtgggtcaatgccatatgcctacattcactatccatttgagaatcgggaactatttgaaaagaactttcctggc

SEQ ID NO: 18089 - DNA, 253 bp, Zea mays
caaggatggacttcattcctggtgttgatggtcctagtgaaggtgtgcctcgggttttggcttgcttcagtaacaatctgctccggagagagcccttgaagcttgttgatgggggtcagtctcagagaacctttgtctacatcaaggatgctatcgaagctgtagtgctgatgattgaaaatcctgctcgagccaatggccacatcttcaatgttgggaatccgaacaatgaagttaccgttagggagttggc

SEQ ID NO: 18090 - DNA, 253 bp, Zea mays
gcataccatgagttggtgcgtgctggagctgaattcccgaagagacccgagaaacctgcacctttgtttaatggccagtctcaggcagcaaggaatatgcgtagtcctgaccaacaggaagcggaatcttctgctgccaatgattttcctgctttgagcatgtcggagattcataacgctcgtggtattatggatgtacttgctgagatgctgaatgctttagacccaggaaacagagaggggctaaggcagg

SEQ ID NO: 18091 - DNA, 112 bp, Zea mays
atgaccgtggctccgagcctcagttcgcatccacgcgcgccgccgccgcctcgccggtcgacgctcaccgcgcagcatggcggaacagacttagaaggctttcctcaagcag

SEQ ID NO: 18092 - DNA, 233 bp, Zea mays
gccagaaaacatactacttgtgtcttctgagtatataaaagttccaagtacaaagaagaattcacaagatgagatgcatttcaagtgcttgccacagtccagtgccataaagctgatagattttggtagtaccgcctttgataatcaggaccataactcgattgtttctacgaggcattacagggcacctgaaataatcttaggtttaggctggagttttccatgtgatattt

SEQ ID NO: 18093 - DNA, 114 bp, Zea mays
gttcctgaaggttctttcaagtgttgagtatgttgagcctaatggtaaagacgctggaataaatgtgaggaaaaaagtagaaaccattgtgggcatcataaatgacaaggagaa

SEQ ID NO: 18094 - DNA, 253 bp, Zea mays
cggacgctggcggacgcgtgggcggacgcgtgggtaggcatccctagcgccatccaccgccgaggtggggcagcaacaatctcggacatcatcaccgagaccggcgtcgacccgtcgaagctcccgtatctccgacggctcatgcgcgtgcttaccgtctccagcatcttggccaccacaggcacagacgagactgagactgagagcgacgacagtactgtttacaagctcactccggcgtcccgcctcctcg

SEQ ID NO: 18095 - DNA, 249 bp, Zea mays
gcaaaccaaacaagcagaccaccttctccacccggccggccttcgtcttcctccgatccccaggccccagccactccccgtacaagccaaagagaccagtaggtaggcaggcagttcatcgtcgatcgagcaagatgtcggactggggccccgtggtgatcgggctggtgctgttcgtgctgctctcgccggggctgctcgtccagctccccggccgccaccacttggtggagttcggcaacctgaaga

SEQ ID NO: 18096 - DNA, 235 bp, Zea mays
aagtgaccaaggctgccgcaaagaagaaatgatgtgtctggctggttctgtgtttgcttgagggatacctagtggaaacataaaatatctcgtcttgttcacgtcattgtctgaactatgctcgcaacgtttgcctggtcgatttagaactgttattttcgttaaaaccagagtgttatttaagacttaaccgaacatctggtgagccatatatggttactagttttgttactag

SEQ ID NO: 18097 - DNA, 251 bp, Zea mays
cgaaacatagctacctactactcaagtatccatccttattgagtacagtgttgatccatggactcggaaggagttgtagcagcaaaggtggcagatgagactactaaaccggcaatccaagaagacggcgccgagagcaaggccgggatgactgatctgctgatgctgaccgacaagtcgcagctgcaggcgctggcgatgctgctgcggaacaacgaggagctcatgatgagccaggcgatcaagtcgga

SEQ ID NO: 18098 - DNA, 243 bp, Zea mays
cttgacatgggtggtggtacttgggagcgtggtacagttgttcgtgctctacgtgctgcatataataaccctgagagagctatagactacctgtattctggaattcctgagaatgtggaggctccgcctgttgcccgagcacctgctgctggccaacaaacaaatcagcaggctccatcaccagctcagccagcagctgcaccaccagtgcagtcatctgccgcctctgcaaggcctaatgca

SEQ ID NO: 18099 - DNA, 243 bp, Zea mays
ctccttcgaggagcaggtggtagtgattagagagaagcttgcagagctatatgagtctgaacaacaatggtcaaaagcagcacaaatgcttagtgggattgacttggattcaggaatcaggatgcttgatgacaccaacaaattatccaagtgtgttcaaattgcacgactctatttagaggatgatgatgcagtgaatgctgaggcttttataaacaaggcttcatttttggtcaccaacag

SEQ ID NO: 18100 - DNA, 182 bp, Zea mays
cccacacagaagcggcggcggcggagcaaacgcaggcgaaggcgagggtgtgagggaaggagcaccagccatggtgcacgtcaacttctaccgcaactatggtaagacgttcaagaaaccaaggcgtccttatgagaaggagcgtcttgatgctgaactgaagctggttggtgagtatgggc

SEQ ID NO: 18101 - DNA, 241 bp, Zea mays
gttcttttttccttttggcttattgcgcaagaagggtaacgagaggacggcggcgatggcgaagaggctgctcccgtctctgaaccgggtgctggtcgagaagctggtgcagcccaagaagaccgccggcggcatcctccttccggaaacatccaagcagctgaatgctgctaaagtggtggctgttggccctggtgagcgcgacaaggcaggcaatctgatcccagttgctctgaaggaa

SEQ ID NO: 18102 - DNA, 238 bp, Zea mays
gaggccgccatgccggtgatcttgggaatgtgacagcgggagaagatggtgttgttaatgtcaatattactgacagccagatacctcttgctggaccccactcgatcattggccgagctgttgttgtccatgctgatccggatgaccttggcaaaggtggacatgagcttagcaagagcaccggaaatgctggcggacgtgttgcctgtggtatcattgggctccaaggctaaagcgg

SEQ ID NO: 18103 - DNA, 238 bp, Zea mays
ccacgcgtccgtcttcggcgggcgtggccatgccgggacatggggaaaggcacttggtgcagaggtctatgactgcaacaacatggtggagcaggagctgcctggaggcgggctcctcgtgtaccagagcttctgtgctgctgaagacgctgttgctacctcgcccaaatctgttttccactgctttgacggcgagaacgtggagagtgctcctcctcctatgaagaaggactacaag

SEQ ID NO: 18104 - DNA, 238 bp, Zea mays
tgttgaaatgcaccatgaggctctccaggaggcccttcctggtgacaatgttggcttcaatgttaagaatgttgctgtgaaggatctgaagcgtgggtatgtggcctccaactctaaggatgaccctgccaaggaggctgctagcttcacatcccaggtcatcatcatgaaccaccctgggcagattggcaacggctatgccccagtgctggactgccacacctcgcacattgctgtc

SEQ ID NO: 18105 - DNA, 238 bp, Zea mays
gagttgggcgcagagaatccccaagcaaacaaacagggtagaggtagagggagaggacaggagacgagaggcgaggagaggttgggtctgggacaccatggctccgatgaagctgtacggggcggtgatgtcgtggaacgtgacgaggtgcgcaacggcgctggaggaggctggctccgactacgagatcgtgcccatcaacttcgccaccgccgagcacaagagccccgagcacctc

SEQ ID NO: 18106 - DNA, 239 bp, Zea mays
cggacgcgtggcggacgcgtggggaaagacccagcttggaaacataactgtggatatggtccttggtggaatgacgagggatgacaggaatgctttgggaaacatccctacttgatccagaggagggtattcgttttaggggcctctcaattccagaatgccaaaaagtgctgccaacagcagttaagggcggcgaacctttgcctgagggtctcctttggcttcttttgacggggaag

SEQ ID NO: 18107 - DNA, 230 bp, Zea mays
ctcgtcttcctccccgccccaccaggtacccacgcgttcctcagatcagatcggcaaggccaatccgaaatctcgagcgctcgcgccggcgaccacagcaaagaggaggccgcagcacgacagcgccccagggttcctactctcgtcgcagcggcagcactggtagcggcagcagtgaggggaagatgtcgtcggtgttcagcggcgatgagaccgcccccttcttcggc

SEQ ID NO: 18108 - DNA, 235 bp, Zea mays
agtgaacatagaagagaagctcaatgttgttgttaaaagagatggtggtattagtaactttgatgttcaaggaacacttgctcttcaggttcttaatgatactgatgggttcatccatttgcagaatgaacaccaagatatgcctgggcttagcttcaaaacacacccaaatatcaataaggatttgtttaacagtcagcatattgggggagcaaaagagccaaacaggcctttt

SEQ ID NO: 18109 - DNA, 87 bp, Zea mays
gcgaatgggggaggcaaaaccctgctacctgggcaggcggcatggggaacagctggagaacgaccgatgatatcgccgacaacttgg

SEQ ID NO: 18110 - DNA, 108 bp, Zea mays
cccacgcgtccgcccacgcgtccggagcggcgagggtggtgacgagaccaaagatatcctcctccttgatgtggctcccctcaccctgggtatcgagaccgtcggggg

SEQ ID NO: 18111 - DNA, 76 bp, Zea mays
gaaaactgagggcatagatctgtcgaaagatagattggccctgcaaaggcttcgtgaagctgctgagaaggcaaag

SEQ ID NO: 18112 - DNA, 80 bp, Zea mays
gttcgaagcagccatcgagacatcattcctgttcctccggatcatctgcgccaaggccaagggcgtcagcaagcggtggg

SEQ ID NO: 18113 - DNA, 84 bp, Zea mays
agacgcagtcgactgccgcagactggtagtagccggcgcgccgtcaccgtatcctcagatcagaggcgagcagaaaccacacca

SEQ ID NO: 18114 - DNA, 76 bp, Zea mays
tccacgtgtccggagcgcggacagcacaaccaggacgtgaactccctgggcctcatctcgtccaggaagaccgccg

SEQ ID NO: 18115 - DNA, 216 bp, Zea mays
cttcgtcgcgccgccgtagcacgactccgactcggccatggcgacacccccagctctcctattcccttcgccctcttcggcatcttctccgccgtcatccgcgcatgtagaggcggtggtcctcttcaacgtctgcgacagctacgtgcggcgaccggaccaggcagaccgtgtcatcggcaccctccttggatccctcctccccgatggcaccgt

SEQ ID NO: 18116 - DNA, 251 bp, Zea mays
cccacgcgtccggtcgacgcgccgtcactgaatcctcagatcacggctagccgtaatcacgccactctgctgaatcccggcgagcagtgtaacattttccttcagccatgggcaaggagaagactcacatcaacattgtggtcattggacatgtcgactctggcaagtcgaccaccactggccacctgatctacaagctcggcggtattgacaagcgtgtgattgagaggttcgagaaagaggccgcggag

SEQ ID NO: 18117 - DNA, 252 bp, Zea mays
ggagctcgacaaggacgaccgacgacgcacgcggagatccggcgtactgcaaattttgaaaactgaactgtaagatggcatcagcagagctttcccgtgaggaaaatgtgtacatggcgaactcgctgagcaggcggagaggtacgaggagatggttgagttcatggagaaggtagccaagactgttgactcggaggagctcactgtggaggagcgaaacctcttgtctgttgcatacaagaacgtcattgg

SEQ ID NO: 18118 - DNA, 252 bp, Zea mays
cgctgctcatggtccactactgatccgctccacgcgagctcccttgtccccgcgtcacactcgcgcccaagcaagcggttgctgcaaaggaagcctcccctgatggctctcgtgacctcgggctcgggtgccgaccaggtgatcgccgaggtggcgatgaacggcggcgccgacccaagtgcaaccaccgtgcgtgctactgtcgtgcaggcgtccaccatcttccacgacacgcccgccactcttgataaa

SEQ ID NO: 18119 - DNA, 253 bp, Zea mays
gcgcgcggcctctccaccgagaaggctgtcggcgccgccgccgtcgctgtcgtgggcagccacaccgctaagtggatgcaggacacgagcaagaagtcaccgatggaactgatcaacaaggtacctccgatcaaggttgatggccgcatcgccgtttgtgaaggggctgctgaaggtgttgggcttggccacccaatcgagtatatctgccttgatctggaggcacccaacgtgtgcaaatactgtggcctcc

SEQ ID NO: 18120 - DNA, 251 bp, Zea mays
ggcgtttgctccccaatcccttcggcccgcccgctcgacgtgatcccaccggcagccatggatccatacaagcaccgcccgtctagtgggagcaactccagcttctggaccaccaactccggcgcccccgtctggaacaacaactctgccctcaccgtcggacagcgaggtccaatcctccttgaggattatcatctaatcgaaaagcttgctcagttcgacagagaacgtatccctgaacgtgttgtgca

SEQ ID NO: 18121 - DNA, 252 bp, Zea mays
agagcctcctccagcggatcgacgagggcaaccgatccaccgggggcctcgccttcgtcaccaatgcatacggcatcgcaggttgcatcaagttcctggagtcatactacctgattttagtcaccaaacgccgtcaaatcggttgcatttgcgggcatgctatatattgtatagatgagagccagatgatcaccatcccacactcatcagtgcaaacagatgttgcgacctctaagaatgagctgaggtaca

SEQ ID NO: 18122 - DNA, 251 bp, Zea mays
ccacgcgtccgcccacgcgtccgtgcttcggctattacgccatcctgatatagttgagatcaagcatataatgctgcctccatcaaggagggacttcaaagatatctatgttgtatttgagctgatggatacagacctccaccaagtcatcaaggcaaatgatgatttaacccgagagcatcatcagttctttctctatcagatgctccgtgcactgaaatacattcataccgctaatgtttatcatcgtg

SEQ ID NO: 18123 - DNA, 208 bp, Zea mays
ccacgcgtccggcctctcctcctccagagctcgtcgccaccggccaccgccaccctcgatcacgccgtccgtcgatgtaagggcagcatggtgatggtcagtgtgctcaacgatgcgctcaagtccatgtacaacgctgataagattggcaagatgcatgtcatgatcaggccgtcatccaatgtcatcatcaagttcctgacggtca

SEQ ID NO: 18124 - DNA, 247 bp, Zea mays
cccacgcgtccgtgtatccccaacaattcttaggcgcggtccagaatggtttgcaagctttgggcgcaagaacaactctggaaccaagctctattgcatctcagggcatgtgaacaaaccttgcaccgtggaagaggaaatgagcatacctctgaaggagttgctcgagaggcactgtggaggtgtgagagggggatgggacaacctgcttgcggtaattcctggcggttcatctgttccccttttg

SEQ ID NO: 18125 - DNA, 245 bp, Zea mays
caaggtgcagtttgttatattgtttatctgtgcacaaccttacactgatattagatgtcattatgttgctatttgctgtctgaacatgtgcttgatgtaaacagggtgccaggaacgaaatttttgcaatgcagccagcacctatccaagtttcgtacatggggttccctggaacaacgggtgctgcatacatagattacttggtcacagatgagtttgtttctccatctagctatgcacatata

SEQ ID NO: 18126 - DNA, 247 bp, Zea mays
gagaagtcccacatcaacattgtggttattggccatgtcgactctggcaagtcgaccaccacaggacaccttatctacaagcttggaggcattgacaagcgtgtgatcgagaggtttgagaaggaggctgctgaaatgaacaagcggtccttcaagtacgcgtgggtgctcgacaagctcaaggctgagcgtgagagaggtatcaccattgatattgctctgtggaagtttgagaccaccaagtact

SEQ ID NO: 18127 - DNA, 246 bp, Zea mays
cccacgcgtccgcccacgcgtccgcccacgcgtccggttgggcgcagagaatccccaagcaaacaaacagggtagatggagatgagatgagaggagaggagaggttgggtctgggacaccatggctccgatgaagctgtacggggcggtgatgtcgtggaacgtgacgaggtgcgcaacggcgctggaggaggctggctccgactacgagatcgtgcccatcaacttcgccaccgccgagcacaag

SEQ ID NO: 18128 - DNA, 188 bp, Zea mays
aaatgttctggagacgggcgtatccgtgtcagaaaggagatcaaagtagaaatccctccaggagtgagcaaaggcagtactcttcgtgtacgtggggaaggtgatgctggaccaaaaggtgggcctcctggagatctctttgtttgccttgatatagaggagccatcagatatcaagagggatggtat

SEQ ID NO: 18129 - DNA, 238 bp, Zea mays
cttcttctctgaattccagtccaagggccggtataccgtcagatggagtgggagatgtggggaaaaaagatggtgaagctcgcatttggaagccttcgcgactctttgatcgccgcgtcgctcaaggcctatgtggccgagttcattgccacgctgctcttcgtgttcgccggcgtctggtccgccattgcctactcgcaattgacgaagggcggtgctctggaccccgtcggtctgg

SEQ ID NO: 18130 - DNA, 241 bp, Zea mays
gtacaccaagtacgaaaaggtcattttcccacctaggctatgcttcttagggggtcttaccttcatgggtaaaaacgagatgccagttatctttccgtattccacaatgcttaagaaactggacttgcagttcactttcctcaccactgaagaccactgtcagcttattgctaaatgccccaacctaagtgttctcgaggtgaggaatgtgattggggatagaggactagaagttgttgct

SEQ ID NO: 18131 - DNA, 238 bp, Zea mays
acttctcttgtcgttgcattgcagggcagctagccggctacagcatccgccatggcgcgcggcggggacggcctgcaggtgctcagcgcgctggacgtggcgaagaccagtggtaccacttcacggccatcatcgtcgccggcatgggcttcttcacgcacgcctacgacctcttctgcatctcgctcgtcaccaagctgctcgggcgcatctactacacggacaccagcaaccacaa

SEQ ID NO: 18132 - DNA, 220 bp, Zea mays
gagaatccccaagcaaacaaacagggtagatggagaggagaggagaggagaggagaggttgggtctgggacaccatggctccgatgaagctgtacggggcggtgatgtcgtggaacgtgacgaggtgcgcaacggcgctggaggaggctggctccgactacgagatcgtgcccatcaacttcgccaccgccgagcacaagagctccgagcacctcgtccg

SEQ ID NO: 18133 - DNA, 239 bp, Zea mays
gacctcctcagacccgagaagcgcactgtcggccatggacgccaccggcactggagctggagggaaggcgaagaagggagcggccggtcgcaaggccggcgggccgaggaagaagtcggtgacgaggtccgtgaaggccgggctccagttccccgtcggccgcatcgggcgctacctcaagaagggccgctacgcgcacgcgtcggcagcggtgcccccgtctacctcgcggccgtcct

SEQ ID NO: 18134 - DNA, 187 bp, Zea mays
ccactggctgggttgatgctcttcctaaatacactccagagagcccaggagatgccaccaggaacctctcccagcagtgcctgaacgcccttgctaatgttgtgcctggtcttatcggaggcagtgctgatcttgcatcctccaacatgactctgctgaagatgtttggtgacttccagaaggatac

SEQ ID NO: 18135 - DNA, 191 bp, Zea mays
agatgctcctatcggagctatgccagggtgctataggcttgggtggaggcacgggctgcttgacgaggtttacaaggcccgcgatgttggtgttaatagtttcgttctctttcctaaagttcccgatgcattgaagtctccaacaggagatgaagcgtacaacgataatggtctggttccacgtacaattc

SEQ ID NO: 18136 - DNA, 200 bp, Zea mays
agtttgtggttggattgggagataaggtctctccaactgatatcgaggaagggatgagggttggtgttgatcgcaacaagtaccagattcaaatccctctcccaccaaaaattgacccaagtgttaccatgatgactgtggaggaaaagccagatgtgacgtacaatgatgtcggtggctgcaaggagcagtttgagaag

SEQ ID NO: 18137 - DNA, 157 bp, Zea mays
atcgccagaggagttgttgatcgaggtgagtgaggttgaaaagcacaccatcgtcatggacggcggatactacggcggtcgcgatcagcgctacagcggcgggtactacggcggcggtggcatcgcaacgccggggtacgctccgtcggtcccttac

SEQ ID NO: 18138 - DNA, 145 bp, Zea mays
tcatcctgtgcttcttcttccaatatcgtatcagtcatccagtgcgtaatgcttatggattgtggctagtatctgttatctgtgaggtctggtttgccttgtcctggcttctagatcagttcccaaaatgggtatcccaattcaa

SEQ ID NO: 18139 - DNA, 156 bp, Zea mays
cccacgcgtccgttatagacatgcttaaaactcctgttaataatgccttaagagatgccaagttgtctgtcagtgatctagatgaagttattcttgtgggtggatccacccgaatccctgcagttcaagaacttgtgaggcatcttactgacaaag

SEQ ID NO: 18140 - DNA, 216 bp, Zea mays
cccacgcgtccgcggacggtgggtcgcctcaccaccattagagcgcgcgagccaagctcgtggtgaggttttcgagatgaaggtactcgagaagatcctggaggcggcgggggatggccggacggcgttctcgttcgagtacttccctcccaagacggaggagggggtcgagaacctgttcgagcggatggaccgcatggtggcgcacggcccctc

SEQ ID NO: 18141 - DNA, 245 bp, Zea mays
aaatgcttgtttcattgagtgatattcaaaatccagataagcgcccagcaattgtttctattgatatcccttctggatggcatgttgaagagggagatgtcgatggaggcattaaacctgatatgctggtgtcattgactgcacctaagctctgtgcaaaaaagttcactggcccacaccattttcttgggaggaaggttgttcccccgcactatgttaaacaaatacggacttcagcttcctcc

SEQ ID NO: 18142 - DNA, 236 bp, Zea mays
gttgtatacacgtactcgacgtcctgtgttggcgcacgtgcaatggagtgcgagaccggcctggtcgaccgccccctcaacagctcagcgccgcgcaccggcgaccccttgaagtggggcaaggcggcggagggtcttactgggagccacctggacgaggtgaagaggatggtggaggagtaccgcgtgccgctggtgaagatcgacggcgccgtgctcagcgtcgctaaggtggc

SEQ ID NO: 18143 - DNA, 221 bp, Zea mays
cggacgctgggtcccggtctcctccgcccgttgccttcgtcccctccatctccggctgcgtcgccggcgaacccgacaccgcgaatcggatccgccgacaaggcgagagggaaaagatggggcttacgttcaccaagctgttcagccggctgttcgccaagaaggagatgcggatcctgatggtgggactcgacgccgccggaaagaccaacatcctctac

SEQ ID NO: 18144 - DNA, 235 bp, Zea mays
gaggtgggttggcttctcctcccccaccggttcgtgttcaggttctggttcgtgggcgagagggaagagatggcggcgtcggacgttgagtaccgttgcttcgttggcggcctcgcctgggccaccgacgaccactccctcaacaacgccttcagcacctacggcgaggtcctcgagtcgaagatcatcctggatcgggagacgcagaggtcccgcggcttcggcttcgtcacct

SEQ ID NO: 18145 - DNA, 234 bp, Zea mays
acgtggtgtgccagtactacccgccgtgcccggagccgcaccgcaccgtgggcgtcaagaggcacacggaccctggcttcttcaccatcctcctgcaggacggcatgggcggcctgcaggtgcgcctcggcaacaacgggcagagcggcggctgctgggtggacatcgctccccggcctggggcgctcatggtcaacatcggtgatcttctgcagctcgtgaccaatgaccggt

SEQ ID NO: 18146 - DNA, 157 bp, Zea mays
agcgccttgagatcacattctctgaggcacctgtctttgtggaccctcatgggcgtggtttgcgtgccctctccagggcccagattgactctgttctggatcttgcacggtgcacaattgtgtccgagctctccaacaaggatttcgactcatatgt

SEQ ID NO: 18147 - DNA, 231 bp, Zea mays
ggtcaggcatgctggacaacatcgacctgaacgacgcctacgcccggtacgccaagcccggcggctggaacgaccctgacatgctggaggtcgggaacggaggcatggcgtacaacgagtacgtcgtgcacttcagcctctgggccatcgccaaggctcccctggtcatcggctgcgacgtgacgagagtctccaatgagacgctctgaatcctctccaacgcggaggtca

SEQ ID NO: 18148 - DNA, 228 bp, Zea mays
cggacggtgggtccgcgtcctgatcgccctgaagctgaagggcgtcgagttcgagttcgtggaggaggtggcgggcaggaagagcgagctgctgctgaggtcgaacccggtgcacaagaagatccccgtcctgctccaccacggcaagcccatctccgagtctctgatcatcgtccagtacatcgacgaggtctggtcctccggcgcgccggccttcctccccgtcga

SEQ ID NO: 18149 - DNA, 229 bp, Zea mays
cctgtacctcggcggtctgctttcatctggcctctccattcttctctggctgcagtttgctacttcaatctttggccacaccagcgcgaccttcatgtttgagctctactttggcctcctggttttcctgggatatatggtgtttgacacccaggagatcatcgagagggcgcaccgtggggacatggactacatcaagcacgcgctgactctcttcaccgactttgtt

SEQ ID NO: 18150 - DNA, 230 bp, Zea mays
aggacgctgggtcgaccacgcgtccgcccacgcgtccgcggacgctgggcaagcagctcaaagctctagtagctagctagctagcaaagggggggaaactggctccgcttactcgctgctgccatgaaccacgctgcagcccatcctggccttaggagccacctagtaggacccaacaatgagagtttctcacggcaccacctgccgtcttcttctccacagagcagcaa

SEQ ID NO: 18151 - DNA, 231 bp, Zea mays
atccaggacaaggaaggtatcccgccggaccagcagcgactaatcttcgcggggaagcagctcgaagacggccgcaccttggccgactacaacatccagaaggagtccacccttcaccttgttcttcgccttcgcggtggcatcattgaaccttccctccaggcgctcgcccgcaagtacaaccaggacaagatgatctgccgcaagtgctatgcacggctgcaccccagg

SEQ ID NO: 18152 - DNA, 228 bp, Zea mays
atcgcgaaggtggctgcggggctcggagccgcggcctcgctcgcctccgcgtcgctctacaccgtcgacggcggcgagcgcgccgtcatcttcgaccgtttccgcggggtgctcccggagaccgtcggcgagggcacccatttcctcgtgccctggctgcagaagcccttcatcttcgacatccgcacgcgcccgcacaacttctcctccaactcggggaccaaggac

SEQ ID NO: 18153 - DNA, 228 bp, Zea mays
ggaagaggtggaggcgtaccgccgccgccgggagatcaccgtcgacggccgcgacatgcccaagccggtgcttgagttccgtgatgtgggcttcccagaatatgtgttgcaagagatcacaaaagctggttttgtggaacctacccctatccaatcgcaaggttggccgatggcattgagaggccgcgaccttattggcattgcagagacaggatcagggaaaactct

SEQ ID NO: 18154 - DNA, 240 bp, Zea mays
ctccttcgaggagcaggtggtagtgattagagagaagcttgcagagctatatgagtctgaacaacaatggtcaaaagcagcacaaatgcttagtgggattgacttggattcaggaatcaggatgcttgatgacaccaacaaattatccaagtgtgttcaaattgcacgactctatttagaggatgatgatgcagtgaatgctgaggcttttataaacaaggcttcatttttggtcaccaa

SEQ ID NO: 18155 - DNA, 244 bp, Zea mays
acggtccgcggacgctgggtgatgctggggcggaaggccatcacggggagcttcatcggcagcatcgacgagaccgctgaggtgcttcagttctgcgtcgacaaggggctcacctcccagatcgaggtggtcaagatggggtacgtgaacgaggcgctggagcggctggagcgcaacgacgtccgctaccgcttcgtcgtcgacgtcgccggtagcaacgtcgaggcggaggcggcggcggcgg

SEQ ID NO: 18156 - DNA, 237 bp, Zea mays
gtatactgtgggcatgaatataccttgagtaatgcaaagtttgccttgagtgtagaaccgggaaataaagcattgcaggaatatgctgcaaatgcagctgagctgcgtaataagaatatacccacggtgccaacaacaattggaagggagaaggaatgcaatcctttcttgcggacctccaatccagaaattaagagaacactgtccgttccagatcatttcgatgaagatcgggtg

SEQ ID NO: 18157 - DNA, 241 bp, Zea mays
attcctcgcgcggcgaccacccgattcgaagcgtgcggagagaccgaagaagcgggagagatggctcgtaccaagcagactgctcgcaagtccacgggagggaaggctcccaggaagcagcttgccaccaaggctgcccgtaagtctgcccccaccactggtggagtgaagaagcctcaccgctaccgccctggaactgttgcactccgtgagatccgcaagtaccagaagagcactgagc

SEQ ID NO: 18158 - DNA, 237 bp, Zea mays
ggaccgtggcgcctccgcctgatccatccaagacagggatcgccatgtcggactcggaggagcaccacttcgaatcgaaggccgacgctggggcgtccaagacctacccgcagcaggctggcaccgtccgtaagaacggcttcatcgtcatcaagaaccgtccctgcacagttgtggaggtttctacctccaagactggtaagcatggccacgccaaatgccactttgtcgccatag

SEQ ID NO: 18159 - DNA, 279 bp, Zea mays
tcctgcagtacggtcggaattccgggtcaccacgcgtccgcaacggtccgcgaccgtggcaagtggtttccaaagccaagtgtgtgtactagcaaccagctagctcgggcggcagcaggcagccatcatgtcggaggagaagcaccaccacttcttcaaccaccacaagaaggacgaggagcagcccgccggcgagtacgggtactccgagaccgaggtggtcaccgccaccggcgagggcgagtacgagaggtacaagaaggaggagaaggagcacaa

SEQ ID NO: 18160 - DNA, 234 bp, Zea mays
caaaatctttggaaatgatgctgttatctaagccaatcaagggcggtgaggcacaccaactgggtctggttgatgccttagtttctcctaatgatttggtgaatactgctcgtcaatgggctttggatatatatgaatgtaggaggccctggatcaaaagcctttataagactgacaagctagaacctcttggggaggctagggaaattctgaagtttgcaagagctcaagctc

SEQ ID NO: 18161 - DNA, 235 bp, Zea mays
ggcgcgtatatcatctctatggcaactgccccatccgatgtgcttgcggtcgagcttttgcagcgtgagtgccatgtaaaacatccactgagagttgttccactttttgagaaacttgcagatcttgaagcagctccagcagctgtagcacggctcttttcaattgactggtacatggataggattaatggcaagcaggaggtcatgattggatattcagactctggcaaagatg

SEQ ID NO: 18162 - DNA, 240 bp, Zea mays
ggcgcgtatatcatctctatggcaactgccccatccgatgtgcttgcggtcgagcttttgcagcgtgagtgccatgtaaaacatccactgagagttgttccactttttgagaaacttgcagatcttgaagcagctccagcagctgtagcacggctcttttcaattgactggtacatggataggattaatggcaagcaggaggtcatgattggatattcagactctggcaaagatgccggg

SEQ ID NO: 18163 - DNA, 230 bp, Zea mays
atgagatcatggctaggggaacctttgccaacattcgtctcgtgaataagttcttgaagggtgaggttggacccaagacaatccatgttccatctggggataagctttcagtttttgatgctgctatgaaatacaagaatgaagggcatgatactattatcctggctggtgccgagtacgggagtggtagctctcgggattgggctgcaaagggcccaatgcttcaggga

SEQ ID NO: 18164 - DNA, 232 bp, Zea mays
cggacgcgtgggctcgcccagcagcagggagcagccatgccaggggaccacggctccaagggcgacatctccattcgccggacgcttcacggccagcgccatcgcagcatgcttcgcagagatatgtaccatcccgctcgacacggccaaggtcaggctccagctgcagaagaacgtcgtcgccgccgccgcctccggggacgccgcgccagcgcttcccaagtaccgcggc

SEQ ID NO: 18165 - DNA, 230 bp, Zea mays
cccacgcgtccgggctggtatcctcctggtcatggtgatgtgtttccttctttgaataacagcggaaaacttgacatcttattggctcatggcaaggagtatgtctttgttgcaaactcagacaacttgggtgctatagtcgacatcaagatcctaaaccatctgatcaataaccagaacgagtactgcatggaggttactccaaagacgctggctgacgttaagggtgg

SEQ ID NO: 18166 - DNA, 236 bp, Zea mays
tcttgtgaccctccctcagccgcgtcgcgtcgcatcctacgatccaaagctctctctgctcgcagccatggcgaagaactacccgaccgtgagcgccgagtacagcgaggctgtggagaaggccaggcgcaagctccgagccctcatcgccgagaagagctgcgccccgctcatgctccgcctcgcgtggcactccgcggggacgttcgacgtgtcgtcgaggaccggcggtccat

SEQ ID NO: 18167 - DNA, 257 bp, Zea mays
gtccgcaacctcctcctgcccagcccttctcacgcgattcaatcgttgcccattcggagccctaatcctctcgttccatagtcgcgggaggcaccaccaccggcatgggaagcggaaggtgtcacctcggggcaggcaagattgtgcttgcgcactgtggcgggagcatctcccgcgccctggcgcagatgagcaacgccactgtgatcgatgataaggtgctcaacgactgcctcaacgagatgctcgcgcgctct

SEQ ID NO: 18168 - DNA, 220 bp, Zea mays
cccacgcgtccgccagagcgctactcttggactggaggcgagattggcttgagcacctacttctctatggccaggggaaatgccactgtccctgccatggagatgaccaagtggtttgatacaaactaccactttattgtccctgaacttggcccaagcaccaagttcacatacgcttctcacaaggctgtttctgagtacaaggaggcaaaggcgctcg

SEQ ID NO: 18169 - DNA, 243 bp, Zea mays
cccacgcgtccgcccacgcgtccgcccacgcgtccgggccatttctcctgagcttggcaaccgcgtgcagagagtccgtgtgcagcttcctggtctaagccaggagcgtcttcagaagttgagggaaaagaacatcgattttgctgctcacagcaaccaggaggactctggttctcttctgttcaaccttattggaaatttggcattcccacttattcttatcggtgggctatttttactgtc

SEQ ID NO: 18170 - DNA, 254 bp, Zea mays
ccaagttcaagcgccagggcctcaatgttgttgatgttgtcgccctctcaggtggtcacaccattggtatgtctcggtgcactagtttccggcagaggctatacaaccagacaggcaatggcatggctgacagcacactggatgtatcctacggcgcaaagctgaaggcaggatgcccccgctctggtggtgacaacaacctctttccctttgacttcttaccgcgcccaaattttaaccatttttactacaag

SEQ ID NO: 18171 - DNA, 257 bp, Zea mays
gttgatgccattgatgagtatgctgttggtcagctcaaggagtttgagggcaagaagcttgtctcggccaccaaggagggtctgaagcttgatgagaccgaggatgagaagaagaggaaggaggagctgaaggagaagtttgagggtctgtgcaagatcatcaaggaggttctgggcgacaaggttgagaaggttgtggtgtctgaccgtgttgtggactcaccgtgctgccttgtcactggtgagtatggctggac

SEQ ID NO: 18172 - DNA, 259 bp, Zea mays
cctcttgctcataccgcaacgctctatctctttcgccgagctcctcgaaaccctaggagcgtgcttgaccggcggcggcgaggtgatggcgatggaccctgacgcggtagcgaaggccttcgtggagcattactaccgaacgttcgacaccaaccgcgcggcgctggttgggctgtaccaggagacctccatgctcaccttcgagggccagaagttccagggcccctccgccattgccggcaagctcggatctctccct

SEQ ID NO: 18173 - DNA, 269 bp, Zea mays
caaagatatacacaattccagtaccgcggtccaacatggctctacatattggtcagctattgacaagtggaaagaggacagacattgcattcgaagttgatggagagatgtttcctgcccacaaggtgattctttcagcccggtctcctgtttttagggcacaactttttggcccaatgaaggataaggacatgaagtgtataaagattgaagacatggaggctccagtattcaaggccttgctccatttcatgtagggggatgagttg

SEQ ID NO: 18174 - DNA, 224 bp, Zea mays
ctgtgcacggacagtggaagcaccatgaggtcaaggtgaaggactccaagacccttctctttggtgagaaggaggttgctgtgtttggctgcaggaaccctgaggagatcccatggggttcggttggcgctgaatatgttgttgagtctactggtgttttcactgaccaggagaaggctgcagctcacttgaagggtggtgccaagaaggttgtcatttctgct

SEQ ID NO: 18175 - DNA, 178 bp, Zea mays
attccgcattcgttccaactcctgagcactttctcctcgtccccgacaagccaatcgaagccgagatacggccatggactccaccggcaccggagcagggggtaacgggaagaagggatcggccgggcgcaatgtcggcgggccaaggaagaagtcggtgtcgaggtccgtgaaggcc

SEQ ID NO: 18176 - DNA, 252 bp, Zea mays
cggacgctgggtgagatggctcccgagatgatccagcacaggccatacaaccagaaagtggacgtctacagactcgccattgtcctgtgggagttggtaactgggaatgtccctttcgcaaacatgactgcagtgcaagctgcatttgctgtggtgaacaagggtgtgcgaccagccataccccacgactgcctccctgcccttggggagatcatgaccaggtgctgggacgcaaaccctgaggtccgtccc

SEQ ID NO: 18177 - DNA, 252 bp, Zea mays
ctatcaccaacgagggagctcgctcagcagattgcagatgtacttagtgaggctggtgcaccatgtgggataaaatcagtctgtctttatggtggaactaaaaaggaaccccaaatatctgcccttaaatctggagtggatatagtcataggaactcctggtcgtatgaaagaccttattggaatgggtggttgctgtcttaatgaggtttcgtttgtggttctagatgaagcagataggatgctggatttg

SEQ ID NO: 18178 - DNA, 244 bp, Zea mays
ggttcacttctccaggtaaggaaagggttcgtactcatggcgccgccgcagccaaagtcgggccttttcgttggcatcaacaagggtcatgtcgtcaccaagcgcgagctgcctccccgcccgtgccaccgcaaggggaaatcaacgaagagggtgtctatggtcaggggcctgatcagagaggttgctgggtttgctccttatgagaagcgtatcactgagcttctgaaagttggcaaggaca

SEQ ID NO: 18179 - DNA, 245 bp, Zea mays
cccactccgatcgaatcgatggccgccgagggcgagaagaagatgataaccctcaaaagctccgatggcgaggagttcgaggtggaagaggcggtggcgatggagtcgcagaccatccgccacatgatcgaggatgactgcgccgacaacggtatccctcttcctaacgtcaactccaagatcctatccaaggtaatcgagtactgcaacaagcacgtacatgccgccgccgccgccgccgccgc

SEQ ID NO: 18180 - DNA, 239 bp, Zea mays
gattgcggagggtgcagcaactctccgaatgaagcaggatatgcaaaatgagaacaaaaatatgtctgacttaatagcatatagaataaaattcacccctcatccacatgctggtgataattggtgtatctatccgagctatgactatgctcattgcatggtggattctcttgaaaacatcacacattcgctgtgcacacttgagtttgacatacgccgcccttcatactactggctac

SEQ ID NO: 18181 - DNA, 243 bp, Zea mays
ccgatgtgatcacgatcgagaactcccggtctgacgagaagctactgtccgtcttccgtgagggtgtgaagtacggagctggcattggccctggtgtctacgacatccactctcctaggattccctccaccgaggagatcgcagaccgcgtcgagaagatgctcgccgtgctcgacaccaacatcctctgggtgaaccctgactgtggtctcaagacacgcaagtacacggaggtcaagcccg

SEQ ID NO: 18182 - DNA, 253 bp, Zea mays
gaaaactttgcggaacttttcttgtctaactacaggtgacagcattatggttgcatataataacaagaagtactacattgatatagtagagacaaagccctccaatgctataagtattattgagaccgattgtgaggttgactttgctccaccacttgactacaaagaacctgagccagtaaaacctgctgttcctgcaagcacggagcctggtaccgacgttccagctgaagaagacccaaagttcatcccc

SEQ ID NO: 18183 - DNA, 266 bp, Zea mays
cccacgcgtccggttcggagcgcacacacacgcaaccagatctcccccaaatccagccgtcggcacctccgcttcaagatgcagatctttgtgaaaaccctgactggcaagactatcaccctcgaggtggagtcgtctgacaccattgacaacgttaaggccaagatccaggacaaggagggcatccccccagaccagcagcggctcatcttcgctggcaaacagcttgaggacgggcgcacgcttgctgactacaacatccagaa

SEQ ID NO: 18184 - DNA, 206 bp, Zea mays
ggtaacgcagacgccttgttcaccatggtgttcgaaaccgacaggctaaagggctccacgctcgtcatcaacggaatggtcacggatgggtcagacgaatgggcgatctacggcggaaccggggtgttcgccatggccaccggtgtcatgaagagaagaaaccttgccggcggtagcaacgacgggaactctgacgagcttgccct

SEQ ID NO: 18185 - DNA, 183 bp, Zea mays
gccgggattgccctgaacgacagccttggcagcaccggtgctgccaaggtgtcgtaaggttcttcctgaattgaatggcaagctcactggcatgtccttccgggttcccaccgtggatgtgtcagttgttgacctcactgtcagaatcgagaagggggcctcttacgaggaaatcaagaaagc

SEQ ID NO: 18186 - DNA, 207 bp, Zea mays
gtcccgatccgaagctgtgcctcgtaccatttcgatccaatggcgccgacgtcgaagctgtcgacgggcatcaagcgcgcttcgcggtcgcacgcgtaccatcgccgtgggctgtgggccatcaaggccaagaacggcggcgccttccccaaggccgacaaggccgccgccgccgtggaacccaagttctaccctgccgacgacgtc

SEQ ID NO: 18187 - DNA, 258 bp, Zea mays
cccacgcgtccggaagtctcacatcaacattgtggttattggccacgtcgactctggcaagtcgacaaccaccggccacctgatctacaagcttggaggcattgacaagcgtgtgatcgagaggtttgagaaggaggccgctgaaatgaacaagcggtcctttaagtatgcttgggtgcttgacaagctcaaggctgagcgtgagaggggtatcaccattgatattgctctgtggaagtttgagaccaccaagtacta

SEQ ID NO: 18188 - DNA, 259 bp, Zea mays
caaacacaagtcgtcgtaggcagcgagcgtctctcctctcccacgcatcgcgccaaggaagagagagagatcgccgctccccttctcggcgtcggtggtgcgggtgccctccctcctcgagcgagatctgtctggtcacagatctatctgacaaaatggtgaagatctgctgcatcggtgctggctatgtcggtggcccaaccatggccgtcattgccctcaagtgcccagacattgaggtcgtcgtcgttgacatctc

SEQ ID NO: 18189 - DNA, 237 bp, Zea mays
agagcacgcactgcagcaccacttcctgcgctgctgctcatcacacaccgtagtactaacactccatcgccacaatggctcccaaggttgcgctcttccttgccctcagcctcctcttcgctgccgccgcgcatggctgcgaaccctactgtcccggcccagtcgtcccaacgccgcccgtcgtgccgtcgcacagccacgggcgctgcccgatcgacgcactaaagcttcaaggtg

SEQ ID NO: 18190 - DNA, 173 bp, Zea mays
cggacgcgtgggcggacgcgtggggaaaaaacctgaagaaacagctgttctcaaagtattacgagatggtaaacagcaagaattaggagtaacacttagacctctgcaacctttagtcccagtccatcaatttgataaattaccaagctactacatatttgctggttttgttt

SEQ ID NO: 18191 - DNA, 242 bp, Zea mays
cggacgcgtggtgcgcgaggcaaaagcgcaaacgcgaccacagacagagcgcgcttcaaggcctttttttttacagataacaaggaggagaggaggagatggcggtcacgatcacctgggtgaaggcgaggcagatcttcgacagccgcggcaaccccaccgtcgaggtggacgtgggcctcagcgacggcagctacgcgaggggggccgtacccagcggcgcatccactggaatatatgag

SEQ ID NO: 18192 - DNA, 244 bp, Zea mays
accagagcgagatgcgcggcaagatatccctggacttcattcttgatctgggagccacacttggcaccgtaagagttccaggcattggactcgtgtacaacgagctggtccagggaatcccatcgatctttggccagctattagtcacacttccagcgatgcactctacaattgtctttgtttgcataaagtatgttcctgtcccttatgtccctcttgaagaaaggttcttgttccgaaggtt

SEQ ID NO: 18193 - DNA, 247 bp, Zea mays
cccacgcgtccgccctgtattgagaacaagaaagcctctttcagttgaattgggacctggaattcttggaaacatttttgacggtatccagcggcctctaaaaaccatcgctattaagtcaggagatgtgtatattcctcgtggtgtttcagttcctgcccttgacaaagatgtattgtgggaatttcagccaacaaagctaggtgttggagatgtcatcacaggtggagatctatacgctactgtt

SEQ ID NO: 18194 - DNA, 236 bp, Zea mays
tttctccattcccacgtaaaagatagaaaggcgagcatcgcagtgcacacgcgcaatggaaggctcgccggtggcgcgcctcccggaggctaattctctccccgacggcttcgtccccgacagcgagagctcagacacggacgcggctcctccctcctccgcgcccatagttgacgatgcaatcgactccgatagtcccgacgccaccatacccggtggtgaggaaacctaagtga

SEQ ID NO: 18195 - DNA, 247 bp, Zea mays
cagaagtattttgtgagtgcttccaaggataactcttggtgcttctatgatatttcaacaggatcttgcctgacacaggttggcgatgcttcaggacaagagggatatacatctgcgtctttccatccagatggtcttatccttggaacaggaactactgatgctgttgttaaaatttgggacgtgaaggctcagtcaaatgtcgcaaagtttgagggtcatgtcggaccagtcactgctatgtctt

SEQ ID NO: 18196 - DNA, 250 bp, Zea mays
actcaaggaaggccaccgcatcatatggaatccaagatgatgaggacacaaggaaggccactacatcatatggaatccatggggaggacccaagaaaggccaccacgtcatatggttcccaggatgagaagggatcaaggaaggtcataatgtcatatgggtctaatggtgaggatgatccgcgaaaggccaccacatcatatggaatacaagataaagagtatcccaggaaggccaccacatcttatgg

SEQ ID NO: 18197 - DNA, 247 bp, Zea mays
agatcatttcgggaaccatggaaagcctcttctgtttctgctacatgggaggaatactgactctggaaatttctcaaagcctgctagttttgaggggatggagaagtttgatactgatttaattacacttcatccaattttaaccgaatgtcgtgtgattaaatctgatctggagcttgctctcatccggtatgctaatgatgtcagttctgaagctcacattgaggttatcagacgagcaaggcca

SEQ ID NO: 18198 - DNA, 189 bp, Zea mays
gctgcagcgcctccgccgccgccgccgcatctaacgcattccctccgccgcagcccgaggcaagatggttctccagaacgacattgatctgctcaacccgccggcagaactcgagaagctcaagcacaagaaaaagagactcgtccagtcgcccaactccttcttcatggatgttaagtgccaggggtg

SEQ ID NO: 18199 - DNA, 253 bp, Zea mays
agttctagatcgcgggcggccgctcgcccacgcgtccgatccccgttcgcctcttctcctccctcctgccgggtccttaataaagagcagcagcgcaagaggttggtagagcgagcgagaagaaggcaatggcggcggagagcttcctgttcacctcggagtccgtgaacgaggggcacccagacaagctgtgcgaccaggtgtcggacgcggtgctggacgcctgcctggcgcaggaccccgacagcaaggt

SEQ ID NO: 18200 - DNA, 235 bp, Zea mays
gtctttccgttacccggcggctttaaaccctagttcccattccatcttcgtttccgctccgccgccgtcgatggagttctggggtctcgaggtcaaacctggatccactgtcaagtgtgagcctggacatggctttatcctgcacgtttcccaggctgcccttggggaatcaaagaaaagtgacagtgccttaatgtatgtcaaagttgatgacaagaagcttgccattggaacg

SEQ ID NO: 18201 - DNA, 231 bp, Zea mays
gcttcgcccactcgctccagccgcttcaccgcgccgccaccgccaccgcgaggatgccgttcaagaggttcgtggagatcgggcgcgtggccctggtgaactacggggaggactatggccgtctcgttgtcatcgtcgatgtggtcgaccagaacagggcacttgtggatgcccctgatatggtcaggtgccagttgaacttcaagcggctctcatttactgacatcaaga

SEQ ID NO: 18202 - DNA, 235 bp, Zea mays
gttatctcatcctgaaacaaaagaacgagtgcagtcatgttctgatgcttctgatgttcttagatatgcttttactttgacagaagatgcaatcgatcatcagtacgagggatgtacaggcacagcacttcttatttggtttgatcaaaataaagattgttttgcccagtgtgctaatcttggtgattctgcttgcgtaatgagtgtcaatggaaagacgatcgatatgactgaa

SEQ ID NO: 18203 - DNA, 236 bp, Zea mays
gcctcctctccctagtctccacgacgcaagggagagtgacggaaagcgacgcgcgcgagcgaggagggccaaggcgaagaggggaagcaccgcaccaggacccttgttcgccgccgccgcctctgatctccgcgaggttgtcaggattcaatatgtcgaccagcacattcgctacttcctgcacgctgttgggcaatgttagaacaacgcaggcctcccagacagcggtgaagagc

SEQ ID NO: 18204 - DNA, 252 bp, Zea mays
ctcaacttcgacgccttccacggcgacaaggcccacggcggcgtccatgacggtaccgagatcgtgctctggaagtggtgcgagggcgacaaccagcgctggaagatcctcccttggtgaacgaacgaaagaaactactagctggtaccctaataataattctgctggctgcggcgatcccaaaataaaagaggccgggtgcgatgcatctcggacttctcgagtggtgtttgcgtcagacagccagccact

SEQ ID NO: 18205 - DNA, 233 bp, Zea mays
ggacgcgtggtacctccccaaaacacatcctgcgatcctcgaagcctccgccgagcatcgatcatgacggcctactgcggcaagtacgcggatgagctcatcaagaatgctgcctacatcggcacccctggcaagggtatccttgctgctgatgagtcaactggcaccattggcaagcgcctttccagcatcaatgtcgagaacgtggaggagaaccggcgggctctccgtga

SEQ ID NO: 18206 - DNA, 235 bp, Zea mays
cgcatcctcgccgcccggaccctctctgtctctgtctccgccgcggcgggctcctcctccatccccgtcaagatgactgcgcggtcggcgctggacgaggtcaccgacacgggcgccttcgaccggtcgccgtccaccttccggagctccgtttccagggacgggcggttccccgccgtggcggggcggtaccacctctacgtctcgtacgcgtgcccctgggcgtcccggtgcc

SEQ ID NO: 18207 - DNA, 233 bp, Zea mays
agcgcacacacacacaaccagatctcccccaaatccacccgtcggcacctccgcttcaagatgcagatctttgtgaaaaccctgactggcaagactatcaccctcgaggtggagtcgtctgacaccattgacaacgttaaggccaagatccaggacaaggagggcatccccccagaccagcagcggctcatctttgctggcaaacagcttgaggacgggcgcacgcttgctga

SEQ ID NO: 18208 - DNA, 231 bp, Zea mays
gggagacccattaccaatgccaagaacaagaaaccagagaggacagccgcgaatacaatccgaatcccctccaaaaacccaccataccgtctcccccatctgcaagaacaagatcaggagagcatcctagggggaagaaacaggagggggaaaaagaagcccagaaagaccaactgaccaaacaaaaaggtggcatctttgtgtcaccgaggcaccgccgatcacagacca

SEQ ID NO: 18209 - DNA, 229 bp, Zea mays
cacacactcgagaactccatttcgatcccatttgaaatcaacccatcctcgtttcctccgtctagcagcctctcaccctcatggccaagatcaagatcgggatcaatgggtttggcaggatcggaaggctggtggccagggtggccctgcagagcgacgacgtcgagctcgtcgccgtgaacgaccccttcatcagcaccgattacatgacctacatgttcaagtatga

SEQ ID NO: 18210 - DNA, 231 bp, Zea mays
caacctcctctgctctcccccacctcccggtccggcagcagagagcgggggtgcagagagatcgagatccggaggccgcgagtgggagcgccaccaccagcgactgcggcaatggcgggcacggtgacggtcccggggtcgtcgaccccctccacgccgctgctcaaggacgagctcgacatcgtgatcccgacgatccgcaacctcgacttcctggagatgtggcggccc

SEQ ID NO: 18211 - DNA, 217 bp, Zea mays
gcctgcaactgcattctactgatacctctgtggttcaaattcctgagtatatactggtgacaaacaatggacgcagtttcaacattgttgtcaatcctgctaatatcagcagtggccttcactattttgaagtttatggcatagattacaaagcaccatggcgtgggcctattttccgtgtgccaattactgtaataaagcctattgccctatggga

SEQ ID NO: 18212 - DNA, 226 bp, Zea mays
ctatgctcagtgcacttgttccggctggtgggcacattgtgaccaccacggattgctaccggaaaacaaggatttacatggaaactgagctccccaagaggggaatttcgatgactgtcattaggcctgctgacatggatgctctacaaaatgcgttggacaacaataatgtaccccttttcttcacggagactcccacaaatccatttctcagatgcattgatat

SEQ ID NO: 18213 - DNA, 225 bp, Zea mays
cccccattttcttcgaggcgaggagagcgtgaaagacagggcaccggcagcgacgatgtcggggcgcggcaagggcggcaaaggtctgggcaagggcggagcaaagcgccaccgtaaggtgctccgtgacaacatccagggcatcaccaagcccgcgatccgtatgctggctcggaggggcggcgtgaagcgcatttcggggcttatctacgaggagacccgcgg

SEQ ID NO: 18214 - DNA, 222 bp, Zea mays
cgtttgcctcttctccctcttgccggtcccgaataaagagcagcagcgcaagaggtcggtagagcgagaagaaggcaatggcggccgagagcttccttttcacctcggagtccgtgaacgaggggcaccccgacaagctgtgcgaccaggtgtcggacgccgtgcttgacgcatgcctcgcgcaggaccccgacagcaaggtggcctgcgagacctgcacca

SEQ ID NO: 18215 - DNA, 225 bp, Zea mays
gcatccgcagagagtttgttccgtccaggcaaccaaaaagcgttgccccgccgcgcagaggaagaagagagcagaggaggatggctcgtacgaagcagaccgcccgcaagtccacgggaggcaaggccccccgcaagcagctcgccaccaaggcggcgaggaagtcggcgccgacgaccggcggcgtgaagaagccccacaggtacaggcccggaaccgtggcgc

SEQ ID NO: 18216 - DNA, 225 bp, Zea mays
aataaggtaataaggggcgacgaaaatggctccaacgaccgccaccaaggacgacagtggctacggcgacgagcgccggcgcgagctgcaggcgttcgacgacacgaagctgggggtgaaaggcctggtggactccggcgtcaagtccatcccgtccatcttccaccacccgccggaagccctgagcgacataatttctccggcgcctctgccgccgtcgtcgtc

SEQ ID NO: 18217 - DNA, 128 bp, Zea mays
cccacgcgtccgaccttcctcctccaggaaaggagaattaaagagattgttttgaaggccatgggacaggcaatcagtaagtctgttgctgttgtagagattatcaagaaaagggcccctgagttaca

SEQ ID NO: 18218 - DNA, 128 bp, Zea mays
gttagacccttattcatctgatggtcatgatggtattgtgagggaagatggtgtaattatgaatgatgaaacagtttatcagttgtgcaaacaggctgtttcacaggctcgtgccggtgctgatgttg

SEQ ID NO: 18219 - DNA, 116 bp, Zea mays
aacgacctgggcgacgcgtccgtcatctggagcctcatcggcccgcgcaggatcttcggcgacctcggaacctactcggcggtcaactggttcttcctggggggcggcgtcgcgcc

SEQ ID NO: 18220 - DNA, 127 bp, Zea mays
ggaaggccaccatgtcatatgggttccaaagtggtgagggctcgaggaaggtcaccacatcatatccgtaccgaggccaggacttaaggatggtcagcacatcatatgtatctcaagatgaggacaa

SEQ ID NO: 18221 - DNA, 109 bp, Zea mays
gccacgcgtccgtgactggcgaggcaaaagcgcaaacgcgaccacagacagagcgcgcttcaaggccttttttttttttgagataacaaggaggagagtaggagatggc

SEQ ID NO: 18222 - DNA, 237 bp, Zea mays
cccacgcgtccgggttcttccaacccaggggctgtgatggcgacgaagaggagcgtgggcaccctcggcgaggcggatctgaaggggaagaaggtgttcgtgcgcgccgacctcaacgtccctctcgacgacgcccagaagatcaccgacgacacccgcatccgcgcctccgtccccaccatcaagttcctcctcgagaagggcgccaaggtcatcctcgccagccacctgggtcgt

SEQ ID NO: 18223 - DNA, 124 bp, Zea mays
gcgacgccacaaccacacgttcacggtagcgagagcgtatcgtcgtcggcggtgaagatggtgtcgctgaagctgcagaagcggctcgccgctagcgtcctcaagtgtgggaaaggcaaagtct

SEQ ID NO: 18224 - DNA, 113 bp, Zea mays
ggcttggcccatgacaccctgggtgttatttacgaacgagggtttattggcacgtaccatgattggtgtgaggctttctcaacgtacccgaggacctacgacctcatccatgc

SEQ ID NO: 18225 - DNA, 236 bp, Zea mays
ctggtccggccaaagtggaggcagttgtatcctggcctacaccaactaactctaaggagttgcgaggttttcttgggttgacaggttattaccgcaaattcgttcaaaacttcggtgtcattgccaagccccttactgctctcctgaagaagcatgttgtgtttttttatgaacatcggatcatgctactgcttttgccttgttgaaatcagcctttgtcttcagcacccgtgtgg

SEQ ID NO: 18226 - DNA, 224 bp, Zea mays
cgcagaccgggagtagtcgacgcgccgtcactgaatcctcagatcacggctagccgtaatcacgccactctgctgactcccggcgagcagtgtaacattttccttcagccattggcaaggagaagactcacatcaacattgtggtcattggacatgtcgactctggcaagtcgggcaccagtggccacctgatctacaagctcggcggtagtgacaagcgtgtg

SEQ ID NO: 18227 - DNA, 229 bp, Zea mays
cggacgcgtgggcggacgcgtgggcggacgcgtgggtgctggcggacgtgttgcctgtggtatcattgggatccaaggctaaatcggttaacctacgaggcaaacaccatagaaggtcgaagcgagcacctcaggaagttgctgttccatttccccggtattgggcaacacaattttagtactccagataagcgctgatccatgatcagggacactattcatgcaattt

SEQ ID NO: 18228 - DNA, 151 bp, Zea mays
cagaccaccaaacaagtgccagcgccctctcgcagtcgccgcaatggagagcaccttcatcatgatcaagcctgacggcgtccagaggggcctcattggtgagatcatcagccgttttgagaagaagggctttctacctcagggctttgaa

SEQ ID NO: 18229 - DNA, 122 bp, Zea mays
cccacgcgtccgcccacgcgtccggcaatggcggcggagagcttcctgttcacctcggagtccgtgaacgaggggcacccagacaagctgtgcgaccaggtgtctgacgcgggtctggacgc

SEQ ID NO: 18230 - DNA, 205 bp, Zea mays
ctggtccggccaaagtggaggcagttgtatcctggcctacaccaactaactctaaggagttgcgaggttttcttgggttgacaggttattaccgcaaattcggtcaaaacttcggtgtcattgccaagccccttactgctctcctgaagaagcatgttgtgtttttttatgaacatcggatcatgctactgcttttgctttgttg

SEQ ID NO: 18231 - DNA, 230 bp, Zea mays
atggcaaccttactaaccgtgtgatcactttgtggtatagacctccagagttgctacttggaagcacaaagtatggcccagccgttgacatgtggtcagtgggctgtatttttgcagaacttctcaatgggaagccaatattgcctggaaagaatgagccagagcagctgactaagatcttcgagctttgtggtacccctgatgacacaatctggcctggtgtcacaaaa

SEQ ID NO: 18232 - DNA, 234 bp, Zea mays
cggacgctgggccgcagttccccgaccacaccgttcctccgagcccaggagcagccccgcgccaggaggatgtttgttcttttaacaatatgtcgagggaggagaatgtttacatggccaagttggctgagcaggctgaaaggtatgaggagatggttgagtatatggagacagtggctaagactgtagatgtggaagagctcactgttgaggagcgtaaccttctgtctgttg

SEQ ID NO: 18233 - DNA, 232 bp, Zea mays
gctgtcgatttcctggtgatttctcttaaaccaatgaggacattaagagagatacacactgatgtgtgccctgccctcagcatacaacagctagagcgaatagttagtatgtactgggatgatgtgaatggaacaaacactatttcagcagagtttacatcaagcttgaaatctgcggtgcgtgatgaatcgaatatggccacaagtttttctatattgctagatgatgatt

SEQ ID NO: 18234 - DNA, 219 bp, Zea mays
cggacgctgactcccccaaatccagccgtcggcacctccgcttcaagatgcagatctttgtgaaaaccctgactggcaagactatcaccctcgaggtggagtcgtctgacaccattgacaacgttaaggccaagatccaggacaaggagggcatccccccagaccagcagcggctcatcttcgctggcaaccagctgaagacgggcgcagcttgttgac

SEQ ID NO: 18235 - DNA, 227 bp, Zea mays
gacgaaaggagggagttttgagaagctcaaatggctcctaaagccgctcctgccaagaagggtgatgccaaggcccaggccttgaaggtggccaaggctgtgaagtctggggcaggcaagaagaagaccaagaagattcgcacatctgtaacatttcaccagcccaagaccctgaagaaggccagggacccgaagtacccaagaatcagcactactggaagaaacaa

SEQ ID NO: 18236 - DNA, 226 bp, Zea mays
gccaattcgctcgagttcagatcgagcgcgcgccaagcaagtcttccggccggccgcgaagagcgcaatcaagcaagacaagatggtgaagctcgccttcggaagcgtcggcgactccttcagcgccacctccatcaaggcctacgtggccgagttcatcgcgagcctcctcttcgtcttcgccggcgtcggttccgccatcgcctacgggcaactgacgaatggc

SEQ ID NO: 18237 - DNA, 224 bp, Zea mays
ccacgcgtccggcctctcctcctccagagctcgtcgccaccggccaccgccaccctcgatcacgccgtccgtcgaggtaaggtcagcatggtgagggtcagtgtgctcaacgatgcgctcaagtccatgtacaacgctgagaagattggcaagaggcaggtcatgatcaggccgtcatccaaggtcatcatcaagttcctgacggtcatgcagcgccatggcta

SEQ ID NO: 18238 - DNA, 226 bp, Zea mays
cgccgcagtccgcaccccctccccaatcacgccacccgacaccgcgctccgcagattcgtagtcgccgctaggcttccggcgagatggacgtggtgaaggcggcgcagttgtcggggcggacgctggaacgggtagtggtgcatcccttggtgctgctcagcatcgtcgaccactacaaccgcgtcgcccgcgacacccgcaagcgcgtcgtcggcgtcctcctcg

SEQ ID NO: 18239 - DNA, 220 bp, Zea mays
ggaccagttccgcgtcaccttcgactgggaggtggagaagcacggcgtcccgggcgccatcatcgtgaagaacaaccacgcctccgagttcttcctcaagaccatcaccatcgacgacgtccccggccacggccccatcgtcttcgtcgccaactcatgggtgtacccgcagtacaaataccgctacaaccgcgtcttcttctccaacgacacgtacctc

SEQ ID NO: 18240 - DNA, 218 bp, Zea mays
cggacgcgtggctgagaacatggtgacctcaagcaagggcaaggtatgtgtaaccggggcctcaggcatttgttgcctcttggcttatcaaacggctcctcgagtctggatatcatgtggtagggactgtcagggacccaggaaatcaccaaaaaacagcccacctttggaaattacctggcgctaaagagaggctgcaaatcgtgcgagctgatctg

SEQ ID NO: 18241 - DNA, 220 bp, Zea mays
cccacgcgtccggcgttgcgtttccttggaggggattgttctctcctctcctttggattggaggtccctccttcttctcctctctctctcagaggaaggcctgaggatccaggaagaggacagcaatgggggaaggtgcaggtgaccgtgtcctgagccgcctccacagcgtcagggagcgcattggcgactcactctctgcccaccccaatgagcttgt

SEQ ID NO: 18242 - DNA, 220 bp, Zea mays
gattaggagggggagttcttccccggcgtcccgaaaatcaagtatgagggtccaacaagcaagaaccctcttgcttataagtggtataacaaggaggaagtgattctcggtaagaagatgaaggattggatgcgcttcagtgttgcgttctggcacacgttccgcggtactggcgctgatcctttcggtgctcatacaaagacttggccttgggaggaag

SEQ ID NO: 18243 - DNA, 204 bp, Zea mays
ccggcgctcgcgcggctttctttcccaactccgacgaaggctagctacaccacctggtgcgggctcgtctccatcgcccgccacccgctccgtcgtcgtcgtccccgccgcgccgatcccgaatcgaatggggagcctggcgtccgagaggaaggtggtcgggtgggccgccagggacgcaaccggacacctctccccctactc

SEQ ID NO: 18244 - DNA, 215 bp, Zea mays
  unsure (1)..(215): unsure at all n locations
gcgcgaagactatgtcggtgatggtggaacgcataacggaatcaacgagaacaacacgatcatcgacacacacgggctgctgagcatccatatgcctccttactacaactctatcatccgaggtgtctccacggtcatggtctcctactccagctggaacggagtanagatgcacgcgaaccatttcctagtcacggattttctcaagaacaagc

SEQ ID NO: 18245 - DNA, 215 bp, Zea mays
acaagagactcactgccttccatcctgaaatcgaggagctcatctacagcgacgtcgagaactccgagcacaagttcgtgctgaaggacaagaagaagccgatcatcttctcgatggcgcgtctcgaccgcgtgaagaacatgacaggcctggtcgagatgtacggcaagaacgcgcgcctgagggagctggcgaacctcgtgatcgttgccggt

SEQ ID NO: 18246 - DNA, 215 bp, Zea mays
gtttaagatgcttctcaagtaccggcctgaagacaaggctgccaagaaggagaggcttctgaagagggcccaagctgagaatgaaggaaaaactgttgagtcgaagaaaccaattgttgtgaagtatggccttaaccatgtgacttacctcattgagcagaacaaggctcagcttgttgtcatcgctcatgacgtggatccgattgaactggttg

SEQ ID NO: 18247 - DNA, 204 bp, Zea mays
gacacgcgtccaaacatacagctagatagcctctgcatgcctacgtacagcatggccaaggccgagctgctcctcgccctcgtggcttcgctcgtcgtgctgccattctcctccctcgccgtgtaccaggacttctgcatcgccgacctatccgccgcagccacgccgggcggctacccgtgcaagcccccgaatgacgtgacc

SEQ ID NO: 18248 - DNA, 216 bp, Zea mays
cccacgcgtccgcccacgcgtccggtcccgtttccatcaatcacaggtctacgccgttcacttcaagtgcaacaagaagctgctgagggagtacccaaacctgttcaactacaccaaggacatataccagatccccggcatcagcagcaccgtcaacatggaacacatcaggaagcactactacggaagccatccgtccataaacccatacgggat

SEQ ID NO: 18249 - DNA, 240 bp, Zea mays
cccacgcgtccggaaacaagaccatggatgcctccaagctccgcgagcttcgcgacttcgtcgaggcgtgcaagaagaatccttcgctcctcgccgaccccaacctctccttcttccgggattacctccagagtttgggtgccaaaattcccgccgccgccccctctttcgaaagtcccaagagatcttccatggacgacattgatgacgacggtgatgacgacgacgatttggatatga

SEQ ID NO: 18250 - DNA, 238 bp, Zea mays
atcaatggctcccctgttgctgtcaaaaagcttctcaataacctaggtcaagctgagaaggaattcagagtagaagttgaggctattggtcatgttcgacacaagaacttggtccggcttcttggttattgcgtggagggtacccaaaggatgcttgtctatgagtatgtgaacaatggaaatctagaacaatggcttcatggagctatgagtcaacatggctctcttacatgggagg

SEQ ID NO: 18251 - DNA, 238 bp, Zea mays
gacagttgatctcaaacctgacattccaagtgaatcacagagaatcaggcaacgcaggggcagaatatttgcacttcctgaggagccggaggttgctcgtgtttggcttccaaggtataactcgcctggattggccatggctagggcatttggagacttttgtctgaaggatcatggtgtaatttctatgcctgatgtttcctatcaccacataacggaaaaggatgaatttgttgtg

SEQ ID NO: 18252 - DNA, 236 bp, Zea mays
atgaaggcccggctcgtcggcgcgacccgcggccacggctgctgaagaagaagtccgacgcgctgacggtccagttccgcgccatcctcaagaagatcgtcgccgccaaggagtcgatgggcgagacgatgcgcgcctcctccttctccctcgccgaggccaagtacgtcgctggcgacggcgtccgccacgtcatcctccagtccgtccgcgcggcatccgtccgcgtccgctcc

SEQ ID NO: 18253 - DNA, 234 bp, Zea mays
cggacgcgtggtcccagcagatcttgtgaccctccctcagccgcgtcgcgtcgcatcctacgatccaaagctctctctgctcgcagccatggcgaagaactacccgaccgtgagcgccgagtacagcgaggctgtggagaaggccaggcgcaagctccgagccctcatcgccgagaagagctgcgccccgctcatgctccgcctcgcgtggcactccgcggggacgttcgacgt

SEQ ID NO: 18254 - DNA, 238 bp, Zea mays
gcttcttcctcccctccctgaccgctgccgcgacctctcggcgaaaccctaacctaccttagaccccgccgccgccgccgccgccgcccaagggagagagagacttgcacatcaaagggcgtccgatggggaagaagaagaagcgcgtcgataaggtcttctgctactactgcgaccgcgagttcgacgacgagaagatcctcgtccagcaccagaaggccaagcacttcaagtgcca

SEQ ID NO: 18255 - DNA, 240 bp, Zea mays
cccacgcgtccgcccgccccgacgtccagcacctccccaccatcttcacctccctcggactcgagtacgacgacaaagtgctcccctccatcggcaacgaggtgctcaaggccgtcgtcgcccagttcaatgccgaccagctcctcaccgaccgcccccacgtctccgccctcgtccgcgacgctctcatccgccgcgcccgcgagttcaacatcatcctcgacgacgtcgccatcaccc

SEQ ID NO: 18256 - DNA, 238 bp, Zea mays
gcgtcattgctcaccatgctggtgctggcacctctcctcgccatggccaccgacccagaccccctgcaggacttctgcgtcgccgacctcaacggcaagccatcagtgaacgggtacccatgccagccgccgtcgtcggccggcgaccagttcctcttctcgaccaagatcgccacgggaggcgaccccctggccaacccgaacggctccaacgtgacggagctggacgtttccgagt

SEQ ID NO: 18257 - DNA, 235 bp, Zea mays
accccctgctcacccacccgtcccctcctgctcgcccatggctcccatcgctgtcggcgacgccctccccgacggccagctcgggtggttcgacgagaacgaccagctgcagcaggtctccgtccacgcgctcgccgccggcaagaaggtcatcctcttcggcgtccccggcgccttcaccccgacctgcagcaaccagcatgtgccaggcttcatcacacaggctgagcagctc

SEQ ID NO: 18258 - DNA, 230 bp, Zea mays
cgccgcctcctccactcgcaccgatggcgaaggaaccaatgcgcgtgctcgtcactggcgccgcagacaaattggatatgccctggttcccatgattgctaggggtgttatgcttggtgcagaccagcctgttattctgcacatgcttgacattccgccagcagctgaagcccttaatggtgttaagatggagttggttgatgctgcgtttcctcttctgaagggagttg

SEQ ID NO: 18259 - DNA, 144 bp, Zea mays
aaaataaggaatgggttgccaaatttgagaaaccaaagggtgacccctctgcctttgtgaaaccttcaacaactgttttgtcaccatatctaaagtttgggtgcctgtcttccagatatttttaccactgcattcaggatgtgc

SEQ ID NO: 18260 - DNA, 218 bp, Zea mays
  unsure (1)..(218): unsure at all n locations
caaatcgaccgagcgaattcaccacagcttctcaccaccgctaccttcgatggcacccaaggcggacaagaagccggcggcgaagaagcctgcagaggaggagcccgcgacagagaaggcggagaaggctccggccgggaagaagcccaagggcgagaaagcgcttcccggcgggcaattccgccggtaaggagggcggcganggcaagaaaggggaa

SEQ ID NO: 18261 - DNA, 196 bp, Zea mays
cccacgcgtccgctgggggtggctttggcggtgggtctggcggtggcggtggttacggcataggtaagggtggcggggactggtggaacaatttcgtctctagtatagcaggtggtggaggaggaggacaaggcggaggcggtggcaccaatggtgggtccgggtccggcggtgggtccggttaatggtcctggaa

SEQ ID NO: 18262 - DNA, 232 bp, Zea mays
cccacgcgtccggtgtacaaggatcaagaccttcatgacaagtacattgacatcaaagagatcccagagctttcagtcatcaacaaaagcagcaagggggtcgagcttggatcagttgtgtccatctctaaagcgattgagctgctgtcagatggaaatgtggttttcgaaaagattgcagatcacctgaacaaagtggccttccgtttgttcggacacagcaccattggtg

SEQ ID NO: 18263 - DNA, 233 bp, Zea mays
ccagacccagcagctattgtggtcgtccctcagccgcgtcgcaccgcatcgcattctacgattcgaagctctctctgctcgcagccatggcgaagaattacccaaccgtgagcgccgagtacagcgaggccgtcgagaaggccaggcgcaagctccgcgccctcatcgccgagaagagctgcgcgcccctcatgctccgcctcgcgtggcactccgcggggacgttcgacgtg

SEQ ID NO: 18264 - DNA, 230 bp, Zea mays
cctccgcctccgcccccgcccccgcccacgcccactcctcgctgccaccactcctgtcacctcttcccgcgccgacgcagccgccatggaccccgtcgccacatgggggctaaccccgctcgcgggcgccgacccggagatctacgacctcctggagcgcgagaagcggcgccagcgtcgcggcatcgagctcatcgcctccgagaacttcacctccttcgccgtcatgg

SEQ ID NO: 18265 - DNA, 226 bp, Zea mays
ctctctccaactccacgatttgttccacacccggttcccgagcctccgcagcgcttcttgctgaaaaagggaactccgagttctccagctctggatcggcagagagcggtggttccttttgcggactctgaggtccagttcttgtttttgatttgtctcatcaacccaccagtcgggctgcaggcttagagctggaaggaataatttgactagagaaatggggcag

SEQ ID NO: 18266 - DNA, 224 bp, Zea mays
ccaggcgcgctggagattcgtgaacgcggacgagtgcctgatgacgaggatgcaggagatgtccctggactaccacttcaccgtggagcaggaagtgagctcctccgtctgcgccttctttggattcaacggcaccgccggcgtgtggcgcatctccgcggtgaacgaggctggggggtggaaggaccggaccacggtggaagacatggatctgggcattcggg

SEQ ID NO: 18267 - DNA, 221 bp, Zea mays
cggacggtgggcttctcgaatttcggtggcatgggtggtatgggcggcatgggtggcatgggtgatatggatggtatgggtggtcttggtggcatgggtgggatgggtgatcttggtggcatgggtggtatgggaatggatgatttcgaagatgagagtgatgatgaagaagaattgtcgaaacctcaagctgcggacaaggctgttgaggctgaggagac

SEQ ID NO: 18268 - DNA, 227 bp, Zea mays
cgtcacaagcagttcgaaaccaaggatcggtccaggagcttccagaaggcgaggaggaagagggagaagggcgcgcgcgcgcgcaggtatcaagtggtgctggtgtcggccatggatcgggttcgcggatccgcgttcctgctcggcgtcctgctcgcaggatccctgttcgcgttttcagttgctaaggaggagaccaagaagctcggcactgtgattggtatcga

SEQ ID NO: 18269 - DNA, 217 bp, Zea mays
cgaacagcagccaattcgctcgagttcagatcgagcgcgcgccaagcaagtcttccggccggccgcgaagagcgcaatcaagcaagacaagatggtgaagctcgccttcggaagcgtcggcgacaccttcagcgccacctccatcaaggcctacgtggccgagttcatcgccaccctcctcttcgtcttcgccggcgtcggttccgccatcggctaa

SEQ ID NO: 18270 - DNA, 244 bp, Zea mays
ctcgagaactccatttcgatcccatttgaaatcaacccatcctcgtttcctccgtctagcagcctctcaccctcatggccaagatcaagatcgggatcaatgggtttggcaggatcggaaggctggtggccagggtggccctgcagagcgacgacgtcgagctcgtcgccgtgaacgaccccttcatcagcaccgattacatgacctacatgttcaagtatgacactgtgcacggacagtggaa

SEQ ID NO: 18271 - DNA, 255 bp, Zea mays
cgcctcgaccggatctcgtcggactcggatccgcccgaccaccccgcgccgccgcagatcaaagaagatggcagctgtcgacacattcctcttcacctcggagtctgtgaacgagggacaccctgacaagctctgtgaccaggtctcagatgccgttcttgacgcttgccttgctgaggaccctgacagcaaggttgcttgtgagacctgcacaaagacaaacatggtcatggtctttggtgagatcaccaccaa

SEQ ID NO: 18272 - DNA, 241 bp, Zea mays
acggccgcaagctggtgtcgggcctcatcccggacgccggcaccatccacgcgcacggccaggagaccgtcaagatcccggtgtcgctcgtcttcgacgacatcaagagcacctacaaggacatccagccgggcagcatcatcccctacctcgtccgcgtcgtgctcctcgtcgacgtccccatcatcggccgcgtcaagatcccgatccagaaggacggcgagatccccatcccttacaa

SEQ ID NO: 18273 - DNA, 241 bp, Zea mays
ctcagaagctatcagggcttcctcctgagactgtgttccagccattgctcaaggataatcttgttgccaaagggatagtactttcattcattactgagtttttcaaggagtaccttgaggaaaacagcttggatgatttgattgcacttttgaagaaaggcaaaatggaggacaatctgttggacttcttcccatcagctaagagatcttctgaggctttatctgagcatttcaccaaagg

SEQ ID NO: 18274 - DNA, 241 bp, Zea mays
ccacgcgtccgctccaggggcaaaagctgcagcgtcgagatggtgaaggggcgcacggggcagcgcgtgaggctctacgtccggggcaccgtccttggatacaagcggtccaagtcgaaccagtacgagactacgtcgctggtgcagatcgagggggtgaacaccaaggaggacgtcgcgtggtactgcgggaagcggatggcctacatctacaaggccaagaccaagagcagcggcaccc

SEQ ID NO: 18275 - DNA, 245 bp, Zea mays
ctcatatgtggtggaaagttctttcatgttagatgtgcaaatcatatattgaaccttgttgctaaagatggcttagcagtaatgggaaatgctattgcaaacattagaatgttcataacagctatcaagaggtcacctttgcaatttgaggcatttcaaaaatgtgctaaagaatgtgatctagacactaagaaagtcctttccttagatgttgctacaagatggaattctacatatattatggt

SEQ ID NO: 18276 - DNA, 238 bp, Zea mays
acacggtccgggaccgtggcgtcggttcacttctccaggtaaggaaagggttcgtactcatggcgccgccgcacccaaagtcgggcctcttcgttggcatcaacaagggtcatgtcgtcaccaagcgcgagtgcctccccgcccgtgccaccgcaaggggaaatcaacgaagagggtgtctatggtcaggggcctgatcagagaggttgctgggtttgctccttatgagaagcgtatc

SEQ ID NO: 18277 - DNA, 235 bp, Zea mays
agaacatcaagcacagcggcaacatcggcctcgacgacgtcgtcgagatcgccaggaccatgaggaacaggtccatggccaaggagttggccggcaccgtcaaggagatcctcggcacctgcgtcacgtcgggtgcaccgtcgacggcaaggaccccaaggacctgcagcaggagattgatgacggcgaggtcgagatcccgtccgcttgaagactagacatcgaaggggacttc

SEQ ID NO: 18278 - DNA, 237 bp, Zea mays
gatgaaccggcacttgatacagtgaaaaggatgaaactatatgcagactctcttgcacgctttcaaggaggctcaccttatatctatccactatatgggttgggtgagctaccacagggttttgcacgactgagtgctgtttatggtggtacttacatgttaaacaagccagattgcaaggttgaattcgatatggaggggaaagtgtgtggtgtcacatctgaaggtgaaactgca

SEQ ID NO: 18279 - DNA, 231 bp, Zea mays
ggacctggcgcgcgcgcgatcacggccgcgagcttcacttactgcgcgatccccgcgctcttcatgtaccgcacgtacgggagcatgtcgatggcgtggaacgtctcgctcatgttcgtcacggggatgttcgtgaacgggccctacgcgctgatcacgacggcggtgtcggccgacctcggcacgcacagctcgctcaacggcaactcccgggcgctggccaccgtgacg

SEQ ID NO: 18280 - DNA, 235 bp, Zea mays
cacatacacaagcacaagcgcactctagcaatggcttctgaggttgtccgccctagcgacgccgagctactaaaggcacaagccgacatatggcggctcagcctctcctacctcacgcccctgtcactgaggtgcgccgtggagcttggcatccctacggcgatctaccgccatggcggggctgcctcagccgctgagctggtcacggcgctgtctctcccctccactaagctgc

SEQ ID NO: 18281 - DNA, 235 bp, Zea mays
cccacgcgtccgcgaacagcagccaattcgctcgagttcagatcgagcgcgcgccaagcaagtcttccggccggccgcgaagagcgcaatcaagcaagacaagatggtgaagctcgccttcggaagcgtcggcgactccttcagcgccacctccatcaaggcctacgtggccgagttcatcgccaccctcctcttcgtcttcgccggcgtcggttccgccatcgcctacgggcaa

SEQ ID NO: 18282 - DNA, 237 bp, Zea mays
agcgacacccgaccccgccgtcgtgatgaggccggcgctgctcaagtccacggccgagctcctccgccgcagccgcggctacgcctcctcggccaacccggagcggaaggtggccatcctgggcgctgcgggcggcatcgggcagccgctctccctcctcatgaagctcaacccgctcgtctcctccctctcgctctatgatatcgccgggacccccggcgtcgcggccgacgtctc

SEQ ID NO: 18283 - DNA, 241 bp, Zea mays
gctggaggggcaattcctgcatgaaggatggcctctccgacagcaccgtccgccggagcttggtcggaggcttctacgatgcgggggacgccatcaagttcaactacaccatggcctggtccatgaccatgctcagctggagtgtgatcgagtacagggcgaaatatgaggccatcggtgagctcgaccatatcaaggagctgatcaagtggggaacagactacatcctcaaaaccttcaa

SEQ ID NO: 18284 - DNA, 231 bp, Zea mays
cccacgcgtccggggcccaaacaccaagttctcctatgcttctcacaaggctgttaacgaatataaggaggctaaggcgctcggtgttgataccgtgccagtacttgttggaccagtctcgtacctgttgctctcaaagcctgccaagggtgtggagaagggattccctcttctttcccttcttagcagcatcctcccagtctacaaggaggtcattgctgagttgaaggc

SEQ ID NO: 18285 - DNA, 234 bp, Zea mays
ccgagctccagtacctgggcaaccccatcaccaaccacgtgcagagcgcggagcagcacaaccaggacgtgaactccctgggcctcgtctcggccaggaagaccgccgaggcgatcgacatcctgaagctcatgtcgtccacctacatcgtggcgctgtgccaggccgtggacctgcgccacctcgaggagaacatcaaggcgtcggtgaagaacaccgtgacccaggtggcca

SEQ ID NO: 18286 - DNA, 233 bp, Zea mays
cacacagaagcggcggcggcggacaaacgcaggcgaaggcgagggtgtgagggaaggagcaccagccatggtgcacgtcaacttctaccgcaactatggtaagacgttcaagaaaccaaggcgtccttatgagaaggagcgtcttgatgctgaactgaagctggtcggtgagtatgggctgaggtgcaagcgtgagctttggagggtccagtatgcactgagcaggatccgta

SEQ ID NO: 18287 - DNA, 235 bp, Zea mays
gcatcgtgtgctcagtcagatccccgtcccgcatttcctaaggccagttggcattgaagacgatgactgcttctgcagctgctggtgtgcagatggtggctgcacgcccttgcatttcggcctcgccaggaattcttaccgcacgggtttctaggactgattgcatgctcagtaccactgctacattccccaaaatcagctgctcctggcctctaaggtttaagcgcaatgatgt

SEQ ID NO: 18288 - DNA, 235 bp, Zea mays
gatcgacagtgataactacccagagacactgtgccggatgtatataattaatgctggccaaggcttcaagatgttatggagcacaataaaatcattcctcgatccaaaaactgcttccaagatccatgttcttgggaataagtatcaacataagttgctcgaaataattgacgagtgtgaactgccagaatttcttggtggcaaatgcaattgtattgaaggttgcaaagatctg

SEQ ID NO: 18289 - DNA, 244 bp, Zea mays
acgagagctacggacgaatgtggccacacatgcacacgaggatcatcgcggctctgatggtttaccagaccaccatgatcggcttcatctccctgaagaagttcgcctacgcgtccgttctcgtgcccctgcttccagccagcataatcttcgcctacgtctgccacatgcgcttctacccggcgttcgccaagactcccctggaggtggtggtgcggcacgacctgaaggagactccgaacat

SEQ ID NO: 18290 - DNA, 243 bp, Zea mays
ttccgtctccatatcttcttcttggtccgccgtctccactccgcgttccctggctccctgcgttgcgtcttgggggagagagagaagtgggagacccgcgagaggctgccgtgtagggactagggaccgtagagtaagcgacagcgataggagggagagggggatggccgggatcgggccgatcaggcaggactgggagccggtggttgtgcggaagaaggcacccaccgccgctgccaagaa

SEQ ID NO: 18291 - DNA, 241 bp, Zea mays
cccacgcgtccgcaccgcgctgtccatcgtcaagcagggggacctcatggtcgtcgccaacgtcggcgactcccgagccgtgctgggcaccacgtacggcgatggcaccatcgtggccgtccagctcaccgtcgacctgaagcccaatctgccacaggagaaggagcgtatccggcggtgcaacggccaggtgtactgcctcgccgatgagcccggggtgcaccgcgtgtggcagcccagc

SEQ ID NO: 18292 - DNA, 239 bp, Zea mays
cccacgcgtccgcccacgcgtccgcactggtgtcacaaccacgatcttggacagagctggccggagaatcatcctcattatttcttcttctgggatgaccctaagccttctggcagttgctgttgtattttgcatcaaggataacattgcacaagactctgacttgtacaacatcttaagaatagtgtccttggttggtgtcgtggcttatgtcactgccttctccttcggtatgggtt

SEQ ID NO: 18293 - DNA, 236 bp, Zea mays
tggggttgggaagacttccttgaagaaccaatatgtgaacaagaagttcagcaatcagtacaaggctacactcggcgcggatttcctcaccaaggaggtgcagttcgaggacaggctcttcactctgcaaatatgggacactgctgagccaggaaaggtatcagagtctcggcgttgcattctacggggaacagattgttgtgtcctagtctatgatgttcattctatgaaatcat

SEQ ID NO: 18294 - DNA, 236 bp, Zea mays
gctcgtttgattagagaaatgtttggctatgcacgtgatcaccaaccatgcatcatcttcatggatgaaattgatgccattggtgggcgaagattcagtgagggaactagtgctgatcgtgagatccagcggacgttgatggaactccttaatcaattagacggttttgatgagctcggaaaggtaaagatgatcatggccacgaatcgacctgatgttctggaccctgcgctcct

SEQ ID NO: 18295 - DNA, 234 bp, Zea mays
gcggaagcacagattgcacggtaaaaatttgggatccaagtttgcgtggttctgaacttcgagcaacacttaaagggcatactagggcaattcgaacaatcagttcagatcgtggcaaaatagtttctggagctgatgatcagtctgtcatagtatgggataagcagacttttaagcttttggaagaactgaagggccacgaggcaccagttagttctgtccggatgctctcag

SEQ ID NO: 18296 - DNA, 234 bp, Zea mays
ccacgcgtccgcggacgcgtgggcttttggttaaacaggttaggctgcacttcactgatggtgcacttagattgttagctaagaaggcgatagctaaaagcactggtgctcgtggtttaagagccatcttggaaactgttcttttggaggccatgtatgaggttccagacgaaaaaacaggaaatgagcgagttgacgctgttgtggtggatgaggaggcgattggttctgttg

SEQ ID NO: 18297 - DNA, 186 bp, Zea mays
gaacacgagtccgcggaccgtggcgaccgtggcggacgcgtgggatcaaacttgtgtggttgctatcttctatgttctgctagtttatgatcggagtccgtaggaatatactagctaattaataaaaagaaaaactgatgtgatgccataatagtataatgtcatggctttttgttatgtttggag

SEQ ID NO: 18298 - DNA, 231 bp, Zea mays
gcagagcagaggtcaacaagacgagacaagagaatgcctgtgagcaggatcgccgtgggtgctccgggcgagctgtcccaccccgacaccgccaaggccgccgtcgccgagttcatctccatgcatcatcttcgtcttcgccggctcaggatcgggcatggccttcagtaagctcacggacggcggcgccaccactcccgccggcctcatcgccgcgtctctggcgcacgc

SEQ ID NO: 18299 - DNA, 229 bp, Zea mays
catgaacaaggttggtggcttcctgcagcggatggacctgtgccgcaaatacgcctttggcaagatgcttgtggtaggctctgagccccctttcaaggtcaaggggctctggctcttcaggggctcagaaattcccaagtttgtcatggacgaagtctatgacatggagctttatgagtggaccaaggttgacctctctgatgaggcacagaaggagcggggtcaatgc

SEQ ID NO: 18300 - DNA, 220 bp, Zea mays
cccagatccaattcgcgagttctccctcctctgccgccatggcgctctctgtggagaagacctcgtctggacgggagtacaaggtcaaggatttctcgaaggcggacttcggcggcttcgagattgacctggccgaggtcgaaatgcccggcttcatggcgtgccgcgccgagttcggcccgtccaagcccttcgcgggcgctaggatctcggggtctct

SEQ ID NO: 18301 - DNA, 227 bp, Zea mays
ctcagcgccgcgcttgcgtttccttctcttcgcttccaagatgtcgaagcgagggcgtggaggttcggctggtaacaagttccggatgtcactgggtctaccagtggcagctactgtgaactgtgccgataacactggagccaagaacctgtacatcatttctgtgaagggaatcaagggtcgccttaacaggcttccttctgcctgtgttggtgacatggttatgg

SEQ ID NO: 18302 - DNA, 230 bp, Zea mays
tgttacttctccctccgccgccactcccctcccattcaccgccaccgccaattccataccgtcctccgccacctctgctgagagcgagaagagatggcaggcaagggtgatgggccggcaatcggcatcgatctcggcacgacgtactcttgcgtcggcgtctggcagcacgaccgtgtcgagatcatcgccaacgaccagggtaaccgcaccacaccctcgtacgtcgc

SEQ ID NO: 18303 - DNA, 227 bp, Zea mays
cggacggtgggtgagggcgggagaggttgaggttgaggaagagcagaggaatccattccaggagtgtttaatggcgggaggcaaggaagcgcacgggtgggcagccagggatgtctctggtcacctctccccttaccacttctcacggagggttcagagagacgacgacgtcaccatcaaggtgctcttctgcgggctttgccacactgacctccacgtcatcaaga

SEQ ID NO: 18304 - DNA, 232 bp, Zea mays
cggacggtgggcgcgtggttaaggcagcaaatgggcctggtcagtcaagaaccggccttgtttaacgacacactaagggcaaacattgcctatggaaaagatggacaggcaacagaatctgagatcgtatctgccgcacaactggcaaacgctcacaagttcatcagctcggcgctccagggatatgacacaatggttggagagcgtggagctcagctgtcaggacggcaga

SEQ ID NO: 18305 - DNA, 77 bp, Zea mays
cggacgcgtgggagcgcacacacacacaaccagatctcccccaaatccacccgtcggcacctccgcttcaagatgca

SEQ ID NO: 18306 - DNA, 230 bp, Zea mays
gtcaggttgaaggctgcaaggttgatctctcttctgctaaagagtaccatcggaagcacagagtctctgtacctcattctaaggctcccaaggtggttgttgctggtctggagcggcgcttttgtcaacagtgtagccggttccatggattagctgagtttgaccagaagaagaaaagctgccgcaggcgcctcaatgatcacaatgcccgcagacggaaaccacaacct

SEQ ID NO: 18307 - DNA, 229 bp, Zea mays
cccacgcgtccggataattgtgcgcctgaacaagatacatgcgagctgtgctaagcagggtagctggagagacaccttcaagcttccatggaaacaaactggagagagataattgtaaagccccgcgaggctgccgtgtcaagatttcgccccttcccttcagcaagtgtgagtaaacacgagtcaagaaacgtagagttacaaacagaaaggcaagtttctatttagt

SEQ ID NO: 18308 - DNA, 233 bp, Zea mays
cccacgcttccggcttcctccaaagccactccaaacccccgcttccagaaccttctcgaaactctccgcctcctcctctactcgctccgatggcgaaggaaccgatgcgcgtgctcgtcactggcgccgcagggcaaattggatatgctcttgttcccatgattgctaggggagttatgcttggtgcagaccagcctgttattctgcacatgcttgatattccgcagcagctg

SEQ ID NO: 18309 - DNA, 235 bp, Zea mays
cccacgcttccggcttcctccaaagccactccaaacccccgcttccagaaccttctcgaaactctccgcctcctcctctactcgctccgatggcgaaggaaccgatgcgcgtgctcgtcactggcgccgcaggcaaattggatatgctcttgttcccatgattgctaggggagttatgcttggtgcagaccagcctgttattctgcacatgcttgatattccgccagcagctgaa

SEQ ID NO: 18310 - DNA, 226 bp, Zea mays
ggagcgcacacacacgcaaccagatctcccccaaatccagccgtcggcacctccgcttcaagatgcagatctttgtgaaaaccctgactggcaagactatcaccctcgaggtggagtcgtctgacaccattgacaacgttaaggccaagatccaggacaaggagggcatccccccagaccagcagcggctcatcttcgctggcaaacagcttgaggacgggcgcac

SEQ ID NO: 18311 - DNA, 240 bp, Zea mays
gcatttgccttgacattcttaaggaacagtggagccctgctttaactatctcaaaggttctcctgtcaatctgctcactgctcacggacccaaaccctgatgatcctcttgtccctgagattgctcacatgtacaagaccgacagggccaagtatgagtccaccgaacgctcctggacacagaagtatgccatgggctagaagcaaggctaaaagctggccaaactggtgaatgtgccgg

SEQ ID NO: 18312 - DNA, 227 bp, Zea mays
gaaccccaaatttgtgctccagatatacagagactttgctgctacaggtgatatgcaattcggtcgagatgtttggcctgcagtctgtgctgctatggactatatggatcagtttgaccgtgatggtgatggtctgattgagaatgatggatttcctgatcaaacctatgatgcttggactgttcatggaatcagtgcttactgtggttgtctttggcttgctgcac

SEQ ID NO: 18313 - DNA, 228 bp, Zea mays
tgagaatgaaataatcataatccataatttcatacgggacaagtataggttgaagtttcctgaactggagtcccttgttcatcacccaatcgattatgcccgtgttgtcaagaagattggaaacgagatggatttaacactagtagatctggaaggacttttaccttctgcaattataatggttgtctcagtgacagcatcaacaacaagtgggaagcctctttctga

SEQ ID NO: 18314 - DNA, 228 bp, Zea mays
gcatattaacacatttaatgccacactcacagattgatatatatgtccaagttcttcaagctgatggtggaacaaggtcagcttgcataaatgctgcaacactagctcttgcagatgctgggattccaatgcgagacattgccacatcatgtagtgctggttatctgtgttctactcctttgctcgatctgaattacctcgaagacagtgctgggggttctgatgtca

SEQ ID NO: 18315 - DNA, 234 bp, Zea mays
ttttagtatatctaggattaccacggattaattgaacttgagtagggttaaggaaaataagagatcttagaataaccttaaccatctcgtggtcatcccactttacgctcccgaggttgcgcacttgattcaccaaggtcttgagccgattgtacatgtgttgtggctcctcccctttgcgaagcggaaccgaccgagttccccttcgatcgtttcccgcttggtgatcttggt

SEQ ID NO: 18316 - DNA, 221 bp, Zea mays
ccctcactcccgttccatttccccatctcccagatccaattcgcgagttctccctcctctgccgccatggcgctctctgtggagaagacctcgtctggacgggagtacaaggtcaaggatctctcgcaggcggacttcggccgcctcgagattgagctggccgaggtcgaaatgcccggcctcatggcgtgccgcgccgatttggcccgtccaagccttcg

SEQ ID NO: 18317 - DNA, 222 bp, Zea mays
cccacgcgtccggtcactcaacacagcacaggcagctcgagagagagagagagagaaagatgtcgtggttcgggcaccaccaccacaaccagccggctcccccggcgtcgggccccaaccaggtgttcaagatcttctgccgcgccaacgagaactactgcctggccgtccgcgacggcgccgtcgtgctggccccggtcaaccccaaggacgaccacaagc

SEQ ID NO: 18318 - DNA, 221 bp, Zea mays
cggacgcgtgggcggacgcgtgggctgcagtacctggaactttacaagaacagcattcaaggaacaatcccttctgagcttggtaatttgaagaatctaataagcttggacttgtacaagaacaacatttcggggacaatacccctttcccttggaaagttgaaatcccttgtattcctgcggctcaatggcaatcatttgactgggccgatcccaaggga

SEQ ID NO: 18319 - DNA, 225 bp, Zea mays
aaaagttgtaactgataaaggagaagagctcattgcagatgttgtcctatttgcgacagggcgcacaccaaactcccagagactgaacttgcaagctgcaggcgttgagattgaccgggttggagccatcaaggttgacgaatattctcgtacttctgctcctagtgtatgggctgtgggtgatgtaacaaaccggattaatttaacacctgttgcattaatgga

SEQ ID NO: 18320 - DNA, 199 bp, Zea mays
aacaattttaaggacgacgatgaagctgatactgttggttgctgtacgctgaaggttgataatgttacatgtatgcctccaaatcagattcagtttgactttctgggtaaagattcaataagatactttaacaccgtagaggttgaagagcttgtgtacaaggcaattgagggtttccgtgctggaaagaagccaggac

SEQ ID NO: 18321 - DNA, 227 bp, Zea mays
ctcagagcctcagagcgccaccaagtcttgcggtcgcgaagagcaacgcaacaagatggtgaagctcgcattcggaagcgtcggcgactccttcagcgtcacctccatcaaggcctacgtggcggagttcatcgccaccctcctcttcgtcttcgccggcgtgggttccgccatcgccttcgggcaactgacgaatggcggcgcgctggaccctgcgggactggtgg

SEQ ID NO: 18322 - DNA, 242 bp, Zea mays
ccacgcgtccgcagcttacctgtgcaacccaggtctatggacccatccaaggatcttgctgcatatgggtatggtagtgttgcttggaaggaacggatggagaattggaagcagagacaagagaggatgcaccagacggggaatgatggtggtggtgatgatggtgacgatgctgatctaccactaatggatgaagcaagacaacaactgtccaggaaaattccacttccatcaagccagat

SEQ ID NO: 18323 - DNA, 236 bp, Zea mays
ccacgcgtccgctcccacggcctgtggctgaacatccctgactatgatgcacccacccagctggtcaagcctaaggagaggaacgaaaggtacgttgatgctgtcatgacaatccccaagggaaccttgttccccatgtgcggcatgaaccttgccttcgacagggatctcattggcctgccatgtacttcggtctcatgggtgatggccagcccattggtcgctacgacgacatg

SEQ ID NO: 18324 - DNA, 237 bp, Zea mays
cccacgcgtccgcaaacgcgtcgcatccgctccacaggatcctctgcgccaccgcaaccgtgtgaccgcccgtgccgccggcgatcccgatcagccgacccgtcccagccccgctcgcagccatgtcgccgtcggagccgacgcgggatgagagcgtgtacatggccaagcttgcggacaggcggagcggtacgaggagatggtcgagttcatggagcgcgtcgcgcgctacgccgg

SEQ ID NO: 18325 - DNA, 231 bp, Zea mays
cccgtggatctctcgataagtacatcttctcgtcggagaagacattctcatgggacaaactcaacgagatcgctctgggcattgctagaggtcttaactacctgcatcacgggtgtgatatgcagatagtacactttgacatcaagccacacaacatccttcttgatagcaactttgttccaaaagttgctgattttgggctagccaaactgttcccaaaagatgacaatt

SEQ ID NO: 18326 - DNA, 230 bp, Zea mays
tccagttgccgatgcaactaccttctttactgatatgcactacgtccttcgtgtgttggctgctggggatatccgaaccgtgtgtcatcaccgtttaaatcttctagagcaaaaatttaatcttcacttgatggtcaatacggatagagaactgcttgctcagaaagctgcacctcaccgggacttctacaatgttaggaaggttgatactcatgttcatcactcagcat

SEQ ID NO: 18327 - DNA, 232 bp, Zea mays
gtagttcgtccccttccccgcgcccccagcagcagcggattcccctcgagagatccggcccttggcgcggtcgccggagagagcggcatggggctctgggactcgctcctcaactggctccggagcttgtttttcaagcaagaaatggagctctccctcgttgggttgcagaatgctgggaagacgtcgctggtcaatgccgttgctacaggtggctacagtgaggacatga

SEQ ID NO: 18328 - DNA, 236 bp, Zea mays
gctgttcgtgggcgtgtccgtcgcggcgaacatctcgggcggccacctgaacccggccgtgacgttcgggctggccgtgggcggccacatcaccatcctgacgggcgtcttctactgggtggcccagctgctgggcgccaccgtggcgtgcctgctcctcgggttcgtcacccacggcaaggccatcccgacgcacgccgtcgcgggcatcagcgagctggaaggcgtcgtgttcg

SEQ ID NO: 18329 - DNA, 235 bp, Zea mays
cccacgcgtccggtcagggagacatgccgcaacattggtttcgtgtcgaacgatgtcgggcttgacgctgaccactgcaaggtgcttgtgaacattgagcagcagtcccctgatattgctcagggtgtgcacggccacttcaccaagcgccccgaggagattggagctggtgaccaggggcacatgtttgggtatcgactgtcacgacccctgagctgatgcccctcagccatgt

SEQ ID NO: 18330 - DNA, 231 bp, Zea mays
attttgaacatcgtgaaacatcatttgtgtggaactacaagtatgctgatgttgaatttggaaggctacaagcaagagatatgctgcagcacttgtggacaggcccgatctcaaatgcagctgttgatgttgttcaagggagtcggtcagttgaagtccggtctgttggagttacaaagggtgctgcaattgatcgtattttaggggagatagttcacagcgaaaacatga

SEQ ID NO: 18331 - DNA, 229 bp, Zea mays
gggcgctcttctgccgggactgcgacgagcccatccacgtcccgggcacgctatccgggaaccatcagcgctacctggccaccggcatccgcgtcggcctcgcctccgcttccgcctgcagcgacgcctgcgacgcccacgactccgaccaccacgccccgcccaaggccaccatcgagccgccgcacgccgccgtctccgccgcggtgcagcaggtgccctcgccgcc

SEQ ID NO: 18332 - DNA, 229 bp, Zea mays
cacaggttgaacgactcaaaggtgaaaacgcaacactgttccagcaactttcagatgccaaccaacagttcagtactgcagtcacagacaacagaatcctcaaatccgatgtagaagcgttaagaattaaggtaaagatggcagaggatatggtagcgagaagtgctgtatcgtgtggcctaggcgaccttggcctggcaccatacgtgaactcaaggaagatgtgcca

SEQ ID NO: 18333 - DNA, 215 bp, Zea mays
gtttcaagggttctgcaccaatcaatctttctgatcgtcttaatcaggtgctccgttgggctcttgggtcagtggaaattctgcttagcagacattgtcctatatggtatggctacaatgggcgattgaagcttttggagaggctggcttacattaacaccattgtttatccaatcacatctgttccgcttatcgcctattgtgtgcttcctgct

SEQ ID NO: 18334 - DNA, 229 bp, Zea mays
cagctcccatatccgctcccctacctctccagcatctcccgtctccgtcgtctcgtctctgctcctcacctcgccgccagccatgggcaagatcaagatcggaatcaacggtttcggaaggatcggcaggctcgtggccagggtcgccctgcagagcgaggatgtcgagctcgtcgccgtcaacgaccccttcatcaccacggattacatgacctacatgttcaagtac

SEQ ID NO: 18335 - DNA, 222 bp, Zea mays
ggaggagctgaccaagtggtcgctgtaccgcgcggtgatcgccgagttcgtggccacgctgctcttcctctacatcacggtggccacggtgatcgggtacaagcaccagacggacgcggcggcgtcgggccccgacgcggcgtgcgggggcgtcggcgtgctcggcatcgcctgggccttcggcggcatgatcttcagcctcgtctactgcaccgcgggggt

SEQ ID NO: 18336 - DNA, 225 bp, Zea mays
tgcgcctctacatttcttctctctctgctcctccgcctccgcctgatccatccaagacagggatcgccatgtcggactcggaggagcaccacttcgaatcgaaggccgacgctggggcgtccaagacctacccgcagcaggctggcaccgtccgtaagaacggcttcatcgtcatcaagaaccgtccctgcaaggttgtggaggtttctacctccaagactggta

SEQ ID NO: 18337 - DNA, 223 bp, Zea mays
ctctcgttccatttccccatctcccagatccaattcgcgagttctccctcctctgcggccatggcgctctctgtggagaagacctcgtctggacgggagtacaaggtcaaggatctctcgcaggcggacttcggccgcctcgagattgagctggccgaggtcgaaatgcccggcctcatggcgtgccgcgccgagttcggcccgtccaagcccttcgccggcg

SEQ ID NO: 18338 - DNA, 227 bp, Zea mays
cagcgccatccgaaagcagtttggctctcaagatggtggccctgagactaaggtccttgattacaagactcaacaaagcagactctttccgttgctggcttcagcatatgcatttagatttgtgggtgactggctgaagtggctatacatggatgtcactcagaaactggaagctaaagactactcaacactgcaagaagcccatgcctgtactgctggtttgaagg

SEQ ID NO: 18339 - DNA, 232 bp, Zea mays
cgtgtggcgcgcggcagcctggcgactgcgaacgggagcagcaaggggtcgttcgaggtgcccaaggtggaggtcaggttcaccaagctcttcatcgacggcaagttcgtcgacgccgtctccggcaagacgttcgagacccgggaccctcgcaccggcgaggtgatcgccagcatcgcggagggagacaaggccgacgtcgatctcgccgtcaaggccgctcgggaggcct

SEQ ID NO: 18340 - DNA, 155 bp, Zea mays
actggatacattactgagggacagatatacattgataggcagctccataacagacagatttatccacctattaatgtcctgccatctctttcacgattgatgaagagtgctattggtgagggcatgacacgtcgagaccattcggatgtatctaa

SEQ ID NO: 18341 - DNA, 237 bp, Zea mays
aagaactgcgacttccaggtggagcgctacgtgtacaagcgccgcactgatggtatctacattattaaccttggaaagacctgggacaagcttcagttggccgccagggtcatcgttgccattgagaatccgcaggacattatcgtgcagtctgctaggccctatggccagagggctgtcctcaagtttgcgcagtacactggtgcccatgccattgctggcaggcacactcctggt

SEQ ID NO: 18342 - DNA, 214 bp, Zea mays
cccttcgctgaggccaatgctggggactctggtgcggcagcagggtcaaaggactacgtacacgtgcgcatccagcagcgtaatggtcgcaagagcctgactaccgtccagggattgaagaaggagttcagctacagcaagatcctcaaagatctcaagaaagagttctgctgcaatggtacagtggtccaggacccagaacttggacaggtca

SEQ ID NO: 18343 - DNA, 237 bp, Zea mays
acggggttcgggtcaccgtgcggggcgtgcaagttcctgcgccgcaagtgcgtgcgcggctgcgtcttcgcgccctacttctgccacgagcagggcgcggcgcacttcgccgccatccacaaggtgttcggcgccagccgcgtgtccgagctgctcgcgcacctgccgctcgccgaccgcgctgaggccgccgtcaccatctcctacgaggcgcaggcgatgcagcggtaccccatc

SEQ ID NO: 18344 - DNA, 235 bp, Zea mays
cccacgcgtccggttttggttcagaattcacaacaatggctggcaggaggctacgtgatgccgtcaaagctgtacttacaagtgacaacagtggtgaatttaataacattcatgttgttcttgcggggctaacaaatacatattcgcagtatattacaacttttgaagaatatgagatccaaagatacgagggagcatcgacgttgtatggcccccacacgttgagcgcctacat

SEQ ID NO: 18345 - DNA, 236 bp, Zea mays
caaccaacggaaacaagaagcttgatgctgcttaccaagaagctcagtcaaagggatctgcatgccctatattcttgttcttctcagtgaatacaagtgggcagtttgttggtgttgctgaaatgactggcgccgttgattttgagaaaaccctagagtattggcaacaggacaagtggaacggctccttctctgttaagtggcacattgtcaaggacgtgcccaacaatattctc

SEQ ID NO: 18346 - DNA, 238 bp, Zea mays
gcggaccaggtaagcagcagcaggaaccctagcaccgccgcatccgcagccatgggtatcgacctcgttgccggtgggaggaacaagaagaccaagcgcacagcgccgaagtccgacgatgtttatctcaagctccttgtcaagctctaccgtttcttggtcaggaggaccaagagcaacttcaatgctgtcattctcaagaggctcttcatgagcaaaaccaatcgcccaccaatct

SEQ ID NO: 18347 - DNA, 236 bp, Zea mays
gcgaacaagcaatccgaattctctgcgatttctctagatatcgaccacccctactagttttggttcatcctttcgttcgagagagcgtttctagtggcaatggcgaagagcgagggtccggcgatcgggatcgacctcggcaccacctactcgtgcgtcggcgtatggcagcacgaccgggaggagatcatcgccaacgaccaggggaaccgcaccacgcagtcctatgtcggctt

SEQ ID NO: 18348 - DNA, 233 bp, Zea mays
gacgacgatccatccatcttaaagcaagcagagacatggagtcgtcgccgctgctgcagctgccggcggcacgcgtggaggctctgagcctcagcggcctctccgccatcccgcccgagtacgtccgccccgccgacgagcgagccggcctcggggatgccttcgacctggcgcgcacgcatgccaacgaccacaccgcgccgaggatccccgtcgtcgacatctccccgttc

SEQ ID NO: 18349 - DNA, 233 bp, Zea mays
cccatccgcacctctctccatctccctgctcctccgcctccttcttgatccagccaagccagggatcgccatgtcggactcggaggagcaccacttcgaatcgaaggccgacgccggagcgtccaagacctacccgcagcaggctggcaccgtccgtaagaacggcttcatcgtcatcaagaaccgcccctgcacagttgtggaggtttctacctcaaagactggtaagcatg

SEQ ID NO: 18350 - DNA, 235 bp, Zea mays
cccacgcgtccgcgagcaggaggcggacaaggtaagcagcaatcgcaggaaccctagcgccgccgcacccgcaggaatgggtatcgacctcgtcgccggtgggaggaataagaagaccaagcgcactgcgcccaagtctgacgatgtctacctcaagctcctcgtcaagctctaccgtttcttggtcaggaggaccaagagcaatttcaacgctgtcattctcaagaggcttttc

SEQ ID NO: 18351 - DNA, 233 bp, Zea mays
ggatgcttgtctacgagtatgttaataatggcaacctggaacaatggcttcatagcgtgaatcaacacggtgtccttagttgggaaaaccgtatgaaaattctccttggcactgcaaaagctctcgcgtaccttcatgaggccatagaccccaaagttgtgcacagagacatcaagtcaagtaatatcttaatcgacgatgaattcaacagcaaggtttctgattttgggttg

SEQ ID NO: 18352 - DNA, 233 bp, Zea mays
ctcgcctgcgatcttcgtagcctccgtcgcgtcgagcatcgatcatgtcggcctactgcggaaagtacaaggatgagctcatcaagaatgctgcctacattggcacccccggcaagggtatccttgctgctgatgagtccactggcaccattggcaagcgcctttccagcatcaatgtcgagaacgttgaggagaaccgccgtgccctccgtgagctcctattctgctgccct

SEQ ID NO: 18353 - DNA, 226 bp, Zea mays
gtgggacagccttgttgatcatgcaaagacgtgtgtcttaagtggaaagcattatgtatactatgctagagactcaagaaacgtgggtgcaatattcaataacatctatgagttcactggtttgattgccgatgatcagttcatttcagctgaaaatcttacagacaatcaaaagggctatgctgatgcattggtaaagaaagcatatgaggactggatgcaagtt

SEQ ID NO: 18354 - DNA, 225 bp, Zea mays
acaaaagcagcaacggggtcgagcttggatcagttgtgtccatctctaaagcgattgagctgctgtcagatggaaatgtggttttcgaaaagattgcagatcacctgaacaaagtggcctctccgtttgttcggaacacagcaaccattggtggaaacatcattatggcgcaacggttgcaatttcactcggacattgtgactgtactactagctgcaggtacaa

SEQ ID NO: 18355 - DNA, 224 bp, Zea mays
cggacgctgggtaacctctctttgtttgcaaagagctactttgctggttcagccaatctttcggtcattctataccaatttttttgtgcgtggtatatcattgattacttcgtccatgaagaattcatgacctcaacgtgggacattattgctgaaagactgggtttcatgctggtgtttggtgatctagttttcatccctttcaccttcactattcaggggtg

SEQ ID NO: 18356 - DNA, 227 bp, Zea mays
gctgccgcagactggtagtagccggcgcgccgtcaccgtatcctcagatcagcggcgagcagaaaccacaccactctactgacgcccgacgagcagtgtaacattttccttcagccatgggtaaggagaagactcacatcaacattgtggtcattggccatgtcgactctggcaagtcgaccaccactggccacctgatctacaagcttggaggtattgacaagcga

SEQ ID NO: 18357 - DNA, 226 bp, Zea mays
cccacgcgtccgctccaaggatggccagacccgtgaacatgctctccttgcgttcacccttggagtgaagcagatgatttgctgctgcaacaagatggatgcaaccactccaaaatactccaaggcacgttatgatgagattgtgaaggaagtctcatcctacctcaagaaagttgggtacaaccctgataagattgccttcgttcccatttctggttttgagggc

SEQ ID NO: 18358 - DNA, 226 bp, Zea mays
gaagctggcaaagaagtaccatgctttccttgcatctgaggctatcattaagcaaattcctcgtcttcttggtcctggtcttaacaaggcaggaaaattccctaccttggtgacacaccaggaatcccttgagtccaaggttaatgagacaaaggctacagttaagttccagctgaagaaggtgctttgcatgggtgttgctgttggcaactgcggcatggatgag

SEQ ID NO: 18359 - DNA, 229 bp, Zea mays
ctcgtcctgaaatctcttacgtcagtctttgaaattattgaccgggagccaaaaattgatcctgatgataccaccggcttgaaaccacccaatgtctacggaagcattgaattcaagagtgttgatttttcttatcctgttcgccctgacattcttgtcttgagtaattttaatcttaaagtgagtggtgggcaaacacttgcggtggttggggtctcaggatcaggga

SEQ ID NO: 18360 - DNA, 244 bp, Zea mays
aaacaaccttgcaaagaaagcaactgagggggcgctctcaattgatgacatggcaggtggaacattcaccatctccaacggtggtgtctatggaagcctcctcagcacacctatcatcaaccctccacagtcgtctattctggggatgcattccattgtgcaacgccctgtggttgtgaatggtgacatccttgcgaggccaatgatgtaccttgcgctgacttacgaccacaggttgatcgat

SEQ ID NO: 18361 - DNA, 242 bp, Zea mays
atctgtcagatactgttactgatgatgagttgaaggagatgtttggaaaatatggaaccataactagtgctgttgttatgcgggatagcgatggaaaatccaggtgttttggatttgtcaattttgaaaatgcagatgctgctgctcaggctgttcaagagttgaatggcaagatattcaatgataaggaactgtatgttggaagagcacagaagaagtctgaaagagagatggagttgaag

SEQ ID NO: 18362 - DNA, 242 bp, Zea mays
tgtagctggactgtattttgctttgacccagctgacccacagaaacatctctcagaatcataagttccaggctgttggtcttggttgggcttttgctgattcagttttgcaccgactggcacctctctggattggggcaagagggcttgaatttacatgggagtacatatttcaaggacttgaagcgaatgctaatcttgtgatgaccctctcccttgctgcattggggtccttgatgtggc

SEQ ID NO: 18363 - DNA, 244 bp, Zea mays
ccgagcctcagttcgcatccacgcgcgccgccgccgcctcgccggtcgacgctcaccgcgcaccatggcggaacagactgagaaggctttcctcaagcagccaaaggttttcctcagctcaaagaaatctggcaagggtaagaagcctggcaagggcggcaaccgattctggaagagcattggccttggcttcaagactcccagggaagcaatcgaagggacctacattgacaagaaatgccca

SEQ ID NO: 18364 - DNA, 243 bp, Zea mays
ggcggcgcggacggacaaggagcaggcggaagaggagttgtgccaaggcacaatgggtatctcgcgtgactcgatgcacaagcgccgagccaccggtggaaagcagaaggcctggaggaagaagcgaaagtatgagcttggtcgccagccagccaacaccaagttgtcaagcaataagacagttaggagggtccgtgttcgtggaggtaatgtgaaatggagggctcttcgccttgatactgg

SEQ ID NO: 18365 - DNA, 246 bp, Zea mays
caaagccaaaccctaattcacggccgccggagatgggacaaggttctcccggcgggatgggcaagcagcccggccttccgggcgaccgcaagcagggagacggcaagaaagagaagaaatatgaaccacccgctgccccttcccgtgtcggccggaagcagaagcggcagaagggctccgaggcggcggcgcggctccccgccgtggcgccgctctcaaagtgccgccttcgcctactcaagctcg

SEQ ID NO: 18366 - DNA, 239 bp, Zea mays
atatgtcgtggcaggcgtacgtcgatgaccacctgctgtgcgacatcgaaggccagcacctcagcgccgccgccatcgtcggccacgacggcagcgtctgggcacagtccgagaacttccccgagttaaagcctgaggaggttgctgggatgataaaggactttgatgaacctggaactcttgcaccaactggtctttttgttggaggtacgaagtacatggtgatccaaggtgaacct

SEQ ID NO: 18367 - DNA, 160 bp, Zea mays
agcgctgctcccgagatgcgaccctcgccggagccaaggcggcagcgtggcgactatcgcctccgcgatccccaccctggccagcgtgcggatgctgccatgggccaaggccaacatcaaccccaccggccaggcgctcatcgtctccacggtggctggg

SEQ ID NO: 18368 - DNA, 236 bp, Zea mays
gccggcttgacaaaacagaacgtgttcgaggcagccatcgagacctcatatctggtgctggagtccgccatggccgagctcatgaaccacaggcgcgtcatgaagaagctgcaagcggaggtacgggcgtacggagcggagaagaagctggacatgatcagggaggacgacctgagcagcctgccgtacctaaaggcgtccatgaaggaagcgctgcggctgcacccaccggggcc

SEQ ID NO: 18369 - DNA, 218 bp, Zea mays
ggaagaagggcctcctgtctcctctcacttcctcagtcctcgtccgtgtctgctccctcgtctctctacctagcaagctagccagcgttcctgtagcgcggcagagatggctgcacctgcgtccaccacggcggcggcggcggcggcgctgctgctgctgctgctcgtgtcgctcgcagcggcggcggaccatgtcgatcgtgtgctacggggagcgc

SEQ ID NO: 18370 - DNA, 238 bp, Zea mays
cccacgcgtccgcaagagagcacgctactactcatcactcgccaacgtgcagagatcagggaagcggcactccatccactgactgaccgctcatggcgaaggtccacctctacgtcgccgcggcctgcgccgtcgtcctcgcgctcgccaccccggccctcgccggtgaccccgacatgctgcaggacgtctgcccggctgactacgcctccccggtgaagctgaacgggttcgcgtg

SEQ ID NO: 18371 - DNA, 239 bp, Zea mays
atcagcaagatggaccggacgtcgatcctgggcgacacgatcgactacatgaaggagctgctggagaggatcaagctgctgcaggaagagatcgggcagcagcaggaggaggcgccaggcatgctcagcgtcttccgggagctcaaccccaacgagatggtggccaggaacacccccaagttcgacgtggagcggaaggagggcggcgacacccgggtggagatctactgcgccgccaa

SEQ ID NO: 18372 - DNA, 240 bp, Zea mays
cggcgtccttcgtgttcggcatcatcccgccctactccgacctcagcggccacggcatcgtcttcttcgtcggcagggacagcttcgccaccgcgctgcccagccagtacctgggcttcctcaactccagcaacaacggcaacttcaccaaccacgtcttcggcgtcgagctcgacaccatccggagcaccgagttcgatgaccccaacgacaaccacgtcggcatcgacgtcaacagcc

SEQ ID NO: 18373 - DNA, 238 bp, Zea mays
ggacggtgggcttctctgaattccagtccaagggccggaataccgtcagaaggagtgggagacggggggaaaaaagatggtgaagctcgcatttggaagctttcgcgactctttgagcgccgcgtcgctcaaggcctatgtggccgagttcattgccacgctgctcttcgtgttcgccggcgtcgggtccgccattgcctactcgcaattgacgaagggcggcgctctggaccccgcc

SEQ ID NO: 18374 - DNA, 232 bp, Zea mays
ccctgacaagctctgcgaccaggtctcagatgctgttctggacgcttgccttgctgaggaccctgacagcaaggatgcttgcaagacctgcaccaagaccaacatggtcatggtctttggtgagatcaccaccaaggccaatgtcgactacgagaagattgtcagggagacatgccgcaacattggtatcgtgtcgaacgatgtcgggcttgacgctgaccactgcaaggtg

SEQ ID NO: 18375 - DNA, 234 bp, Zea mays
ggtcaataagaaagtaatggcaatgtttgagaaggcggaggatgagtacaatgatttgatgtcaaagaaaaacatcatcgagaatgacaaggcaaaaatcaagaaagtgatagaggagttggatgagaagaagaaggaaacattgaaggtcacttggctcaaagtaaacaaggatttcgggtctatattcagtactcttttacctggtacaatggcaaaacttgatcctccaga

SEQ ID NO: 18376 - DNA, 234 bp, Zea mays
cccacgcgtccgcccacgcgtccgatttgagcgtgcaagctccttcgcctcgaaccctctcgcgcttggcttgctttcactctccagggccccactcccacctcgccgccgcagccatggcgatcacagcgccaactcccgacatcctcggcgagcgccagtccggccaggacgtccgcacgcagaacgtgatggcttgcggggcggtggccaacatcgtcaaatcctcgctcg

SEQ ID NO: 18377 - DNA, 233 bp, Zea mays
aggaagacgagagctagaagcgaaggagaaaagcagttcttcagctaggcaggagggcacatgaaggaggagatggcgtcaaagaggattcagaaggagctcaaggatctgcagaaggaccctcccacctcgtgcagtgcaggtcctgttggtgaagacatgttccactggcaggcaacaataatgggtccatctgatagcccatattctggtggagttttcctagtcacaat

SEQ ID NO: 18378 - DNA, 239 bp, Zea mays
ccacgcgtccgcagattagcagcttctccgtgctgctgcgtctcctcctcatcgtcctctccagtgtccagctcggccatggcgttcaccgtctccttctcccccgccaacgttcagatgctccaggctaggagtggccacggccacgccacctttggaagctgttccgccgtgccaagagccgggccaaggctgcgctccacggccgtccgggtcagcagcgagcaggaggcggcggc

SEQ ID NO: 18379 - DNA, 236 bp, Zea mays
gttgggtctgggacaccatggctccgatgaagctgtacggggcggtgatgtcgtggaacgtgacgaggtgcgcaacggcgctggaggaggctggctccgactacgagatcgtgcccatcaacttcgccaccgccgagcacaagagccccgagcacctcgtccgcaacccgtttggtcaggttccagctctgcaggatggtgacttgtacctcttcgaatcacgagcaatctgcaag

SEQ ID NO: 18380 - DNA, 235 bp, Zea mays
aggagctggagaagaacccggagaagttcttcgtgcgctccatcaccgcccaattccaggccgtcgtcggcatctcgctgctggagatcctgtccagccactcctccgacgaggtgtacctcggccagcgcgacaccaaggagtggacgtcggacgccaaggcgcaggaggcgttcaagcggttcggcgcgcggctgaccgagatcgagaaacgcgtggaggccatgaacaagga

SEQ ID NO: 18381 - DNA, 230 bp, Zea mays
gttgggcgcagagaatccccaagcaaacaaacagggtagatggagaggagaggagaggagaggagaggttgggtctgggacaccatggctccgatgaagctgtacggggcggtgatgtcgtggaacgtgacgaggtgcgcaacggcgctggaggaggctggctccgactacgagatcgtgcccatcaacttcgccaccgccgagcacaagagccccgagcacctcgtccg

SEQ ID NO: 18382 - DNA, 239 bp, Zea mays
cccaatcaagacgatcaagacaaatgtcatgggaactttgaatatgttgggtctggcgaacgaattggtgcaaggtttttgttgactagcacaagtgaagtttatggtgatccgcttgagcatccacagaaggagtcatactgggggcacgttaatcctataggtgttaggagctgttacgatgaggggaagagaacagcagagactttaactatggactatcatcgtggtggtggtgt

SEQ ID NO: 18383 - DNA, 235 bp, Zea mays
cccacgcgtccgatccaggtagtccgcttcatctcgaaagtgacattgcttgcatcaggaggagctggccatatatatcccacaaccaccaatccaccggtagctactggggacggaatcgcaatgtgtcatcgtgctcaggctgtaatatccaatatggagtttgtgcagttccatccaactgcactttcagatgagggcctgccaataaagccaaagacaagaagagagaatg

SEQ ID NO: 18384 - DNA, 231 bp, Zea mays
caccaatctccgctccggcctgcgccctcgccatgcccccgcacggccccgaagaagacgccgccgacgcgcacctcttcgctggcgtccgcttcgcgctccacggcttcgaccagatctccgcgtcccagtttcggttggagatagagcggtgcggcggcgtccacgcgggaggttgggacgcagactgcacccacgttatagtttccaacaccttatatgatgatccag

SEQ ID NO: 18385 - DNA, 231 bp, Zea mays
caccttgtgccgtcttccaccgctcccgagtccaaggtcttctatctcaagatgaagggtgactactacagataccttgctgagttcaagactggagctgagagaaaggacgctgctgagaacaccatggtggcatacaaggctgcccaggacattgctttggctgagcttgctccaactcaccctattaggcttggactggcactcaacttctcagtgttctactatgag

SEQ ID NO: 18386 - DNA, 229 bp, Zea mays
ctaagctaagccgagctaagaagcacagcaagtctcaccagactagcggctagcgcgagaatggccaaggacatcgaggccgcggcgcacgagggcaaggactactcggacccgcctccggcgccgctggtggacgcggaggagctgaccaagtggtcgctgtaccgcgcggtgatcgccgagttcgtggccacgctgctcttcctctacatcacggtggccacggtga

SEQ ID NO: 18387 - DNA, 232 bp, Zea mays
ctttatacagctgacctctttgtttgaatgcagctttttgcttttgatactgccaagaaattcttgactccaaaggctgatgagtctccaaagaccttcctacctccatcacttattgctggagcacttgcaggagtcagctcaaccctgtgcacatatcctttggagttgattaagaccagattgacgatagagaaagatgtctataacaacttcctccatgctttcgtca

SEQ ID NO: 18388 - DNA, 232 bp, Zea mays
ctctctcaagagtttgggtgggacaaggatcttgccaagaagatttggtgcttcggacctgagaccaccggcccaaacatggttgttgatatgtgcaagggagtgcagtatctcaatgaaatcaaggattctgttgtggctggtttccagtgggcatcgaaggagggtgcactggctgaagagaacatgcgcgggatttgcttcgaggtctgtgatgtcgttcttcatgctg

SEQ ID NO: 18389 - DNA, 178 bp, Zea mays
cagccgccgttgctgctgccgcgtccacagaatggggggtttcgtgaagacccataagaccaatgcgtatttcaaacgtttccaagtgagtgtcaagagaaggggtgctggcaagaccagctaacagggcaagaataaggctgataacccagaccaaaatcaggtacaacccacccaa

SEQ ID NO: 18390 - DNA, 219 bp, Zea mays
caaggagatgatccccccaggtgctcttgttatgctgacaccactgatcgttgggatcttgacacaggttgcgtagtcaggctttgtggtgccctccatgagcccagggatggtgttgaactgccggcggacttcctccaccatcttgagtgcagcactgcctacacttttcattgtcattgccgagaaccagtatgggagcatagcaccaacaataag

SEQ ID NO: 18391 - DNA, 237 bp, Zea mays
gtcatcaaagaagatagagttggatcacaaggacatggtccatgattctgctatcgactactatggcaagcgccttgccactgcctcctcagactctaccgtgaagatcatcaacattggcgcggcaaatgccccatcccaggtccttgcaacgcttagtggccactatggtcctgtgtggcgtgttgcttgggcccatccaaagtatggcgctatccttgcttcgtgcagttatga

SEQ ID NO: 18392 - DNA, 241 bp, Zea mays
ccacatctcgtctctcagatcgggaggcgaaaccaaggcatacatatacatatttgcagtgggaccatcataacaagtaaagatggtgaagttcacggctgaagagctccgtgccatcatggacaaaaagaacaacatccgtaatatgtctgttattgctcatgtggaccatggcaagtctacacttacagattcccttgtggcagctgctgggattattgcccaggaagttgctggtgat

SEQ ID NO: 18393 - DNA, 243 bp, Zea mays
ctctctaccgtccgataccccaagcaccagcgcggcggcggcgaccatggctgtcggaaagaacaagaggatctccaagggaaagaagggtggcaagaaaaagaccgtcgaccctttctctaagaaggattggtatgacatcaaggcaccgtcggtgttcagtgtgcgcaacatcgggaagactctcgtatccaggacacagggtaccaggattgcttctgagggtctgaagcacagagtctt

SEQ ID NO: 18394 - DNA, 242 bp, Zea mays
gccacgggtccgcagtattagcagcttctccgtgctgctgcgtctcctcctcatcgtcctctccagtgtccagctcggccatggcgttcaccgtctccttctccccagccaacgttcagatgctccaggctaggagtggccacggccacgccacctttggaagctgttccgccgtgccaagagccgggccaaggctgcgctcaacggccgtccgggtcagcagcgagcaggaggcggcggcg

SEQ ID NO: 18395 - DNA, 224 bp, Zea mays
  unsure (1)..(224): unsure at all n locations
atcccctttgcaagtatagtctctctgctaagcgaagcancttcaagctagtctcggcggctctagaagacgatgggcaaggacgacgtgatcgagagcggcgctggcggcggcgagttcgctgccaaggactacacggaccctcccccggcgccgctgatcgacgcggcggagctggggtcctggtcgctgtaccgcgccgtgatcgccgagttcatcgccac

SEQ ID NO: 18396 - DNA, 229 bp, Zea mays
ggaaattgttggctgctatcaaccagaagattcaattgtataagtggatgtcacgcgaggatggttcacatgagctgcagtctgagtgtggccaccatgggcacatacttgccttgtatactcaaacacgtggtgacttcattgtggttggcgatctgatgacatcaatatccttgctggtgtataagcatgaggaaagcgcgattgaagagcgtgctagggattacaa

SEQ ID NO: 18397 - DNA, 233 bp, Zea mays
gaaaaaaaaaaacaggcaaggaaaatggctccgaccgccgccaaggacagtggctccgccgatcgctggcgcgaggtgcaggcgttcgaggacagcaagctgggtgtgaagggcctggtcgactccggcgtcaagtccatcccggccatgttccaccacccgccggagtccctcaaggatgtcatttctccaccagctctgccctcctccgacgatgcgccggccatcccagt

SEQ ID NO: 18398 - DNA, 216 bp, Zea mays
ttcatggctaggggaaccgttgccaacattcgtcttgtgaataagttcttgaagggtgaggttggacccaagacaatccatgttccatctggggagaagcttgcagtttttgatgctgctatgaaatacaagcctgaagggcatgacactattatcctggctggtgccgagtaccggacttgcagctctccggattgggattgcaagggctcaatg

SEQ ID NO: 18399 - DNA, 159 bp, Zea mays
agcggcagcaggcggaggcgcggtgcgtgcgctgtcccagaaggagcaggacatacagatgatgctcgccgccgacgtccaccttggcaccaagaactgcgatttccagatggagcgctatgcctttaagcgccgcaccgacggcatctacatcatcaa

SEQ ID NO: 18400 - DNA, 273 bp, Zea mays
cccacgcgtccgcccacgcgtccgcccacgcgtccgcccacgcgtccgtgtgaccctccctcagccgcgtcgcgtcgcatcctacgatccaaagctctctctgctcgcagccatggcgaagaactacccgaccgtgagcgccgagtacagcgaggctgtggagaaggccaggcgcaagctccgagccctcatcgccgagaagagctgcgccccgctcatgctccgcctcgcgtggcactccgcggggacgttcgacgtgtcgtcgaggaccgg

SEQ ID NO: 18401 - DNA, 274 bp, Zea mays
cccacgcgtccgggctgccgcagactggtagtagccggcgcgccgtcaccgtatcctcagatcagcggcgagcagaaaccacaccactctactgacgcccgacgagtgtaacattttccttcagccatgggtaaggagaagactcacatcaacattgtggtcattggccatgtcgactctggcaagtcgaccaccactggccacctgatctacaagcttggaggtattgacaagcgagtgattgagaggttcgagaaagaggctgccgagatga

SEQ ID NO: 18402 - DNA, 275 bp, Zea mays
ccttctcacgcggctcgctcagggctcgagcgtctccccatcggaaccctaatcctctctttccctactcgcggaagccaactccaccggcaggggaagcggaagggaagcacctcggccccggcaagatggtgctcgcacagctgggcgggagcatctcccgcgccctggcgcagatgagcaacgccacggtgatcgatgagaaggtgctcaacgagtgcctcaacgagatctcgcgcgcgctcctacaggccgatgtccagttcaagatggtc

SEQ ID NO: 18403 - DNA, 273 bp, Zea mays
cccacgcgtccgcccacgcgtccgctggcttccaccactcctgtcacctcttcccgcgccgacgcagccgccatggaccccgtctccacatgggggctaaccccgctcgcgggcgccgacccggagatctacgacctcctggagcgcgagaagcggcgccacgtcgcggcatcgagctcatcgcctccgagaacttcacctccttcgccgtcatggaggcgctcggctccgcgctcactaacaagtactccgagggcatgcccggcgcccgct

SEQ ID NO: 18404 - DNA, 272 bp, Zea mays
gaggagcagaaaaagttctgcattgcggcacctgagccacttctgacgtttgctctcagctgtggaatgtattcttctcccggggtgaagatttacacggctaacaacgtgagggaagaacttcaagacgcacagcgtgatttcattagagcatcggtaggagtgagtcggaaagggaagcttctggcccctaagatactgcactgctttgcccgtggctttgtcgacgacaacagcttcccaatctggatctcgcatttcctaccccagca

SEQ ID NO: 18405 - DNA, 270 bp, Zea mays
  unsure (1)..(270): unsure at all n locations
ggaccgtggtgcttgccagagaagtttgaagattgtacatttgagtggctctactggccccaagccagtgagccattcaatgatgaaaccattgaatacatcaaatcactcgatgctgaagaagacatcaagcttctcaagatccatgggtgggagctgcctccacggtgtgctcgtgtcctgcgcatcagcacaatgcttttgaagaaaggtgcatctcgtggcttcacgccctatgacatagggcgcatactatgcaggganactgtg

SEQ ID NO: 18406 - DNA, 276 bp, Zea mays
cccacgcgtccgcaccaccggcttcggcggcacctcccaccgccgcaccaaggacgggcccgcgctccaggtcgagctgctcaggcatctcaacgccggaatcttcggcaccggcagcgacgggcacacgctgccgtcggaggtcacccgcgcggcgatgctggtgcgcatcaacaccctcctccagggctactccggcatccgcttcgagatcctcgaggccatcacgaagctgctcaacaccggtgtcagcccctgcctgccgctccggggcac

SEQ ID NO: 18407 - DNA, 269 bp, Zea mays
cccacgcgtccgggtgcgtcaagcctccgatcatctacggtgacgtgagccgccccaaccccatgaccgttttctggtcgaagacggcacagagcatgacgtctcgcccaatgaaggggatgctgactggcccagtcacaatcctcaactggtccttcgtccggaatgaccagccgaggtttgagacttgctaccagatcgctcttgcgatcaagaaggaagtcgaggatcttgaggctggtggtattcaggttatccaaatcgacgag

SEQ ID NO: 18408 - DNA, 264 bp, Zea mays
ctttcgctatgatgatgacttcgttcattgctcttgtagagtcaactggcgccttcatcggtgcttcgagatatgcgagtgcaactatgattcctccatcgattatcagtcggggcgtgggatggcagggcattggtctgttgctcgattcatttttcgggacagcgaacgggacatcggtttcagtagagaatattggactgcttgcgttgacacgcattggcagccggagagtggtgcagatatctgcaggcttcatgattt

SEQ ID NO: 18409 - DNA, 265 bp, Zea mays
aggagatgtttggaaaatatggaaccataacaagtgctgttgttatgcgggatagtgatggaaattctaggtgttttggatttgtcaattttgaaaatgcagatgctgctgctcaggctgttcaagagttgaatggcaagatattcaatgataaggaactgtatgttggaagagcacaaaagaagtctgaaagagagatggagttgaaggagaaatttgaaaagaatattcaagaggtagctgagaagttccaaaacactaactt

SEQ ID NO: 18410 - DNA, 265 bp, Zea mays
cgatcctccacaccagcacccgccgccgccgcctcttcccttgcgcacctgctgctgtgcggatcggtgaggcggaggagtaggatggcgagcgcggccggaggcgagcggcgggggaaggggagtggcttaaggtatcccagctcaggcccatggtggaagcgcaggaccccaacgccaaggcagtggacaacctgacgctgcgtcggttcctgcgcgcgcgcgaccacgacgtggacaaggcctccgccatgttcctcaagtt

SEQ ID NO: 18411 - DNA, 264 bp, Zea mays
gccgagagcaacctcaagcccgtgtcgctcgagctgggcggcaagtctcccgtcatcgtcttcgacgacgccgacctcgacatggccgttaacctcgtcaacttcgccacctacaccaacaagggcgagatctgtgtggccggcacgcgcatctacgtgcaggaagggatctacgacgagttcgtgaagaaggccgccgagctcgccagcaagtccgtggtcggagaccgttcaacccgagtgtcagccaaggccccaggttga

SEQ ID NO: 18412 - DNA, 265 bp, Zea mays
gcaagcaaggcaggcggacgggcaagggcaagcgagggatgagaatgagggccgtggtgatcacgtgcgccggcgggccggaggtgctggaggcgcgggaggtggaggaccatcccgcgctaggcgaaggagaggtgctcctcgaggtcgccgccgcgggcgtcaatcgcgcggacaccgtgcagcggatgggccggtacccgccgcctgccggcgcgtccccttacccggggctcgacagctccggcaacatcctcgcgctcgg

SEQ ID NO: 18413 - DNA, 265 bp, Zea mays
ctcaaaccctagccgcctcctgcaagtttgaggggctgtgcaaggtcatcaaggaggttctgggtgacaaagttgagaaggtggtggtgtctgatcgcgttgtggactcaccgtgctgccttgtgactggcgagtatggctggaccgccaacatggagaggatcatgaaggcacaagccctgagggactcgagcatggcgggctacatgtcgagcaaaaagacaatggagatcaacccagagaaccctatcatggatgagctccg

SEQ ID NO: 18414 - DNA, 252 bp, Zea mays
cagattagcagcttctccgtgctgctgcgtctcctcctcatcgtcctctccagtgtccagctcggccatggcgttcaccgtctccttctcccccgccaacgttcagatgctccaggctaggagtggccacggccacgccacctttggaagctgttccgccgtgccaagagccgggccaaggctgcgctccacggccgtccgggtcagcagcgagcaggaggcggcggcggccgatcaggcgccgtccgggag

SEQ ID NO: 18415 - DNA, 267 bp, Zea mays
cccacgcgtccggcgggtgtggatgatgcccaaatgtttcgaactgtgacgcaagctatgaacattgttcatatcagcaaagaggaccaagagagtgtttttgcaatggtctctgctgttctttggctgggggatgtctcgttcacagtaattgacaatgaaaatcatgttgaaatcatagtagatgaagcttcgaaaacggtttcagaacttcttggctgcagtattgaagatctcaatttagctttatcaaagcgccacatgaaa

SEQ ID NO: 18416 - DNA, 269 bp, Zea mays
cgacttcttgccccggacggctactcctcttgaagacattttcaagtcgatcctctgcttgccttgcctcctaggtttgagatgtttgagggatacatgtatacctgaagacgctatgcttaaggatccaaggaggctttatgcaccaggccggatttatcacatagtcgaaagaagaacgtgcaggtgcggaagatatccaccggtagtcaaaacagctgtgccggtggatggtagatttgagcacatagttctttcctgcaatgcca

SEQ ID NO: 18417 - DNA, 203 bp, Zea mays
cccacgcgtccgcacaggacacctgatctacaagcttggaggcattgacaagcgtgtgatcgagaggtttgagaaggaggctgctgaaatgaacaagcggtccttcaagtacgcatgggtgctcgacaagctcaaggctgagcgtgagagaggtatcaccattgatatcgctctgtggaagtttgagaccaccaagtactact

SEQ ID NO: 18418 - DNA, 259 bp, Zea mays
atgttgctcatctgaacatatctgatgacttgctatcatataaagatgtcatagcaaaggttatctatgacaaaaattatccaaggattcagaccgtggtgaataaagtggggacaataacaaatgaatttagagtcccgaagtttgagatcttagcagggaaaaatgatatggttactgaaattaaacaatatggtgcaacattcagacttgattatggtttggtctactggaattcaaggctcgagcatgagcatat

SEQ ID NO: 18419 - DNA, 257 bp, Zea mays
cccacgcgtccgcaacgtggtgcgcgacccacggtggggacgcgccagcgagacccccggcgaggaccccttcgtcgtcggccgctacgccgtcaacttcgtccgcggaatgcaggacgtcgacgaccgcccctacgccgccgccgcagacccgttctcgcggcccatcaaggtgtccagctgctgcaagcacttcgccgcctacgacgtggacgcgtggttcaaggccgaccgcctcacgttcgacgcgccagtgg

SEQ ID NO: 18420 - DNA, 259 bp, Zea mays
cgtttgcctccgtctcgcgtgacttcattcccagcggccggcggcgacctccacgtggtgccattcgccggcaacgagcacccgcccaccaggatccaggtttgtgctgcgagagcgcctatccattcaccatgattaatttcgtgctcctgatcagccgccagggcaaggtgaggctcaccaagtggtattctccttacacccagaaagagaggaccaaggtcattcgcgaactcagtggactcattcttacacgagg

SEQ ID NO: 18421 - DNA, 245 bp, Zea mays
cggacgctgggcgcgacggcaccgtgtccatcaagcaggaggcgctggaccagatccccgcgcccaccatgaccttcacccaactcctccagtccttccagaacaagagcctcaacctcgccgacctcgtctggctctcaggggctcacacgatcggcatctcccaatgcaactccttcagcgagcgcctgtacaacttcacggggcgcggcgggcccgacgacgcggacccgtcgctggacccg

SEQ ID NO: 18422 - DNA, 255 bp, Zea mays
ccgctagcgcgctcctcgagcccagcagagaaaggccggcctacccactctctctctctctctctccagtctccaccggcagcgctaatcgtaatagccatgggctccaccgccggcgacgtggccgcggtggtggacgaggcggcgtgcatgtacgcgatgcagctggcgtcgtcgtccatcctgcccatgacgctgaagaacgccatcgagctgggcctgctggaggtgctgcagacggaggccggccgcggc

SEQ ID NO: 18423 - DNA, 258 bp, Zea mays
gtgtagcagagacgctgatgttcgactatcacaggcagcatggcattgaaatccgaattgccaggattttcaacacctatgggccaaggatgaacattgacgatggccgtgttgttagcaacttcattgctcaggctgtgcgtggcgaaccccttactgtccagaagccaggaacacagactaggagcttctgctatgtcgccgatatggttgatggtcttattaggctgatgaacggaaacaacactggaccgatta

SEQ ID NO: 18424 - DNA, 259 bp, Zea mays
gccaaaccagagacgcggcacgcgacgcggaaggaccagcagcggcggcgcggcgacatcgcgaggccagggcagaggcgaccgccgagagtccctgccaccatggacaccttcttcctatcgcacggctcgcccacgctctccatcgacgacagtatcccggcgcggcacttcttcaagtcatgggtgccggcgaaggtcgcgggcgaccagcccccgcgcgccatcctcgtcgtctcgggacactgggagacggcca

SEQ ID NO: 18425 - DNA, 258 bp, Zea mays
ccacgcgtccgctctttttaatctaggggcaagtggttattttagataatcacactttgagctattttgcaggaatttatcaaagaggttatggctctggtagagcttgatcagctgagatatgcattagtagggaagcagggttctactgggttatcaacagagcaaatgaagggccttactaatttttcaaattctattgcttattgtagcagattgccagagttaccttacttttttcttgtaaaagaactattt

SEQ ID NO: 18426 - DNA, 250 bp, Zea mays
cgtcactgaatcctcagatcacggctagccgtaatcacgccactctgctgactcccggcgagcagtgtaacattttccttcagccatgggcaaggagaagactcacatcaacattgtggtcattggacatgtcgactctggcaagtcgaccaccactggccacctgatctacaagctcggcggtattgacaagcgtgtgattgagaggttcgagaaagaggccgcggagatgaacaagcggtcattcaag

SEQ ID NO: 18427 - DNA, 258 bp, Zea mays
ccacgagcagctgtccgtggccgaaatcaccaacagcgccttcgagccatcctccatgatggccaagtgcgacccccgccatggcaagtacatggcatgctgcctcatgtaccgtggtgatgtggttcccaaggacgtgaacgctgctgtggccacaatcaagaccaagcgcaccatccagttcgtggactggtgcccgactggcttcaagtgcggaatcaactaccagcctcccagcgtcgtccccggcggtgacct

SEQ ID NO: 18428 - DNA, 235 bp, Zea mays
cccacgcgtccgcccacgcgtccgggcttcaagggcgccgagatcgccatggcctcctactgctcggagctccagttcctgggcaacccggtgaccaaccacgtccagagcgcggacagcacaaccaggacgtgaactccctgggcctcatctcgtccaggaagaccgccgaggcagtggacatcctgaagctgatgacgtccacgttcctgatcgcgctgtgcacagccatcga

SEQ ID NO: 18429 - DNA, 231 bp, Zea mays
cagacgcgtggcttccacgctcagccatctctaaaccctacccacagccaccgccgccgccgccgctacatgacccctagtgtccggatttaacttcaaacatggcggacgtcgatgtcgagccggacgtcgccgccggtgctcccaagaagaggacgttccgcaagtacagctaccgcggcgtcgacctcgatgcgctgcttgacatgtccaccgacgacctcgttcagc

SEQ ID NO: 18430 - DNA, 239 bp, Zea mays
gcaggagcaaaaaggtttcgttggcgatggcgagctcgtggacgcttcctgaccacccgaagctccccaaggggaagccggtggctgtcgtcgtgctggacggatggggcgaggccaaccccgaccagtacaactgcatccatgtcgctcagactcctgtcatggactcgttaaagaatggtgctcctgagaaatggagactagtgaaggctcatggaacagctgtgggtctcccatct

SEQ ID NO: 18431 - DNA, 211 bp, Zea mays
cccacgcgtccggagagagatcagcaacttaacaacaataatggccaccgccatagttcccacggacgccgagctgctgcaggcgcaggccgacctgtggcgccacagcctctactacctgacatccatggcgctcaagtgcgcggtggagctccacatcccgaccgccatccacaacctaggcggtgctgcaacgctgccggacctcgtg

SEQ ID NO: 18432 - DNA, 233 bp, Zea mays
gcactctttgaagaaatgcggcaagtttcggaagaaaaaaaaccagacctggtgatttttgtgaatgacagtagtattggtcaggctgcatatgatcgaccacaggcatttaaacaaagtgacacagttggtgatgtgattattacaaaaatggatggtcacgcaaaaggcggtggtgcccttagcgcagtcgcagcaacaaaaagtcctgtaatattcattggaactggcga

SEQ ID NO: 18433 - DNA, 233 bp, Zea mays
cccacgcgtccgacgacacgtacctccccagccagatgccggcggcgctgaagccctaccgcgacgacgagctccggaacctgaggggcgacgaccagcagggcccgtaccaggagcacgaccgcgtctaccgctacgacgtctacaacgacctcggcctgcctgacagcgggaacccgcgccccgtcctcggcggcaccaaggagctcccctacccgcgccgctgccgcacc

SEQ ID NO: 18434 - DNA, 233 bp, Zea mays
gcaagctagccagccttcctgtagcgcggcagagatggctgcccctgcctccaccacggcggcggcggcggcggcgctgctgctgctgctgctcgtgtcgctcgccgcggcggcggacatgtcgatcgtgtcctacggggagcgcacgctgagtgaggcgcggcggatgtacgcggagtggatggcggcgcacggccggacctacaacgccgtcggcgaggaggagcggcggt

SEQ ID NO: 18435 - DNA, 179 bp, Zea mays
cccgtcgcatcccatcccactaccacccatctcgtcgtccgccgattcgatccggttcttccaacccaggggcagtgatggcgacgaagaggagcgtgggcaccctcggcgaggcggatctgaaggggaagaaggtgttcgtgcgcgccgacctcaaggtcccgctcgacgatccccaa

SEQ ID NO: 18436 - DNA, 232 bp, Zea mays
cgattctcctcctccgtccgcgtactctcggtttcggcgatgtcggggcgcggcaagggcggcaaggggctgggcaagggcggcgccaagcgccaccgcaaggtgctgcgcgacaacatccagggcatcacgaagccggcgatccgtaggctggccaggaggggcggcgtcaagcgcatttctgggctcatctacgaggagacccgcggcgtgctcaagatcttcctcgaga

SEQ ID NO: 18437 - DNA, 161 bp, Zea mays
ggctaaggaagctccatcgatcctgcgttattttgccggtaattgattgatagatggcgtcggagaagagcaagatcctggtggtcggcggcacggggtacctgggcaggcacgtcgtggcggcgagcgcgcggctgggccaccccacctcggcgctcgtc

SEQ ID NO: 18438 - DNA, 229 bp, Zea mays
gtttcgcgcctgctgcaggaaggttcttcagccagtttctagcatactttttaacgcaccagatggctgtggccttgtttcggttgctaggtgcaattttgaagacaatggttgtagccaatacatttggcatgtttgcaatgcttcttatcttcctgttcgcagggattctcctacccagacaggacattaaacattggtggatttgggcctactggtcatctcccat

SEQ ID NO: 18439 - DNA, 226 bp, Zea mays
caactcgccgtctgccttctgcgcctccatttcggcctctgtcccttgcaagttcaatctcacctccaaccatgggtaaagagaagtcccacatcaacattgtggttattggccacgttgactctggcaagtcgaccaccacaggacacctgatctacaagcttggaggcattgacaagcgtgtgatcgagaggtttgagaaggaggctgctgaaatgaacaagcg

SEQ ID NO: 18440 - DNA, 231 bp, Zea mays
cccacgcgtccgcccacgcgtccgcaatactatctgaagactggcacatgcaagtttggagcaacttgcaagtttcatcatccccgagaaaaggctgcaatggcaactcgagttcagctgaatgaactgggctacccactccgcctgaatgaaaaggaatgtgcttattatttaagaacagggcagtgcaagtttggaagcacatgtaagtttcaccatccacaaccatcc

SEQ ID NO: 18441 - DNA, 230 bp, Zea mays
ccacgcgtccggacagtgcaaactaatgctattaatgaggcctccagcgctaatgaaattgatcccacatttcttgaagcattgcctgaggatcttcgggcagaagtccttgcttctcagcagaaccgttctgccccagctgcttcctatactcccccagctgcagaagaaatagatcctgagtttttggctgctcttccaccagacatacaggctgaggttctagccca

SEQ ID NO: 18442 - DNA, 230 bp, Zea mays
cccacgcgtccgcccacgcgtccgcccacgcgtccgatgtggtatctgtccatcaatgcccagatgtcaaatacgggaagcgtgtgcacatacttccaattgatgacaccattgaaggcatcactggcaacttatttgatgcctttctgaaaccatactttcttgaagcctatcgtcctttgaggaaaggagaccttttcctagtcaggggtggcatgagaagtgtagaa

SEQ ID NO: 18443 - DNA, 193 bp, Zea mays
atcgcatctgcttccagagccccccgccgccgctgcgccctcctctcggtcctgccgtccgtcgaggtaaaaggacagcatggtgagggtcagcgtgctcaatgatgctctcaagtccatgtacaatgctgaaaagatagggaaacgtcaggtcatgatcaggccgtcatccaaggtgatcatcaagttcctg

SEQ ID NO: 18444 - DNA, 232 bp, Zea mays
ggcacgtaccgccagctcttccaccctgagcagctcatcagtggcaaggaggatgccgctaacaatttcgcccgtggccactacacaattggcaaggagattgttgatctgtgccttgaccgtatccgcaagcttgctgacaactgcaccggcctccagggcttcctggtcttcaatgccgttggtggtggcactggctctggccttggttctctcctccttgagcgcctgt

SEQ ID NO: 18445 - DNA, 290 bp, Zea mays
ctcacacacacgcaaccagatctcccccaaatccagccgtcggcacctccgcttcaagatgcagatctttgtgaaaaccctgactggcaagactatcaccctcgaggtggagtcgtctgacaccattgacaacgttaaggccaagatccaggacaaggagggcatccccccagaccagcagcggctcatcttcgctggcaaacagcttgaggacgggcgcacgcttgctgactacaacatccagaaggagagcacctccaccttgtgctccgcctcaggggaggcatgca

SEQ ID NO: 18446 - DNA, 285 bp, Zea mays
cccacgcgtccgcacagccacgcgagccttcgccgatccgcgagcgcagatcgccgaagccaggcggcggagagggagctcgaggcggcggaggaaggcgttcgccacagtcgctgatttccctggggaagagatgggtctctcctttgggaagctgttcagccgcctcttcgccaagaaggagatgaggattctcatggtcgggctcgatgccgccggtaagaccaccatcctctacaagctcaagctcggcgagatcgtcaccaccatccccactatcggatt

SEQ ID NO: 18447 - DNA, 280 bp, Zea mays
ccacaaatcccaattccaaaaccttttctccgtcccatcgccggcgatcttctccttcgccgccaatggatctctccgctgtccaggctgccctctccgacaagtcctactccaccctcgcctccctctgcgacgaacttctcctccaggccgcgtcccagggattcaccaccgacgaatggccctactctgtccacctgcttgcccacctctacatcaatgacctgaacagcgcgcggttcttctggaagtcgttgccgcaggaggtcaaggacacgcg

SEQ ID NO: 18448 - DNA, 283 bp, Zea mays
cccacgcgtccgcccacgcgtccgcccacgcgtccgctccttctccatcccacgcgcgcgcaggccaaggccggatcggcggcctctcagatctcgccggccgccgtgagacagagaccgaagggcgggttgaccggtgctcgggaggaagatgtttagcgggacgcagcagaagtgcaaggtgtgcaccaagacggtgtacccgatggaccagctctccaccgacggcgtcgtcttccaccgctcctgcttcaagtgccagcactgcaagtctaccctctca

SEQ ID NO: 18449 - DNA, 276 bp, Zea mays
aatcagaagagcggcggcgcgggcggacaaggagcaggcggaggaggagttgtgccaagccacaatgggtatctcgcgtgactcgatgcacaagcgccgagccaccggtggaaagcagaaggcctggaggaagaagcgaaagtatgagcttggtcgccagccagccaacaccaagttgtcaagcaataagacggtgaggagggtccgtgttcggggaggtaatgtgaaatggagggctcttcgcctggatactggtaactactcatggggaagtga

SEQ ID NO: 18450 - DNA, 273 bp, Zea mays
caaatgtgcagaagttgcagtatcttgcatttgcaagctggcttggaattgtgctttgtttgtcctggaacttcgttgctgtcatagtctgctggatcaaggagggagattcaaagttgtttttccttgcaacaatctatgctttgcttggaattcctctgtcatatttgatatggtacaggccactctaccgtgcaatgaggactaacagtgctttcagttttggatggtttttcctgtgttacctgatccacattggtttttgcataattg

SEQ ID NO: 18451 - DNA, 272 bp, Zea mays
ggaagctccatcgatcctgcgttattttgccggtaattgattgatagatggcgtcggagaagagcaagatcctggtggtcggcggcacggggtacctgggcaggcacgtcgtggcggcgagcgcgcggctgggccaccccacctcggcgctcgtcagggacacggcgccgtccgacccggccaaagcggcgctgctcaagaccttccaggacgccggtgtgacgctcctcaagggcgacctgtacgaccaggctagcctggtgagcgcggtg

SEQ ID NO: 18452 - DNA, 275 bp, Zea mays
ggacatagcaacttccactgatttgcttggtgttgaaaccagaagcacaggcatcattttctccattggaaaagaacctctgaaaacccgtccttcagtgtttgctctgggtgaacgaataaacattttgaaggaaatcgaccagccagcattgatacctcatatagctgaagcgaagtcacagaaatactcgtatgaagttcttttcagaagcttgcagaaacttcttattgatactgccacttcagaatacctgtttactgatgatttctttg

SEQ ID NO: 18453 - DNA, 269 bp, Zea mays
cgacgcctctcctcctctccccccccacccgtccatcgcccctccctccggtctgcgctcccacagcctcacccctgcgcccccgccgattcgcgtcgccctttgttggaaggaacgatggagcagaccttcatcatgatcaagcccgacggcgtccagcggggcctgatcggggacatcatcagtcgcttcgagaagaaagggttctacctcaaggggatgaagttcatgaacgtggagaggtccttcgcgcacagcactacgctgac

SEQ ID NO: 18454 - DNA, 198 bp, Zea mays
gccagggctcaggtatgaaagtcaccattcgtcagctggggccttccatgatacagcagatgcagcagccttgcaacgagtgcaaggggactggggagagcatcaacgagaaggaccgctgcccagggtgcaagggtgagaaggtcgttcaggagaagaaggttcttgaggttcatgttgagaagggaatgcaacaca

SEQ ID NO: 18455 - DNA, 277 bp, Zea mays
aactcgccgtcgtcttctgcggttctgccgtctacgcctccaatttggcctctctcccttgcaagtttaagcttcaccttcaaccatgggtaaggagaagtcccacatcaacattgtggtcattggccacgtcgactctggcaagtcgaccaccaccggccacctgatctacaagcttggaggcattgacaagcgtgtaatagagaggtttgagaaggaggctgctgagatgaacaagcggtccttcaagtatgcttgggtgctcgacaagctcaag

SEQ ID NO: 18456 - DNA, 278 bp, Zea mays
gatggattaagagaacgcattcgtggatacctcaagggagcttcagatgaacatctttctcagtttttgcagctagtaaaatatgttagtggctcctatgataggggggaaggatttgagttattaaataaggcaatctctgagtatgaaacttcaaaaaacaatgactcaggaagctaccacagattattttatttggcattgcctccatcagtctacccatcagtatgcaaaatgataagatcatattgcatgagtccatcttcacacactggttg

SEQ ID NO: 18457 - DNA, 273 bp, Zea mays
cggacgcgtgggctgaagctgacgcatgtcatggctgcgaagaagcaggagtggcaagttatgaagcagcttcctgtccccatagacatcgggccagaattccagtatcattctgtctttgtgtgcccggtgctcagggagcagtccagtgacgagaatcccccaatgcggatgccttgtggacatgttgtctccaagcagtccatcatgaagctgtcgaaaagcagctcgagggccttcaagtgcccctactgcccctcggaggctatggcg

SEQ ID NO: 18458 - DNA, 237 bp, Zea mays
cccacgcgtccgaagaggatactgaggaaaaggctcccacaaatggagcgacttttaagctgaatgaagatgctgctcgtgggccaactgaatctagtcaatcaggacctatgctatctgttgagacaattgagaagatgatggaagatccagctgtgcagaagatggtttatccctacttgcctgaagagatgaggaacccagattcgttcaagtggatgctgcagaatcccatgt

SEQ ID NO: 18459 - DNA, 268 bp, Zea mays
cgatctcgtttcaaatccatccatcctcgtttcctccgtcccgcagcatctcaaccccatggccaagatcaagatcgggatcaatgggttcggcaggatcggaaggctggtggccagggtggccctgcagagtgacgatgtcgagctcgtcgccgtgaacgaccccttcatcagcaccgactacatgacctacatgttcaagtacgacactgtgcacggacagtggaagcaccatgaagtcaaggtgaaggactccaaaacccttctc

SEQ ID NO: 18460 - DNA, 268 bp, Zea mays
gaagagagaatcctaccaaacctagctaccaactcgatcgtcgtcatcacgctcgaccgcacaactgcaccaaggggggaggagacctaaaaactactacatcttttatagctacatctctagctaaagatcgagagggtaaataaggacgagcgggcgcgagctagaagagcagctgcaggtactaccatcatcgtcgtcgtcgtcgccaggatgaccgtcgtcgacgccgtcgtctcctccaccgatgccggcgcccctgctgccg

SEQ ID NO: 18461 - DNA, 269 bp, Zea mays
cgcaccacaagcgagcgagggacccggggcggaagaagagagagaagacgtctctctcctctcggcgtccccgttccccaacctctcgtctgctgcctgcctgcctgcctgcctgcaaaaaggagtttgtcatggcgtctaagcgcatcctcaaggagctgaaggacctgcagaaggacccccccacatcatgcagtgcaggtcctgctggtgaggacatgtttcattggcaagcaacaattatgggaccacctgacagtccctatgct

SEQ ID NO: 18462 - DNA, 267 bp, Zea mays
cgcaagccactccgaggccaagtctagggtttgggaatctgtaggaggggagaggggagcgcgctcagggtcagggaggcgaagatgatcgaggtggtgctgaacgaccgcctggggaagaaggtgcgggtgaagtgcaacgaggacgacaccatcggcgacctcaagaagctggtggcggcgcagacggggacgcgccccgagaagatccgcatccagaagtggtacaacatctacaaggaccacatcacgctcaaggactacgag

SEQ ID NO: 18463 - DNA, 269 bp, Zea mays
gcgccgtccacaaggggatgccgcacaagttttaccacggccgcaccggtcgcgtctggaacgtcaccaagcgcgccatcggcgtcgagataaacaagcaggtgaatggtcgcatcatcaggaagcgtatccatgtccgcgtggagcatgtgcagccgtcccgctgcacagaagagttccgcctgaggaaggtgaagaatgaccagctgaaggcggatgcaaaggagcggggcgaggtcatcagcaccaagaggcagccgttgggcccc

SEQ ID NO: 18464 - DNA, 238 bp, Zea mays
cgcagttcccccgcgcccgagacgcaaccccgcgccaggagtaagtttgttcttttatcgatattatcgatatggcgagggaggagaatgtctacatggccaagctggctgagcaggccgaaagaaggaggagtcccgtaagaacgaagagcatgtgaaccttatcaaggaataccgtgcgaaattcgaggctgacttgaccataaccgggaatgcatcctgaagctgcttgactccc

SEQ ID NO: 18465 - DNA, 261 bp, Zea mays
aatttgaaggctgcccaacccttgcgccggtaggcggtggcggtgaggatagagggttacctgaggaggcagtgatggcggccacgattcagtacaaccggagcaacccggcggtgaagcggatcctgcaggaggtcaaggagatgcagtccaacccctcacccgacttcatgtccctccccctcgaggaggacatcttcgagtggcaatttgctatccttggtccgagagacagcgagtttgagggtggaatttatcatg

SEQ ID NO: 18466 - DNA, 240 bp, Zea mays
cacaacccagtcgctcaaaaccctagagctctcgcctgctcgcctccgccgccggagcgagctccccatcttcatccgtcaaccatggcgacccagatcagcaagaagaagaagttcgtcagcgacggtgttttctacgccgagctcaatgagatgctgacgcgggagctggcggaggatggctactctggcgtggaggtgcgcgtcacgccgatgcgcacggagatcatcatccgcgcc

SEQ ID NO: 18467 - DNA, 231 bp, Zea mays
cccactcgtccgcccacgcgtccggtttggaaatcgaggggaaaaccatatggaaaaatcctactggataccttccgggtcggatggcacctcttaagaacttttttggactgatgtcttttgcatttgtcgtacttgggatctattggttttatcagtatatgaagtcctggagagaggttcttccacttcagaactgtattactcttgtgattacactgggcatgtttg

SEQ ID NO: 18468 - DNA, 233 bp, Zea mays
ctgttgaccattgggtattctgaaccatcgagccatggctgccaagctgactcgcctccacagtcttcgcgaacgccttggtgccaccttctcctcccatcccaatgaactgatagcactcttttccaggtatgttcaccagggcaagggaatgcttcagcgccatcagctgcttgcggagtttgatgccctgtttgatagtgacaaggagaagtatgcaccctttgaagaca

SEQ ID NO: 18469 - DNA, 232 bp, Zea mays
ccgcctctcctgctcctaccgcagctctccctcaggtttagtgttcgcaatggcggccttcaacaagcttggtggccttctaaggcacagtgctctggtgagcggtatcactggtggctcttctcctgcagtgttcaatgctgcacggctcatgtctaccaagctatttattggtggtcttgactggggtgttgatgacgtgaaactaagagaagcatttagcagctttgga

SEQ ID NO: 18470 - DNA, 230 bp, Zea mays
ctgacgcgtgggcggacgcgtgggcggacgcgtgggattggccacaagaatccaaaagttcaacttcttgatctaactctgtatgaaactgttaataaaaattgtggggatatacttcacatgcatgttgcagagagagatatattgcatgatatggtgaagatagtgaagaaaaagtctgatcctcgtgttaaagagaaggtattggtgctgatagatacatggcaaga

SEQ ID NO: 18471 - DNA, 232 bp, Zea mays
caccagttcaccacccacctcccactcccagttcaccccgtcgtcctcggcgccaccactcctcgtcccccggcgctactcccccgctccacggtccaaggaaagatggcgtcccatattgttggataccctcgcatgggccccaagagggagctcaagtttgccttggagtctttctgggatgggaagagcagcgccgaggatttggagaaagttgccactgacctgaggt

SEQ ID NO: 18472 - DNA, 221 bp, Zea mays
ccaccgtttctttcctcacctcccgcgacacaccggtagctgccatggcctcttgcgacctccttgatgtcgaccctctggagcttcagtttccgttcgtgctcgacaagcagatcccctgcccgctgcggctcgccaacaggactgaccgtaccgtcgcctttaaggtgaagacgacgaacccgaggaagtactgcgtgcgccccaacaatggcatcgta

SEQ ID NO: 18473 - DNA, 224 bp, Zea mays
tgcagatctcccttcgcagccgccgaggaaccccttcacagcgcggaagatggctgaacaggaggccccagtcgcggttgaggcaccaaccccagttcttggggagcctatggacttgatgactgctctgcagctcgtgatgaagaagtcaagtgctcatgacggtcttgtgaagggtctccgtgaggctgccaaggccatcgagaagcacgccgctcagcttt

SEQ ID NO: 18474 - DNA, 223 bp, Zea mays
attttagccgccgccgctgctcatctcacatccctcgagaagacgcctgctcctcgccgatcgatacgatggccgtcttctccgacctccacaccgccgacggcctcaagtccctcgaggctcacctcgccggcaaaacctatgtgtctggtgactccattactaaggatgacattaaggtcttcgccgcggtgccgtcgaagcctggcgctgagtttcctaa

SEQ ID NO: 18475 - DNA, 226 bp, Zea mays
gctatattatcgttaagattcagtcgtagtaaaaagtaaagattattttatttccctggagtatcaaactgttgcggatctcctctccgccgatccccacgccggtgctctccaaggcgctccgggtggacgccagtgtcgtggatctcatcaagtccaagttcgccggtgggtactgagactgagacccagcatgcatcttgctagcgcactatgcatgcgccga

SEQ ID NO: 18476 - DNA, 226 bp, Zea mays
aaaaacgaactagaaacgaccgcgaaccacaggtcgaaggcggcggcggcgatggggagcgacacggagacggagaagaaggcctcggtggcgctgatgtccatcgcgaaacccctcgctggaaagaagctctgcaagcggaccctcaagctcgtgcgacgagcctccgaggcgaagtgcctcaagcgcggagtcaaagaggtagtcaagagcattcgccgcggga

SEQ ID NO: 18477 - DNA, 219 bp, Zea mays
cattaatattggcagcaagctagctaggatcatcagcatctgagcttattattactaaatcgatcggttgccatggcgatgagagtcggcaagctggcgctggctgcggtgctgctgtgcgcggtggcggccatggccacggcgcagaggcctccggcgtgcgcgcaacctacaacttctacaacccgcagcagaacaactgggacctcaacgctgtga

SEQ ID NO: 18478 - DNA, 220 bp, Zea mays
ggccccttgtggcctgaagactcgtccattcgactcaattctggctgaagtgcgcgcattcttcgacgtgcatgatcaagaaggaagtcacccaggaggcatccaccttgaaatgactgggcagaacgtgaccgagtgcattggtggatcacggactgtgaccttcgatgaccttagcgaccgctaccacacccactgtgacccaaggctgaacgcctcc

SEQ ID NO: 18479 - DNA, 220 bp, Zea mays
cgatccgccattgctcaccgcacaagtgcacgctcacctcacacacgcagctaagtagctaacgccgtatgagcacacaagaaaaggctcgacatggccgaggagaagaagcagggcctgcagctgctggacttctgggtgagcccattcgggcagcgctgccgcatcgcgctggacgagaagggcctggcctacgagtacctggagcaggacctgggga

SEQ ID NO: 18480 - DNA, 217 bp, Zea mays
gtggaagcttcgagttcttttttccttttggcttattgcgcaagaagggtaacgagaggacggcggcgatggcgaagaggctgctcccgtctctgaaccgggtgctggtcgagaagctggtgcagcccaagaagaccgccggcggcatcctccttccggaaacatccaagcagctgaatgctgctaaagtggtggctgttggccctggtgagcgcga

SEQ ID NO: 18481 - DNA, 180 bp, Zea mays
acgaaacatagctacctactactcaagtatccatccttattgagtacagtgttgatccatggactcggaaggagttgtagcagcaaaggtggcagatgagactactaaaccggcaatccaagaagacggcgccgagagcaaggccgggatgactgatctgctgatggtgaccgacaagtc

SEQ ID NO: 18482 - DNA, 221 bp, Zea mays
catcagcagctagcgcgctcctcgagcccagcagagaaaggccggcagcgctaatcgtaatagccatgggctccaccgccggcgacgtggccgcggtggtggacgaggaggcgtgcatgtacgcgatgcagctggcgtcgtcgtccatcctgcccatgacgctgaagaacgccatcgagctgggcctgctggaggtgctgcagaaggaggccggcggcggc

SEQ ID NO: 18483 - DNA, 230 bp, Zea mays
accatattgaagaggctgctgtgcttagacctgtaacagaatggaaatttatgtggtggccctatcatggaaccgaggtatcagggaagtcgtggactggatgtcgaagaaaagtggtattcctgcttctgagcttagggaacacctattcatgctgcgtgacagtgatgctacacgccatctgtttgaggtatcggctgggttggactctctggttctcggtgaaggac

SEQ ID NO: 18484 - DNA, 229 bp, Zea mays
ctctctcgcatccgcagcctttcgagctctactccaccccctcgatctcgaagcgcagatgcagcagtcaggtggccatggacgcgagcgcaccgcgagccggcgggaaggcgaagaagggcgcggccgggcgcaatgctggcgggcctaggaagaagtcggtgacgaggttcgtcaaggctgggctgcagtttcccgtcggtcgcatcgggcggtacctgaagaaggg

SEQ ID NO: 18485 - DNA, 230 bp, Zea mays
ctcatacctatgggcagcctattgctcattttctcaggaagacagctgttgtccctgatgctaaggtcatatctgaacaccaggcggtcagggttggcattgtcttctgtggcagacaatccccaggaggccacaatgttgtttgggggctctatgaggctatcaaggcccacaaccaaaacagcaaactcattggtttccttggtggatcagatggtctgctagcacag

SEQ ID NO: 18486 - DNA, 202 bp, Zea mays
gcagcctccaaagccactcccaaacccccgcttccagaaccttctcgaagctccccgccgcctcctccactcgcaccgatggcgaaggaaccaatgcgcgtgctcgtcactggcgccgcaggacaaattggatatgccctggttcccatgattgctaggggtgttatgcttggtgcagaccacctgttattctgcacatgct

SEQ ID NO: 18487 - DNA, 228 bp, Zea mays
cagcatcttgagaaaggtgaaacacaccaagggccagctgtcctagggattgctcttattgctatggctgaagaattaggagctgaaatggctgtacgttcacttgagcgtcttctgcagtatggcgagcagaatataagacgggcagtccctcttgctcttggtatactctgcatatctaatcccaaggtaaacgttatggacacactgagcagattgagtcatgat

SEQ ID NO: 18488 - DNA, 225 bp, Zea mays
tgtcattccgcttgcttgattgttccagatattcgcagttgaccgggtcctcggagcacgatgaagtttgttgctgcctacttgcttgctgtcctcgctgggaacgccagcccctccgctgaggatttgactgccattctggagtcagttggctgtgaagttgacaatgaaaggatggaactcctgctgtcccaactgagcggtaaggacatcaccgagctcatt

SEQ ID NO: 18489 - DNA, 225 bp, Zea mays
cccacctgctgcgcacctgcaagcctcgagtggagctcttccacggccgcggtggagatggcggcgaatctggaggacgtgccgtcactggatctgatgcacgagctgctccgccgcatgaagtgcagctccaagcccgacaagcgcctcatcctcatcggtccacctggctctggaaagggaactcagtctcctattatcaaggatgaatattgcttgtgccat

SEQ ID NO: 18490 - DNA, 225 bp, Zea mays
cctaaaaccatctgcttcagccttcagctagccccaagtttagtcggccgatcgatcactgaagtagtaatggcctccgccaacagctggaccctcgagatcgcgtcgccggtggccccgcagcgcctgttccgcgccgccgtgatggactggcacaccctggcgcccaaggtcgcctcccacgtcgtcgccagcgcgcacccagtggagggcgacggcggcgtt

SEQ ID NO: 18491 - DNA, 226 bp, Zea mays
agcagcaggaaccctagcaccgccgcatccgcagccatgggtatcgacctcgttgccggtgggaggaacaagaagaccaagcgcacagcgccgaagtccgacgatgtttatctcaagctccttgtcaagctctaccgtttcttggtcaggaggaccaagagcaacttcaatgctgtcattctcaagaggctcttcatgagcaaaaccaatcgcccaccaatctcca

SEQ ID NO: 18492 - DNA, 205 bp, Zea mays
gaaacatagctacctactactcaagtatccatccttattgagtacagtgttgatccatggactcggaaggagttttatgagcaaagtgtggcagatgatactactaaaccggcaatccaagaagacggcgccgagagcaaggccgggatgactgatctgctgatgctgagcgacaagtcgtagctgcaggcgctggcgatgctgc

SEQ ID NO: 18493 - DNA, 224 bp, Zea mays
cccacgcgtccgcccatgcgtccgccacgcgtccgcgctccacaggatcctctgcgccaccgcaaccgtgtgaccgcccgtgccgccggcgatcccgatccgccgacccgtcccagccccgctcgcagccatgtcgccgtcggagccgacgcgggatgagagcgtgtacatggccaagcttgcggacaggcggagcggtacgaggagatggtcgagttcatgga

SEQ ID NO: 18494 - DNA, 216 bp, Zea mays
ttcctcatgtggtcaaccatgatgaagatgaagaacaatgccattgtctgcaacattggccactttgacaatgaaattgatatgctcggccttgagacctaccctggcgtcaagcgcatcaccatcaagccccagactgaccgctgggtgttccccgagaccaacactggcatcattgtccttgctgagggtcgcctgatgaaccttgggtgtgct

SEQ ID NO: 18495 - DNA, 223 bp, Zea mays
cacctcctcgcttgcactccgctcgtctgacatctcgtcccgtcctttcgtttcgaagcctcgcgagccccgacgatggccaccaccgcggtgtcggtcgacgagaagctcgataagcttcgcgccgaggtcgccaagctcgaccagatcagcgagaacgagaagtccgggttcatcagcctcgtgtcacggtacctcagtggggaggcggacagatcgagtg

SEQ ID NO: 18496 - DNA, 221 bp, Zea mays
tgagccacatcagattcatacgttttacgaatcagttggccatatgatccaagctgaatctgacaacactaatagggatgaatacctcaagagattgatgagccttcctaaccagaagtgggcagaaataatcggacaggcaagccaaagtattgatatcctgaagaaccaagatgttatccgatcagttctcaacattctacagacaaacacaagtgttg

SEQ ID NO: 18497 - DNA, 250 bp, Zea mays
acgagatcaaggccgcgctcgaggctgcctgcccggccaccgtctcctgcgccgacatcctggcgcttgcagcccgcgactccaccgtcatgactggcggccctgggtggatcgtgccgctggggcggagggactcccgtggcgctagcgtgcagggctccaacaacgacatccctgctcccaacaacactctccccaccatcatcacaaagttcaagctccagggcctcgacatcgtcgacctcgtcgc

SEQ ID NO: 18498 - DNA, 249 bp, Zea mays
cggacgcgtggcgccggagagcggtgaagaagcatggagatggagcagctctgctcgctgctccgcgacctcgacgcgctcaagcagcatcccgacgatctcacttccaccatcgatcggatgcgggagcggctagtggcgatgatgaatccggcagccggtgccgcttctcgatccaagattaaggacatgagtgcagaagtggtggacaacaatccctacagcagacttatggcgttgcaacggatg

SEQ ID NO: 18499 - DNA, 251 bp, Zea mays
ggaaggtcataatgtcatatgggtctaatggtgaggatgatccaagaaaggccagcacatcatatggaatacaagataaagagtatcccaggaaggccaccacatcttatggagttcaaggtgagaaggacccaagggaagctaccatctcatatgggtcccaggatgatgaggattctagaaaagtcaacatgtcatatgggtctaatggtgaggacgacccaagaaaggccaccacatcatatgggtcc

SEQ ID NO: 18500 - DNA, 250 bp, Zea mays
cctcgcctcgccttggtgttcacgccgtcgctagcgcctgccgcggcgaacttctgtcctccccggcgccgggctcgggtcgtcgtcggccaggaagatggctggcggcttcagggtactgcatctggtcaggccttttctggctttcttgccagaggtgcagagcgcggataggaagataccgttcagagaaaaagttatatacactgttatttccctcttcattttcctggtctgcagccagctccca

SEQ ID NO: 18501 - DNA, 243 bp, Zea mays
cccacgcgtccgcccctcctcgacatctccgccgttgtcgatgacgccttcctagcaaagtatgacatcaagctgaacaatgccattctcgctgaggagaagcacttgcctatgtatgatgagttggctagcaacagcaatgttgaatatattgctggaggagccacccagaactctatcagggttgcccaatggatgcttcaaactcctggtgcaacaagttacatgggatgcatggggaag

SEQ ID NO: 18502 - DNA, 211 bp, Zea mays
ccaagaaggactacaacctggcgaacacccgcagatcgatgtgcccaacctccaggtgatcaagctcatgcagagctttaagtccaaggagtatgttagggagaccttctcctggcagtactactactggtatctcaccaacgatggcattgagcacctacgcaactacctgaacctcccgtctgagatcgtgcctgccacgctcaaagag

SEQ ID NO: 18503 - DNA, 215 bp, Zea mays
cccacgcgtccgcactactcacccatccactgcaaacacgccaaacggccggcacacaagctggcaaagatggcttcctccttggtcctcgtcgcagcggccctgcttgcgctggcctcgtcgtggcagcaggccatcgcctacgatcctagccctctccaggacttttgtgtcgcagacaagaactcgcctgttcgcgtcaacgggttcccttg

SEQ ID NO: 18504 - DNA, 193 bp, Zea mays
ccacgcgtccgatgatgagccaggcgatcaagtcggagacggagcgcattgagtacctcaagacggtgagcgactgctacacgcggacgatgaagctcctcgacgattccatggcggccaggaccacgtacgagcgttcgggcggaacgaggagcctcgtcgcccgggacatggacgactacgtcgtctacgg

SEQ ID NO: 18505 - DNA, 241 bp, Zea mays
agaacatgacggtggcggcgacgacgcggtcgctggacgcggacatgacggtggacgagttcaaggagtggctgcggcggttcgacacggaccaggacgggcgcatcagccgcgacgagctgcggcgcgccctgcgtgccatccgctcccggttcacggggtggaggagcaggcagggcatcagttacgccgacgctgacggcgacggctacatcgacgacagcgaggtcgatggcctcat

SEQ ID NO: 18506 - DNA, 240 bp, Zea mays
cgaagaaagaagtatgaataaaacaaaatttgaagacgcctaacagcccgactgcttcgtttccacgcgcacgaaaccctagactagataaaaagttcccatttccctcaattccccaacttccctcgccgcaatctctcgccgcctccagtccagagccaccgtgagatctgcccgattccgccgcccggacccggggactccctcccctcctcgatccgttcgggcggccggccggct

SEQ ID NO: 18507 - DNA, 241 bp, Zea mays
cccacgcgtccgcccacgcgtccgcccacgcgtccgcccacgcgtccgccggcgctcgcgcggctttctttcccaactccgacgaaggctagctacaccaccttgtgcgggctcgtctccatcgcccgccacccgctccgtcgtcgtcgtccccgccgcgccgatcccgaatcgaatggggagcctggcgtccgagaggaaggtggtcggttgggccgccagggacgccaccggacacctc

SEQ ID NO: 18508 - DNA, 237 bp, Zea mays
ccacgcgtccgcgttcccatcaaactaacaaccatggcgcaccaggatgccggtgtcggcggcaaagatcaccgcgagctgcaggcgcacacaccaccgacaccgaggagctgctggcagcccaccgcgagctttggagccatgccctgggctacgtcaagtccatggcgctcaaatgcgcattggaccttggcatccccgataccatccaacgctacggcggaggcgccaccgtag

SEQ ID NO: 18509 - DNA, 233 bp, Zea mays
gtgaaatatatgatgaagcggacccgtggtggaggaggacgtggagagggtagatctcgccagatccaaggaggtggggacgagatggtgagctcctcgtcgtcggtggttaacgtgtacccgctcgccaactacacgttcggcaccaaggagcccaagatggagaaggacacctccgtcgccgaccgcctcgcccgcatgaaggtcgactacatgaacgaaggaatgcgtac

SEQ ID NO: 18510 - DNA, 236 bp, Zea mays
aactcatggaaggccaccatgtcatatgggttccaaagtggtgagggctcgaggaaggtcaccacatcatatccgtaccgaggccaggacttaaggatggtcagcacatcatatgtatctcaagatgaggacaactcatggaaggtctcgatgccatctaggttccaagttggtgagggctcaaggaagctcaccacgtcaaatgggtaccaaggccatgacttaaggacggtcac

SEQ ID NO: 18511 - DNA, 237 bp, Zea mays
gcatcacctgcgtcaccgtgggcaacgaggtcttctccggcaacgacacggccacgatggccagcctcctccccgctatgaaggccgtccacgcggcgctcgcggacctgggcctcggcggccaggccaccgtctcgtcggcgcactccgtgaacgtgctcgccgccagcttcccgccgtcgtcgggcgcgttccgggaggacctggcggagtacatgaagcccatcctggacttcc

SEQ ID NO: 18512 - DNA, 228 bp, Zea mays
cccacgcgtccgctccgcttccaagatgtcgaagcgaggacgtggaggttctgctggtaacaagttccggatgtcactgggtctaccagtggcagccactgtgaactgtgctgataacactggagccaagaacctttacatcatttctgtgaagggaatcaaggggcgccttaacaggcttccttctgcctgtgttggtgacatggttatggcaactgtgaagaaggg

SEQ ID NO: 18513 - DNA, 192 bp, Zea mays
ggatatcactggcaacccgagggctctccggaggctgaggacctcttgtgagagggccaagagaactctgtcttccactgcccagaccaccattgagattgactcgctgtacgagggcattgacttctactccaccatcacccgtgccaggtttgaggagctcaacatggacctgttcaggaagtgcatgga

SEQ ID NO: 18514 - DNA, 241 bp, Zea mays
ggcggcgctcctcccgtcttcttcttcttcttcctgtactatatatatatagcttcccctcgcaaattgtcactgacgttcattcggcttgcttgattgttccaggtattcgcagtcgaccgtgtcctcggagcacgatgaaggttgttgctgcctacctgcttgctgtcctcgctgggaatgccagcccctccgctgaggatttgactggcattctggagtcagttggctgtgaagttga

SEQ ID NO: 18515 - DNA, 243 bp, Zea mays
tgaaaacagaaggctccggcctccggcatccgccaaaatggggaaaaaaaggagagagaacacacacacacaaaccccaatcccctgcggcggcgatggacccgtcatcggcgggctccggcggcaactccctcccgtccgtcggccccgacgggcagaagcggcgcgtgtgctacttctacgacccggatgtgggcaactactactacgggcagggccatccgatgaagccgcaccgcatcc

SEQ ID NO: 18516 - DNA, 241 bp, Zea mays
gagagataacacacacacacacaaaccccaatcccctgcggcggcgatggacccgtcatcggcgggctccggcggcaactccctcccgtccgtcggccccgacgggcagaagcggcgcgtgtgctacttctacgacccggatgtgggcaactactactacgggcagggccatccgatgaagccgcaccgcatccggatgacgcactcgctgctggcgcgctacggcctcctcaaccagatg

SEQ ID NO: 18517 - DNA, 239 bp, Zea mays
atcaagctcagagcctcagagcgccaccaagtcttgcggtcgcgaagagcaacgcaacaagatggtgaagctcgcattcggaagcgtcggcgactccttcagcgtcacctccatcaaggcctacgtcgcggagttcatcgccaccctcctcttcgtcttcgccggcgtgggttccgccatcgccttcgggcaactgacgaatggcggcgcgctggaccctgcgggactggtggcgatcg

SEQ ID NO: 18518 - DNA, 238 bp, Zea mays
tctcggaggacacccgcgagcatgacctccttgagctcttccgtgcctttggccctgtcagccgtgtctacgtcgcggtggatcagaagactgggtcgagcagggggtttgggtttgtcaactttgttcacagataggacgccgagaaggccatcaacaagctcaacgggtatggttatgacaaccttatcctccgagtcgagtgggcgacaccaaggcccaattagttttgccgcta

SEQ ID NO: 18519 - DNA, 224 bp, Zea mays
cggacgcgtgggatagtttgcgtcactaccagcagatctttgtagaaaaccaaaggaacagaagtggctagcgtggcctaagctgcagctgtcagcgtcgccgtcgccgccgccggcgccgcgatgatcaccgggcgggacatctacgacgttcttgcggcgatcgtgccgctgtacgtggccatgttcctggcgtacgggtcggtgccgtggtgggccatctt

SEQ ID NO: 18520 - DNA, 232 bp, Zea mays
ggacctggtccctcgactccctctccatatgcatgaacgtgaacgcatgggtgttcatgatctccgtcgggttcaacgccgcggcgagcgtgcgggtcgggaacgagctcggcgcaggcaacccgagggcggcggcgttctcggtgttcatggtgacgtcgctgtcgttcatcgcggcgacggtgtgtgccgtcgtcgtgctgtgcctccgcgaccagctgagctacttctt

SEQ ID NO: 18521 - DNA, 235 bp, Zea mays
agatcaaggtcgtcgctccgccggagaggaagtacagtgtctggattggaggatcaatcctcgcatccctgagcacattccagcagatgtggatctcaagggctgagtatgaggagtctggtccagctattgtccacaggaagtgcttctagacgtcactcctcgtggaaatgcctttgtttcatgacatatctatgggtggtcgctctgctacagctcgcagttttttgtgtat

SEQ ID NO: 18522 - DNA, 231 bp, Zea mays
ggacgctggtgtcaatgcctggttcctcgccaacgaccccaagaggtgggtgcgccccgaagagttccggcccgagcgcttcctggaggaggagaagtccgtggaggcccacggcaacgacttccgattcgtgccctttggggtcggccgccggagctgccctgggatcatcctcgcgctgcctatcatcggcatcaccctgggccggctggtgcagaacttccagctgct

SEQ ID NO: 18523 - DNA, 236 bp, Zea mays
gccgggaaagagcttacgctgctggggttatgggcgagcccgttcgtgctccgggcgcgcatcgcgctcagcctcaaaggcctcacctacgcttactccgaggagaacctcgacgacaagagcgagtttctcctcagctccaaccccgtgctcaagaaggtgcccgtgctcatccaccacggcaagcccgtctgcgagtcccagatcatcgtgcagtacgtcgacgaggctttccc

SEQ ID NO: 18524 - DNA, 235 bp, Zea mays
cccacgcgtccgcgccgccgttgctgtgttccgtctcttcgccgatggcttcggccaagttcggtgctgcccagcaggtggagaaccgaggcgcgctgtccaaaaggtcacgtaacgacgtgtctgtaatggagggggactggaattgtcctcagtgtggtaatgtcaacttcagttttagaaatgtttgcaaccgtggagcctgtggtgcaccccgtccatcaccgagtccaag

SEQ ID NO: 18525 - DNA, 230 bp, Zea mays
gcgcccacctcctctgctctctcctctcccccacctctgcgtccgtgcgttgtgtttgtttaggcggcaaccgcgatgcgcaatggcggccgggcgagagctggtggtgagtttcggcgagatgttgatagacttcgtgcccaccgtggcgggggtctcgctggcggaggcgccgggcttcctcaaggcgcccggtggcgcgcccgctaacgtcgccatcgtggtctcgc

SEQ ID NO: 18526 - DNA, 233 bp, Zea mays
ccaagttcgtggttagtgattacgaccagcaagtcacaagtgaaggcgggatatgttgaggttgaggaagagcagaggaatccattccaggagtgtttaatggcgggatgcaaggaagcgcacgggtgggcagccagggatgtctctggtcacctctccccttaccacttctcacggagggttcagagagacgacgacgtcaccatcaaggtgctcttctgctggctttgcca

SEQ ID NO: 18527 - DNA, 234 bp, Zea mays
cccacgcgtccgcccacgcgtccgcccacgcgtccgcccacgcgtccgaatggaaggaaacattgttatcggcctcaagcagggaaagcaaagcatctcactagaacctggaggccaatttgaacttagtggcgctcctctcgaaacgttacatcaaacttgtgctgaggtcaactcacatctatatcaggtcaaagcagttggagaagaaatgggaataggatttcttgggct

SEQ ID NO: 18528 - DNA, 232 bp, Zea mays
cgcgtgttcaacgagggcatgaagaaccactcggtgatcatcaccaagaagctgctggacttctacacgggcttcgagggcgtgtcgacgctggtggacgtgggcggcggcgtgggcgccacgctgcacgccatcacgtcccgccacccgcacatctccggggtcaacttcgacctgccgcacgtcatctccgaagcgccgccgttccccggcgtgcgccacgtgggcgggg

SEQ ID NO: 18529 - DNA, 232 bp, Zea mays
gttccattcagatacacagaattcatcgacgatctgacgacacaagttcagaacaaggtcatccccatgagcagaatcgacgacgccgtctacaggatccttcgtgtcaagttcaccatgggtctgttcgagaacccttaccccgactctagcctcgccggcgagctcgggaagcaagaacaccgggaactggcgcgcgaagcgtcaggaaatcccttgttctcctgaagaa

SEQ ID NO: 18530 - DNA, 230 bp, Zea mays
agctgctaaatcaaataaaagcatgtttgtatctggtgatgatgaccttccgaagagagataatatcggagaaagacggagaaaaaatgggcttcgcgtcctatcaagagtaggggctaagtcagcagaggatcatgagctgccagatggtgacgcttctgaagaggaggaccaccatgtgttggcagaaggaggtgatgcatctgaagacgacttctatcgggatgtta

SEQ ID NO: 18531 - DNA, 231 bp, Zea mays
cgaaacgtggccaatgtatgctgtgtacaattctctccatactcctcccgcatgctagcttttggttcagctgattacaaaatatactgttatgatctgaggaacacaaggataccttggtgtactatttcgggacatggaaaggctgtcagttatgtaaggttcttggatccagaaacacttatctctgcatcaaccgacaacacattgaagatatgggatcttaaccag

SEQ ID NO: 18532 - DNA, 231 bp, Zea mays
gtggcaggcaccctttctccatcacctcagctcccggagacgactgcgtcacgtccacgtccagaccaggggcgactggacacaggagctcaagcgcatcttcgtcgagaactacttcacgccgtgcgtgcccagacgggctgccttcggggacctagcaggcgcggtggaccacaagaccaagagcccgccgaggttgctggtcgacgggccctacggcgccccggcgca

SEQ ID NO: 18533 - DNA, 246 bp, Zea mays
  unsure (1)..(246): unsure at all n locations
cggacgcgtggngcagacgcgtgggccgccacccagcgctcgagctcctcgcgtcctgcgagcgcgcgccgcaccgccaccatgaagttcaacatcgcgaacccttccaccgggtgccaaaagaagctggaaatcgatgacgaccagaagctgcgtgccttttatgaccgaaggatatcccaggaggtcagtggtgatgctctgggtgaggagttcaagggttatgtcttcaagatcatgggtgga

SEQ ID NO: 18534 - DNA, 236 bp, Zea mays
gggttaatcatgctaacgagaggacaggtggcttccgcagcagcggtggttatggtggtggcggctatggtggtggtggtggcggctatggtggcggtggctatggcggcggctatggtggtggtagcggtggctatggcggcggcggcagcggtgactatggtggcggcacggtggatatggtggcaactacggcaacagggctggtggtggctatggtggtggtggtgattatg

SEQ ID NO: 18535 - DNA, 241 bp, Zea mays
caccgcgtgcgaatccaagcagaccccagcagaagaagcgaagtcgtcgccggagcaggaggaagagcgaggagcaacatgtcgtggcaggcgtacgtcgatgaccacctgctgtgcgacatcgaaggccagcacctcagcgccgccgccatcgtcggccacgacggcagcgtctgggcacagtccgagaacttccccgagttaaagcctgaggaggttgctgggatgataaaggacttcg

SEQ ID NO: 18536 - DNA, 234 bp, Zea mays
cggacgctgggcgagcagttctgggtcatcggaggcgtttcggcgcatctgttcgcggtgttccagggcatgctgaaggtgttcgccggcatcgacacgagcttcaccgtgacgtcgaaggccggggacgacgaggagttctcggagctgtacacgttcaagtggaccaccctgctgatacccccgaccacgctcctcctgctgaacttcatcggggtggtggccgggatctcg

SEQ ID NO: 18537 - DNA, 237 bp, Zea mays
cacgcttccttctctacctcgttagctagcttagcccggccgagggagagaagcagaagcagtagaggcgaccttttttttctgttctctgatcgagctctgaagaccggggatggcgtcctgggcggctctcctggcgctgctgctctcggcgttctcggcggcggcgcactaggacgagaggttctacggccagtcgtgccccagcgtggaggacgtcgtgcggaaggagatggt

SEQ ID NO: 18538 - DNA, 240 bp, Zea mays
caggtttgcacacaaaggtagcccaagttgctgcctcgtcattcaatatccctcttagctctgtatttatatcagagacaagtactgataaggttcctaatgcatcaccaacagcagcctctgctagttcagatctgtatggagctgcagttttggatgcttgtcaacaaatcaaggttcgaatggaacccattgctagcaaaggaacccacaactcgtttgcagagttggctcaagcat

SEQ ID NO: 18539 - DNA, 242 bp, Zea mays
ctcgcgtcgtcgccccacagccacgcgagccttcgccgatccgcgagcgcagatcgccgaagccaggcggcggagagggagctcgaggcggcggaggaaagcgttcgccacagtcgctgatttccctggggaagagatgggtctctcctttgggaaactgttcagccgcctcttcgccaagaaggagatgaggattctcatggtcgggctcgatgccgccggtaagaccaccatcctctaca

SEQ ID NO: 18540 - DNA, 241 bp, Zea mays
aaataccctcctatgaaggttcttctcatgaccctccagaatgcaccacctggtcttgattatgaacgtgacaaaagattctcaaagtcatttaaagaaatggttgcaatgtgcttggtcaaagatcaaacaaagagaccaacagctgagaagttgcttaagcattcatttttcaaaaatgcaaagcctccagagttgactattaagagtatcttgtctggtttacctcctctctgggacc

SEQ ID NO: 18541 - DNA, 226 bp, Zea mays
cggacggtgggcagggaacaagcgacatgggcgtctacacctttgtgtgccgcaacaacggcggcgagtggaccgccaagcagcactccggcgagatcgaggcttccgccgctaccccatacgagctgcagcgccgcctcgtcgctgccgcctccgcggccgactctgcctacggcgtccagtcgtccttctccatggtcacccccagctccgccgtgttccaggt

SEQ ID NO: 18542 - DNA, 228 bp, Zea mays
ccacgcgtccgccccgctccgcctccactcctcgcgccgctgccgcatctcctctacaggtaagaaggagagaaagagggcgaaatggtgaagcacaacaacgtcatccccaacgggcacttcaagaagcactggcagaactatgtcaagacatggttcaaccagcccgcccgcaagcagaggcgccgcatcgcacgtcaaaagaaggctgtgaagatattcccacga

SEQ ID NO: 18543 - DNA, 227 bp, Zea mays
cccacgcgtccgcaccctgccgcctcaccgcctctctcaatctgataccgcagatccgtcgtccggtgagtggaagccgcacgaacccatggcctccggcgagcttgcctgcacctacgccgctctcatcctcagcgacgatggcatcgccatcaccgccgagaagatcgccacgatcgtgaaggcggccaacatcaaggtcgagtcctactggccggccctcttcg

SEQ ID NO: 18544 - DNA, 228 bp, Zea mays
ggaaggcacgtgaagaagaaaacccacccgaccgcggcgatgcccgagtagaggaagaagctgccgccgatggtgatacccttggacatggacatgaaggtcatggagataacggcgctggtaacgcggttgcacgccacgccgaccgcgaatcccagcgcgcgcacctgcagcgggaatatctccgagttgtacatacccgtgacggggccgaggccgatggagaag

SEQ ID NO: 18545 - DNA, 229 bp, Zea mays
aattattggatcaatttcgataattattagtagatctatgagatatgccgcctggaagaggcgaggtaagctgcagcatgtaaaaaagagaaaaaagatgtgacatcctagaggaggaggcctttgccatgatgggtgcgctcgcatggcaggccaggcaataataaaaagatgattattgcgtgccgggggaggagatcgcacgggggttgatgtttttggccccggg

SEQ ID NO: 18546 - DNA, 234 bp, Zea mays
ccttattgcaagtggagctggatttggtttatggttatataatctcacaaccgtatgctatcattctctttaccttcccctcctatatgtgactttcttagcagacttcttccaggaggaagacatgctcctagagaacgtctactattctgaaatgaaggatgctgggttcttcgatgctgactgggattaatccgtggctactgtgctgtatgacccatcccatatgaagta

SEQ ID NO: 18547 - DNA, 226 bp, Zea mays
tgtgaagatagcgagcattcggattccactgcatcaaatgatggtatctctgggaaagagattatgagagtccgagaaaggtcaagctggtatctatctaatgcagaagtacagataaactcatggcggattcccatctggcagaaatctaagatttgcttctatgtgatggaccatcctgctgcagagtcggtcgaatcagttagcagtggtggagaaattgaga

SEQ ID NO: 18548 - DNA, 222 bp, Zea mays
gcaccaatcagccagcagtccagcacaatatcatgaacaagcgtcaggtcgccgcggcggtggctgccctcctggcgctgctagccgcatcatcgacggccggcgccgtgacgttcgacgcgacgaacacggcgtccgatacccccggcgggcagcggttcgaccaggccgtcggcctcgactacgccaagcaggtcctgtccgacgcgtccacgttcatct

SEQ ID NO: 18549 - DNA, 224 bp, Zea mays
tcgcgaaaccctagccccgcctcaccgccggcggtggtggcagcctcagcaccggcacacagcccgccgtacctctcctcgtacgctcccttccggtgtgccgtcgccccctcgaccggtccatcgttcgtcggctcggtagccgccggatcggatcgggatcggccggcgccatgtccaaggccagggtctacaccgacgtcaacgtgctgcgccccaaggag

SEQ ID NO: 18550 - DNA, 219 bp, Zea mays
atcgcgaagtcctacgggaagctcaagaagctcaggttcttgggcctctccggcaacaacctcggccgcgcgatcccggccgaactgttcgagatgtccgcattggagcagctcatcattggctctaatgagttcacaggcacgatcccggccgcgattggcaacctcgccaacctccagtatctcgacctggcgatcggcaaactgcaaggccccatc

SEQ ID NO: 18551 - DNA, 222 bp, Zea mays
cccttcaaggtcatttctgggcctggtgagaagccaatgattgttgtccagcacaagggtgaggagaagcagtttgcagctgaagagatctcctctatggttcttatcaagatgcgtgagattgctgaagcttaccttggtagcacgatcaagaatgctgtggtcacagtccctgcctacttcaatgactcacagaggcaggccacaaaggatgctggggtg

SEQ ID NO: 18552 - DNA, 225 bp, Zea mays
gtcccctgctccattctcagccgccgccaatcccttcccgtgctccgcaaccgctgagtgagaagaagagatggccggcaagggcgatggcccggctatcggcatcgatctcggcacgacgtactcttgcgtcggcgtgtggcagcacgaccgcgtcgagatcattgccaacgaccagggtaaccgcaccacgccctcgtacgtcgccttcaccgactccgagcg

SEQ ID NO: 18553 - DNA, 206 bp, Zea mays
cggcaagctggtggtcatcgacttcactgccgcctggagcggtccatgccgcgccatcgccccactgttcgtcgaacacgccaagaagttcactcaggtcgtcttcctgaaggtggacgtggacgaagtgaaggaagtcaccgcggcctacgaggtcgaggcgatgccgaccttccacttcgtacagaacggcaagacggtcgcga

SEQ ID NO: 18554 - DNA, 259 bp, Zea mays
cccacgcgtccgcttttagctgtcatgtgtcacgaggatgttgatgctacaaggacaacaagtaaccatctgattgaagtgattgaggtacttggaattgaggctgtccgtcgatctctcttggatgagcttcgggtggtgatatctttcgatgggtcatatgtgaactaccggcatctggccattctttgtgatacaatgacatacagaggtcacttgatggctattacaaggcatggtatcgaccgcaacgacactg

SEQ ID NO: 18555 - DNA, 270 bp, Zea mays
cagacccagcagctattgtggtcgtccctcagccgcgtcgcaccgcatcgcattctacgattcgaagctctctctgctcgcagccatggcgaagaattacccaaccgtgagcgccgagtacagcgaggccgtcgagaaggccaggcgcaagctccgcgccctcatcgccgagaagagctgcgcgcccctcatgctccgcctcgcgtggcactccgcggggacgttcgacgtgtcgtcgaggaccggcggtcgcttcggtactatgaagtg

SEQ ID NO: 18556 - DNA, 271 bp, Zea mays
ggagcgagctcattctcaactcgactcaagagctctgcctcctccatcttcccatctctggcctccggagccacgctgatcagagatggaggcgaatccgaagaacaccttcacgatcaaagtggaggacgggaagcccgggaaggacggccggctggcggtcggaccggtgttccggagcgttctggccaaggatgggttcccgcagcttgaccctgacatgaagacatcatgggacgtgttcagggtagcagcagtcaagtatgccgac

SEQ ID NO: 18557 - DNA, 275 bp, Zea mays
gccacgggtggtgatcatgctcgtcaaggccggcgcgccagttgaccagaccatcgcgacgctcgcagctcacttggagcagggcgactgcatcatcgatggggggaacgagtggtacgagaacacggagaggagggagaaggccatggaggagcgcggcctcttgtatcttggcatgggtgtctctggaggagaggagggtgcccgcaacggcccgtccttgatgcccggatgctcgttcgacgcttacaagtacgtcgaagacattgttctca

SEQ ID NO: 18558 - DNA, 268 bp, Zea mays
ccacgcgtccgggtgaagccgccgccgctgcagtgtccatagccaccgcagagactgagatggggggttttgtcaagacccacaagaccaatgcgtacttcaagcgtttccaggtgaagttcaagagaaggcgcgctggcaagacagactacagggccaggataaggctgattaaccaagacaaaaacaagtacaatacacccagatacagatttgtggtgcgattatccacgaggggcttcccgcagcaattatctctgctagtata

SEQ ID NO: 18559 - DNA, 274 bp, Zea mays
ggccaatcccgagcagtggtgcgaaacctcgagcgctcgcgccggtgaccataacaaagaggaagccgcggtagcactggtagcggcagcagtaagggggagatgtcgtcggcgttcagcggcgatgagaccgcccctttcttcggcttccttggcgcctccgctgcgctcgtcttctcatgcatgggggcggcgtacgggacagccaagagtggcgtcggcgtggcgtccatgggtgtcatgcgcccagagctcgtcatgaagtccatcgtgc

SEQ ID NO: 18560 - DNA, 274 bp, Zea mays
agcgattgttggaaaggaccccactgagcaggttgagattgacaacttcatggtccaacagcttgatggaacctccaatgagtggggctggtgcaaacagaagcttggagcaaatgccatccttgcggtttcacttgctgtgtgcaaagctggagctatggtgaagaagattcctctttaccagcacatcgcaaatcttgctgggaacaaaactctggtgctccctgtacctgcctttaatgtgattaatggagggtcacatgctggaaacaag

SEQ ID NO: 18561 - DNA, 202 bp, Zea mays
caatcacaacgaacaaaagctctcgatctcaccgacaccgaggaagaagagatcaatggcgtccgagcagggagtcgtgatcgcgtgccacagcaaggctgagttcgacgcccacatgaccaaggcccaggaagccggcaagctggtggtcatcgacttcactgccgcctggtgcggtccatgccgcgccatcgccccactg

SEQ ID NO: 18562 - DNA, 268 bp, Zea mays
gccgccgcttccgccgcatcaagcgctagaactaggaacccctcccaaaggatctcaagaagacaaggacaccgtcgagtcgccgccagtcgctcgatggggtgcgggcagtcaaagatcgatcaagaggaggcggtgtttcgatgccgggagcggaagcgactgatggctgacgccgtggcctcgcggacggttttcccgccgccaacacgggctacactgtccgcctgagagagcaccggcgacgcgctatccgatttcgcccggg

SEQ ID NO: 18563 - DNA, 256 bp, Zea mays
aacaacatgtgacatgtgtggttatcgcaattcagagctgaagcctgggggtgaaattccagctaagggaaagaaaattacactgcgtgttcaaaatgcacaagaccttactcgtgatgtcataaagtcagattcagctagcgtaaaagtacctgaacttgagttggaactttcatgtggaactttgggtggatatggtcacaactgttgaaggtttaattgtgaaaatatgtgaggctctggagagaatacatgg

SEQ ID NO: 18564 - DNA, 247 bp, Zea mays
ggagctctctatcctctgcgacgcggaggttggcctcatcatcttctccagcaacggcaggctctacgatttctccaacaccaacatgaaagctgtgatagaccgatatgggaaggcaaaagacgagcagcttggcaagaacgatgcaacttcagaactcatggtacggtgaggaaaatgtatacctatttctagctaactagcagttattggtcgtagtacacacgtgccatatgatgtatgttgg

SEQ ID NO: 18565 - DNA, 208 bp, Zea mays
caaacgcgtcgcatccgctccacaggatcctctgcgccaccgcaaccgtgtgaccgcccgtgccgccggcgatcccgatccgccgacccgtcccagccccgctcgcagccatgtcgccgtcggagccgacgcgggaggagagcgtgtacatggccaagcttgcggagcaggcggagcggtaacgagatatggtcgagttcatggagcg

SEQ ID NO: 18566 - DNA, 266 bp, Zea mays
cccacgcgtccgaaagatgttcctgccaacgtgtatgttggaatgcggtattggcatcccttcactgaagaagccatagaacaaataaaacgggatggaatcacgaaacttgttgtgttgcctctataccctcagttctccatatcaactagtggttcaagtctccgtttattggagagcatattcagagaggatgagtatctcgtgaatatgcaacatacagttataccttcctggtaccaacgtgaaggatatatcaaggctat

SEQ ID NO: 18567 - DNA, 147 bp, Zea mays
tgttggaagagcacagaagaagtctgaaagagagatggagttgaaggagaaatttgaaaagaatgttcaagaggtagctgagaagttccaaaacacaaacttgtatttgaagaacttagaggagaacattgatgatgagaaattgcg

SEQ ID NO: 18568 - DNA, 269 bp, Zea mays
agaagcaagaaaactagaaaagcctcctcccgaccgcaacgcccctcatctccctcgaccccgacatccccgacccgatggcgcccaaggcggagaagaagccagcggagaagaagccggcggccgaggagaaggcggagaagacgaccgcaggaagaagcccaaggccgagaagcggctgcccgcgtccaagtcctccggcaaggagggcggcgagaagaaggggaagaagaaggccaagaagaccgtggagacctacaagatctaca

SEQ ID NO: 18569 - DNA, 271 bp, Zea mays
gtgatgactgggagggtctttttgagtctatcactggctatggccttggtgggtcgtccatggctctctttggaagagttggtggaggcatctacacaaaggctgctgacgttggtgctgatcttgttggaaaggtcgagaggaacattcctgaggatgatcctaggaacccagctgtgattgctgataatgtcggtgacaatgttggtgacattgctggaatgggatctgatctctttgggtcatatgcagagtcttcctgtgctgccct

SEQ ID NO: 18570 - DNA, 260 bp, Zea mays
aaacagaagcttggagcaaatgccatccttgcggtttcacttgctgtgtgcaaagctggagctatggtgaagaagattcctctttaccagcacatcgcaaatcttgctgggaacaaaactctggtgctccctgtacctgcctttaatgtgattaatggagggtcacatgctggaaacaagcttgccatgcaggagttcatgatcctcccaactggtgcctcctcgttcaaggaggccatgaagatgggagttgaggtgta

SEQ ID NO: 18571 - DNA, 264 bp, Zea mays
cccacgcgtccgcccacgcgtccgcccacgcgtccgcgagtctcgtccacccgtcatcctcctagctcctctactcgccagtcgccatgggcaagattaagatcggaatcaacggcttcggaaggatcggcaggctcgtggccagggtcgccctccagagcgaggatgtcgagctcgtcgccgtcaacgaccccttcatcaccacggactacatgacctacatgttcaagtacgacaccgtccacggccactgggacacaggga

SEQ ID NO: 18572 - DNA, 228 bp, Zea mays
cccacgcgtccggcagcgagagagaatggcagccgccgccgccaccaccaccacccttcgtactgctctctcccaagcaacagggcaagagcagagagcttcactgctgtgcacaccgaagcaccgagttgctgccagcaggagaagcttgagattcaccactagggccagctcgaatgcgggcgccagtgtgagcatcccgaagcaatggtacaacctcatcgccga

SEQ ID NO: 18573 - DNA, 174 bp, Zea mays
cacaaagcgatactagctagtccctaccaaagcatacttcctgaaacactcttgcaatccactgagttctgtttgttgagacgcatagagctagagtcgacaatgtcgctcgtgaggcgcacaaacgtgttcgactccttctccagggacctctgggaccccttcgacaccatg

SEQ ID NO: 18574 - DNA, 169 bp, Zea mays
cgcttcaagctcctcatctcgcgcaggggggtcgcctgagatcacagagacaatggtgaaggcagttgctgtcctcgccggcactgatgtcaagggcaccatcttcttttcacaggagggggatggtccgaccaccgtgactggaagtatctctggcctcaagccaggg

SEQ ID NO: 18575 - DNA, 224 bp, Zea mays
cgtcatccttggctatggtagccattcttccgttgctgtcaaaacgttttgccttttgctttgcaagagtaactggtaggtgaagttttatgtgctgttcaccaaccctgtagacatcggggtgatgagtggagcggcgatgtacatcaagaaggacctgaggatcacggacgtgcagctggagatcctgatagggatccgaacctctactcgctcttcgggtc

SEQ ID NO: 18576 - DNA, 165 bp, Zea mays
cagaataaagagtggtcttatagatcatcttggaattgagcctttgatgatggaagctcttgagaagattgagaaggacattaagaaaccacttttgaggagcgacaagaagaacatggccaccctcttggcagagtttgccaggttaacaaaaaacttggcgtt

SEQ ID NO: 18577 - DNA, 175 bp, Zea mays
gttcacagtaatactggcatctttggaatccatacatctactgatgcatcatttgttcctaaagctattgacctagcagccagagagctcacttcccttgcaactcctggacaagttgaccaaagccaactggaccgtgctaaagcctcagctaaatctgccatactggcaaatt

SEQ ID NO: 18578 - DNA, 177 bp, Zea mays
cttcgggcagcgctgccggatcgcgctggcggagaagggcgtggcctacgagtaccgcgagcaggacctcctggacaagggcgagctgctcctccgctccaaccccatccacaagaagatccccgtcctgctccacgccggcaggcccgtctgcgagtcgctcgtcatcctccagta

SEQ ID NO: 18579 - DNA, 169 bp, Zea mays
gtctgattattggttttgtcacagaatactacactagcaatgcatacagtcctgtgcaagacgttgcagattcttgcagaactggtgctgccactaatgtcatttttggtcttgctcaaggatacaactcactcatcatcccgattttcgctatcgctgttagcatcta

SEQ ID NO: 18580 - DNA, 152 bp, Zea mays
cccacgcgtccgcccacgcgtccgcccacgcgtccgaatctatggcacccagtatctaccaaggaagttcaaggttgcggttaccgcggctggtgataactctgttgatattctgaccaatgacatcggtgttgttgttgtttcagatgatg

SEQ ID NO: 18581 - DNA, 164 bp, Zea mays
cagaaatgggtttggtgatgttattctaaatccttctctccagaagagagtgaagcagcttgctaatgccacggccaatacaaaacttcatcaagctcctttcaggaacatgcttttctatgggcctcctggcacagggaaaaccatggcagcacgagaacttg

SEQ ID NO: 18582 - DNA, 236 bp, Zea mays
ccaccctccagcgcctccaccctcctcgccgcctcactccctctgaggtcgcagatccgtccggttagacgaagccgcccgcacccatggcctccggtgagctcgcctgcacctacgccgccctcatcctcagcgacgacggcatcgccatcaccgccgagaagatcgccaccatcgtgaaggcggccaacatcaaggtcgagtcctactggccggcgctcttcgctaagctcctg

SEQ ID NO: 18583 - DNA, 127 bp, Zea mays
ccaacaccacctcgccgcgatctccgtagcctccgtcgcgtcgagcatcgatcatgtcggcctactgcggaaagtacaaggatgagctcatcaagaatgctgcctacattggcacccctgaaagggg

SEQ ID NO: 18584 - DNA, 179 bp, Zea mays
gtagccgtcaccatgagccgctcggggcagcctccggatctcaagaagtacatggacaagaagcttcagattaagatgaatgcaaaccgtgttgttatcggcacacttcgtgggttcgaccagttcatgaatctggtggtggacaacactgtggaggtcaatggaaatgacaaaccaga

SEQ ID NO: 18585 - DNA, 149 bp, Zea mays
ggtgaagccgccgccgctgcagtgtccatagccaccgcacgagactgagatggggggttttgtcaagacccacaagaccaatgcgtacttcaagcgtttccaggtgaagttcaagagaaggcgcgctggcaagacagactacagggcca

SEQ ID NO: 18586 - DNA, 165 bp, Zea mays
ctgtgatgaaagttgagaaagcgcctttggaatcttatgctgacattggtggactggatgctcagattcaagaaattaaagaggcagttgagcttcccttgactcaccctgagctgtatgaagacattggtattaggcctcccaagggagtcatattatatggag

SEQ ID NO: 18587 - DNA, 167 bp, Zea mays
aatccctcgcatcgcattcgcagcctttgctgcatcacaccaccgcgaaaccccagcagccgcatcgatggcgcccaaggcggagaagaagccggctgcgaagaagccagcggaggaggagcccgctgccgcgaaggccccggcggggaagaagcccaaggccgaga

SEQ ID NO: 18588 - DNA, 232 bp, Zea mays
gaaagtgaaagcaatctcagaaaggcatttgaagaagctgagaaaaatgcaccttccatcatttttattgatgagatagattccatagcacctaagagagaaaagacccatggagaagttgaaaggcgtattgtttcacagctcttgactcttatggatgggctcaagtctcgtgcacatgtgattgttatgggtgccaccaaccgtccaaacagcatcgatcctgctctta

SEQ ID NO: 18589 - DNA, 232 bp, Zea mays
ggaggattacgagaagaccggcaagatccccgacccggagtccaccgacaacgctgagttcaagatcgtgctcaccatcatccgcgacgggctcaaggctgaccccaagaagtaccgcaagatgaaggagaggcttgtcggcgtctctgaggagaccaccacgggtgtcaagaggctctaccagatgcaggagaccggcgccctcctcttccctgccattaacgtcaacgat

SEQ ID NO: 18590 - DNA, 230 bp, Zea mays
aggcgaccctccctccttcgctccttccgcgccgcctcccggccgtcgccgccatggtgaagtactcgcaggagccgggcaaccctaccaagtcggctaaggccatgggcagggatctgagggtccacttcaagaacacaagggagacagcctttgcgcttcgcaagttgtctttgaccaaggctaagcgataccttgaggatgttattgctcacaagcaggcaattccc

SEQ ID NO: 18591 - DNA, 228 bp, Zea mays
gcattcgagaagccgaagaaaattcgaagacgaggagcagctacactgcggacggacttcgggcatggagggccagttccaggttggcaaggaggaggtcatccaagcatggtacatggacgacagtgaagaggaccagaggcttcctcatcatcgcgagcccaaagaattcatccctctcgacaaactttccgaactaggaatattaagctggcgcctaaatgctga

SEQ ID NO: 18592 - DNA, 227 bp, Zea mays
cacccaactcgccgccgccgctgccaacgccgcctgctgccgcagccgccatgggggcgtacaagtatgtgtcggaactatggaggaggaagcagtcggacgtgatgcgcttcgtgcagcgcgtgcgctgctggcgagtacaggcagcagccgtccatcgtccgcctcaccaggcccacccgccccgacaaggcccgtcgtctcggctacaaggccaagcagggata

SEQ ID NO: 18593 - DNA, 226 bp, Zea mays
cccacgcgtccgacggcctggaggcgtgctgcggcgggtccccgagacgctcccgccggaggtgctggagaagatgcaggcgccggtcaaggaccccgcggtccccgtgatcgcgtcggccgcggagctgcaggaggctgacggagtgttgtttggcttcccgacgaggtacggcgccatggctgcgcaaatgaaggccttcttcgactccaccggctcgctctgg

SEQ ID NO: 18594 - DNA, 225 bp, Zea mays
gacagattcctcaatgccggcgcgttcggcacgggcgccgacggccacgtgcagccggcggaggccacccgcgcggcgatgctcgtgcgcgtcaacaccctcctccagggctactccggcatccgcttcgagatcctcgaggccatcgccaagctgctcaacgccaacgtcacgccgtgcctgccgctccggggcaccatcaccgcgtcgggcgacctcgtcccg

SEQ ID NO: 18595 - DNA, 222 bp, Zea mays
atttcgctgagcgcatggctgtgaggaaaacatggatgcaggctccagaaattaagtcttgtgaagccgtggctcgattctttgttgcactgaattcaaggaaagaggtcaatgtaatgttgaagaaagaagcagaatactttggagacattgtcattttgccatttatagaccgctatgagctggttgttcttaagacaattgctatctgtgagtatgggg

SEQ ID NO: 18596 - DNA, 220 bp, Zea mays
agaaatatctcgaccagcttggctttcatattgttggctatggttgcacaacctgcattggaaattctggagagcttgatgaatctgtgtctgctgcaattactgagaatgatattgttgctgctgctgtgttgtctggaaacagaaattttgaaggacgtgtgcatcctttaaccagagcaaattaccttgcttcccctcctttagttgtggcttatgc

SEQ ID NO: 18597 - DNA, 221 bp, Zea mays
agctcttagaacctatctcttttcatactcgtcttcgtacgagtccttaagccttaaccagctcactaccatgtttgatctcagcgagcagcatgcccacagcattgttagcaagatgatgatgcatgaagagcttcatgctagctgggaccagccaacaaagtgcatcgtattccatagtgtggaccaaactaggcttcaggggctactcttccagatgg

SEQ ID NO: 18598 - DNA, 220 bp, Zea mays
gatattcacaagagtattaagtacaatgtttgggcaagtactcctaatggaaataaaaggcttgacaatgcctataggcttgcacaggaaaggatggcagaaaaaggaaccaaatgtcctgttttccttttcttctcagttaatgcaagtggtcagttctgtggcgtggctgagatggttggcccagtagatttcaacaggaacatgaacttctggcaac

SEQ ID NO: 18599 - DNA, 220 bp, Zea mays
cccacgcgtccgatttcaaattggtataccctcttcaaaattaatatctaaaaccctcttgaacactaagaggaggatttcattaagggggagttttgtttagtcaaatgaaaagcatttgaaacagggggagaaaatttcaaatcttgaaaatgcttctcaaaatcttattcatatacctttgactagttgcaaaagattttgaaaaagaatttccaaa

SEQ ID NO: 18600 - DNA, 254 bp, Zea mays
ctctcacgctcgcgtcaccggagctctccagaaccgaaccccaactgcccaagggcgagcgatccgaacccctcggcggcttcgtcaacgacgccgagaacactttgaggaatggctgaagaggatgtccagccccttgtgtgtgacaatggcactggaatggtcaaggcgggtttcgctggtgacgacgcaccgagagctgtctttcctagcattgtaggcaggccacgccacactggtgtgatggtgggcat

SEQ ID NO: 18601 - DNA, 164 bp, Zea mays
cccacgcgtccgcccacgcgtccgaccaagccggcgatccggcggctggcgaggaggggcggcgtcaagcgcatctcggggctcatctacgaggagacccgcggcgtgctcaagatcttcctcgagaacgtcatccgcgacgccgtcacctacactgagcacgc

SEQ ID NO: 18602 - DNA, 171 bp, Zea mays
tgggaaattaaggtcaaatttccttggcacaaaatttgtaatatacgatactcatccgccatacaatggaactagtcaaacagtggcagggaaaacaagtcagagattctactccaagaagggatcaaccaaggtttcttgcaggtggtacagtattgcacaaatctcata

SEQ ID NO: 18603 - DNA, 244 bp, Zea mays
aagatgagcaacgctatgaagacgtatgggaagggcatcttcttctcgctgtgcaatgggggaggcaaaaccctgctacctgggcaggcggcatggggaacagctggagaacgaccgatgatatcgccgacaactggggcagcatgacgtctcgtgcagaccagaacgacaggtgggcttcctacgccggacctggcgggtggaacgatcctgacatgcttgaggtgggcaacggcggcatgtc

SEQ ID NO: 18604 - DNA, 245 bp, Zea mays
gctggagacgctgtgcgggcagtcgtacggggcgaacagtaccacatgctgggcatctacctgcagcggtcgtggatcatcctgtcggcgtgcgccgtggtgcagctccccgtgtacctgttcacggagccgctgctggtggcgctggggcaggacccggacatctcggcggtggcggggaccgtggcgctctggtacatccccgtgctcttctccttcgtctgggccttcccgctgcagatgta

SEQ ID NO: 18605 - DNA, 252 bp, Zea mays
gcccagtggttcactcttatgctattgtaacattgcacagtgctttcttttatgttgataagagaaaagtaactgtcgaggttcagaagtacatgtctggaaatggtatcgaaataagagagtatgaaactgttcaatcagatgcaagtttgcttgcatctggcaagctacaaagttctgtacatgtggaaaagtatatggatgaggtggagagttcaaaaatttggattgattctggctcatgttgccttg

SEQ ID NO: 18606 - DNA, 169 bp, Zea mays
cggacgcgtgggccgctgctgcaacgccactcgccgtcgtccgaatagtacactctaacgccgccatacggcgtatgcacagccgcgggaagggtatctcgtcgtcggcgctgccgtacaagaggacgcctcctacctggctgaagaccgccgcctccgacgtggagga

SEQ ID NO: 18607 - DNA, 163 bp, Zea mays
ggcgctcaggggacagccgaccgccgtggtgcagtacaacggctggaaaggcggcggcttgattgccgtcagctacgaggctcgtggatttggtgtgaagaggtccatgcgcggagatgaggccaagagggtttgtcctggtattaatcttgttcaggtccca

SEQ ID NO: 18608 - DNA, 161 bp, Zea mays
cccacgcgtccgctactacgaaaggggtcgatgatagcttgcaggatatccttcgtctgttaactctgaggtatccccatggttgaaccaaagaagttcaaacagcgttgcagaaaggtttttcccttgtcaagattgagatgtggctggttgtgctgccc

SEQ ID NO: 18609 - DNA, 245 bp, Zea mays
gtgactatatgcgatcaaagaaaggaattacaaggcctgaaatgataattgctgaatcagcacattctgcatatgacaaagctgctcaatacttcaatattaaagtgcggcgtgtacctgtgaacaaagagtttcttgcagatgtgaaaggattcaaacgatgcataaatggaaacaccataatgatggttggatctgcaccaggatttccgcatggtttaattgatcctattgaggaacttggg

SEQ ID NO: 18610 - DNA, 171 bp, Zea mays
cccacgcgtccgatcagacctctttggaggcattacttccagaacacccagggtcttatctttgttgtggacagcaatgaccgtgaccgtgttgttgaagccagagatgagctccacaggatgctgaacgaggatgagctacgtgatgctgtgctgcttgtttttgccaac

SEQ ID NO: 18611 - DNA, 169 bp, Zea mays
agaatgtgagacggacaagttaacacacgtgtatactttcattcttaggcctgatgcatcttatagcctgcttgttgataaccgtgaaagagaatctgggagcatgtacactgattgggatattctccctcctcgtaaaattaaggatgttcacgccaaaaggcctaag

SEQ ID NO: 18612 - DNA, 241 bp, Zea mays
cccacgcgtccggcatgactcacattgtccgtgaggttgagaagccaggatccaaactccataagaaggaaacttgtgaggctgttaccatcattgaaacccctcctcttgtcattgttgggctcgtggcatatgtgaagactcctcgtggcctccgcacactcaactctgtttgggcccaacatcttagcgaagaagtgaggagaaggttctacaagaactggtgcaagagcaagaagaa

SEQ ID NO: 18613 - DNA, 235 bp, Zea mays
cagacggtgggctgagatctgatttctgggggacaaacttcaaaatatatgatagcaagccaccatatgacggcgctaaagcatcaagtagtcgatctagtcgtcgtttcggaagcagaaggattagtccccaagtatcgtctggtaactatgaagttggacaggtttcatacaaatacaacttgctcaaatccagaggccccaggagaatgaattgcactcttgaatgcccttc

SEQ ID NO: 18614 - DNA, 237 bp, Zea mays
gctgttcaaaaggtggtagagtttatggatacatactctttaagccaggaagacttcgatacaattgttgaagtatccaaatttaagggtcatccaagtcctatggatgggattcaacctgctgttaaaagtgccttgacaaaggcatacaaacaaggaagtagttcccgtgttgttcgagcagcagatctaataaacattccaggcatgaaaaagcctttaaagaaacgagtggcg

SEQ ID NO: 18615 - DNA, 161 bp, Zea mays
ctctccttttgctcggaacgcacacaccgcccgtccccgatctccgatcccctcgtcgatccaaagatgcagatcttcgtcaagaccctcactggaaagactatcaccctcgaggtggagtcttctgacaccattgacaacgtcaaggccaagatccagga

SEQ ID NO: 18616 - DNA, 169 bp, Zea mays
cccacgcgtccgctctgatggttcatacggtgttccttctggactcatttattcattcccagtaacatgcagtggtggtgaatggaaaatcgttcaaggcctcccgattgatgagttctcaaggaagaagatggatgccactgcccaagagctgacggaggagaagacg

SEQ ID NO: 18617 - DNA, 232 bp, Zea mays
agataataagcaatataatactgatctagaatcgagttgttgtactcttcgcagataggttcgttccttcacatagaagcgagtacagactacagaccacacagtatcagctggcacaaaacgaaaatggttacttgcaaattgcatgcacgagctagaattatattcttctaatcttcttcgttgactttctggcttcagcaggcgcgtgatggcgctttcagcttcccga

SEQ ID NO: 18618 - DNA, 233 bp, Zea mays
cgacgatattggatgtccacggtgtgggctggaaaaactttagcaagattgcaagggatttggtgcgttgtatgcaaaaaatagatggtgactattatcctgagacattacatcaaatgtttattgtaaatgcgggacctggtttcaagctgatatggagcactgttaagggacttcttgaccccaaaacgtcatctaagatacatgttctaggaacaaaatatcaaagcaga

SEQ ID NO: 18619 - DNA, 233 bp, Zea mays
caccaccgcctcgcaggacagatccttgttgtcctacagcagtggctggctgccggccaaggccacctggtacggcgcccccaccggcgccggccccgtcgacaacggtggtgcgtgcgggttcaagggcaccaaccagtacccgttctcgtccatgacgtcctgtggcaacgagcccatcttcaaggacggcaagggttgcggctcatgctaccagatacggtgcctgaaga

SEQ ID NO: 18620 - DNA, 232 bp, Zea mays
ggtggccgccgcagtccgcaccccctccccaatcacgccacccgacaccgcgctccgcagattcgtagtcgccgctagcttccggcgagatggacgtggtgaaggcggcgcagttgtcggggcggacgctggaacgggtagtggtgcatcccttggtgctgctcagcatcgtcgaccactacaaccgcgtcgcccgcgacacccgcaagcgcgtcgtcggcgtcctcctcgg

SEQ ID NO: 18621 - DNA, 232 bp, Zea mays
gttttatgaattttaacccagtgttttctgctatccaggcgccctggcggagaaaaagtttaccacgtcttcgacaatcaatttcctgtagctattaaacggttgcagtttgataagcaactctctatggaaaatgtaaagaagcttataacagaagctgatggataccagcctcacttaatagctccagaacaaggatatcgacgccttatagaatcttgtcttattagta

SEQ ID NO: 18622 - DNA, 234 bp, Zea mays
cccgttcgcaacgccacgctccccaccgccgaaatggccccgaagcgaggtggcagggcaccggtgccggccaagaagaagacggataaagtgacgaaccctctgttcgagaaaaggccgaagcagttcggcatcggcggcgcgttgcctcccaagaaggacctgcaccgattcgtcaagtggcccaaggtcgtgcgcatccagcgccagcgtcgcatcctcaagcagcgcctc

SEQ ID NO: 18623 - DNA, 231 bp, Zea mays
atcactttcaagaacacgtcgccggtgccgaggcccggggcgacggggaagcaggcggtggcgctgcgggtgtcggcggacaacgcggcgttcgtggggtgcagtttcctgggcgcgcaggacacgctgtacgaccactcgggccggcactactacaaggagtgctacatccaagggtccgtggacttcatcttcggcaacgcgctgtcgctgtacgaggactgccacgtg

SEQ ID NO: 18624 - DNA, 233 bp, Zea mays
gagcactttctcctcgtccccgacaagccaatcgaagccgagatacggccatggactccaccggcaccggagcagggggtaaggggaagaagggagcggccgggcgcaaggtcggcgggccaaggaagaagtcggtgtcgaggtccgtgaaggccgggctccagttccccgtcggccgcatcgggcgctacttgaagaagggccgctacgcgcacgtgtcggcaccggcgccc

SEQ ID NO: 18625 - DNA, 225 bp, Zea mays
cgccgagtccggcacctccatgtcgtgcccgcacgtcgccggcatcgccggactcctcaaggccgtccatcctgactggagccctgccgcgatcaagtcggcgatcatgacaaccgccagggtgcaggacaacatgaggaagccgatgagcaactcgtccttcctccgcgcgacgccgttcggctacggcgcggggcacgtgcagcccaaccgcgccgccgaccc

SEQ ID NO: 18626 - DNA, 228 bp, Zea mays
ccaaggccgaggaggcccaggcggactcccggactccaaccaagacgtgcagcagctcatcgacaacttcgccaggaagaacttcacggtggaggagctcgtcatcctcaccggggcgcactccatcggccagggccactgctcgtccttcaccggccgcctctccgagccatcgcagcagatcaccccggcgtaccgcgacctgctcaactacaagtgctcccaggg

SEQ ID NO: 18627 - DNA, 216 bp, Zea mays
ggacggtggtcgactatggagtcctggcactccaggtggttatacagtccacagtaaaggatcctacgtatcttgatggtagagttgatgaattcttcaagatgtttgaaagcaaaatctatgaactctccgacaaggacttcaagagaaatgtgaaatcactaattgattctaaactggagaagtttaaaaacttatgggaggaatcagatttct

SEQ ID NO: 18628 - DNA, 222 bp, Zea mays
gatgatttgctgttgcaacaagatggatgccaccacacccaagtactccaaggcccgttatgatgagattgtgaaggaagtctcttcctacctgaagaaggttggatacaaccctgacaagatccacttcgttcccatctctggtttcgaaggtgacaacatgattgagaggtccaccaaccttgactggtacaagggcccaaccctacttgaggctttgga

SEQ ID NO: 18629 - DNA, 221 bp, Zea mays
cccacgcgtccggcatgagattgctgagcatgttgctacaaaaacaaaagaacagtgcatgttacacttccttcaaatgccaatttctgaaccgtttcttgatggcgatgatttcaatgaaacaccccagaagatcacaaaacaggattcagcagaaactggtccttctgatgtacctgacaagatggatgtagatggtaatgcggaaggaaaagagagca

SEQ ID NO: 18630 - DNA, 217 bp, Zea mays
cagaccgtggtcagcgtcttaagccctttaactgcaacctgctttaccatgacagacttcagattgacccagagcttgagaaagaaattggggccaaatttgaggaggacctggatgctatgcttccaaagtgtgatgtgattgtgatcaacacacctcttacggagaaaacaagaggcatgtttaacaaagagaggattgcaaagatgaagaaagg

SEQ ID NO: 18631 - DNA, 222 bp, Zea mays
cgcgaaaacgcaggagcaacccgcccactcgccaccaccgcccgcgcgcacggcggcgaccgatggccccgctcgtgccgatgtcgcagccatgggtggagaaataccggccgaggcaggtcaaggatgtggctcaccaggaggaggtgattcgggtgctcaacaacaccctccagaccgccgacctgccgcacatgctgttctacggcccgccggggacgg

SEQ ID NO: 18632 - DNA, 221 bp, Zea mays
gaagggcgagcgcgccaggatggcatcgtttgttggggccatggcaatctcggatttggtgaagaccacattgggcccaaaaggaatggacaagatcctgcaatcaactggcagaggacgtaatgttactgttacaaatgatggggctaccattttgaagtcacttcacattgacaatcctgctgcaaaggtccttgttgacatctcaaaagttcaagatg

SEQ ID NO: 18633 - DNA, 250 bp, Zea mays
cccacgcgtccgggtagatcaggttctgttaacaacaaatgcggatggtctaagatttgtcaaggttaggatgcgatctgttcgcataccacaaattggcgacaagtttagcagcaggcatggacaaaaaggaactgttgggatgacttacactcaagaggatatgccatggacaatcgaaggcattacacctgatattattgtgaatccacatgctattccatcccgtatgactattgggcagctgatt

SEQ ID NO: 18634 - DNA, 249 bp, Zea mays
aggagctgtgccaagccacaatgggtatctcgcgtgactcgatgcacaagcgccgggccaccggtggaaagcagaaggcctggaggaagaagcgaaagtatgagcttggtcgccagccagccaacaccaagttgtcaagcaataagacagtgaggagggtccgtgttcgtggaggtaatgtgaaatggagggctcttcgccttgatactggtaactactcatggggaagtgaagctgttacccgcaaga

SEQ ID NO: 18635 - DNA, 247 bp, Zea mays
ccacgcgtccgcgccgccgctccgcctcagcgcgtcgcccgccgccacatcctacagcgacctcatcgatcaccttcaactttcaatcatggcggacgtcgatgtcgaaccggaggttgccgccggcgctcccaagaagaggacgttccgcaagtacagctaccgcggcgtcgacctagatgcgcttctcgacatgtccacggacgacctcgtccagctcttccccgcgcgcgccaggagaaggttc

SEQ ID NO: 18636 - DNA, 242 bp, Zea mays
cactgatgctgcaacccttcaactgcaagtaacaatgaagcagctgagactgagagatactagtgcttccctgcacattattgagtccttgttgggttggtcggtagcagctgatgtttctaaacaaaaacaatactctggatatataccgacgacgccaggagttccatggagcgatgaggagcacaggcagttccttgccggcctggacaagctgggcaagggcgactggcgaggcatcg

SEQ ID NO: 18637 - DNA, 246 bp, Zea mays
gagccgaggttccccaaacacgcacagcacacgaacacacaccgcgcccagctccgaggtgatcttccggcggccggcgagatgagccgtggcacaggcgcgggctatgaccgccacatcaccatcttctccccggagggacgcctgtaccaagtcgagtacgcgttcaaggcggtgaagtcggcgggtgtcacgtcgatcggcgtccgcggcgcggactccgtctgcgttgttacgcagaagaaa

SEQ ID NO: 18638 - DNA, 241 bp, Zea mays
aaagaatcaagctgcagggtctgaacgtgacaccaaagattcttgtgctgactaggctgataccagatgccaagggtacaaaatgcaatgtggagctcgagccagttgaaaatacaaaacattcccacatacttcgtgtgccattcaagactgaaaacggcaaggagttgcgccagtgggtgtcccggtttgacatctacccttacctagagagatatgcccaggattcttgtgccaaaat

SEQ ID NO: 18639 - DNA, 241 bp, Zea mays
ctcactactacatacatcaccaactaggatcgatctctcgacagcaatagctagcaatggagaagtacaccaaagccctagcgtcattgctcagcatgctggtgctggcacctctcctcgccatggccaccgacccagaccccctgcaggacttctgcgtcgccgacctcaacggcaagctgtcagtgaacgggtacccatgccagccgccgtcgtcggccggcgaccagttcctcttctc

SEQ ID NO: 18640 - DNA, 241 bp, Zea mays
cacacgcgtccggatgaaagctaccagtccctttttaagccaatcatgggcaaagttatggaggttttccgccctggtgcagttgtgcttcagtgtggtgctgattccttgtctggggataggttgggctgcttcaacctctcaatcagaggtcatgcggaatgtgttaggtatatgaggtctttcaacgttccattgttgctccttggtggtggtggatataccataagaaatgttgcac

SEQ ID NO: 18641 - DNA, 242 bp, Zea mays
tctggtttcgctgccccgattcgccacgaagccgcactgtgagagagggacgcggcccgttgtcctcggcttgtacgcaatccttccgtcgctgcgaactgatccctcgtgttcgccatggcccccagcgtcgccgtggaaaacctcaaccccaaggccttgaaatgtgagtatgcagtccgtggcgagattgtcatccatgctcagcgcttgcagcaacaactacaaacacaaccagggtc

SEQ ID NO: 18642 - DNA, 236 bp, Zea mays
gcgggagcctccgtgttctccaagatcaccaggttcgaggaggagctccgcgcggtgctgccccaggaggtggaggccgcccgcgtggcggtcgccgagggcaccgcccccgtggcgaaccggatcgcggacagccggtcgttcccgctgtaccgcttcgtgcgcgaggagctcggctgcgtgttcctgaccggcgagaggctcaagtcccccggcgaggagtgcaacaaggtgtt

SEQ ID NO: 18643 - DNA, 236 bp, Zea mays
ccccatccgcacctctctccatctccctgctcctccgcctccttcttgatccagccaagccagggatcgccatgtcggactcggaggagcaccacttcgaatcgaaggccgacgccggagcgtccaagacctacccgcagcaggctggcaccgtccgtaagaacggcttcatcgtcatcaagaaccgcccctgcaaggttgtggaggtttctacctcaaagactggtaagcatggc

SEQ ID NO: 18644 - DNA, 235 bp, Zea mays
gtcccctgctccattctcagccgccgccaatcccttcccgtgctccgcaaccgctgagtgagaagaagagatggccggcaagggcgatggcccggctatcggcatcgatctcggcacgacgtactcttgcgtcggcgtgtggcagcacgaccgcgtcgagatcattgccaacgaccagggtaaccgcaccacgccctcgtacgtcgccttcaccgactccgagcgcctcatcgga

SEQ ID NO: 18645 - DNA, 235 bp, Zea mays
ccccatcaaaacaatcaagaccaatgtggttgggactctgaacatgcttggattggcaaagaggatcaatgctaggttcctcctcaccagtaccagtgaggtctatggtgatcccctccagcacccgcagtggagacttactggggcaatgtcaatcccatcggtgtcaggagctgttacgatgagggcaagcgtacagccgaaacgttgaccatggattaccaccgtggtgcca

SEQ ID NO: 18646 - DNA, 238 bp, Zea mays
gttgctcgcctcgggtcaaaccctaagcagggagttgatttatccgctgcagccatgagtaagttgcagtctgagtctgtcaaggatgccatctcccagattgttggggatgccaaggagaagaataggaagttcactgagactgtggaacttcagattggtctgaagaattatgatccacagaaggacaagcgttttcagtggctctgttaagttgccccatatccctcgtcccaag

SEQ ID NO: 18647 - DNA, 261 bp, Zea mays
ctcgtgttccgcttcttgcagccgtcgccgcgaagcgtccagagaacttccgtcaacatggggaagacacgtggtatgggagccgggcgcaagctcaagacccaccgcaggaaccagcggagggctgacaaggcatacaagaagagccatttgggcaatgagtggaagaaacccttcgctgggtcatcccatgccaagggcattgtcctggagaagattggtattgaggccaagcagcccaactccgctatccgtaagtgt

SEQ ID NO: 18648 - DNA, 60 bp, Zea mays
gacacgctctgagtctctgaccgccccttccgtcgtccccgttcgaaggcgcggcaagcg

SEQ ID NO: 18649 - DNA, 257 bp, Zea mays
cacacacacacacacagacaagtggtttccaaagccaagtgtgtgtactagcaaccagctagctcgggcggcagcaggcagccatcatgtcggaggagaagcaccaccacttcttcaaccaccacaagaaggacgaggagcagcccgccggcgagtacgggtactccgagaccgaggtggtcaccgccaccggcgagggcgagtacgagaggtacaagaaggaggagaaggagcacaagcacaagcagcacctcggc

SEQ ID NO: 18650 - DNA, 252 bp, Zea mays
ctccttcaaggactccgcctgccgctgcttcggctacatggtctccaagaagaagtacatctacaccatcgacgacgactgcttcgttgccaaggacccatctggcaaggatatcaatgctcttgagcagcacatcaagaacctcctcagcccatccaccccgttcttcttcaacaccctgtacgacccctaccgtgagggtgctgactttgtgcgtggataccccttcagcctcagggagggtgctcacac

SEQ ID NO: 18651 - DNA, 270 bp, Zea mays
  unsure (1)..(270): unsure at all n locations
gcttctatggccactgcttatgaaaagaaatggccattgtatcttagcaccaaanaacagctaaatttttgaagaatatattgatgtgcaggggtctaagggacaaattttccctcggaggggggttgtaaaacaagtgcggggaaaaccaaaaagttttttgccggcaaaaggtatgtgcaccgccttatcgatgacatggtagcatacgcacttaagagtgaaggagggtatgtctgggcttgcaagaattatgatggagatgtgcag

SEQ ID NO: 18652 - DNA, 130 bp, Zea mays
cccacgcgtccgcttctcactcgcagctacatcactggctaccaagcttccaaggatgacttggctagctacaggtcgtttgtatacgggtgtttgttgtccccccctgcgaaagatgttctaagggggg

SEQ ID NO: 18653 - DNA, 249 bp, Zea mays
ggaggagaatatgagggcgtccgtgctagttggcttcatggcggtgtcggcgtgcatagcatgcatcgcgcatggcggcaacttctaccaggacacggagatgacctgggggcaggggcgcggcaaggtggtggacgggggccgcgggctggacctgagcctggacagggcctccgggtccgggttccagtccaaggacgagtacctgttcggcaagatcgagatgcagatgaagctggtgcctggcaa

SEQ ID NO: 18654 - DNA, 251 bp, Zea mays
gtacttcgtcaacccagacgacaccgtcacgcagaagatcgttgttcacaagaccagcgccaggggcacccacttccggcgcgctgggccacggcagcgggtgtacttccagcccgacgaggtgaacgccgccatcgtcacctgcggcgggctctgccccgggttgaacaccgtcatccgtgagcttgtctgcggcctgtatgacatgtacggcgtcaccagtgtcgttggcatagagggtggatacaagg

SEQ ID NO: 18655 - DNA, 254 bp, Zea mays
ctcacctgtttcgctgctcgcccgatctcgcgctgccggcagcgatctgagatcgagcgaactaagctttttcatcgagatggtgcttgtactgcatgctaacagtggtaacaaaaatgcattcaaaacactaattgccgcagaatacagcggtgtcaaggttgagttggtgaaggactttcaaatgggtgtctccaacaaaactccagagttcctcaagatgaaccctattgggaagattcctgtcctggaga

SEQ ID NO: 18656 - DNA, 255 bp, Zea mays
tcgaaacagcttgggaaagtttcgtgaggaaaacaatgccatgagggcacagagtgcaggcttatgctcttccatcgaagagcttgacctaacgatcaagatgctgaatgatcgcatggtacatgaaagcatacctttatctgaggagaagcgtctagtgaaagaaattaaggaccttgagaaaaccagatcgaaagtcatctctaatgctgctaacagggctaaattgcaaggtacagtggttgaaaaagaggc

SEQ ID NO: 18657 - DNA, 251 bp, Zea mays
cccacgcgtccggcgagcgagggacccggggcggaagaagagagagaagacgtctctctcctctcggcgtccccgttccccaacctctcgtctgctgcctgcatgcctgcctgcctgcaaaaaggagtttgtcatggcgtctaagcgcatcctcaaggagctgaaggacctgcagaaagacccccccacatcatgcagtgcaggtcctgctggtgaggacatgtttcattggcaagcaccaattatgggac

SEQ ID NO: 18658 - DNA, 246 bp, Zea mays
atttgcgatacccgataccgatctaggagaagagaaaggcgtcatgtcgtcgttcggacgcaattcatggtgtatcctcgtgctggcctccgtgctcctcctgtcctgcctcgccgagacggccgtggccaaccgaacaggcgagctcaccgtcttctggggccggaacaaggaggagggcaccctgcgtgaggcctgcgacacaggactctacaacaccgtcatcatctccttcaagagggtttg

SEQ ID NO: 18659 - DNA, 246 bp, Zea mays
ctagggttttgctgctctccgaccccgagctccgaacgccgcagcatcaggcgcggcccccctcgcgtgtgaccgagatggcgctgccgaatcaggggaccgttgattaccccagcttcaagctcgtcatcgtcggcgatggtggaactggtaaaactacatttgtgaagaggcatctcactggagagtttgagaagaaatatgaaccaaccattggtgtggaagttcatccgttggatttcacca

SEQ ID NO: 18660 - DNA, 248 bp, Zea mays
ctcgccgacagggaaagccgtgttgcaagaaggggaattccgctgcgagatccgtgaacggttcagagatggcacagacggtgttcaccccctctttggaagcgatgaagcatgtcaaggcagagaacggagtcattctcaccaagcccttccttgatgtctgcaagcaaatattgcctgtcctcgataaatttggaggtgctatggcaattgtaaagagtgatatcggcggcaatatcacaagactg

SEQ ID NO: 18661 - DNA, 247 bp, Zea mays
cctggcttcccttggaggtggaagtggtattgaatacgaaattcttcagacaaatccaatactcgaggcttttggcaatgcaaagacattgagaaatgataactcaagtcgttttggaaagcttatagaaattcatttcagtaccactggaagaatatgtggtgccatgattcaaacatttttgcttgagaagtccagagttgtgcaatgtgcagttggtgagcgatcataccatatattttatcag

SEQ ID NO: 18662 - DNA, 248 bp, Zea mays
acgagatcactaaagccaaggagtcggtcaccaacatcttcaaggccgccgaggcctacctcgtcgccaacccggaagcctacaactagaccatgcatgcgatcggtcgatcgggaacggatttcttccttgtcttttgtgttttctacggctaaaataaaacttgtctaaggtgtgtacgaacgagaggagaggtcggagaccgccgagcagagtatgcatgcaattgacaagtgccaaatgtgtgt

SEQ ID NO: 18663 - DNA, 229 bp, Zea mays
cccacgcgtccgggctggctacactggaaaggtggtcattggaatggatgttgctgcttctgaattcttcggtgagaaagacaagacttatgatcttaatttcaaggaggagaacaacgatggctcaaacaaaatttcaggcgacagctgaaagacctgtacaagtcctttgtttctgagtaccctatcgagtcgatcgaagacccatttgatcaggatgactggagca

SEQ ID NO: 18664 - DNA, 242 bp, Zea mays
gaaacttccttgtaaaggtgaatgcaaatattgggaattcagctgttgtgagctccattgaggaggaagttcacaagctccagtgggccacgatgtggggagctgatactgtcatggacctttcaacagggcgacatatccatgagacgcgggaatggattattcgcaactctccggttcctattgggactgttcctatttaccaagcacttgagaaagtaaatggtattgctgaaaatctg

SEQ ID NO: 18665 - DNA, 244 bp, Zea mays
gcgcgcttcaccttccccaccccgccgccgccatcgcacgcccgcatccgcatccgctatgggtgcgtacaagtacgtctcggagctatggcggaggaagcagtccgatgtgatgcggttcgtgcagcgcgtgcgctagctgggagtacaggcagcagccggccatcgtccgcctcacaaggcccactcgtcctgacaaggcgcgccgcctcggctacaaggccaagcagggttatgttgttta

SEQ ID NO: 18666 - DNA, 244 bp, Zea mays
cagatatgggaggttcttgacaaatgtcagcttcatgaagctgtccaggagaaggaacagggattggactcacttgttgtggaggatggctccaactggagcatgggtcagaggcagctcttctgtttgggacgtgcactgctaagaagatgccgtgtcttagtcctcgacgaggccacggcatctatagacaatgctaccgatgcgatccttcagaaaacaatcaggacagagttcagagact

SEQ ID NO: 18667 - DNA, 246 bp, Zea mays
tgagaacaaaagaagttgcaattacaaatcttacaaactacctcactaaagaaaacagagctgaggagctgcgtaatcttttgacccagctcagaccattttttgcagttattcctaaggcaaagactgcaaaaattgtccgtggaataattgatgctgtcgccaagatacctggaacatcagatcttcagatttcactctgcaaggaaatggtagaatggacccgtgcagagaagcgtactttcc

SEQ ID NO: 18668 - DNA, 244 bp, Zea mays
gaaacaatcaaccagcaacactcttctcgtataacataatacagcgaaggtaactcacatggcaacttccatgggttgtctcgtcttgctctgccttgtttcttctctccttcccagtgccgtccttggccacccatggggtggcttgttcccacagttctatgaccattcgtgccccaaggcgaaggagattgtgcagtccattgtggcacaggctgtggccaaggagaccaagatggcggca

SEQ ID NO: 18669 - DNA, 245 bp, Zea mays
ccaatctcgtccgacccggcgcgtcgtcccctccagatctccgtcgccctctccaggtagcagaaactgttctgctgcagtctgacaaagtggagggcttaggagcttctgcttcttttatgtctgaacaatctttgctttatttgggattgttgggagagtactctcgtgcaactaggaaaaggcacaaggttccgtcccactgcatgcgtcaagagactgtctggttttcttgttctgatttg

SEQ ID NO: 18670 - DNA, 235 bp, Zea mays
cggacgctggcgatctcgcgctgccggcagcgatctgagatcgagcgaactaagctttttcatcgagctggtgcttgtactgcatgctaacagtggtaacaaaaatgcattcaaaacactaattgccgcagaatacagcggtgtcaaggttgagttggtgaaggactttcaaatgggtgtctccaacaaaactccagagttcctcaagatgaaccctattgggaagatcctggtc

SEQ ID NO: 18671 - DNA, 242 bp, Zea mays
tttcttctttctactagagctggtggtctgggaataaacttggcaactgcagatactgtaatcatctatgacagtgattggaacccacatgcggatttgcaagctatggcaagagctcatcgcttaggacagactagtaaggtgatgatatacaggcttgttagccgaggtacaattgaggagcgaatgatgcagcttacaaaaaagaagattttattggagcacttagttgttggtcgact

SEQ ID NO: 18672 - DNA, 241 bp, Zea mays
tcggagtcccccactcgctcgtgctcgtgagcgaacggagtccaaggcagacgctgcgattcacaagcgccgaggagcgagatgcagaacgtggtggaggtcgagccgggccgcacggctgccgatggccggccatccgtggggcccacctaccggagcgccttcgcccgcgacggattcccgccgcccgtccccgggatggacagctgctacgacatcttccgcatggccgtggagaagt

SEQ ID NO: 18673 - DNA, 243 bp, Zea mays
gatcgaggcagtcgtagtaataagccaacaaacaaaccggccggaacgccatgctggaggagtacaaaccgtgtgcggccatggtggtgacgcatgcatctacgccgctctagcgctcttgtccaaggcggcgttcaccggcggcatgagccccctggtgttcgtcgtctacaggcaggccgtcgccaccattgtactcgttcccgtcgtcatcgcggccaacaggaagaagatgaaggagat

SEQ ID NO: 18674 - DNA, 241 bp, Zea mays
tgcaagtgtaaatacccaccttggaattgaacaaagccggagggatgacatggaatctcttggatatgtactgatgtacttcttgcgaggaagccttccatggcagggcctgaaagctgggaacaaaaaacaaaagtatgaaaagatcagcgaaaggaaaattgctacttcaactgaggctctctgccgtggatatcctaccgaatttgcttcttacttccattactgtcgctcactgcgt

SEQ ID NO: 18675 - DNA, 236 bp, Zea mays
gacaacccgtcagcccctctcgtttttcatccgccttcgcctccaaccgcgtgcgctccacgcctcctccaggaaagcgagagcttctgcataagaacaacaaatcaaaagcgtgatcagctcggtgccaacaaaacctcaacaaccaagtttcatgtctgatctcgacgtccagcttccatctgcctttgatccgtttgctgaggcaaatgctgaggactctggtgctggtcctg

SEQ ID NO: 18676 - DNA, 238 bp, Zea mays
gtcaaatatgctgttggttatgggttgtgctttctttgctggtggtgttgttcaccgcaacaaagaccaaatcttcagtaaggcaactgcagttgtcaactcaggtttactgttgatggctgtcatgggattgatgtttcctgccgttcttcatttcactcattcagaagtgcgtcaaggggcatcagaggttgcactttcaaggttcagtagttgtattatgcttgtggcgtatgca

SEQ ID NO: 18677 - DNA, 241 bp, Zea mays
cccacgcgtccgggatatcatcatggttgccagtggtggtcacgaagatgtcagcttcagagacaacgtcctccaagggaaggacctgaagaccctccatcagagcctggagggcacagatggggtcgatctcggtcacaaggatatcatcatgggtgaccacatgagggagatgaagaacaatgccattgtctgcaacattggccactttgacaatgaaattgatatgctcggccttgag

SEQ ID NO: 18678 - DNA, 238 bp, Zea mays
cccacgcgtccgcccacgcgtccgcccacgcgtccgcccacgcgtccggcagagtccagagtccagacgccagacgccctctacttctcttctctctagttatacatttcaaactcttggccgccgcagcggtctctgttcgccgcgccccgccgcagaaatggcgctgccgaatcagcaggttgtggattaccccagcttcaagctcgtcatcgttggcgacggtggaactggcaaa

SEQ ID NO: 18679 - DNA, 87 bp, Zea mays
gcagctagcgcgctcctcgatcccatcagatctatgccggcagcgctaatcgtaatagccatggtctccaccgccggcgacgttgcc

SEQ ID NO: 18680 - DNA, 234 bp, Zea mays
ggcaaaagaggtcttagggcgatggcgcaaactagcctgcctcctggatttcgtttccacccaactgatgttgagattgtttcctactatttgaagaggaagattatgggaaagaagcttattgtagacgctatatcagaggttgatctctacaagtttcctccctgggatctccctgaaaagtcctctcttcgaagcaaagatcttgaatggttcttcttttgtcctcgtgac

SEQ ID NO: 18681 - DNA, 231 bp, Zea mays
atttgtgctattggctggttatcttccgttccatgataagaacttgatggacatgtataagaagattgagaaagctgacttcaaatgtccaagttggttttctaccgatgttcggaggcttttgcaaaggattcttgatcctaaccctagtagaaggatctcggtggaaaaaatcatggagaacccatggtttaggaagggtttaggtgcaaagctacttaggtacgattt

SEQ ID NO: 18682 - DNA, 216 bp, Zea mays
tggctgttacccttgttaagctgaagcagttccaaggtgctgtggatgctgctcgcaaggctaacagtgctaaaacatggaaggaggtctgctttgcttgtgttgacgctgaggagttccgtcttgcacaaatatgtggtctcaatattattgttcaggttgatgacttggaagaagtcagtgagtactaccagaacagaggatgcttcagtgaac

SEQ ID NO: 18683 - DNA, 231 bp, Zea mays
agacatttggggatattcttgcttctagagcaataagggcagcacattgcttaacttccattcagttctcacctacatccgaacacatacttttggcatatggtcgtcgtcatagctcgctgcttaggagcatagtcgtggagggagaaaatgggattcctgtatatactattttggaggtatatagagtttcagatatggagcttgtgagagtgcttcctagtgccgaag

SEQ ID NO: 18684 - DNA, 233 bp, Zea mays
gctacctactactcaagtatccatccttattgagtacagtgttgatccatggactcggaaggagttgtagcagcaaaggtggcagatgagactactaaaccggcaatccaagaagacggcgccgagagcaaggccgggatgactgatctgctgatgctgaccgacaagtcgcagctgcaggcgctggcgatgctgctgcggaacaacgaggagctcatgatgagccaggcgat

SEQ ID NO: 18685 - DNA, 238 bp, Zea mays
gcgacatgatctccttgtctgagcaggagcttgttgactgtgacacttcatacaaccaggggtgcaatggaggtttgatggactatgcgtttgagttcatcatcaacaacggcggaatcgacaccgaggaggattacccttacaagggcacggacggacggtgtgatgtcaacaggaaaaacgccaaggttgttactatcgacagctatgaagatgtaccagcgaacagtgagaaaag

SEQ ID NO: 18686 - DNA, 239 bp, Zea mays
cccacgcgtccgagggtatggaggagggcgagttctccgaggctcgtgaggatctggctgcgctcgagaaggactacgaggaggtcggtgctgagtttgacgagggtgaggacggcgacgagggtgacgagtactagacgctctactggcgcggcgtcgtcgggcttgtgtgccactgctatcctgtgatctgccctgagtggctcctatcgtgttatgtttctgtcggttcttatcta

SEQ ID NO: 18687 - DNA, 241 bp, Zea mays
aaattctaaaaaggcaggggccgtttctccgaccaccgcccgacgaatcagcgcgtccgctacaactccggcgacccccgccggcgacgacccaccagggcagcgatccacgcaggcgaacaacgatgggcggccgcaagatcgcgctgatggtgggaatcaactacccgggcaccaaggccgagctcaagggctgctacaacgacgtcgaccgcatgcgccgctgcctcgtcgaccgctt

SEQ ID NO: 18688 - DNA, 117 bp, Zea mays
gattggtgaactcaagaagctagtggaagaaggaaaggttaagtacattgggttatccgaagcatctgcatcaacaatccgaagagctcacgcagtccatcctatcactgcagtaca

SEQ ID NO: 18689 - DNA, 241 bp, Zea mays
atgtgatccccatcttcaacggcgagtgcggggcgtgcgcctactgcgagtccgatcggacaaacctgtgcgggacctaccgcgtggacgcttccaagagcaccatggtctctgacggcggcaccaggttctccgtagcggaccgcgtgtccggccgcaccgtgccggtctaccacttcctcaacacctccacctttgccgagtacaccgtgctggacgcggcctgcgccgtcaaggtcaa

SEQ ID NO: 18690 - DNA, 112 bp, Zea mays
cccacgcgtccgcgacattgttttctccccccttctcgccttctccttctcccccctagtctagaggcgtttgctccccaatcccttcggcccgcccgctcgacgtgatccc

SEQ ID NO: 18691 - DNA, 242 bp, Zea mays
cccacgcgtccgtatctacaggtgtggtcactgcaagagtcttgcaccggttagtacatggttctcgtttgagttcttgacacattctattgtggttttactcttgtaagcacccttggcgatcttcatcatttctgatatgtctaatcataatctttattgtttcagacgtatgagaaggtggcttctgttttcaagttggatgaaggagttgttattgctaaccttgacgctgacaaaca

SEQ ID NO: 18692 - DNA, 235 bp, Zea mays
gccaatccgaaatctcgagcgctcgcgccggcgaccacagcaaagaggaggccgcagcacgacagcgccccagggttcctactctcgtcgcagcggcagcactggtagcggcacagtgaggggaagatgtcgtcggtgttcagcggcgatgagaccgcccccttcttcggcttccttggcgccgccgccgcgctcgtcttctcatgcatgggggcggcgtacgggacggccaaga

SEQ ID NO: 18693 - DNA, 236 bp, Zea mays
cagaagttacattaaatgtttgccttggaaaacaattctttggtggtgaattatactttcgaggtattcggtgtgagaatcatgtgaattcagagacacaacatgaggaaatgtatgactacacacatattcctggttgggctgtactccaccatggtcgacacaggcatggtgctcgagctacttcatctggtctcagaataaatctgcttttgtggtgccggagagagatgaag

SEQ ID NO: 18694 - DNA, 237 bp, Zea mays
aaaactcccatttcgccgtccgtgacgcgagagacctcttcgcatcccgaggcggcgcttttggggtcggaagcgacacgggcgcccggcgggtccgcgggtggtggtgctactgctagcaagcagcagcaggcgacgctaggcgagagccccagtcggagcaggccaccatgtgcagcatcctcgctgtcctcggcgtcgctgaggtctccctcgccaagcgctcccgcatcattg

SEQ ID NO: 18695 - DNA, 112 bp, Zea mays
cccacgcgtccgagagcggcggcgcgggcggacaaggagcaggcggaggaggagctgtgccaagccacaatgggtatctcgcgtgactcgatgcacaagcgccgggccaccg

SEQ ID NO: 18696 - DNA, 238 bp, Zea mays
caccgccgtcacgccatctcgccgggggcggaaccccgaccgcgagtatggggaacatcttcgtgaataagcccaagatcactgacgtcgatagggccatcctcaccctcaagacgcagcgccgcaagctcgcccaggttcaacagcagcttgagaaggtaatcgaagcagaaaaggaagctgcacggcagttggttcaacagaagaagagaggcagagctttgattgctctgaagaa

SEQ ID NO: 18697 - DNA, 233 bp, Zea mays
cccacgcgtccgcccacgcgtccgcttatcaagaacaagaaagatcagagattaaatgaccagaggatgttccttcgtaccatagtcagacaaccaagtgcaacaaatagtttcctgacaggtaatattgacaatgaagtagggcacacacaagcttcgtcatcgttcacatcaaacagcattctcagatcattgatgggagcactagaagaaatagagctacatgctcatag

SEQ ID NO: 18698 - DNA, 228 bp, Zea mays
gctggagacgctgtgcgggcaggcgttcggcgccaagaagcaccacatgctgggggtgtacctgcagcgctcctggatcgtgctcctcatcttcgccgccgcgctgacgccgacgtacatcttcatggaggacctgctgctgctgatcgggcagtccccggagctgtcgcggttggcggggcagatgagcgtgtggctgctcccgcagcacttcgcaatggcgatgct

SEQ ID NO: 18699 - DNA, 231 bp, Zea mays
ccggctagggtgttcacgcctgccgcggcgaacttctgccctccccggcgtcgcgctctggtcgtcgtcggccgggaagatggctggcggcttcagggtacttcatctggtcaggccctttctggctttcttgccagaggtgcagagcgcggataggaagataccattcagagaaaaagttatctacactgttatttctctcttcatttttctggtgtgcagccagctccc

SEQ ID NO: 18700 - DNA, 232 bp, Zea mays
cactggccaaagcggttcgtgcaagacttcaagaagggagaggctcactgatggttctagggctgatgcccttcaggaccaagaatatgtccttacttacgaagataaagatgctgactggatgctcgttggtgatctcccctgggacttgttcaccacaatttgtgggaaacttagaatcatgagaggctctgatgctgctggcatggctccaagatcaccggagcagata

SEQ ID NO: 18701 - DNA, 232 bp, Zea mays
ctgacgagtccatccatgcctttgctgacgcttctatggccactgcttatgaaaagagatggccattgtatcttagcaccaaaaacactattttaaagaaatatgatggcaggttcaaggacattttccaggaggtgtatgaagctggttggaaaaccaaatttgaagctgccggcatatggtatgagcaccgccttatcgatgacatggtagcatacgcacttaagagtga

SEQ ID NO: 18702 - DNA, 252 bp, Zea mays
gtactgagtacggtcgaattccgggtcacccgtcgtcaggtccgggacgtggcgagtggcgctgattttggaaagctttttaagtcatctgcacctgtagaattgactgaagctgagactgaatactcagttaatgttgtgaagcatatttttgatggacatgttgtgctccaatacaactgtaccaatacaattcctgaacaattgcttgaacaggttactgtttttgttgatgcttctgaggctgatgaa

SEQ ID NO: 18703 - DNA, 237 bp, Zea mays
cccacgcgtccgagaaaagcagttcttcagctaggcaggagggcacaggaaggaggagatggcgtcaaagaggattcagaaggagctcaaggatctgcagaaggaccctcccacctcgtgcagtgcaggtcctgttggtgaagacatgttccactggcaggcaacaataatgggtccatctgatagcccatattctggtggagttttcctagtcacaatccattttcctcctgatta

SEQ ID NO: 18704 - DNA, 252 bp, Zea mays
ggacgctggcgctccgccgccgccgaaacagcacatcgctctctcgatcagagccatggcggaggtggagcagccccaggacgcggtgaagctcttcaaccgctggaccttcgacgatgtccaggtgaacgatatctcgctgaacgactacctggctgtgactgcggcgaacacgcgacattcctgccgcactccgcggggcgctactccaagaatgcggttccgcaagcgcagtgcgccatcgtcgagcgc

SEQ ID NO: 18705 - DNA, 255 bp, Zea mays
agtgctcctcctcctatgaagaaggactctccacgttctcgccgtcaaagcagtggaaaacagatttgggcgaggtagcaacagcgtcttcagcagcgcagaagctctggtatacgaggagcccgcctccaggcagctcctgctccaccatgttgttgcagtcatagaccaaatctgttttccactgctttgacggcgagaactggagtagtgctcctcctcctatgaagaaggactacaaactagctaatcttc

SEQ ID NO: 18706 - DNA, 256 bp, Zea mays
ccagaccatcaaacaagtgccagcgccctctcgcagtcgccgcaatggagagcaccttcatcatgatcaagcctgacggcgtccagaggggcctcattggtgagatcatcagccgttttgagaagaagggcttctacctcaaggccttgaagcttgtgaacgtggagaggtcgtttgctgagaagcactacgccgatctcgcctccaagcccttcttccagggcctcgtggactacatcatctctggccctgtggt

SEQ ID NO: 18707 - DNA, 259 bp, Zea mays
ggtatcttcattgtataaggaaatgataagataccagcggaaggatggagttcaacttacagcaaacttatacctgcccccagggtatgattcatcaaaagatggacctttgccatgtctagtttggtcctaccctggtgaatttaaaagcaaagatgctgctggtcaagttcgtggttcccctaatgaatttccagggattggtgctacatctcctcttctttggttagctagagggtttgtgattctgtctggtccg

SEQ ID NO: 18708 - DNA, 259 bp, Zea mays
gcggaccaggtaagcagcagcaggaaccctagcaccgccgcatccgcagccatgggtatcgacctcgttgccggtgggaggaacaagaagaccaagcgcacagcgccgaagtccgacgatgtttatctcaagctccttgtcaagctctaccgtttcttggtcaggaggaccaagagcaacttcaatgctgtcattctcaagaggctcttcatgagcaaaaccaatcgcccaccaatctccatgcgccgccttgtcaagt

SEQ ID NO: 18709 - DNA, 260 bp, Zea mays
caatcatcaaaccgcagtatgttgaccacatcccaaaggctgttcaagggaatgtaggacaagtgcttgaacagaaggacgagagggatatgaaagctgaactgtgtgttgatcttgaattaaaccaagttattgaccgaaatgtaggagatctttctggcggtgagctccagagatttgcaatagcagttgttgcagtgcaaaatgcggaaatctacatgttcgatgagccatcaagttaccttgatgtgaagcagagg

SEQ ID NO: 18710 - DNA, 251 bp, Zea mays
caatgtgcagctttttaacagccttctgctgcggcgtgagtgctgctcgttcagtaacggagagtacgtgaaggctgggctggatgagctagagcattggtgcttttggctgactgaagagtacgcaggatctgcatgggacgagctgaagcatatcaggcaggcagttaccctcttgatacttgacgacaagcatagccggagtctcgcggagatcacagacgacttctgcccagtgctgagcatgcagc

SEQ ID NO: 18711 - DNA, 252 bp, Zea mays
atctgatgcaatgcaaatgtgctgttaacacagccgaagattggcttaaccctgttgccatacaagaggcgtttgaagcccgggctctcaggatggcagtaaactgtgcccagaacataggccaagcagcaaaccaagaagaaggtttctatgagcggtcccctgatttgctagaggctgcagtagctcacatccagttggtcattgtaaccaagttcattgcgaaggtacagcaggacattcctggacctg

SEQ ID NO: 18712 - DNA, 251 bp, Zea mays
gtgaaggtgatgggcaacagagctaatgcaatcaaccttgacttctcagatgtaattgttgacatctatgtatgatctccttgactactatgggaactgtttagtgagaaactatattgttttcagatattgtctgatgaagagctagaaacatatctaaaggtgattgcagtaatatccatgggaacataagttattgaacatgacttgttaaatatcagagagctatatgatcatgtgttggccctact

SEQ ID NO: 18713 - DNA, 255 bp, Zea mays
cacaggctttcctatacttggagttgaatggcagaaaatggagaacccggatctccgcaaagcaatgggaatgaaaccagatcaaaagggtgttcgtgttagaagggtggagcccactgctccagaatctggatgcctacgaccatctgatattattcttagtttcgatggtgttgacattgctaatgatggaacagttcctttcaggcatggtgagcgcattggcttcagttatctggtttctcagaaatatac

SEQ ID NO: 18714 - DNA, 254 bp, Zea mays
gatgttactcccctgtcactaggtattgagacactcggtggtatcttcaccagattgatcaacagaaacactacaatccctacaaagaaaagtcaggtgttctcaactgctgctgacaatcagacccaagtgggtatccgtgtgttgcaaggtgaccgtgaaatggcagcagacaacaagcttcttggtgaatttgaccttgtgggcattccacctgccccaagaggcttgcctcagattgaggttgcattcga

SEQ ID NO: 18715 - DNA, 253 bp, Zea mays
  unsure (1)..(253): unsure at all n locations
ggacgtgtngcagctgtacgagggcgggatcaagctgcccgacatccccgagctcgaggagttccgcaagcagttcccgctacagatggtcaaggacctcatgcccgccggcggcggctacgtcctcaagctccccatgcccagaatcatcgaagaggacaagaaagcttggatgagtgacgaggagttcgcaagggagaccctcgccggcgtgaaccccttgatcatcaggcgtctcacggagttccctccg

SEQ ID NO: 18716 - DNA, 257 bp, Zea mays
ggaaacaacttcagaatgaactgtctcaaagagggtttgtccctgcagatgcatctgcctgcagcttaaactctaaagatccaggtatcatgcgtgctgttcttatggctggtgcttacccaatggtagggaaaatgctccctcctcgcaaaaatgcaagaaaatcagttctggaaacagcgagtggtgccaaagttcgtctgcacccacactcctgcaactttaacctatctttcagtaaatcttctgggaatcca

SEQ ID NO: 18717 - DNA, 246 bp, Zea mays
gaacacgctttgaagaaacatggttgtagtatgcattatcttctacaaaaatcgtggtatgacatatgcctggcatttttggtggaggcgaaatggcaccatggaaactatagaccaagcattcaaaagtatctagagaatggatgggtatcatcttcagcaccattgttgttgttacatgccttctcaatgcttgattcagttgtcaacatgagtacgatatcccctttgcaaaccaaactgaga

SEQ ID NO: 18718 - DNA, 236 bp, Zea mays
gctaggattctcccgaaaccctcccccaaaaccccagagcggagaagagcgcaagatgttcggcttcgggcccacggccaccacggccacaaccgccggcgcacggcgcgtgcaccagcccaccttcaagatcttctgcaaggccgacgaggggtactgcctcaccgtccgcgacggcaacgtggtgctggcccccgccaacccgcgcgacgagcagcagcactggtacaaggaca

SEQ ID NO: 18719 - DNA, 252 bp, Zea mays
ggacgttcaaagattccttccgtgcacccttgttaactaaacaatgaggcagcagactggtaagcgtccctcccaacacagggaatatgaaagagaagaaaggaaggaccaacacaagaggccgtttccccgtgctcaggaaagctctaataatgatgggctggttctttaccgtatactctgtccagacagtttgattggtagtgtcataggaaagcatggcaatgtgataaatgctatcaggcatcagac

SEQ ID NO: 18720 - DNA, 248 bp, Zea mays
cccttccattggaggcacgcggaaaaattggtgacttcattaaaggagtgtttgccgtcttcctagacttggatttctcatttcttgagatgaatccgttcaccatggtcaatggggagccatatcctctggacatgagaggagaactagatgacacagcagctttcaagaacttcaagaagtggggaggtatagaatttcctctaccttttggaagagtactcagccctacagaaagtttcatccat

SEQ ID NO: 18721 - DNA, 210 bp, Zea mays
cttcggccgcctcgagattgagctggccgaggtcgaaatgcccggcctcatggcgtgccgcgccgagttcggcccgtccaagcccttcgccggcgctaggatctcggggtctctccacatgaccatccagaccgccgtcctcatcgagaccctcaccgcgctcggcggcgaggtccgctggtgctcctgcaacatcttctcaacgcagga

SEQ ID NO: 18722 - DNA, 245 bp, Zea mays
gtttatccctggacgtccattcctctcctggcttactgtaccttgcctgccatctgcctgctcacggggaagtttatcacaccagagcttaccaatgtcgccagtatctggttcatggcacttttcatctgcatctccgtgaccggcatcctggaaatgaggtggagtggcgtggccatcgacgactggtggaggaacgagcagttctgggtcatcggatgcgtttcggcgcatctgttcgcggt

SEQ ID NO: 18723 - DNA, 248 bp, Zea mays
gcgtgacgcgtctcccacacggccgccgccctcgccttcgtgcgttccccgcgtagagtttagggttttgtcgccgccatggcgatcctctcggcgctcgccaccgaggtgttcatccccgtcgccgccgtcatcggcatcgccttcgccgtcgtgcagtgggtgctcgtgtcgcgggtgaagctctccccggctgcagccgcgtccggcggcagcaagaacggctacggcgactacctcatcgagga

SEQ ID NO: 18724 - DNA, 255 bp, Zea mays
ggcgctcatcaacgccgacggcatcatcgaggagtccttctggccgggcaggtacgccgtcgagctcagctcagcggcgtacggcgccacgtggcagttcgacacggaggcgctgcccaacgacctcgtcaagcgtgggctcgccgtgcgccgggacgacggcgagctggagctcaccatcaaggactacccctacgcgcacgacgggctcatggtctggaacaccataaggcagtgggcggccgactacgtcaa

SEQ ID NO: 18725 - DNA, 179 bp, Zea mays
catctttgctgcttgtctatgctgagaataaatgtgaacggtgcccctggacgctggatccatgctggttttggacacggttgtctttttgtgtttaacttatctgctgccgtcctgtaacgaattcgctaagttttagttcttttgtgctttgttaagaatataaacaatgaggtttc

SEQ ID NO: 18726 - DNA, 239 bp, Zea mays
gagctgcctgctacacccctgccaagatccatctttccggttccgccgcctgatcgaagtgaacaagcaaggaagagccatggcgagcgagcacgcggcggggggcgatgctaagcatcaccagaagcagagcctgatggacaaggcgaaggggttcgtcgcggagaagatcgcgcacatccccaagcccgaggccacgctggacggcgtgacgttcaagggcctgagccgggagtgca

SEQ ID NO: 18727 - DNA, 237 bp, Zea mays
cctcctgaagcccaacatggtgactccaggctccgactccaagaaggtgacccctgaggtgattgctgagtacaccgtccgtaccctccagaggaccgtccctgctgctgtgcctgctgttgtcttcctctctggtggacagagcgaggaggaggccacccgcaacctcaatgccatgaacaagctcagcaccaagaagccgtggtccctgtctttctccttcggccgtgccctcca

SEQ ID NO: 18728 - DNA, 237 bp, Zea mays
tagtgccaggaggtgtgcaggaaatacttcatatggatcatgattcagaggttgcttttcttaaaccaagaaaaggttttgttaagatagctattgagatgggttgccctgtagtccccgtttttgctttcggacagagctatgtttacaaatggtggaggccaggtggcaagttaattgtcaagattgctagagcaatcaaattttctccaataatcttctggggaaaactgggga

SEQ ID NO: 18729 - DNA, 247 bp, Zea mays
cccacgcgtccgccgttccatttccccatctcccagatccaattcgcgagttctccctcctctgccgccatggcgctctctgtggagaagacctcgtctggacgggagtacaaggtcaaggatctctcgcaggcggacttcggccgcctcgagattgagctggccgaggtcgaaatgcccggcctcatggcgtgccgcgccgagttcggcccgtccaagcccttcgccggcgctaagatctcggggt

SEQ ID NO: 18730 - DNA, 237 bp, Zea mays
attccaaatggaagggttggtgttatcattggaaaagccggggaaactattaggtatatccaacttcaatcaggagcaaagattcaagtcacaagagaccatgaagctgaacctggtgcactgacaaggcaagttgagctttctggcaaacctgagcagataagcaaagctgaacagttgatcaaagaagttctggcagaggccgatgctgggtcatccggtgctggatctggtggc

SEQ ID NO: 18731 - DNA, 235 bp, Zea mays
gggagagagagagagaggaagacgagaggcagcgaaggaaacagtagttcttcaattaggcaggagggcacaggaggaggaagatggcgtcgaagaggatccagaaggagctcaaggatcttcagaaggaccctcccacctcgtgcagtgcaggtcctgttggtgaagatatattccactggcaggcaacaataatgggtccatctgatagcccatattctggtggagttttcct

SEQ ID NO: 18732 - DNA, 234 bp, Zea mays
ccagccgcggaggtgtgcgaggactgcatcccggggctgcgcgtcgaccacctcgacgtcgccgacctgccgatgctcaacaccgacctcgagacgaacggtggtacgggcttcccgcccgccgtcgaggcgttccgcgccaaggtccgccatgccgactgcttcctcttcgcctcgcccgaatacaactactccatcaccagcccactgaagaacgcgcttgactgggcttct

SEQ ID NO: 18733 - DNA, 240 bp, Zea mays
gctaagccgagctaagaagcacagcaagtctcaccagactagcggctagcgcgagaatggccaaggacatcgaggccgcggcgcacgagggcaaggactactcggacccgcctccggcgccgctggtggacgcggatgagctgaccaagtggtcgctgtaccgcgcggtgatcgccgagttcgtggccacgctgctcttcctctacatcacggtggccacggtgatcgggtacaagcacc

SEQ ID NO: 18734 - DNA, 170 bp, Zea mays
aaagaaagaagagaaggtggaagagaaggaagaaagcgatgatgatatgggcttcacctcttcgactaggctgcacagtcatcacagtattgttttgggcagtgaaactcagaggaaaaccagagtcatgtttagattttaagcttgttttatgttggaaagtactggaa

SEQ ID NO: 18735 - DNA, 168 bp, Zea mays
ctcgagccctcgcccgctcagtcacaaagcctcagatctcagtcgcctgcgccgccgcttcgttcgtgtggaggggagaagacaggaaatggcggcgactgagggcgtgctcttggggatgggcaaccccctcctcgacatctccgccgtcgtcgatgacgccttcct

SEQ ID NO: 18736 - DNA, 174 bp, Zea mays
  unsure (1)..(174): unsure at all n locations
agagcacgcagtangtgcagcagcactgaagcactacttcctgcactcactgtgctagctgctcaaaccgtagtagtaacagtccatcaccatcaccatcaccaccaatggctcccaaggttgcgctcttccttgccctaagcctcctgttcgctgccaccgcgcatggctgcg

SEQ ID NO: 18737 - DNA, 167 bp, Zea mays
cccacgcgtccgatcctggagggcaacttcatctacgccaccaggaccgtgctgttcctgcgcggcgacggcacgctggagcgagtggccatcgagctgagcctgcccgagctccgggacggcctgatcaccgccaagagctccgtgtacacgcccaagtcgaccac

SEQ ID NO: 18738 - DNA, 164 bp, Zea mays
agaagataaccctgcaaacggctttcctatttccaggggttgcatttgttattttcttcatcttgaatgctcttatatggggggagaagtcgtctggtgctgttcctttcaccacaatgtttgccttggtcctcctttggtttggcatctcagtaccccttgtc

SEQ ID NO: 18739 - DNA, 165 bp, Zea mays
atcaccgatggccacggctaacacaagcaagcaagcaagtcactgagtagctagcagtatataccaccataaaaacaacacacacacacgtgcgctaataagctaagcttaaggtagctcctctctatctccggctagctcggacggacgacgttgccatggctg

SEQ ID NO: 18740 - DNA, 167 bp, Zea mays
gcaacatgggctgtgttcctcggcattgccctctgcgcacggcagcgctcttcctttcgcgcggccggcgcccggtctacaaccccccgccgggccccaagccatggccgatcatcggcaaccttaacctcatgggcgagctgccccaccgctccatgaacgagctg

SEQ ID NO: 18741 - DNA, 161 bp, Zea mays
cccacgcgtccggcccttcttcctaggccaattcagcttggcggatgtagcgtacattacgattctggaaagggttcagatatactattcccatcttaggaactacgacatcgccgaagaggcccaacctccaggaattcatcgaggagatgaacaagatt

SEQ ID NO: 18742 - DNA, 159 bp, Zea mays
aatgcacctgcctaaaaggttttcatccgaagttgcaggagcagtggaatgcaggaaattggagtcaaggttgcatcaggagcccacctctgggttgtgagaccaatcagtctggggatggatttcttccaatgggaaacataaagtggcctgatttct

SEQ ID NO: 18743 - DNA, 158 bp, Zea mays
gcacagtggacttcatgtacaaccacataaagctattgttggtgccaatgcctttgcccatgaaagtggaattcatcaggatgggatgcttaaatataaaggaacatatgaaataatatcgcctgatgatattggtttagcacgtgcaaatgaatttg

SEQ ID NO: 18744 - DNA, 238 bp, Zea mays
ggaacctggtgcgtcttgaaaggggagagagagagagagaagagagagagaagagagagagagagacgaggagtgggagacccgcgagaggctgccgtgtagggaccgtagactcagcgactgcgaaggagggataaggggatggccgggatcggaccgatcaggcaggactgggagccggtcgttgtgcggaagaaggcacccaccgccgccgccaagaaggatgagaaggccgtca

SEQ ID NO: 18745 - DNA, 237 bp, Zea mays
cggacgctggcggcacgtccgtgggctccgcgctcgggccaccgtgatgtacgacgccaacgtcctggccgtcctgtcggaggtcctgtccgccgtcttctgcgaggtcatgaacggcaagcccgagtacacggaccacctgacccacaagctgaagcaccacccggggtccatcgaggccgcggccatcatggagcacatcctggatggcagctccttcatgaagtaggccaagaa

SEQ ID NO: 18746 - DNA, 239 bp, Zea mays
agagaaggaagtttggctgaaggatcttaaatatggtatttttggccttggaaacaggcagtacgaacactttaataaggttgcaaaggtggtagatgagctactagaggagcagggtgggaaacgtattgttcctgttggccttggagatgatgatcagtgcattgaggatgatttcactgcatggaaagaactagtgtggccagagttggatcaattgctccgcgacgaggatgaca

SEQ ID NO: 18747 - DNA, 241 bp, Zea mays
ccaaccttctcgcagtgggcaacagcagctggagttgatgagaaaactttgcgcaacgcttgaattatggtatttattgcaagaacagaatggtaacatctaatgtgagacttgtaatctctatcgccagagagtttgaaggccctggaatggacttttatgatcttattcaggaaggaatgcagggccttataaggggagctgaaaaatttgattcatcaaaaggttttaggttctctac

SEQ ID NO: 18748 - DNA, 239 bp, Zea mays
cttatggagctactcaatcagatggatgggtttgatcaaacagtcaatgtgaaggttataatggcaactaatcgggcagacactctagatcctgctttgttgcgtcctggtagacttgacaggaaaattgagttccctctgccagaccggcgtcagaagaggcttgtttttcaagtttgcactgccaaaatgaacctgagcgatgaggttgatttggaagattatgtttccagaccgga

SEQ ID NO: 18749 - DNA, 118 bp, Zea mays
ccgacatcctactttcgtcctcacgagtgaccgataatccgccggcgctaagatgttggtttatcaagatctcctatctggcgacgagctcctgtcggattcattcacctacaaggag

SEQ ID NO: 18750 - DNA, 237 bp, Zea mays
gagtttctgaaaaccggtgacccggagttcagttggaagccaccgaaggacgagtggcagagcatcgccctaggctacacttctgggactacttccagcccaaagggcgtcgtgttgcatcaccgcggtgcttatctcatggcactcagcgttgccatcgtgtgggggatgcctgaaggggctgtctacttgtggactctgcccatgttccattgcaatggttggtgctacacttgg

SEQ ID NO: 18751 - DNA, 241 bp, Zea mays
cataagtacatataaccaactaggcttgatcgatctctcgacagcaaatagctagcaataatggagaagtacaccaaagccctagcgtcattgctcaccatgctggtgctggcacctctcctcgccatggccaccgacccagaccccctgcaggacttctgcgtcgccgacctcaacggcaagccatcagtgaacgggtacccatgccagccgccgtcgtcggccggcgaccagttcctct

SEQ ID NO: 18752 - DNA, 235 bp, Zea mays
ggtatggattgacttggaaatgaccggtttggatataacaaaagatcggattttggagattgcttgtatcataacggatggcaaacttacaaaacaaatagagggtcctgacttagttataagccagagcaaagattgtttagataatatggatgaatggtgcaaaactcatcatgcagctagtggtttgacggaaagagtactgcagagtgaactttctgagcatgatgcagag

SEQ ID NO: 18753 - DNA, 232 bp, Zea mays
cccacgcgtccgccgcaacctatcgacccaatctcgtccgacccggcgcgtcgtcccctccagatctccgtcgccctctccaggtagcagaaactgttctgctgcagtctgacaaagtggagggcttaggagcttctgcttcttttatgtctgaacaatctttgctttatttgggattgttgggagagtactctcgtgcaacgaggaaaaggcacaaggttccgtcccactg

SEQ ID NO: 18754 - DNA, 236 bp, Zea mays
ccggcgccatctgcgcgtcgttcgtgctcaaggccgtgctgcaccccatcgccgtgctgggcaccaccacgccggcggggccgcactggcactcgctcatcatcgaggtcatcgtcaccttcaacatgatgttcgtcaccctcgccgtcgccacggacacgagagcggtgggtgagttggccgggttggcggttggttctgcggtttgcatcacgtccatcttcgcagggtaaata

SEQ ID NO: 18755 - DNA, 235 bp, Zea mays
ccggcgccatctgcgcgtcgttcgtgctcaaggccgtgctgcaccccatcgccgtgctgggcaccaccacgccggcggggccgcactggcactcgctcatcatcgaggtcatcgtcaccttcaacatgatgttcgtcaccctcgccgtcgccacggacacgagagcggtgggtgagttggccgggttggcggttggttctgcggtttgcatcacgtccatcttcgcagggtaaat

SEQ ID NO: 18756 - DNA, 237 bp, Zea mays
cggacgcgtggcgcgagctccggccgggacgacgacgacgcggtggccgcgaccttcgcgtcgcgctaagtgcgcgagcgcctgccgcggtaccggatgccggagcagtcgatcccgcgggaggcgacgcagagatcatcagcgacgagctcatgctggacggcaacccgcgcctgaagctggcgtccttcgtcaccacgtggatggagcgcgagtggtagaagctcagcgatggga

SEQ ID NO: 18757 - DNA, 239 bp, Zea mays
ctctacctaccggagcagggagcacgccgcacgagccctttccgccgccgccaaaatggtgaacgttcctaagacacactctacatactgcaatgacaaggactgcaagaagctcactctccacaagggtactcagtacaagaagggtaaggatagcctgtctgctcagggaaagcgccgttatgaccgcaagcagtcaggatatggtggccagaccaagcctgtcttccacaagaagg

SEQ ID NO: 18758 - DNA, 239 bp, Zea mays
cccacgcgtccgctgcgcctctacatttcttctctctctgctcctccgcctccgcctgatccatccaagacagggatcgccatgtcggactcggaggagcaccacttcgaatcgaaggccgacgctggggcgtccaagacctacccgcagcaggctggcaccgtccgtaagaacggcttcatcgtcatcaagaaccgtccctgcaaggttgtggaggtttctacctccaagactggaaa

SEQ ID NO: 18759 - DNA, 238 bp, Zea mays
gtgcggggtgagaaggcaatgcagctgctggagagtggcttgaaggtgaaggagtacgagctgctgaggaggaacttcagtgacactggctgctttggatttggtatccaagagcacatagatcttggcatcaagtatgatccatctactggtatctacggcatggacttctacgtcgtccttgagcgtgctgggtaccgtgtcgcccgtcgccgcaggtgcaagtcccgtgttggga

SEQ ID NO: 18760 - DNA, 236 bp, Zea mays
ccgacgccgagtttttgctccatcccgcatccaccgccagaatgtttctcacgaggacggagtacgaccgcggggtgaacaccttctcgccggaggggcggctgttccaggtcgagtacgccatcgaggccatcaagttgggatccactgcgatcgggttgaaaacaaaggatggtgttgtccttgctgttgagaaacgtgtgacctcgccactgctggaaccaagcagtgtggaa

SEQ ID NO: 18761 - DNA, 232 bp, Zea mays
cattgttcaatgccagactttaaagtacaacatgaagtcaagggctgggagaggctttacccttgaggagctgaaggctgctggcatcccaaagaagcttgctccaaccattggtatttctgttgatcaccgccgcaagaacaaatcccttgagggactgcaggccaatgtccagaggcttaagacatacaaggccaagctggttatcttcccaaggcgtgcgcgcaaggtg

SEQ ID NO: 18762 - DNA, 228 bp, Zea mays
gtgaccctccctcagccgcgtcgcgtcgcatcctacgatccaaagctctctctgctcgcagccatggcgaagaactacccgaccgtgagcgccgagtacagcgaggctgtggagaaggccaggcgcaagctccgagccctcatcgccgagaagagctgcgccccgctcatgctccgcctcgcgtggcactccgcggggacgttcgacgtgtcgtcgaggaccggcggt

SEQ ID NO: 18763 - DNA, 230 bp, Zea mays
cagatgggttctgttgcatttgctgtcatacaacttgttggaatcattgccgtgatgtctcaggttgcatggcaggtgttcgttgttttcattcccgtggctgctacgtgtttctggtatcagcgatactacattgataccgccagggagatgcaaaggctagtaggtgtctgcaaagctcctatcatacagcattttgccgaatcaataacaggatcgactaccatcag

SEQ ID NO: 18764 - DNA, 231 bp, Zea mays
cggacgcgtgggcggacgcgtgggcggacgcgtgggcggacgcgtgggcggacgcgtgggtgatgagatcaaggctgcggtcatggccgaggcagaaggtagcctcaagggcatcctgggttacgttgaggaggaccttgtttccaccgatttccagggtgacagcaggtctagcatctttgatgctaaggctggcattgccttgaacggcaacttcgtgaagctcgtgtc

SEQ ID NO: 18765 - DNA, 228 bp, Zea mays
ctacatctccgtccgcaagcgtcaccaggctgccccgggaggccgggaggaagcagatcggagaaggtgatctgttgtaatggctcgattgtacatcggcaacctggatccccgggtgaccgctcgggagctggaggacgagttccgcacgttcggggttcttcgcagtgtctgggttgctcggaaaccacctggctttgcgtttattgattttgatgataagaggga

SEQ ID NO: 18766 - DNA, 109 bp, Zea mays
catcagtagaatgaaacagttcagggcaatgaacaagctcaagaaagttgcattgaaggttgtggcagagaacttatcagatgaagagattatgggcctaaaagaaatg

SEQ ID NO: 18767 - DNA, 234 bp, Zea mays
ggtttttcagtcctccacgtacgggaaggtgcttgtcctcgacggagttattcaggtgacagagagggatgagtgcgcgtaccaagagatgattactcacctgcccctttgctccatcaaagaccccaagaaggtgttggttattggagggggggatggtggtgttttgcgtgaggtttcacggcatatctctgtggagcagattgacatctgtgaaattgataagatggtggt

SEQ ID NO: 18768 - DNA, 220 bp, Zea mays
ccacgcgtccggttgggcgtactgctcaggctaagtctcgccactcgaatggtcagggacgctggcctgtcaagtctgctaaattcattctagaccttctcaagaatgcagagagcaatgctgaggtgaaaggacttgatgtggataccctctatgtgtcgcacattcaagttaatcaggctcagaagcagcgaacgcaggacatacggtgctcatggac

SEQ ID NO: 18769 - DNA, 205 bp, Zea mays
gtcctcactcctcaccatttcccaaaccctacccatacccccgccgccgccgccatgccgcccaagctcgacccgtcgcaggtggtggaggtcttcgtccgggtgacgggcggcgaggtcggcgcggcgtcgtccctggcgcccaagatcggcccgctcggtctctccccgaagaagatcggcgaggacattgccaaggagacgg

SEQ ID NO: 18770 - DNA, 231 bp, Zea mays
caatgttccagttgatattgtgaagctgcaaattcctgattattttgacattgtgaagaccccaatggatcttggtactgtcaagaaaaagcttgaatctggttcatacacaagtccatcagattttgctgctgatgtccggctgacctttaacaacgctatggcttataatccgcgggggcatgctgtgcacgacatggccatccagctgaacaagatgtttgagagtcg

SEQ ID NO: 18771 - DNA, 192 bp, Zea mays
cgcgcctctacatttcttctctctctgctcctccgcctccgcctccgcctgatccatccaagacagggatcgccatgtcggactcggaggagcaccacttcgaatcgaaggccgacgctggggcgtccaagacctacccgcagcaggctggcaccgtccgtaagaacggcttcatcgtcatcaagaaccgtc

SEQ ID NO: 18772 - DNA, 169 bp, Zea mays
cagagcattcgagaagccgaagaaaattcgaagacgaggagcagctacactgcggacggacttcgggcatggagggccagttccaggttggcaaggaggaggtcatccaagcatggtacatggacgacagtgaagaggaccagaggcttcctcatcatcgggagcccaa

SEQ ID NO: 18773 - DNA, 235 bp, Zea mays
aaatcaacccatcctcgtttcctccgtctagcagcctctcaccctcatggccaagatcaagatcgggatcaatgggtttggcaggatcggaaggctggtggccagggtggccctgcagagcgacgacgtcgagctcgtcgccgtgaacgaccccttcatcagcaccgattacatgacctacatgttcaagtatgacactgtgcacggacagtggaagcaccatgaggtcaaggtg

SEQ ID NO: 18774 - DNA, 235 bp, Zea mays
cggacgcgtgggagctccttggggttgacccagctgatgtagatataatgatgggtacttttaccaagtcttttggatcatgtggtggatatattgccgcatcaaaggagataattcagcaccttaagcatagttgtccggcccatctgtatgctacttccatgtcgccaccagcagtccaacaagttatttctgctattaaagttatccttggggaggatggctctaacagagg

SEQ ID NO: 18775 - DNA, 224 bp, Zea mays
  unsure (1)..(224): unsure at all n locations
cggacgcgtggccgtcatcgatctcgtttcaaatccatccatcctcgtttcctccgtcccgcagcatcacaaccccatggccaagatcaagatcgggatcaatgggttcggcaggatcggaaggctggtggccagggtggccctgcagagtgacgatgtcgagctcgtcgccgtgaacgacnccttcatcagcaccgactacatgacctacatgtccagtacga

SEQ ID NO: 18776 - DNA, 230 bp, Zea mays
gttcttgcgcgtacgcgtacacatccccgatccgaatcgtcctcctcgcgagcctcgccgatcccccactcccctcccctcgcttcaagatgcagatctttgtgaagaccctcaccggcaagactatcaccctcgaggtggagtcttctgacaccattgacaatgtcaaggctaagatccaggacaaggagggcatccctcctgaccagcagcgccttatcttcgccggc

SEQ ID NO: 18777 - DNA, 195 bp, Zea mays
ggagattctcgccggcgtgaaccccatgctcgtcaagcgtctcacggagttccctccgagaagcagtcttgacccgagcaagtacggcgaccacaccagcaccatcagggaggcggacctcgagaacaagctcgagggcctgaccgtgcagcaggcgctgcacgacaaccggctctacatcctggaccaccacga

SEQ ID NO: 18778 - DNA, 229 bp, Zea mays
atcccgtcgcatcccatcccactaccacccatctcgtcgtccgccgattcgatccggttcttccaacccaggggctgtgatggcgacgaagaggagcgtgggcaccctcggcgaggcggatctgaaggggaagaaggtgttcgtgcgcgccgacctcaacgtccctctcgacgacgcccagaagatcaccgacgacacccgcatccgcgcctccgtccccaccatcaag

SEQ ID NO: 18779 - DNA, 224 bp, Zea mays
acactcgagaactccatttcgatctcatttgaaatcaacccatcctcgtttcctccgtctagcagcctctcaccctcatggccaagatcaagatcgggatcaatgggtttggcaggatcggaaggctggtggccagggtggccctgcagagcgacgacgtcgagctcgtcgccgtgaacgaccccttcatcagcaccgattacatgacctacatgttcaagtat

SEQ ID NO: 18780 - DNA, 223 bp, Zea mays
catttgggctctctgcatgttgtgtgtatgggggatcaccttatcgtcctcaagaaatggcattgagaagaggtgtggatattgttgttggaactcctggtcgtgtcaaggatttcattgttaaaggaactctcaatttgaaatgcttgaaattccgtgtccttgatgaagctgatgagatgctaaacatgggttttgttgatgatgtcgagctcattcttgg

SEQ ID NO: 18781 - DNA, 227 bp, Zea mays
cggacgcgtggcgccgccgccgctgccaacgccgcctgctgccgcagccgccatgggggcgtacaagtatgtgtcggaactatggaggaggaagcagtcggacgtgatgcgcttcgtgcagcgcgtgcgctgcatgggagtacaggcagcagccgtccatcgtccgcctcaccaggcccacccgccccgacaaggcccgtcgtctcggctacaaggccaagcaggga

SEQ ID NO: 18782 - DNA, 227 bp, Zea mays
ggccgaagaagaggagaagcgaacaagcaggcttcgagaacaagactgcagggggagggggaggaccaagcgaaaggggaactagagcaagatgggcggcgcactgctgcttgcgctcctcctcgtctctgctgctgccgcccctcaggtacttggagttggcaatggagacaatcacatgagaatcatccaggaggacatcatcgagacagtcaacaaccatcccg

SEQ ID NO: 18783 - DNA, 207 bp, Zea mays
agccggagaaggtgttcgtgcgcaccatcaccagccagttccaggccctcgtcggcatctcgctgctggagatcctgtccagccactcctccgacgaggtgtacctcggccagcgcgacaccaaggagtggacgtcggacgccaaggcgcaggaggcgttcaagcggttcggcgcgcggctgaccgagatcgaagaacgcgtcgtca

SEQ ID NO: 18784 - DNA, 233 bp, Zea mays
atcccccttgcaagtatagtctcggcggctctagaagacgatgggcaaggacgacgtgatcgagagcggcgctggcggcggcgagttcgctgccaaggactacacggaccctcccccggcgccgctgatcgacgcggctgagctggggtcctggtcgctgtaccgcgccgtgatcgccgagttcatcgccacgctgctgttcctgtacatcacggtggccaccgtgatcgggt

SEQ ID NO: 18785 - DNA, 236 bp, Zea mays
  unsure (1)..(236): unsure at all n locations
cccacgcgtccgggcgcagagaatccccaagcaaacaaacagggtagaggtagagggagaggagagaagagaagagnagaggagaggttgggtctgggacaccatggctccgatgaagctgtacggggcggtgatgtcgtggaacgtgacgaggtgcgcaacggcgctggaggaggctggctccgactacgaaatcgtgcccatcaacttcgccacggccgaacacaagagccccg

SEQ ID NO: 18786 - DNA, 231 bp, Zea mays
atacaaactaccactttattgtccctgaacttggcccaagcaccaagttcacatacgcttctcacaaggctgtttctgagtacaaggaggcaaaggcgctcggcattgatacagtcccagtgcttgttggaccagtgtcatacttgctcctctctaagcctgccaagggtgtggagaaatctttctctcttctttcacttcttggtagcattcttcccatctacaaggagg

SEQ ID NO: 18787 - DNA, 220 bp, Zea mays
cccagatccaattcgcgagttctccctcctctgcggccatggcgctctctgtggagaagacctcgtctggacgggggtacaaggtcaaggatctctcgcaggcggacttcggccgcctcgagattgagctggccgaggtcgaaatgcccggcctcatggcgtgccgcgccgagttcggcccgtccaagcccttcgccggcgctaggatctcggggtctct

SEQ ID NO: 18788 - DNA, 222 bp, Zea mays
cccacgcgtccggatgatatttactttacaagcaaaggagaatgacctgtcaaaatctattgactcatgtaacatggaggccagtgtagtcaagacttgggtaaatttcctcgaggatacatggcaacttcagttgtcatacaatgaacagaaggaaactaaaacgaatgacgagctggagagatgcacaagcagttttctgaagttgaccaagcatcatct

SEQ ID NO: 18789 - DNA, 231 bp, Zea mays
accacacgcggatcgaattaggctctccgagtctccggttccctcctctcggcggcggctcaggtccctctccatctccggcgtggcgcttggcgtctgacctcaacaagcaagaaagcaaatggcaggcggcacggttgcgcatgccaccctcaagggcccgagtgtggtgaaggagatcttcattggactgaccctgggtctgatcgcgggaggcatgtggaagatgca

SEQ ID NO: 18790 - DNA, 229 bp, Zea mays
gtgccatctgtgagtccctcgtcatcgtcgagtacgtcgacgagaccttcgacgggccgtccctcctcccggccgacccccacgaccgtgccacggcccgtttctgggcagacttcatggacaggaagctcctgaagccgttctggctggcgcactggacagagggcgacgcgcagaaggctcaggtggaagaggccaagcagaagctggcgctcatggaggcgcactc

SEQ ID NO: 18791 - DNA, 230 bp, Zea mays
  unsure (1)..(230): unsure at all n locations
ccgtttccttggataaccacgacgtccgcccgccccccggcaagcgaaaggagacantgccaacccagccatggagaaggcgatcgatcggcagcgggtcctcctggcgcacctcctcccctccccctccgccgcctcctcgcagcctcagcttgcggcgtcggcgtgcgcggccggggacagcgccgcctaccagaggtcctcctccttcggggacgatgtcgtcgtcg

SEQ ID NO: 18792 - DNA, 223 bp, Zea mays
ggaccgtggtaacgctggtgacaaggctcgagttattcaatcgttcctctttatgagtggcataaacacactgctgcaaacacttattggaacgagacttccaacagttatgaatgcctcttttgcatttgttgtcccagtgctgtcaatagcaaaagagattgaatcaaataacttcctaaatgaccatgagagatttaaacacacaatgagaacagcacag

SEQ ID NO: 18793 - DNA, 61 bp, Zea mays
ctcccagcaccacctcgccgcgatctccgtagcgtccgtcgcgtcgagcatcgatcatgtc

SEQ ID NO: 18794 - DNA, 225 bp, Zea mays
cggacgcgtgggcgcaagcaggacagggaaaatgtctcgagtaatatcaaatttagtaatgtatatgtgaagagtctgtcagatactgttactgatgatgagttgaaggagatgtttggaaaatatggaaccataactagtgctgttgttatgcgggatagcgatggaaaatccaggtgttttggatttgtcaattttgaaaatgcagatgctgctgctcaggct

SEQ ID NO: 18795 - DNA, 211 bp, Zea mays
cggacggtccgcccacgcgtccggcgacgccgagcgcgacgtggacacgtccatcttcgccaaggtggccgagttcgagcagcaggtccgcgcggcgctgcccaaggaggtggacgccgcgcgcgcggcgtgagagaacggcagccctctggtccccaacaggatcaaggagtgccggtcctacccgctgtaccggttcgtgcgcgaggag

SEQ ID NO: 18796 - DNA, 226 bp, Zea mays
ctcctctccgactccaccgccgtcacgccatctcgccgggggcggaaccccgaccgcgagtatggggaacatcttcgtgaagaagcccaagatcactgacgtcgatagggccatcctcaccctcaagacgcagcgccgcaagctcgcccagtttcaacagcagcttgagaaggtaatcgaagcagaaaaggaagctgcacggcagttggttcaacagaagaagaga

SEQ ID NO: 18797 - DNA, 227 bp, Zea mays
ctcattaattgtctcaggctctgatgactgttctgttatcttgtgggacctgacaagcctagtctttgtgaagcagctaccaaggttcccggcatcagtatccgcgctacatgtgaacagcctcactggtgagattctgactggtgctggtgttctttttgctgtttggaccaccaatggggactcccttcctgtggtgaacacctccaagtttccttctgacctca

SEQ ID NO: 18798 - DNA, 231 bp, Zea mays
cgttcttcagcgagactggttccggcaagcatgtgcccagggccatcttcgtcgaccttgagcccactgtcatcgacgaggttcgcactggctcgtaccgccagctcttccacccagagcagctcatctcggggaaggaggatgcagctaacaactttgcccgtggccactacacggttgggaaggagattgtcgatctatgcctggaccgtgtgcgcaagcttgcagaca

SEQ ID NO: 18799 - DNA, 244 bp, Zea mays
cctctgctctcccccacctcccggtccggcagcagagagcgggggtgcagagagatcgagatccggaggccgcgagtgggagcgccaccaccagcgactgcggcaatggcgggcacggtgacggtcccggggtcgtcgaccccctccacgccgctgctcaaggacgagctcgacatcgtgatcccgacgatccgcaacctcgacttcctggagatgtggcggcccttcttccagccctaccacc

SEQ ID NO: 18800 - DNA, 219 bp, Zea mays
gaccaatcaacaaagtgacgcgagcacgagcatccatcgtttccccttcttccccatcgcgtgccctcgccgcagccatcttccatggcggaccagctcacggacgagcagatcgcggagttcaaggaggccttcagcctcttcgataaggattgcgacggctgcatcactaccaaggagcttggaactgtgaatcgctcccttggcaagaaccccatt

SEQ ID NO: 18801 - DNA, 145 bp, Zea mays
ctttggaggcattacttccagaacacccagggtcttatctttgttgtggacagcaatgaccgtgaccgtgttgttgaagccagagatgagctccacaggatgctgaacgaggatgagctacgtgatgctgtgctgcttgtttttg

SEQ ID NO: 18802 - DNA, 238 bp, Zea mays
cggaccgtgggcgattcaagcgtttcccattcggagccctaatcctctctttccatactcgcggaagtgaccaccaccggcaggggaagcggaaggggagcacctcgggccaggcaagatggtgcttgcgcactcgggcgggagcatctcccgcgccctggcgcagatgagcaacgccacggtgatcgatgagaaggtgctcaacgactgcctcaacgagatctcgcgcgctctccta

SEQ ID NO: 18803 - DNA, 241 bp, Zea mays
cacacagcaaataccccacaaggccactccaaagagctagtagtggaaccgaagatgttcgggaacatcggaaagatccccatcatcggcgacctgacgggcagcaacaagaatgcgcacctcaagggcaacgtggtgctcgtgcgcaagaccgtgctcggcttggacgtcaccagcatcgccggctccctcctcgacggcgtcggcgagttcctcggccgcggcgtcacctgccagctta

SEQ ID NO: 18804 - DNA, 240 bp, Zea mays
cagatgcttccactcgcaaattcttcgaaacccgtagatactttggcctagaccctgaccaagtgacatttttccaacaaggcacacttccatgcgtctctgccgatggtagatttattatggagacaccatatagggtagcgaaggctcctgacggcaacggtggagtttatgctgcgctgaagtccaagaagctgatggaagacatggctgcgcggggagtgaaatacgtagactgct

SEQ ID NO: 18805 - DNA, 240 bp, Zea mays
ctctcctgcgctgcgccgtccttcacctccgccgccgaatccgagactctgatctcgggttcaccgcagcgcacagagcacccccgactcccgtcccgatccgcgctctcctctacgacgcttcagtcatggcaggaatggcacccgagggttctcagtttgatgctaagcactatgattctaaaatgcaggagctgctgagcactggtgagactgaggagttcttcacttcatatgatg

SEQ ID NO: 18806 - DNA, 238 bp, Zea mays
acgaaacatagctacctactactcaagtatccatccttattgagtacagtgttgatccatggactcggaaggagttgtagcagcaaaggtggcagatgagactactaaaccggcaatccaagaagacggcgccgagagcaaggccgggatgactgatctgctgatgctgaccgacaagtcgcagctgcaggcgctggcgatgctgctgcggaacaacgaggagctcatgatgagccag

SEQ ID NO: 18807 - DNA, 238 bp, Zea mays
ctttgagagccttgtggtgttcttcgaagatgctgcaggtgaagcttctacctacagcctagttacgatgttcgataagctggcctcctctccagaataccagcgccgagctgcaatggtggagcacttcaacagaagcaacaagtggaagaagcgtggcatttcttgtgtgccaattacatatgaggtcaatcttcggccaactccaggcaaggtgtctatcatgaatgatggttcc

SEQ ID NO: 18808 - DNA, 235 bp, Zea mays
cccacgcgtccgctctggcggacacctgtcgagcgaccttccatacaagctgtcgagcgacgacatcttcgtcaccgccggaggacgcaagccatcgaggtggtggtctcagtcctcgcgcaccgggcaccaacatactgctcccgaggccgggctatccgaactacgaggcgcgcgcagggctgcacaacctggaagttcgccggttcaatctgatccccgagagagggtggga

SEQ ID NO: 18809 - DNA, 210 bp, Zea mays
gtggggaggaagatacagcacatttgctgcttgggaaatttaaatggggtcacgcattcttgtctctaaacagagatctcctgaaagcatactcccaatgtgaaaatggagctgagattatcaatgtgcagaagtcatggttatcaagtaactcgagtgttcaaaagccacctgtaaacggggcagaggaatcacggcaaaacaaggagg

SEQ ID NO: 18810 - DNA, 235 bp, Zea mays
agcagagcggcagggcgccatggcggcatcggtggcgctgagcagcgggcaccggatgccggcggtggggctgggcgtgtggcggatggagaaggcggacatccgcggcctcatccacacagcgctccgcgtcggctaccgccacctggactgcgccgctgactaccagaacgaagctgaagttggtgacgcgctcgcagaggcattccagaccggactcgtcaagcgggaggac

SEQ ID NO: 18811 - DNA, 234 bp, Zea mays
cccacgcgtccgcccacgcgtccgggaaaggatgcggagagcgcttactgggaactcgttataaaggatatccaagatgcgtgcaaactttttgagcccatctacgacgagactgatggggctgatgggtatgtctccgtagaggtgtctcctaggttggcaaatgacactcaaggaactgttgaagcggcaaagtggttacacaaagtggtcaaccgccccaatgtctacata

SEQ ID NO: 18812 - DNA, 233 bp, Zea mays
aacagatcaaatcagagatggcaagtcgtagtagctctgcagaaggtgcaggcaggacgttgcctgtcaatctcaagttgatcaccgtgctgagcatcgatggcggcggcatcagagggatcatcccggccaccatcctcgccttcctggaagcgaactccaggaactggacgggccagacgctcgtatcgcggactacttcgacgtcgtcgccggcacgagcaccggcggtc

SEQ ID NO: 18813 - DNA, 230 bp, Zea mays
ccacgcgtccgtggtactgctacggcaaggcggtggcggacaggcggcgtgggagacggcccggcggcggggcgtggacctggtggtggtgaaccccgtgctggtggtgggccccctgctgcaggcgacggtgaacgccagcatcgcgcacatcctcaagtacctggacggctcggcccgcaccttcgccaacgccgtgcaggcgtacgtggacatgcgcgacgtggccg

SEQ ID NO: 18814 - DNA, 218 bp, Zea mays
cagatctgagacgagacgagttaccatctcatcccaactccggaacgaacaagttaccatctcatcccaactccgcctcgaccggatctcgtcggactcggatccgcccgaccaccccgcgccgccgcagatcaaagaagatggcagctgtcgacacattcctcttcacctcggagtctgtgaacgagggacaccctgacaagctctgtgaccaggtc

SEQ ID NO: 18815 - DNA, 232 bp, Zea mays
ttggcagtggcacatctatataggcaccccgcacccggaatccccactcccccacgacgccgtcctcgtccccgtcccgacgaattggaataggagaagcaaaagatgatggatctcgccgacagccagcaacagcggctcatcgccggcgcggctctgctggtcgccaccgtcgccttcctcaggctcctcctgagctcccgctccgggggcaagcgcctgccgcccacca

SEQ ID NO: 18816 - DNA, 230 bp, Zea mays
cggacgcgtgggcggacgcgtgggttgggctgtaccccagctgggtcagctggacgtttagtattatactgaacttttcagtctccatggccttatatgcattggttctcttctaccacttgtttgctaaagagctggcacctcacaagcctcttgcaaagttcttgtgcatcaaagggattgtcttcttctctttctggcagggttttgcgctcgatgttttaacccaa

SEQ ID NO: 18817 - DNA, 231 bp, Zea mays
cgacgcgtgggaaaaaaactgctcggttgctgctcctgctccgccgcgccggcatcatgtgtggcatcttcgccgtgctcggttgctccgactggtctcaggcaaagagggctcgcatcctcgcctgctccagaaggttgaagcacaggggccccgactggatcggcctctaccagcacgatggcactttcttggcgcagcagcggctcgccgtcgtctccccgctgtccg

SEQ ID NO: 18818 - DNA, 239 bp, Zea mays
gctccaagggccaagggaggctgcaggcaggttgtctccctccttcccacctgcaccacccctacccctgccccccatctcatccatcaatgggaaggtcaccttgctgcgatgagaatggcctcaagaagggcccctggacccctgaagaagaccagaagctcatggagtacatccagaagaacggccatgggagctggagggcgctgcctaggcttgccgggctcaacaggtgtggc

SEQ ID NO: 18819 - DNA, 249 bp, Zea mays
ccatccaatgccaaggaattgttcaatttgcgccattcaacagctagaaatgtgatagagagaacatttgggctattgaagatgaggtgggctatattaaggaaaaaactcatattttgacttacaaaatcagattaggatcatcaatgcttgttgcatattgcacaactttgtaagggataggcaaagagatatggatgatttacttttaggccaagttgatcaagtaatatctgttgaatctcatga

SEQ ID NO: 18820 - DNA, 245 bp, Zea mays
gtaaatcttctgggaatccactgctgatatacgatgagatcactcgaggtgatggtggaatgtatataaaaaattcttcagttgttgggtcatatcctttgcttctaatagctgcagaaatggttgttgctccacctgatgatgatagtgatgaagatgaggaagattctagtgaggatgaagctgaggaaagcacattggtacagcacaaagaagagattatgtcttcacctgacagcattgtt

SEQ ID NO: 18821 - DNA, 243 bp, Zea mays
gtgcacttgaggctgtgaaaacagtgagagcacagcccaaggctaatgatcaatacttgcccccatttgtgatagttgatgacagcggcaaagctgttggacctgtattagatggtgatgcagttgtcactatcaacttccgggctgatcgcatggttatgcttgcgaaagcactagagtatgcagattttaacaactttgaccgtgtacgtgtccccaaaattcgatatgctgggatgcttc

SEQ ID NO: 18822 - DNA, 232 bp, Zea mays
ggaccgtggagctgacatcttcgtgaccaccactggcaacaaggatatcatcatggttgaccacatgaggaagatgaagaacaatgccattgtctgcaacattggccactttgacaatgaaattgatatgctcggccttgagacctaccctggcgtcaagcgcatcaccatcaagccccagactgaccgctgggtgttcccgagaccaacactggcatcattgtccttgctg

SEQ ID NO: 18823 - DNA, 248 bp, Zea mays
gacaggcgtcttcgtactcgcctatctccgcgactcaaagctttccccaattcccccccttctcacatttctcaccaccgccgccgctccccccgttcaacaacaccatgagggagtgcatctcgatccacatcggccaggctggtatccaggtcggaaacgcgtgctgggagctgtactgcctcgagcatggcattcaggctgatggccagatgcccggtgacaagaccattgggggaggtgatgat

SEQ ID NO: 18824 - DNA, 244 bp, Zea mays
gaaatggtgggcctgctcctgaatctgttaccgacaagattttctctaatacaacgacaatctctgaatacctcatctctgaagacctaccagatgttgatatttctgttgtcggtgtcaccagcttcagtggacccgaagcccctttgatgtggatgtttttgactctagtgtagattacataaagttaatgaagacaatttttgacttcgaagcaataaaaaagctgctgacctccccaaag

SEQ ID NO: 18825 - DNA, 226 bp, Zea mays
cggaccgtggcgttagtgagaaagggtccaacccgaacaggaactccatcagggggttcgaggtggtagaccagatcaaggctgctctcgaggctgcctgcccgggcacagtctcctgcgccgacattctcgccctcgccgctcgtgattccaccgccctggttggtggcccatactgggacgtggcgcttgggcggagggactcgctgggcgcaacatccagggc

SEQ ID NO: 18826 - DNA, 246 bp, Zea mays
gaagcatatagcaccagcggaacacgggaacggcggaagcaaacaactagaaattccccagcccggttctttgcgtgcggttgatctcgtcggaggcccggccgcggttccccaatccgccatcgaattcgatggcggccaacgccgggaataagatccgcaacgccaagctggttcttcttggagatgtgggcgctggcaaatctagcttggttcttcggtttgttaagggacagtttgttgaat

SEQ ID NO: 18827 - DNA, 232 bp, Zea mays
  unsure (1)..(232): unsure at all n locations
cggacgcgtggggcattctcgaattacgattcccaatccagcaaaccctaccagccttttgcaaactcagagagggacccgatggcacccaaggcggagaagaagccggcggcgaagaagcccgcagaggaggagcccgcggccccggcggagaaggcccccgctgggaaaagccgaagganagaagcggctcccggcgggaaaatccgccggcaaggaaggcggtgttgac

SEQ ID NO: 18828 - DNA, 235 bp, Zea mays
gagcacattgacgagtttgaagtttttgatgtgaagccatttgttagtcgcctgttaggaatgggagattgggcaggctttatggacaagattcatgaagtggtacctacggatcaacagcctgagcttctgcagaaactgtctgaaggaagctttactctcaggcttatgtatgagcagttccaaaacattctgaaaatgggtcctattggccaggtcttctctatgttgcctg

SEQ ID NO: 18829 - DNA, 237 bp, Zea mays
gcaaggactattgggaggatggagcttcttgtgctggccaccctgaaatggagaatgcaggctgtgacccccttcactttcatcagctacttcctcgacaagttcaatggtgggaagccgccgagtatggcactagcgtcacggtgcaccgagatcataattggcacactcaaaggctctacattcttgtcattcagaccatctgagattgccgcggcctcagctctagcagcagtt

SEQ ID NO: 18830 - DNA, 238 bp, Zea mays
cccacgcgtccgcattcactcacacagcaaatacccacagtccacagcaagaaccgaagatgttcggaaacatcggaaagatcccgatcatcggcgacctgacgggcagcaacaagaatgcgcacctcaagggcaacctggtgctcatgcgcaagaccgtgctcggcttcgacgtcaccagcatcgccggctccctcatggacggcctcggcgagttcctcggccgcggcgtcacctg

SEQ ID NO: 18831 - DNA, 230 bp, Zea mays
cgacgtggtgtgtgcttgatccttgacgagcgggagagagagagagaggaagacgagaggcagcgaaggaaacagtagttcttcagttaggagggcacaggaggaggaagatggcgtcgaagaggatccagaaggagctcaaggatcttcagaaggaccctcccacctcgtgcagtgcaggtcctgttggtgaagatatattccactggcaggcaacaataatgggtcca

SEQ ID NO: 18832 - DNA, 230 bp, Zea mays
agggctgctagtttcaacatcattcccagcagcactggagctgctaaggctgttggcaaagtgcttcctgtcctcaatggaaaattgactggaatgtctttccgtgtcccaactgtcgatgtttctgttgttgatctgactgttaggcttgagaagtctgccacctatgatgagatcaaggctgcggtcaaggccgaggcagagggtagcctcaagggcattctgggtta

SEQ ID NO: 18833 - DNA, 234 bp, Zea mays
  unsure (1)..(234): unsure at all n locations
cccgctcgcagccatgtcgccgtcggagccgacgcgnggaggagagcgtgtacatggccaagcttgcggacaggcggagcggtacgaggagatggtcgagttcatggagcgcgtcgccgctacgccggggacaccggcggcggggacgagctctcggtggaagagcgcaacctgctgtccgtcgcctacaagaacgtcatcggcgcccgcatgcctgcgtggcggatcatctcc

SEQ ID NO: 18834 - DNA, 232 bp, Zea mays
cccacgcgtccgattcctcccaacaccacctcgccgcgatctccgtagcctccgtcgcgtcgagcatcgatcatgtcggcctactgcggaaagtacaaggatgagctcatcaagaatgctgcctacattggcacccctggcaagggtatccttgctgctgatgagtccactggcaccattggcaagcgcctttccagcatcaatgtcgagaacgttgaggagaaccgccgtg

SEQ ID NO: 18835 - DNA, 231 bp, Zea mays
ctactactcaagtatccatccttgttgagtacagtgttgatccatggactcggaaggagttgtagcagcaaaggtggcagatgagactactaaaccggcaatccaagaagacggcgccgagagcaaggccgggatgactgatctgctgatgctgaccgacaagtcgcagctgcaggcgctggcgatgctgctgcggaacaacgaggagctcatgatgagccaggcgatcaa

SEQ ID NO: 18836 - DNA, 235 bp, Zea mays
cattcgagaagccgaagaaaattcgaagacgaggagcagctacactgcggacggacttcgggcatggagggccagttccaggttggcaaggaggaggtcatccaagcatggtacatggacgacagtgaagaggaccagaggcttcctcatcatcgcgagcccaaagaattcatccctctcgacaaactttccgaactaggaatattaagctggcgcctaaatgctgatgattggg

SEQ ID NO: 18837 - DNA, 225 bp, Zea mays
acgagaggcagcgaaggaaacagtagttcttcagttaggcaggagggcacatgaggaggaagatggcgtcgaagaggatccagaaggagctcaaggatcttcagaaggaccctcccacctcgtgcagtgcaggtcctgttggtgaagatatattccactggcaggcaacaataatgggtccatctgatagcccatattctggtggagttttcctagttacaatcc

SEQ ID NO: 18838 - DNA, 228 bp, Zea mays
accacagccaccgcgatggcgcagatcatcgatggcaaggccatcgccgccgacgtccgccgcgaggtcgccgccgatgtggccgcgctctcgtcggcccacggactcgtgccggggctggccgtggtcatcgtggggagcaggaaggactcgcagacgtacgtgaacatgaagcgcaaggcgtgcgccgaggtcggcatctgctccatcgacgtcgacctcccggag

SEQ ID NO: 18839 - DNA, 229 bp, Zea mays
cccacgcgtccgctgatgcaattgaggggacaatacgtgatactattgaggatacactgacatggccgaatcgcataattgttcccattgtacctggagactatagtgacttggagttgaaacctactggggtattagaagtaaaactggtggaagctagggacctaaagaacaaggatcttgtgggaaagtcggacccttttgcattgatatacatacgtccattgca

SEQ ID NO: 18840 - DNA, 229 bp, Zea mays
ggaagtacctcctgagcttccagaaccagcactggggataaactttgcccgtgatggaatggtcgaaaaagactggttgtctctagttgcagttcatagtgatgcatggctcctgtctgttgcattctattttggagctcgttttggatttgacaaagatgccaggagaaggctcttcaccatgattaacaacctgcccactgtttatgaagttgtgacgggggttgct

SEQ ID NO: 18841 - DNA, 228 bp, Zea mays
gggttatgtgggaccagaaaacaggacgatccagagggtttggttttgtttctttcaggaaccagcaggatgctcaaagtgcgataaatgacttgaatgggaagtggcttgggaaccgtcaaattcgttgcaattgggcaacgaaaggtgctaatgctggtgaagagaaacaaattctggacactaaggttgacctgtcaaatggttcatcagaatctggaaaagaga

SEQ ID NO: 18842 - DNA, 228 bp, Zea mays
gcgccatcgacttcatctcggattgaagcaatgtcgtcggacgatgaggtcagggaggagaaggagctcgacctctcctccaacgacgttgtcaccaagtacaaggctgccgccgaaatcctcaacaacgctctgaagattgttgtgtctcagtgcaagccaaaagtcaagattgttgacctttgcgagaagggcgactctttcataagagagcaaactgggaatgtt

SEQ ID NO: 18843 - DNA, 230 bp, Zea mays
cactctccgcttcccgctccgatcgacctgctccctccccaccaccgagcccatggcggaccagctcaccgacgaccagatcgccgagttcaaggaggccttcagcctcttcgacaaggacggggatggttgcatcacgaccaaggagctgggcactgtcatgcgctcgctggggcaaaatcctacagaggctgagctccaggacatgatcaacgaggtcgatgctgatg

SEQ ID NO: 18844 - DNA, 224 bp, Zea mays
ccacggtccgcgaccgtggctagaacgttgaggagaaccgccgtgccctccgtgagctcctaagctgctgccctggtgctctccagtacatcagcggtgtgatcctcttcgaggagaccctgtaccagaagaccaaggatggcaagccttttgttgatgtcctcaaggagggaggcgtcctccctggcatcaaggttgacaagggcaccattgaggttgttggc

SEQ ID NO: 18845 - DNA, 216 bp, Zea mays
cggacctggtctgagatcgcgagccggccgcccttttttttttttttttttgcatagatcgtggtgaaaaaggaaattttcactttagagatacaattccttggacctgtctcgaatgcacataatgtgaatccattacaactcaacaaacgtgcttattattttactacaccccacgcaattattactgccacacgtctaagactcatgcattct

SEQ ID NO: 18846 - DNA, 218 bp, Zea mays
ggcaccatctcttgccgcaccccccattcgaacgccggagctcgacaaggacgaccgacgacgcacgcggagatccggcgtactgcaaattttgaaaactgaactgtaagatggcatcagcagagctttcccgtgaggaaaatgtgtacatggcgaactcgctgagcaggcggagaggtcgaggagatgttgagtcatggagaaggtaccaagactgt

SEQ ID NO: 18847 - DNA, 224 bp, Zea mays
gatcttgctgcatctcttagcactcttcagtctcttgaggccgttgctggcaaggacaaacttgtggtgtcaacctcctgctcactgatgcacaccgctgttgatcttgtcaatgaaactaagctggatgatgagattaagtcatggcttgcatttgctgcccaaaaggttgtcgaggttaatgcccttgcgaaggctttggcaggccaaaaggatgaggctta

SEQ ID NO: 18848 - DNA, 227 bp, Zea mays
gttcatggaaggaaaggagaagaacattgctgtgattgttggcacagtcacagatgacaagaggatccaagaggttccagcaatgaaggttactgccctgaggttcaccgagacggcaagggccaggattgtcaatgctggtggggagtgcctcacatttgaccagcttgctctccgtgctccacttggcgagaacacagtcctcttgaggggccccaagaatgccc

SEQ ID NO: 18849 - DNA, 214 bp, Zea mays
cggacctgggtgcataagggcacttatgattttatttacttgccaattgattttaagaataaatgtaatgtcggctatgctttcatcaacatgaccaatcctcagcatatcattccgttttatcagagttttaatggtaaaaagtgggagaagtttaacagtgagaaggtggcatcacttgcttatgccagaatccaagggaaaacagccctga

SEQ ID NO: 18850 - DNA, 224 bp, Zea mays
ggagcattcgagaagccgaagaaaattcgaagacgaggagcagctacactgcggacggacttcgggcatggagggccagttccaggttggcaaggaggaggtcatccaagcatggtacatggacgacagtgaagaggaccagaggcttcctcatcatcgcgagcccaaagaattcatccctctcgacaaactttccgaactaggaatattaagctggcgcctaa

SEQ ID NO: 18851 - DNA, 225 bp, Zea mays
cccacgcgtccgcaagagagcacgctactactcatcactcgccaacgtgcagagatcagggaagcggcactccatccactgactgaccgctcatggcgaaggtccacctctacgtcgccgcggcttgcgccgtcgtcctcgcgctcgccaccccggccctcgccggtgaccccgacatgctgcaggacgtctgcccggctgactacgcctccccggtgaagctga

SEQ ID NO: 18852 - DNA, 240 bp, Zea mays
ggacgcgtggcggacgcgtgggcaaggaccgctctgctttgagaatgatagaggatgctgaggagaggggattgatttcgcctggagtcacaacactggtggagccgacgagtggtaacatggggttagggttggtcctcttcgctattcagagaggttacaggctcattgcagtcatgccggctaaatactcgcttgacaagcagatcttgctgaggttcatgggcgcggagtatactt

SEQ ID NO: 18853 - DNA, 239 bp, Zea mays
ggacgctggcggcctctgtcccttgcaagttcaatctcacctccaaccatgggtacagagcagtcgcgcatcaacattgtggttattggccacgttgactctggcaagtcgaccaccacacgacacctgatctacaagcttggaggcattgacaagcgtgtgatcgagaggtttgagaaggaggctgctgacatgagcaagcggtccttcaagtacgcatgggtgctcgacaagctcaa

SEQ ID NO: 18854 - DNA, 241 bp, Zea mays
atgaaagtgaggcatcagcagtggatggcggagcatggccgcacctacagggacgaggctgagaaggcgcaccggttccaggtattcaaggcgaacgccgattttgttgacgcgtccaatgccgcaggtgacgacaagaagagctatcggctggagctcaacgagttcgccgacatgaccaacgacgagttcatggccatgtacactggcttgagaccagtcccggcaggggcaaagaaga

SEQ ID NO: 18855 - DNA, 242 bp, Zea mays
atcttgcaatcacaacgaacaaaagctctcgatctcaccgacaccgaggaagaagagatcaatggcgtccgagcagggagtcgtgatcgcgtgccacagcaaggctgagttcgacgcccacatgaccaaggcccaggaagccggcaagctggtggtcatcgacttcactgccgcctggtgcggtccatgccgcgccatcgccccactgttcgtcgaacacgccaagaagttcactcaggtcg

SEQ ID NO: 18856 - DNA, 243 bp, Zea mays
cccacgcgtccgatcctgttagccagccctaaacccttctgtcccgatggcgtcgtcgtcgtcgccgccgccgccgaagctgccgattcccggccgccgcaacatactcatcactagcgcacttccgtacgtcaataatgtcccgcacctagggaacatcatcggctgtgtgctcagcgcagacgtgttcgcgcggtactgccggctccggggttacaacgctatctacatatgcgggacgga

SEQ ID NO: 18857 - DNA, 245 bp, Zea mays
gagatctgccccctcgccctcgccctgctccaatccccatctccttgcggcccgatccaccctgctccaatcccccggcgatggtcgtgtgcaaatgccgaaaggcgacgagggtttactgcttcgtccatcaggtccccgtctgtggcgtgtgcatatgcttcccggaacatcagctatgtgtggtgaagaactatgctgaatgggttgttaattctgagtatgactggccacaacactgttcg

SEQ ID NO: 18858 - DNA, 236 bp, Zea mays
cgtcatcctcctagctcctctactcgccagtcgccatgggcaagattaagatcggaatcaacggcttcggaaggatcggcaggctcgtggccagggtcgccctccagagcgaggatgtcgagctcgtcgccgtcaacgaccccttcatcaccacggactacatgacctacatgttcaagtacgacaccgtccacggccactggaagcacagcgacatcacactcaaggactccaag

SEQ ID NO: 18859 - DNA, 234 bp, Zea mays
attccagaaggtctcatcccagtgcaactcctatgggtcaatctagttacagatggccctccagcgactgctttggggttcaacccgccagataaagatatcatgaagaaacctcctcgaagaagtgatgactcgttgatcactccttggatcctgtttcgctatatggttattggcctttatgttggggttgcaacagtgggaatcttcatcatctggtacacgcatgacagt

SEQ ID NO: 18860 - DNA, 230 bp, Zea mays
caaggaagaacgaagagagatcagcgacttaacaacaataatggccaccgccatagttcccacggacgccgagctgctgcaggcgcaggccgacctgtggcgccacagcctctactacctgacatccatggcgctcaagtgcgcggtggagctccacatcccgaccgccatccacaacctaggcgggtctgccacgctgccggacctcgtggccgcgctgtccctgccag

SEQ ID NO: 18861 - DNA, 236 bp, Zea mays
ggctaatcttttcacaatctttagcggtgagcccctgactgtccagaggccaggaacacagactaggagtttctgctatgttgccgatatggtttgtcttccactgcattctcaattggtttgttgttggtcagaagactgtcagtgcactatatcaactatgccattcattgcaggttgatggtcttattaagctgatgaatggaaacaagactggaccgattaacttggggaac

SEQ ID NO: 18862 - DNA, 236 bp, Zea mays
ggacctttacgggaatatcgtcctcagtggagggacgaccatgttccctggcatcgctgacaggatgagcaaggagattactgccctcgcgccgagcagcatgaagatcaaggtcgtggcgcctcctgagagaaaatacagtgtctggattggtggctcgatccttgcgtcgctcagtacgttccagcagatgtggatatccaaggatgagtacgatgagtctggccctgctatcg

SEQ ID NO: 18863 - DNA, 237 bp, Zea mays
cctgctctctcgctctcctcgctctcagaccacagttgccgccgccgccgccctaagccagggtgctgaggctttcgttggcctcttcgccggcagcgagcacccaccagcagttctgtagaaatggctgatggtgaggacatccagcctcttgtctgcgacaatggaaccggaatggtcaaggctggttttgccggcgatgatgcaccaagggctgtattccctagcatcgttggg

SEQ ID NO: 18864 - DNA, 238 bp, Zea mays
ctcaacacagcacaggcagctcgagagagagagagagagaaagatgtcgtggttcgggcaccaccaccacaaccagccggctcccccggcgtcgggccccaaccaggtgttcaagatcttctgccgcgccaacgagaactactgcctggccgtccgcgacgcgccgtcgtgctggccccggtcaaccccaaggacgaccaccagcactggtacaaggacatgcgcttcagcacccggg

SEQ ID NO: 18865 - DNA, 242 bp, Zea mays
agtttaccaaatatgctcacttcattcccctataccatccttacacgcctagctcagttgctcagacgttcatgactcatgtgtataggttgcatggtcttccagcttccattgtttcagatagggatccagtcttcaccagcacattttggcaacaactcttcaagctgattggaaccgaattaaaactcagttcctcttacctctcccaaactgatggccaaacggaacgtcaaccaatg

SEQ ID NO: 18866 - DNA, 232 bp, Zea mays
ccacgcgtccgcgttcggagcgcacacacacgcaaccagatctcccccaaatccagccgtcggcacctccgcttcaagatgcagatctttgtgaaaaccctgactggcaagactatcaccctcgaggtggagtcgtctgacaccattgacaacgttaaggccaagatccaggacaaggagggcatccccccagaccagcagcggctcatcttcgctggcaaacagcttgagg

SEQ ID NO: 18867 - DNA, 213 bp, Zea mays
  unsure (1)..(213): unsure at all n locations
agcaaagcgaagcnagcgcacagagatctagctgagctactagctatagcagcagctgctgcaggtctcctgacatggcgaacaggacatcgaagcatcggggcccgaggccggcgagttctcggccaaggactacacggaccctcggccggcgccgttcatcgacgcggatgagctcaccaagtggtccctctaccgcgcggtcatcgccga

SEQ ID NO: 18868 - DNA, 235 bp, Zea mays
ctacaatcctaaaaccatctgcttcagccttcagctagccccaagtttagtcggccgatcgatcactgaagtagtaatggcctccgccaacagctggaccctcgagatcgcgtcgccggtggccccgcagcgcctgttccgcgccgccgtgatggactggcacaccctggcgcccaaggtcgcctcccacgtcgtcgccagcgcgcacgccgtggagggcgacggcggcgttggc

SEQ ID NO: 18869 - DNA, 136 bp, Zea mays
ggggaaaggttacgagggtgtggtcactcgttggggtgtcacccggcttccccgcaagacccacaggggtctccgcaaagttgcttgtatcggtgcatggcatccggctagggtctcctatacggttgcccgtgct

SEQ ID NO: 18870 - DNA, 226 bp, Zea mays
ggtgcgtcaagcctccgatcatctacggtgacgtgagccgccccaaccccatgaccgttttctggtcgaagacggcgcagagcatgacgtctcgcccaatgaaggggatgctgactggcccagtcacaatcctcaactggtccttcgtccggaatgaccagccgaggtttgagacttgctagcagatcgctcttgcgatcaagaaggaagtcgaggatctcgatgc

SEQ ID NO: 18871 - DNA, 228 bp, Zea mays
cccgaccccgccgtcgtgatgaggccggcgctgctcaagtccacggccgagctcctccgccgcagccgcggctacgcctcctcggccaacccggagcggaaggtggccatcctgggcgctgcgggcggcatcgggcagccgctctccctcctcatgaagctcaacccgctcgtctcctccctctccctctatgatatcgccgggacccccggcgtcgcggccgacgtc

SEQ ID NO: 18872 - DNA, 224 bp, Zea mays
ggacgctggtgcccgttgattgacaaggaggagctgagggccatggcgaccgagaagcccatccagtacaacgcctggatcagctcctgctcccaccgtgttcgcatcgcactcaacctcaaaggtgtggattacgagtacaagtcggtaaaccctaggacagatccagattatgaaaaaatcaatccaatcaaatatattccagcattagtagatggggacat

SEQ ID NO: 18873 - DNA, 229 bp, Zea mays
cattgcccattgccattccttccttcctccacagagaaatccgatccgcggagatttgacccaaccagatcatatcacacacgtaatcccatcccattccgcccgcaacagcagcaccaccggtgggaagaagaagatgaagaaggccacttcgctctccgagctgggcttcgacgccggcgacgcgtcgtcgggcttcttccgccctgtgtccggcgactcgtcgacg

SEQ ID NO: 18874 - DNA, 212 bp, Zea mays
cccatctcccagatccaattcgcgagttctccctcctctgccgccatggcgctctctgtggagaagacctcgtctggacgggagtacaaggtcaaggatctctcgcaggcggacttcggccgcctcgagattgagctggccgaggtcgaaatgcccggcctcatggcgtgccgcgccgagttcggcccgtccaagcccttcgccggcgcaag

SEQ ID NO: 18875 - DNA, 213 bp, Zea mays
gtagagagagatatttctgcctccctatcgagggtcgtccccgatggcctttggtcgcagaccatctttgctgcttgtctatgctgagaataaatgtgaacggtgcccctggacgctggatccatgctggttttggacacggttgtctttttgtgtttaacttatctgctgccgtcctgtaacgaattcgctaagtttaagtcctttggtgct

SEQ ID NO: 18876 - DNA, 225 bp, Zea mays
cccaaatccccaaagcctccgacccccttcctctctccctccgccgccgctgcgcacgcagggaacaagcgacatgggcgtctacacctttgtgtgccgcaacaacggcggcgagtggaccgccaagcagcactccggcgagatcgaggcttccgccgctaccccatacgagctgcagcgccgcctcgtcgctgccgcctccgcggccgactctgcctacggcgt

SEQ ID NO: 18877 - DNA, 223 bp, Zea mays
cggacgcgtggtgcggcataatcattggtggtgctctcttatttatgaccccattatttactgatataacccagtgtgcattggctgcaattgtgatttctgctgttactggcctggtagattatgaagaggccatcttcttgtgggctattgataagaaagatttctttttttgggcaatcacatttatcacaacattagtttttggcattgagattggcgt

SEQ ID NO: 18878 - DNA, 224 bp, Zea mays
cccacaccaaccaaccaacctcctctgcctgccgcttctcctgctgcgggcgggcactgctgcaagtactagaggaggacatccgcttccattactgcgcctgcggaggatcggaggaaccagtagcggaggcttcgattttcggcgggcgcaataaatttcccgcatggctcggagggccgcgtcctcgctcgtctcccgctgcctcctggcgagggcccctg

SEQ ID NO: 18879 - DNA, 172 bp, Zea mays
gggttttgctgctctccgaccccgagctccgaaggccgcagcatcaggcgcgccccccctcgcgtgtgaccgagatggcgctgccgaatcaggggaccgttgattaccccagcttcaagctcgtcatcgtcggcgatggtggaactggtaaaactacatttgtgaagaggca

SEQ ID NO: 18880 - DNA, 228 bp, Zea mays
cggacgcgtgggggtgtacacaacttctttgttacgtttattgaggtcttgcgtgacaggcctgctggtcatgattgggagcttgaacctggagtcacgtgtggtgactatttgtttgggatgttgcagggaacccgttctgctctttatgcaaatgaccgggagtctatctctgttactgtgcaagaggtaactcctagagctgttggagcactgattgcactttat

SEQ ID NO: 18881 - DNA, 225 bp, Zea mays
cccacgcgtccgggaaaatggaggagcataaaccaaaggagcagaggcccaaggccaacgagaacaagcctgtgatgaacgaatgaatatctccagaagctttgttcaatgtgcaaccaaatgcgatgtccgtttgctctggttagcttaaaaccaacgcttccaataatcctattggtgtcttagtttccccttatagtgttatttgctcggcttgaacatggc

SEQ ID NO: 18882 - DNA, 223 bp, Zea mays
gcagttccccgaccacaccgttcctccgagcccaggagcagccccgcgccaggaggaagtttgttcttttaacaatatgtcgagggaggagaatgtttacatggccaagttggctgagcaggctgaaaggtatgaggagatggttgagtatatggagaaggtggctaagactgtagatgtggaagagctcactgttgaggagcgtaaccttctgtctgttgca

SEQ ID NO: 18883 - DNA, 65 bp, Zea mays
ggttcgtgaggttctccggggttcggtttcgtgggtgggcggatcgagatcgcggcgtcggatgt

SEQ ID NO: 18884 - DNA, 219 bp, Zea mays
cggacgctggacggacgcgtgggcgccgtctgccttctgcgcctccatttcggcctctgtccctcgcaagttcaatctcacagccaaccatgggtaaagagaagtcccacatcaacattgtggttattggtcatgtcgactctggcaagtcgaccaccacaggacaccttatctacaagcttggaggcattgacaagcgtgtgatcgagaggttcgaga

SEQ ID NO: 18885 - DNA, 218 bp, Zea mays
cccagacccagcagctattgtggtcgtccctcagccgcgtcgcaccgcatcgcattctacgattcgaagctctctctgctcgcagccatggcgaagaattacccaaccgtgagcgccgagtacagcgaggccgtcgagaaggccaggcgcaagctccgcgccctcatcgccgagaagagctgcgcgcccctcatgctccgcctcgcgtggcactccgc

SEQ ID NO: 18886 - DNA, 216 bp, Zea mays
attggcttcgcgctgaatacaattgctattttctaccgctcattagcagcaataccatttggaacaatggttgtcatgtttgtactttgggctttcatctcctttcccttggtgcttttgggaactgtcgttggtaggaactggagtggagctcctaacaatccctgccgagtaaagactattccacggcctattcctgagaagaagtggtacctt

SEQ ID NO: 18887 - DNA, 219 bp, Zea mays
atcccacaccacatcctcccctcattcctccttgggttcccagcccgtgcgccccgcctgtcgcagtcgcaccgcagccgccggccatggcctgcctcaccgacctcgtcaacctcaacctctcggacaccacagagaagatcatcgccgagtacatatggatccgtggatctggcattgatctcaagagcaaagccaggaccctcccgggcccggtaa

SEQ ID NO: 18888 - DNA, 251 bp, Zea mays
caccgggcacaccccccgagctcagcttagctccactccagctccaatcacagtcgtgaccagagcgcgagagctagctagagggccgtgaaaatgccgatcaataggatcgccctggggagccaccaggaggtgtaccacccgggcgccctcaaggcggcgttcgctgagttcatctccaccctcatcttcgtcttcgccggccagggctccggcatggccttcagcaagctgaccggcggcggcccgac

SEQ ID NO: 18889 - DNA, 248 bp, Zea mays
cccacgcgtccggggcgacgaaaatggctccaacgaccgccaccaaggacgacagtggctacggcgacgagcgccggcgcgagctgcaggcgttcgacgacacgaagctgggggtgaaaggcctggtggactccggcgtcaagtccatcccgtccatcttccaccacccgccggaagccctgagcgacataatttctccggcgcctctgccgccgtcgtcgtcgccctccgccgccgccatcccggtg

SEQ ID NO: 18890 - DNA, 240 bp, Zea mays
cccacgcgtccgcccacgcgtccggaaaccaaggattgatccaggagcttccggaaggcgaggcgcgcgcgcacgtcgaggtgctggtgccggtgccgcccatggatcgggctcgcggatccgcgttcctgctcggcgtcctgctcgcaggatccttgttcgcgttttcagttgccaaagaggagaccaagaagctcgggaccgtgatcggtatcgatctcggtaccacctactcctgtg

SEQ ID NO: 18891 - DNA, 241 bp, Zea mays
agattgttggctctactcttcgggatttagcaaatgatagcatggaacttgtgacaaactttgaatcagacaaatctcctgcagaatttgctaaattttataaagcagatgaacttctaggaggacatgttataatgcttggcgcaaatccttcaagccaggctgctgcactggaggcactacgtgcatatcctggtggtttgcaagttggaggtgggataaatttggagaatgcaatgtc

SEQ ID NO: 18892 - DNA, 244 bp, Zea mays
cagcagatgagctaaagcctgtaattggtaatctccatccatcagaatacttctatgccaagcaacaagccgactatgtaatatctcaggctgacacgaacaaagatggacaattgagcatgaatgagatgatcgagaacccctatgtcttttacaatgctttattcacagaagatgattatggctttcacgacgagctccgttagttcccaagtcaacagcacaaagctttatggaatcacca

SEQ ID NO: 18893 - DNA, 230 bp, Zea mays
cccacgcgtccgttttgagacaactgtaacagatgtcctgaacatgtatacaatgatcactggaaagactgtggatcttagtgtggatttgagtgcagctagtgctgctgaagaatactgatttcagtcataatgtttatcaaagatcacatcattggggacagcacatgaccaaacttcaatgagtggctagtatgagtttagtcggttcaagattataccatgccgac

SEQ ID NO: 18894 - DNA, 216 bp, Zea mays
cgcagtgtgcatgcatataagagcaacaagatactggcgcagaggagcaatgcccggcatggatgccttcgctgctgtgtcactactcgccacactctttctggttcgtgcggcactgcccatcctccggcggcggctgcggacgccatgacgccgacggactattggcgagcggtgcttcctgagaccccgatgccccgagccatactcgaccta

SEQ ID NO: 18895 - DNA, 245 bp, Zea mays
cccacgcgtccgcccacgcgtccgccccgctccgcctccactcctcgcgccgctgccgcatctcctctacaggtaagaaggagagaaagagggcgaaatggtgaagcacaacaacgtcatccccaacgggcacttcaagaagcactggcagaactatgtcaagacatggttcaaccagcccgcccgcaagcagaggcgccgcatcgcacgtcaaaagaaggctgtgaagatattcccacgaccaa

SEQ ID NO: 18896 - DNA, 232 bp, Zea mays
tgatgttttcgactgctggttcgagagtgggtcaatgccatatgcctacattcactatccatttgagaatcgggaactatttgaaaagaactttcctggcaattttgtggcagagggtttagatcaaacccgtggatggttctatactctgatggttctctcaacagcactgtttgggaagcctgcatttaaggatcttatatgcatgggcttgtcttggctgaggatggta

SEQ ID NO: 18897 - DNA, 237 bp, Zea mays
cccacgcgtccgcggacgcgtggtggtgttcctgcacggcttcccggagctctggtactcgtcgcgccaccagatggcgcacctcgccgcgacgggctaccgctgcgtggcgccggacctccgcggctacggcggcaccgcgcggccgcccgacgtcgcgtcctactccgccttccacgtcgtcggcgacgtcgtcgcgctgctcgacgcgctcgacatccagaacaaggtgttcgt

SEQ ID NO: 18898 - DNA, 241 bp, Zea mays
cctaaaaccatctgcttcagctagccccaagtttagtcggccgatcattcactgaagtagtaatggcctccgtcaacagctggaccctcgagatcgcgtcgccggtggctccgcagcgcctgttccgcgccgccgtgatggactggcacaccctggcgcccaaggtcgcctcccacgtcgtcgccagcgcgcactccgtggagggcgacggcggcgttggcagcgtcaggcagttcaactt

SEQ ID NO: 18899 - DNA, 241 bp, Zea mays
gggggcttcacctgctgtatctcattaccatctgcatctggttgcccgttgattgagaaggaggagctgagggccatggcgaccgagaagcccatcctgtacaacgcctggatcagctcctgctcccaccgtgttcgcatcgcactcaacctcaaaggtgtggattacgagtacaagtcggtaaaccctaggacagatccagattatgaaaaaatcaatccaatcaaatatattccagcat

SEQ ID NO: 18900 - DNA, 242 bp, Zea mays
cccacgcgtccgggttacatggcacctgaggttctcaatggaaatccctacaacaggaaatgcgatgtttacagcttcgggatctgtttgtgggagatatactgctgtgatatgccatatcctgacttgagcttttctgaggtcacgtctgcggttgtccgtcagaacctgaggccggagataccacgctgctgcccgagctctctatcgaacgtgatgaagcgctgctgggacgccaaccc

SEQ ID NO: 18901 - DNA, 235 bp, Zea mays
gtggctggtttccagtgggcatcgaaggagggtgcactggctgaagagaacatgcgcgggatttgcttcgaggtctgtgatgtcgttcttcatgctgatgctatccacaggggtggtggccaggtcattccaactgccaggagggtcatttatgcttctcagctcacagccaagccgaggctgctggaaccagtttacctggtggagatccaggccccagaaaatgcactgggtg

SEQ ID NO: 18902 - DNA, 244 bp, Zea mays
aacagcagagcagaggtcaacaagacgagacaagagaatgcctgtgagcaggatcgccgtgggtgctccgggcgagctgtcccaccccgacaccgccaaggccgccgtcgccgagttcatctccatgctcatcttcgtcttcgccggctcaggatcgggcatggccttcagtaagctcacggacggcggcgccaccactcccgccggcctcatcgccgcgtctctggcgcacgcctcggcctct

SEQ ID NO: 18903 - DNA, 238 bp, Zea mays
cggacgcgtggttgtttttagaggaccaaatggagctgctgctggagttggtgctcaacactcacagtgttatgcagtttggtttgcacatgttccaggacttaaggttctcacaccatactcttcagaagatgcccgaggcttgcttaaagctgctattagggatcctgatcctgttattttcttggaaaatgaattgctttatggagaatctttcccagtttctgctgaagtgctt

SEQ ID NO: 18904 - DNA, 238 bp, Zea mays
gtcgctggacggtgcatcagtcccacatttttccttacaagatggcatcctccggtacaagaacagagtttgggtaggttctgatgttcctctccaccacaagctggtagcagcatttcatcaaagcccagttggtggccattcgggtgtgcccgttacttacaggaaaatcaaacaagttttcgcatggaagggaatgaagacctttgtgcaaaactgggtagcttcctgccttaca

SEQ ID NO: 18905 - DNA, 233 bp, Zea mays
ctcggagccaccagggatccaaacctggtgaagaggatcggcgccgcgaccgcgcttgaagtgagagccaccggcatccagtacgcgttcgcgccatgcattgcggtgtgccgtgatccgaggtggggccggtgctacgagagctacagcgaggaccaccgtatcgtgcaggccatgactgagctcatcccgggcctgcagggcgacgtcccgcagaacttcaccagcggcat

SEQ ID NO: 18906 - DNA, 236 bp, Zea mays
cccacgcgtccgcccacgcgtccggagcattcgagaagccgaagaaaattcgaagacgaggagcagctacactgcggacggacttcgggcatggagggccagttccaggttggcaaggaggaggtcatccaagcatggtacatggacgacagtgaagaggaccagaggcttcctcatcatcgcgagcccaaagaattcatccctctcgacaaactttccgaactaggaatattaag

SEQ ID NO: 18907 - DNA, 233 bp, Zea mays
ctcaggttgccattggcaccaatgatgtgtacaagagcgccgaggcggttgatctggcgaccaaagaactaggtggcaagattttgcggcaccagggcctctacctgggatcaacactaagatcgcctcttttgttgatccagatggctggaaagtggttctggttgacaacaccgacttcctcaaggaactccactgaaggctcgggatacccaggtgctgtgctaggatgt

SEQ ID NO: 18908 - DNA, 235 bp, Zea mays
ggaaatggaactagaccctttcctgggcgtcgtgctcgccaccgccgtcctcctcgtcgccgtcctccgccggaagcgcggctccagccgcaagtacaagatgccacccgggcctaggccgtggccggtgatcggcaacctcaacctgatcggcgcgctcccgcaccgctccatccacgcgctctccgcgcggcacggcgcgttcatgtcgctccgcttcggctccgtccccgtc

SEQ ID NO: 18909 - DNA, 231 bp, Zea mays
ggacctggtgaccgggttggagccatcaaggttgacgaatattctcgtacttctgctcctagtgtaacggctgtgggtgatgtaacaaaccggattaatttaacacctgttgcattaatggaggcaacttgctttgctaaaactgtgtttggtggccagcaagttaagcctgatcacagagatgttccttgtgctgttttctccattccaccactatctgtagtgggcctc

SEQ ID NO: 18910 - DNA, 238 bp, Zea mays
acaacccagtcgctcaaaaccctagagctctcgcctgctcgcctccgccgccggagcgagctccccatcttcatccgtcaaccatggcgacccagatcagcaagaagaagaagttcgtcagcgacggtgttttctacgccgagctcaatgagatgctgacgcgggagctggcggaggatggctactctggcgtggaggtgcgcgtcacgccgatgcgcacggagatcatcatccgcgc

SEQ ID NO: 18911 - DNA, 156 bp, Zea mays
cccacgcgtccgaatcttccgttctcaaaccaacctaggcaattcgccgcagcctctcaccctcgcgagtcccgacctcccgcagccgccgcacagatggcacccaaggcggagaagaagccggcggccaagaagcccgcggaggaggagcccgcg

SEQ ID NO: 18912 - DNA, 180 bp, Zea mays
cccacgcgtccgcgtttcgcgtccgcctcagcccgccgcaaggagaggtaagttcaggagacatcttcgagaagctgaaatggctcctaaagctgctcctgccaagaagggtgatgccaagacccaggccttgaaggttgccaaggctgtgaagtctggggcagccaagaagaagaccaa

SEQ ID NO: 18913 - DNA, 238 bp, Zea mays
cactcactgctcgttgccggctgcccccgcggccccggccagtccatcccctcgctcgctccccaactccagcaggcagatcagatacatccatccattcgcggaccggaaggaaaggaagggttgaactatgagcgccgtggcggtttcgtcgtcgctgaacccggacgcgccgctcttcatcccggcggcgctgctgcaggtggaggacttctcgcgcagtggtgggacctcatca

SEQ ID NO: 18914 - DNA, 247 bp, Zea mays
ggagtggggagtgcccgtgcacgacgacgagttgctgttcgagatgctcacactgtcgggcgtgcaagtcggggccgactggacttccatcctcaagaaaagacacgtctacagggaggcgttttccggcttcgacgtggatgcggtcgccaagtacaccgagaagcagatggcgtcgctgagcgccgactacgggctggatttgggcaccgtcagaggaaccgtcaacaacgcctgccggattctt

SEQ ID NO: 18915 - DNA, 211 bp, Zea mays
actttttgttcctcgcgccgccgccgccgccgccgtgacggaaggaagaggaggagcaaggagcacgacgcgatgggccactccaacgtgtggaactcgcaccctaagaactacggccctggctcccgcgtctgccgggtctgcgcgaaccctcacggtctgatcatgaagtacgggctcatgtgctgcaggcagtgcttccgcagcaacg

SEQ ID NO: 18916 - DNA, 217 bp, Zea mays
agctgaccaagatctgtgatggcatcctcaagctgcttgagacccatcttgtgccgtcttccactgcccccgagtccaaggtcttctatctcaagatgaagggtgattactacagataccttgctgagttcaagactggagctgagagaaaggacgccgctgagaacacgatggtggcatacaaggctgcccaggacattgctctggctgagcttgc

SEQ ID NO: 18917 - DNA, 240 bp, Zea mays
gttcgtgcgaaggcgaccctccctccttcgctccttccgcgccgcctcccggccgtcgccgccatggtgaagtactcgcaggagccgggcaaccctaccaagtcggctaaggccatgggcagggatctgagggtccacttcaagaacacaagggagacagcctttgcgcttcgcaagttgtctttgaccaaggctaagcgataccttgaggatgttattgctcacaagcaggcaattccc

SEQ ID NO: 18918 - DNA, 171 bp, Zea mays
cggacgcgtgggcaaaaatctacaaatgtgaggatgacagatgtccgcgaccaatgtgctacaaggcctatggaagcggaaaagaagatagccctctatgtgatgtgcctggatttgaaaacactagaatgaaactcctgagacatgtttcttttgttgattgcccgggac

SEQ ID NO: 18919 - DNA, 182 bp, Zea mays
cagtggctccaccactagcaacccgtgcagcgagcccaccccgaccactgccatgtcgaggcgcggcgactgggtctacgagaacaacggcgggacctgcgtggccatcgccggcgccgattactgtgtcgtcgcggcggacacccgcctctctgtcggatacagcatcctcacgcgcgacc

SEQ ID NO: 18920 - DNA, 240 bp, Zea mays
atttttcatatcctcactcgccgccgccgccgctcgtccctcgccccatcgcgatggcccggatcaaggtgcacgagctgcgggggaagagcaaggcggatctgcaagcgcagcttaaggagtttaagtcggagctctccctgctacgcgtaccaaggtcaccggcggggctcccaacaagctctccaagatcaaggttgtgcgcacctccatcgcgcgcgtgctgaccgtcatctcgca

SEQ ID NO: 18921 - DNA, 242 bp, Zea mays
aggcccgagcaggtcgtcgctattgccagggagatggtggcgtacgcgcgcagcctcgggtgccccgatgttgaattcagccctgaggatgccggcaggtcaaatcgagaattcctgtatcatatactggaggaagtcattaaagctggagcaaccactcttaatatcccagacactgtcggatacactcttccttatgaatttgggaaattaattgctgacataaaggcaaacacttctgg

SEQ ID NO: 18922 - DNA, 238 bp, Zea mays
cggacgcgtgggtgcgctttctggcttcgttgcttgcgtgaaggattagtaaggcgcgtgatggcgctctcagcttgcccggctcaggaagaactgctgcagcctgctgggaggccgttgaggaagcagcttgctgcagccgcgaggagcatcaactggagctattccctcttctggtccatttcaagcactcaacgaccacgggtgctgacgtggacggacgggttctacaatggcg

SEQ ID NO: 18923 - DNA, 238 bp, Zea mays
caatctagaagcacccctctccctctctctctcttcgccgtccgaagctccgcaccccaatctaatcgacacctcaccgagatgggccgcaagttcttcgtcggtggcaactggaaatgcaatggaaccacagatcaggtcgagaagattgtcaaaaccctgaatgaaggacaggttcccccttcagatgttgtggaggtcgttgtcagccctccttatgtcttccttcctgtggtca

SEQ ID NO: 18924 - DNA, 235 bp, Zea mays
cccgcagcagccaaaacctacctagccgccgccgcaggccccccatcgccgccaagatgcagatctttgtgaagactctgacggggaagaccatcactttggaggtggagtcctcggacaccattgacaatgtgaaggccaagatccaggacaaggagggcatccccccggaccagcagcggctcatcttcgccggcaagcagctcgaggacggtcgcaccctcgccgactacaa

SEQ ID NO: 18925 - DNA, 232 bp, Zea mays
gaagctgttaagattattttggatgctgtcgagcaagttggtggtatttaccttgttaccgccgatcatggcaatgctgaggatatggtgaaaaggaacaagtctggcaagccgttgctcgacaagaatgaccgtatccagattcttacctcgcatacccttcagccggtcccggttgccattggaggccctggccttcaccctggagtgaaattccggaacgacatccaaa

SEQ ID NO: 18926 - DNA, 238 bp, Zea mays
gtagatggacgcaacatttgggctgatgatcttgctgcatctcttagcactcttcattctcttgaggctgttgctggcaaggacaaacttgtggtgtcaacctcctgctcactgatgcacaccgctgttgaccttgtaaatgagactaagctggatgatgagattaagtcatggcttgcatttgctgcccaaaaggttgttgaggttaatgcccttgccaaggctttggcaggccaaa

SEQ ID NO: 18927 - DNA, 237 bp, Zea mays
gtgggtctacgacaacgtgtcccgcccattgtacagcgggctcaagtgctccttcatcttccccgaggtggcctgtgacaagtatggcaggaaggatgccatgtaccagcactggagatggcagcctcatggtcatggatgcgacctcccaagatttgatgccatcaagctgcttgaaaatctgagaaacaagagaatggtgtttgtgggcgactcagtcaacaggaaccaatgggt

SEQ ID NO: 18928 - DNA, 237 bp, Zea mays
gtcggatctgagacgagacgggggggccctcccctcaaccggaacttgttttaccccatctcatcccactgactcggcccacccaccatacgcactgcctccgccggatctcgtcggactcggatccgcccgaccacgaccaccccgcgccgccgccgcgcagcagcagcagatcagagaagatggccggactcgacaccttcctcttcacctcggagtccgtgaacgagggacacc

SEQ ID NO: 18929 - DNA, 234 bp, Zea mays
cccacgcgtccggccggagctcgacaaggacgaccgacgacgcacgcggagatccggcgtactgcaaattttgaaaactgaactgtaagatggcatcagcagagctttcccgtgaggaaaatgtgtacatggcgaactcgctgagcaggcggagaggtacgaggagatggttgagttcatggagaaggtagccaagactgttgactcggaggagctcactgtggaggagcgaaa

SEQ ID NO: 18930 - DNA, 234 bp, Zea mays
ggtgatccagatcgatgaggcagctctaagggagggtctgccactacgcaagtcagagcatgcattctacctggactgggctgtccactctttcaggatcaccaactgcggagtccaggacaccacccagatccacacccacatgtgctactccaacttcaacgacatcatccactccatcatcgacatggatgccgatgtgatcacgatcgagaactcccggtctgacgagaa

SEQ ID NO: 18931 - DNA, 232 bp, Zea mays
cttcccggagcgcttcctggaacaaggccgcgacgccgaggtcgacatgtacggcaaggacatccggttcgtgccgttcggggctgggcgcaggatctgcgcgggggccacgttcgccatcgccaccgtcgagatcatgctcgcgaacctcatctaccatttcgactgggatatgcccgccgagatggagcgcaccggggccaatgtggacatgtccgatcagttcgggatg

SEQ ID NO: 18932 - DNA, 230 bp, Zea mays
gcttcattcttctgaacggagaagccaagtaaggtagatcaagctacggtgtccatggagcaaggcggcaagatggcccatgggtgggctgccagggatgcctccggcctcctctccccttacagcttctcaagaagggttcagggggacgacgacgtgacgatcgaggtgctcttctgcggcatctgccacaccgacctccacatcatcaagaacgagtggggcaatgc

SEQ ID NO: 18933 - DNA, 238 bp, Zea mays
catgaagtcaagggctgggagaggctttacccttgaggagctgaaggctgctggcatcccaaagaagcttgctccaaccattggtatttctgttgatcaccgccgcaagaacaaatcccttgagggactgcaggccaatgtccagaggcttaagacataccaaggcaaagctggttaacttcccaaaggcgtgcgcgcaaggtgaaggctggtgactctactccagaggagcttgcca

SEQ ID NO: 18934 - DNA, 235 bp, Zea mays
cccacgcgtccggctctaagggctccattcgacttgttgatctgcggcaatcagccctttgcgacactcattcccaaatctttgagcagcatgaggccccaggttcaagatcatttttcactgagattatagcttcaatttcggacataaaattttcgaaggatgggaggcatattctcagtcgtgactacatgactctgaagctttgggatgttaagatgaattctggtcctgt

SEQ ID NO: 18935 - DNA, 233 bp, Zea mays
aaaccctagccctcgcgccgccgcctcctccgccacccagcgctcgagctcctcgcgtcctgcgagcgcgctccgcaacgtcaccatgaagttcaacatcgcgaacccttccaccgggtgccaaaagaagctggaaatcgatgacgaccagaagctgcgtgccttttatgaccgaagatatcccaggaggtcagtggtgatgctctgggtgaggagttcaagggttatgtctt

SEQ ID NO: 18936 - DNA, 230 bp, Zea mays
cccacgcgtccgtgtcaaccctagccaaaggacagtcaatacataacattagatgatggccggagactctgcttggagtgtctgcatactgctattatggagaccaatgaatgccagccactgtacattgatattcaagaattttatgagggtatgaacatgaaagtagagcaacaagttcccttgcttttggttgagcgacaagctttaaatgaagccatggaagcaga

SEQ ID NO: 18937 - DNA, 227 bp, Zea mays
cggacggtggtgttgagaaggaggccgctgaaatgaacaagcggtcctttaagtatgcttgggcgattgacaagctcaaggctgagcgtgagatgggtatcaccattgatattgctctgtggaagtttgagaccaccaagtactattgcaccgttattgatgcccctggacaccgtgactttatcaagaacatgatcactggtacctcccaggctgactgtgctgtc

SEQ ID NO: 18938 - DNA, 229 bp, Zea mays
ccccactcgctcgtgctcgtgagcgaacggagtccaaggcagacgctgcgattcacaagcgccgaggagcgagatgcagaacgtggtggaggtcgatccgggccgcccggctgccgatggccggccatccgtggggcccacctaccggagcgccttctgccgcgacggattcccgccgcccgtccccgggatggacagctgctacgacatcttccgcatggccgtggag

SEQ ID NO: 18939 - DNA, 232 bp, Zea mays
atctcacaagacctcctcagaaccgagaagcgcactgcggccatggacgccaacggcactggagctggagggaaggcgaagaagggagcagacggtcgcaaggccggcgggccgaggaagaagtcggtgacgaggtccgtgaaggcagggctccagttccccgtcggccgcatcgggcgctacctcaagaagggccgctacgcgcagacgtcggcagcggtgcccccgtcta

SEQ ID NO: 18940 - DNA, 241 bp, Zea mays
ggacgctggcaaatagctagcaataatggagaagtacaccaaagccctagcgtcattgctcaccatgctggtgctggcacctctcctcgccatggccaccgacccagaccccctgcaggacttctgcgtcgccgacctcaacggcaagccatcagtgaacgggtacccatgccagccgccgtcgtcggccggcgaccagttcctcttctcgaccaagatcgccacgggaggcgaccccctg

SEQ ID NO: 18941 - DNA, 246 bp, Zea mays
ggctggcatgactcacattgaccgtgaggttgagaagccaggatccaaactccactaagaaggaaacttgtgaggctgttaccatcattgaaacccctcctcttgtcattgttgggctcgtggcatatgtgaagactcctcgtggcctccgcacactcaactctgtttgggcccaacatcttagcgaagaagtgaggagaaggttctacaagaactggtgcaagagcaagaagaaggctttcacaa

SEQ ID NO: 18942 - DNA, 244 bp, Zea mays
cccacgcgtccgcccacgcgtccgcgtccgcctcgtcaagcgctgccacaagcccgaccgcaaggagttcaccaaggtggcggcgcggacggcgatcgggttcgtcgtcatgggcttcgtcggcttcttcgttaagctcatcttcatccccatcaacaacatcatcgtcggttccggctaggcttacaggagtacagggcgactagcatgggagtagtgcaatacttttgggagcaatagataa

SEQ ID NO: 18943 - DNA, 241 bp, Zea mays
cgttctctaaccttggctcccgctccctccgcagagcatctcaacaccgccttgaggaccccccaactcgccggctgcagccatggtgaaatattcgacggagccaaccaaccccaccaagtcaaccaaggccatgggccgtgacctacgtgttcacttcaagaacacccgtgagacagcttttgcccttaggaagttgtcactcaccaaggccaaaaggtaccttgaggatgtgattgcc

SEQ ID NO: 18944 - DNA, 239 bp, Zea mays
aacgagaagagcggcggcgcgggcggacaaggagcaggcggaggaggagctgtgccaagccacaatgggtatctcacgcgactcgatgcacaagcgccgtgccaccggtggaaagcagaaggcctggaggaagaagcgaaagtatgagcttggtcgccagccggccaacaccaagttgtcaagcaataagacagtgaggagggtccgtgttcgtggaggtaacgtgaagtggagggctc

SEQ ID NO: 18945 - DNA, 239 bp, Zea mays
gttgatactcatgttcatcactcagcatgcatgaaccagaagcacctgttgagatttatcaagtctaagttgaggaaggaacctgatgaggttgtaatctttagagatgggacctatttgactcttaaggaggtttttgagagtttggatttgacagggtatgacctcaatgttgatctcttagatgttcatgctgataagagtacatttcatcgttttgacaagttcaatctgaaata

SEQ ID NO: 18946 - DNA, 240 bp, Zea mays
tgcgccgccgcctccgacatcgtcccttcgtccccacgagcaaccgataatccgccggcgttgagatgttggtttatcaggatctcctatctggcgacgagctcctgtcggattcattcacctacaaggagctcgagaacggcgtcctgtgggaggtcgagggaaagtgggtcacccaaggtcctgttgatgtggacattggtgccaatccatccgccgagggtggtgaggacgaaagcg

SEQ ID NO: 18947 - DNA, 238 bp, Zea mays
acgcaacttgcaagctttcttctcgaattttggtgttgaaggtctcattgtgtctgccatgtgctctgctgcccagtcagtggtttctcctaaacaaagccagcacatttggcatcatttggctatgtttttccgagatgaactgttatcttggtcgtggaggcggcctctgggcattccatcagtccctgtcgctgctggaatgatcaacccatcagatttccaacagaaggtggta

SEQ ID NO: 18948 - DNA, 238 bp, Zea mays
cggacgcgtggcgccgtcctcggcttcgccttcaagaaagacaccggtgacaccagggagaccccggccatcgacgtctgcaagggcctgctgggcgacaaggcccagatcagcatctacgacccccaggtgacggaggaccagatccagcgggacctggccatgaacaagttcgactgggaccacccgatgcacctgcaaccgacgagccccacggccattaagcaggtgagctgcg

SEQ ID NO: 18949 - DNA, 236 bp, Zea mays
cacacccgactcgtcagacgtcagccagcagttcgaaaccaaggatcgatccaggagcttccggaaggctaggcgcgcgcgcagctcgaggtgctggtgccggtgccgcccatggatcgggctcgcggatccgcgttcctgctcggcgtcctgctcgcaggatccttgttcgcgttttcagttgctaaagaggagaccaagaagctcgggaccgtgatcggtatcgatctcggtac

SEQ ID NO: 18950 - DNA, 236 bp, Zea mays
cttctgcataagaacaacaaatcaaaagcgtgatcagctcggtgccaacaaaacctcaacaaccaagtttcatgtctgatctcgacgtccagcttccatctgcctttgatccgtttgctgaggcaaatgctgaggactctggtgctggtcctggaacgaaggattatgtgcatgtgcgcatccagcagcgcaacggcagaaagagtctgactacagtccagggtctgaagaaggat

SEQ ID NO: 18951 - DNA, 236 bp, Zea mays
cacctcgatctcgcgctaggttttcgccacaccgctctcgtcctccgcgaagatgccgaagaacaagggtaagggaggcaagaaccggaagcgtggaaagaacgaggctgacgacgacaagcgcgagcgcgtcttcaaggaagacgggcaggagtatgcgcaggtgacccggatgctcggcaacgggcggtgcgaggccacctgcgtggacggcacgcgtcgcctctgccatatcc

SEQ ID NO: 18952 - DNA, 238 bp, Zea mays
cccacgcgtccgggcagacattaatcgaagcccatgttgatgtcaagacaaccgacaactacatgttgcgtttgttctgcatcggcttcacgaagaggcgcccaaaccaggtcaagagaacctgctatgctcaggcatcccagatccgtcagatccgccgtaagatggttgagattatgatcaaccaggcttctacatgtgacctgaaagaacttgtttcgaagttcattccagaagt

SEQ ID NO: 18953 - DNA, 237 bp, Zea mays
gaagtttgccactggtgtctccatggttgcctccctgtcactggcgatctcgtacccgacccttgctgctgtgccccacatgttcatcaatgggtacaagaatgtgcttgctgttgctgtcgagacagactactcatacccacatgctgacaagatcaaggagtacctcaaggacccaagcaagtttgctgttgccgccccggttgctgctggggactctggcgctgcagctgctcc

SEQ ID NO: 18954 - DNA, 235 bp, Zea mays
ggatcgaggacaccgtgggtgtcggcaagggcgccaccaagatatatgccaccgtcgatctcgagaaggcccgtgtcgggcggacccggatgatctccaacgagcccgtgaaccctcgttggtacgagtccttccacatctactgcgcgcacatggccgccgacgtcatcttcaccgtcaagatcgacaactccatcggggcctcgctcatcgggagggcctacttgcctgtcca

SEQ ID NO: 18955 - DNA, 235 bp, Zea mays
ccacgcgtccgcagaagagcacggagctgctgatccgcaagctgccgttccagcgcctggttcgtgagatcgcccaggacttcaagaccgaccttcgcttccagagctccgccgtcgctgcgctgcaggaggcgtccgaggcctacctcgtcgggctcttcgaggacaccaacctctgcgccattcacgccaagcgcgtcaccattatgcccaaggacatccagctcgcccgccg

SEQ ID NO: 18956 - DNA, 234 bp, Zea mays
cccacgcgtccgcccacgcgtccgcgtccgcctcgtcaagcgctgccacaagcccgaccgcaaggagttcaccaaggtggcggcgcggacggcgatcgggttcgtcgtcatgggcttcgtcggcttcttcgttaagctcatcttcatccccatcaacaacatcatcgtcggttccggctaggcttacaggagtacagggcgactagcatgggagtagtgcaatacttttgggag

SEQ ID NO: 18957 - DNA, 232 bp, Zea mays
gtctttgggaaacactgcaggtgttgatctactgaaaaatgtccatgtgcaagcaatcgtcgggccacagacatctactcaagctaaatttcttgcagagcttgggaacaaggcatcagttccaatcatttccttttctgcaaacagcccatcccgttcacccagccagaccccatatttcatcaggacggcatggaacgactcctgccaagctgaagctattgcttcactt

SEQ ID NO: 18958 - DNA, 232 bp, Zea mays
cagtatttacatggatcggtaatctaagctcatcaatggaccaagagcttgctgagaggcagctagatgtgatcaagccaaatttgcagtccagaatgctcaaagaaggatctgaatatgatcagttttggaagttgcttggagtcaagtctgagtatggcagccagaagattgtgagggaccaagaaagtgaccctcatttatttgcttgtacatttacaaagggggtgct

SEQ ID NO: 18959 - DNA, 234 bp, Zea mays
aattttgaaaactgaactgtaagatggcatcagcagagctttcccgtgaggaaaatgtgtacatggcgaactcgctgagcaggcggagaggtacgaggagatggttgagttcatggagaaggtagccaagactgttgactcggaggagctcactgtggagtagcgaaacctcttgtctgttgcagacaagaacgtcattggagcccgccgggcctcatggcgcatcatctcctc

SEQ ID NO: 18960 - DNA, 182 bp, Zea mays
attgagtatagtacccctcaggaagctgagctggctagggaaaaaaccaatgggtacaaactcgacaagtctcacatctttgcagtcaatttgctcgatgatttcgagaagtacatgaaagttcctgacacatggacccctgctgaaattaagccatacactgctggagaaaatcttctgaa

SEQ ID NO: 18961 - DNA, 225 bp, Zea mays
ccagcgtccgcggacctgcgccggcgtgcttgtgatctcaacccaagtcgtgcctccgctccggtcacccgtcgctccacgcaacactgtcgaggaggaagaccagggagcccaaggaggagaacgtcacccttggacccactgtccgtgaaggagagtatgtctttggtgttgctcacatctttgcatccttcaatgacaccttcattcatatcactgatttgt

SEQ ID NO: 18962 - DNA, 128 bp, Zea mays
ggccaggctggtatccaggtcggaaacgcgtgctgggagctgtactgcctcgagcatggcattcaggctgatggccagatgcccggtgacaagaccattgggggaggtgatgatgctttcaacacttt

SEQ ID NO: 18963 - DNA, 225 bp, Zea mays
cccacgcgtccggaacgagaaactatgtgacttgcctggattggtgaatacaagtccatatgagaagggatggattatgaaggtcaagctcagcaattcaggtgagctcaattcgctcatggatgatgatacgtactcgaaagtgtgcgaagactcgaaagtgggcgaagacgacaaccattgaagaaatcaaagtgtcttctgaagaccagaacgtgtttttca

SEQ ID NO: 18964 - DNA, 224 bp, Zea mays
cgctgcctccgcctctcgagtctcgtccacccgtcatcctcctagctcctctactcgccagtcgccatgggcaagattaagatcggaatcaacggcttcggaaggatcggcaggctcgtggccagggtcgccctccagagcgaggatgtcgagctcgtcgccgtcaacgaccccttcatcaccacggactacatgacctacatgttcaagtacgacaccgtcca

SEQ ID NO: 18965 - DNA, 248 bp, Zea mays
cccacgcgtccgagcaaagcaagctgcagagtgggaggatgttcggtgcccggtgtgcatggaccacccgcacaacgccgtcctgctggtctgctcctcacacgagaagggctgccgccccttcatgtgcgacaccagctcgcggcactcgaactgctatgaccagtaccggaaggcatccaaggattcaaggacagagtgcagcgagtgccagcagcaggttcagctctcgtgcccactgtgccgtg

SEQ ID NO: 18966 - DNA, 247 bp, Zea mays
ctacaggtaaggaagaggagggcaggatgtcgcaccgtaagttcgagcacccgaggcacggctccctcggcttccttcccaggaagcgctcctcccgtcaccgcggcaaggtgaagtcattccctagggatgaccccaagaagccttgccatctcactgccttccttggctacaaggctggcatgactcacattgtccgtgaggttgagaagccaggatccaaactccataagaaggaaacttgtga

SEQ ID NO: 18967 - DNA, 242 bp, Zea mays
cccacgcgtccgtatctgcagaggcatggcggttgccgacccgtcgagcccgtacaaggtacggctgctggtggaggactacccgtacgcgtcggacgggctggccatctggcacgccatcgagcagtgggtgacggagtacctcgccgtctactaccccaacgacggcgtgctgcgggcggacgtggagctgcaggcgtggtggaaggaggcgcgcgaggtcgggcacgccgacctcaagg

SEQ ID NO: 18968 - DNA, 238 bp, Zea mays
cggcaaggcgtggtacaagaccatggtctcggacagtgactacaccgagtttgagaacttcaccaagtggctcggagtgacgcagtgaagcggcctttgaggcctagttaagttttgagtagttgtgtcgctgaacttgtattgagacgaaatagtatttttatcaatctgtcttatcctgcgtcttcacaacaagttgcctatctgtggactttaagcctgcatgtccgtttaattc

SEQ ID NO: 18969 - DNA, 240 bp, Zea mays
ctgccacctcgccgtctcgcacgttccttttcccaactccccagcgcctctccgcgccgcgatccagatccaggttgttcagcatgggtctggtgaaggaaggcgtcgacatggaggagggacccctagagatcggcatggagtacaggactgtatctggtgtggccgggcctctggttatcttggataaagtaaagggcccaaagtaccaagaaattgtaaacatccgacttggagatg

SEQ ID NO: 18970 - DNA, 235 bp, Zea mays
atcgccgctgcgccgtctcctccgctcccgtcgtccggaaagatggcgtcccacattgttggataccctcgcatgggccccaagagggagctcaagtttgcacttgagtctttctgggatgggaagagcaccgctgaggatctggagaaggttgctaccgacctcagggccagtatctggaagcagatggctgatgctgggatcaagtacatccccagcaacactttctcgtact

SEQ ID NO: 18971 - DNA, 233 bp, Zea mays
ctagaagaagatgaacaacctaaaaagaaggttatattagggagcctagcggctcaatggatttcagtttataatgcttggtggcccatgaagcagaggtaccattacaatgtggctgactcgaggctaagcatgatgggctttacattagcagcgtggcttcctcggcaaacctttgggcactcatcatggacgcaggaactggtttctgttctcaggtttatgagctctca

SEQ ID NO: 18972 - DNA, 236 bp, Zea mays
ctggttttctctgcgcggggaagaatggcgtcgtggttggagcagctgcagcgcgagctcgccgcccgcggcctcacagtcgcctccatccccggcaagggaaggggtctcatcgctacttgcaccttcttcccaggggatgtcattctcaatcaggaaccttacgcttctacacctaacaagattttagttggatcgagctgtgaccactgtttcacctctggcaacctgaggaa

SEQ ID NO: 18973 - DNA, 240 bp, Zea mays
cccacgcgtccgccttggttgccgcttcctccaaagccactccaaacccccgcttccagaaccttctcgaaactctccgcctcctcctctactcgctccgatggcgaaggaaccgatgcgcgtgctcgtcactggcgccgcagggcaaattggatatgctcttgttcccatgattgctaggggagttatgcttggtgcagaccagcctgttattctgcacatgcttgatattccgccagc

SEQ ID NO: 18974 - DNA, 239 bp, Zea mays
ggaacatatggagagcacataacacaaaggaaattttggaaaaacatcttaaggcaactggaggaaaagtgatgacccgttttccaccagaacctaatggatatcttcatattggtcatgccaaggctatgtttatcgattttggtctggctaaggagcgaaatggccattgctaccttaggtttgacgacacaaatccggaagctgaaaagaaagaatacatagatcacattcaagaa

SEQ ID NO: 18975 - DNA, 235 bp, Zea mays
caaacttgcctcccttgacgagtacatctcacggatgaagtcagggcagaaagacatcttctacatcacgggaagcagcaaagagcagctggagaagtctccattcctcgagaggctaaccaagaagaactacgaggtattttatgctgctggtttatccacttccattatagtgtctgggatctggaatacagcttggtttttttgtttgtgcaggtcatcttcttcaccgacc

SEQ ID NO: 18976 - DNA, 230 bp, Zea mays
cggacggtgggcggagatgtcgtcggcgatggtggagcgggcaaccagcgatatgctcatcggcccggactgggcgatgaacttggagatctgtgacatcctcaaccgcgaacccggacaagcaaaagatgtggtaaagtccctcaagaaacgcattgcacacaagaacccaaaagtccaacttcttgctctcacgttgctggagacgatgataaaaaattgtggggacg

SEQ ID NO: 18977 - DNA, 230 bp, Zea mays
gccgaggcacctcatctccggcgaagggaaatggcgaccgttccaggggatctgatctggcagattgtgaggaagaacaactccttcctggtgaagcagtttggcaacggcaatgccaaggtgcagttcaccaaggagcccaacaacctctacaatgtacactcctacaagtactctggcttagcaaacaagaaaactgtaacgatccagccagctgctggaaaggactc

SEQ ID NO: 18978 - DNA, 226 bp, Zea mays
  unsure (1)..(226): unsure at all n locations
ccaccctggccagatcggtaacggctatgccccagtgctggactgccatacctcccatatgggggacaaancagctgagctgattaccaagatcgacaggcgttctggcaaggagcttgagaaagagcccaagttcttgaagaacggtgatgctggtatggtgaagatgattcccaccaagcccatggtggtggagacattctcgcagtatcctcccctgggtagg

SEQ ID NO: 18979 - DNA, 228 bp, Zea mays
caatcaaccagcaacactcttctcgtataacataatacagcgaaggtaactcacatggcaacttccatgggttgtctcgtcttgctctgccttgtttcttctctccttcccagtgccgtccttggccacccatggggtggcttgttcccacagttctatgaccattcgtgccccaaggcgaaggagattgtgcagtccattgtggcacaggctgtggccaaggagacc

SEQ ID NO: 18980 - DNA, 228 bp, Zea mays
cccacgcgtccgccaagaagagcttgacattgatgtgcttgtgcatggcgagcctgagagaaacgatatggttgacgtacttcggtgagcagctctccggttttgcgttcactgccaatggctgggtgcagtcttatgggtcaaggtgcgtcaagcctccgatcatctacggtgacgtgagccgccccaaccccatgaccgtgttctggtcgaagactgcgcagagca

SEQ ID NO: 18981 - DNA, 232 bp, Zea mays
cgtcatcgatctcgtttcaaatccatccatcctcgtttcctccgtcccgcagcatctcaaccccatggccaagatcaagatcgggatcaatgggttcggcaggatcggaaggctggtggccagggtggccctgcagagtgacgatgtcgagctcgtcgccgtgaacgaccccttcatcagcaccgactacatgacctacatgttcaagtacgacactgtgcacggacagtgg

SEQ ID NO: 18982 - DNA, 242 bp, Zea mays
cccacgcgtccgctccaggtaaggaaagggttcgtactcatggcgccgccgcagccaaagtcgggcctcttcgttggcatcaacaagggtcatgtcgtcaccaagcgcgagctgcctccccgcccgtgccaccgcaaaggggaaatcaacgaagagggtgtctatggtcaggggcctgatcagagaggttgctgggtttgctccttatgagaagcgtatcactgagcttctgaaggttggca

SEQ ID NO: 18983 - DNA, 237 bp, Zea mays
cccacgcgtccggatgtgatggacgcgatgtggtcgctcgacaactacaaggatgagtcatacttgaggcgtgtcgtgatgccactagaggtactgctcactagctacaagaggcttgttgtgaaggactctgctgtaaatgctatctgctatggtgctaagcttatgattcctgggttgctccgatttgagaatgatattgagactggggaggaggtggttctcatgacgacgaaa

SEQ ID NO: 18984 - DNA, 240 bp, Zea mays
ctcctaatagagagaaatttatggaggtcattagtggaaccggtgacatcaatgcagatattgagaaattttgcacgaccttctctcctttcctcaaagaaaaccacaactttctggcgagcgtcggtcttgatgatctgaaggcttcatagatcaatctccatgctgattacaacaaaataagcatgtcttacgaaactcaaagtgttgccgagggtatacctgtttcccgtagccatc

SEQ ID NO: 18985 - DNA, 237 bp, Zea mays
ctgacgcgtggctggacgcgtggggcagcagacacctccgccacctccaccctcgaatcgtaccccaccatggcgtcgcatggatcctccgtcttcgccgcactcgagcaggccccggaggaccccatcctcggagtgaccgttgcctacaacaaggatcccagccccgtgaaggtcaacctcggggtcggcgcctaccggaccgaggaagggaagcccctagtgctgaacgtggtc

SEQ ID NO: 18986 - DNA, 237 bp, Zea mays
gtggcactatctacaagggggtcctggacgacggccgagcggtggccgtcaagagactgggatacataaggcagcacagcagagaggagttccacgacgagctgcacgtcatcgcaaggatcaaccatatgaacctggtaaggatgtacggcttctgctcggagaggtcccacaggatgctggtcctcgagtacgcggacagagggtccttggctgacgtgctgttcagaggcagag

SEQ ID NO: 18987 - DNA, 234 bp, Zea mays
cccacgcgtccgggaaaatgtcaagacgaagcacccgcagcttcactacgagtccaagctatacatgcttctccaaggaggaagtaggccctagagtcctgtcctgtcctgtctagttttactgctgggacggtactctgtggttagttgctagcatgatgcgcgagttgggctaaccttccgctcccccccttttttttgtttcgtcacagctggcattccgcacctgaagtg

SEQ ID NO: 18988 - DNA, 234 bp, Zea mays
cttacatgatccgtgctattccaagcaatgcatcagacaatgtctattgcaccctgctcgcacatagtgccattcatggtgcaatggcgggatacagctttacagtcggaatggttaatggcaggcatgcatatataccatttcatagggtaacatctacaaggaacaaggtgaggataactgacaggatgtgggcgaggctgctgtcttcaacaaaccaaccgagtttcctga

SEQ ID NO: 18989 - DNA, 233 bp, Zea mays
gcgagctcgctcaccgccagaacgacggcttcgacagcgtgctgcagtcgccggcattcccctctggtgtctttgactcgcccttctccgtgggcacgcatttcggggggccgcacccgctggtcaatgaggcctgggaggcgctcaggaaatcggtcgtctacttccgggaacagcccgtcggtactattgctgccgtagaccatgcgtcggaggaagtgctcaactatgat

SEQ ID NO: 18990 - DNA, 229 bp, Zea mays
ggacctggcgcggacggccctccacctttatcgccgccgcctccgccgccgttgctgtgatccgtctcttcgccgatggcttcggccaagttcggtgctgcccagcaggtggagaaccgaggcgcgctgtccaaaaggtcacgtaacgacgtgtctgtaagggagggggactggaattgtcctcagtgtggtaatgtcaacttcagttttagaaatgtttgcagacgtg

SEQ ID NO: 18991 - DNA, 234 bp, Zea mays
aaggtgtaccaaaattcttgcgccgtattgacaccgctctgaaaaatattgggatcaatgaacgtctcccttacaatgctcctctcattcagttctcttcctggatgggtggtgatcgtgatggaaatccaagagtaacaccagaggttacacgggatgtatgcttgttggcgagaatgatggctgctaacttgtacttctctcagattgaagatttaatgtttgagctgtcta

SEQ ID NO: 18992 - DNA, 234 bp, Zea mays
gaaagatccagatgcggagtttgagataattcagattcttgtcaaggagtgcaataagatcgaaggtcacgtccagcagtgcaagaggctggttctgcaatacattcccctcatcttggtgaacggtgagaagttcctcgagaagaacgatgtctgcgcgctcgcacaggcttgtccagcgagcagtaggaagacgttcagctcgatgttgaagggagcgttgtggagtgacgc

SEQ ID NO: 18993 - DNA, 235 bp, Zea mays
gatcacacacactcgagaactccatttcgatctcatttgaaatcaacccatcctcgtttcctccgtctagcagcctctcaccctcatggccaagatcaagatcgggatcaatgggtttggcaggatcggaaggctggtggccagggtggccctgcagagcgacgacgtcgagctcgtcgccgtgaacgaccccttcatcagcaccgattacatgacctacatgttcaagtatgac

SEQ ID NO: 18994 - DNA, 234 bp, Zea mays
tgcagttgacatgtgggcaatgggtgccattatcgcggactattttcactgcgacctctttttcctggatcaagtgagccagatgaactttacaaaatctgtagcattattggcactccaaatcagcgtacttggcctgaaggactgcagctagcagcatctatgggttttcagttccctcagtgtgaaggtgtacatctttcggaagtggttcctttagcaagcaaagatgca

SEQ ID NO: 18995 - DNA, 222 bp, Zea mays
tgatcatcgcagacgacatcgtcctcgccttcgcggacgccatcccgtgggaggagatcggcgtcttcgttgcagaggatgatgtcccgcagctggacagcatcctgacatccatccccacagacgtcgtgctgaggaagcagcggctccttgcgaacccgtcgatgaagcaggccatgctgttcccccagcctgctcagccaggagatgcgttccaccaga

SEQ ID NO: 18996 - DNA, 229 bp, Zea mays
gtcagtcacagctcacagcaaacaccgcgaaccgcccccgctcccaaacccgaccgagcaaagcgcaaagccccccaaccgcggatcaatccgcagcatcgatggcgcccaaggcggagaaaaagccggcggcgaagaagcccgcggaggaggagcccgcgaccgagaaggcggagaaggctccggcagggaagaagccgaagcggaggaaacgcctccccgcgggcaa

SEQ ID NO: 18997 - DNA, 229 bp, Zea mays
atcaagatcgggatcaatgggtttggcaggatcggaaggctggtggccagggtggccctgcagagcgacgacgtcgagctcgtcgccgtgaacgaccccttcatcagcaccgattacatgacctacatgttcaagtatgacactgtgcacggacagtggaagcaccatgaggtcaaggtgaaggactccaagacccttctctttggtgagaaggaggttgctgtgtttg

SEQ ID NO: 18998 - DNA, 230 bp, Zea mays
ttcttccctctcgccttcccctccgccgccaatcccacgtccaatcagccgccgctccagccttccatccatccatcccgtagctgctctctattccgccagcgatcgagagaccaagaggagcaggagcgatggcgaggagctcgttcaagctggagcaccccttcgaaaggaggcaagctgaggctaaccgcatcagggagaagtaccccgatagaattcctgtcatt

SEQ ID NO: 18999 - DNA, 254 bp, Zea mays
ctcgaattaaaaccctagcggcaaaaccttcgctctgcgccgccgtcgcctgctcccgtcccgccaccacatccgcccaggagctcgccgtcggggaggctgctcgaggagccgcgctgtctctcccgcgccgcgaccttcgccctcgccgccgccatgatctgcgcgatctccggtgaggtgccggacgagccggtggtgtcgaagaagtcggggcttctcttcgagcggcggctcatcgagcgctacattga

SEQ ID NO: 19000 - DNA, 249 bp, Zea mays
cccacgcgtccgcgcacaccagcacggcagcacctgccctcctcgccgtcgctgcctccctccgcgcgaccgatctaccctccgccgccaccatgtcgctgatcgccggggaggacttccagcatatcctgcgtttgctgaacaccaacgtggatgggaagcagaagatcatgttcgccatgacctcaatcaagggtgtcgggcgccgcttctccaacatcgtctgcaagaaggccgacatcgacatga

SEQ ID NO: 19001 - DNA, 176 bp, Zea mays
gtctccaagaagaagtacatctacaccatcgacgacgactgcttcgttgccaaggacccatcaggcaaggatatcaatgctcttgagcagcacatcaagaacctcctcagcccgtccacaccgttcttcttcaacaccctgtacgacccctaccgtgagggtgctgactttgtgcg

SEQ ID NO: 19002 - DNA, 162 bp, Zea mays
cactcctcaccatttcgcaaaccctacccatacccccgccgccgccgccatgccgcgcaagctcgagccgtcgcaggtggtggaggtcttcgtccgggtgacgggcggcgaggtcggcgcggcgtcgtccctggcgcccaagatcggtccgctcggtctctc

SEQ ID NO: 19003 - DNA, 160 bp, Zea mays
tgcttacaagggcaagtggcatgcacctatgattgacaaccccaactacaagggaatctggaagcctcaggagatccccaaccctgagtactttgagcttgacaagcctgactttgatccaattgctgctattgggattgagatctggacaatgcaggat

SEQ ID NO: 19004 - DNA, 235 bp, Zea mays
agaaggtctaaagatccttcaaaaggtgaaagcaacatatgaccttccgatagtcactgatgtgcacgaaagccaccagtgtgaagctgttggaagagttgctgacatcatacagattccagccttcctctgtcgccagactgatcttctagtggctgctgctaagactggaaaaattatcaatatcaagaaaggacaattctgtgcgccttctgttatggtgaactctacagag

SEQ ID NO: 19005 - DNA, 168 bp, Zea mays
tgatggcattcgttgggattcctggggtcgattcgttgagcacagtactgcataccagccatggatttggaatactggaaaccatgaaatagagtacaggcctgatctgggagaaacttctgtattcaagccatatttgcataggtacatgactccatatttagcatc

SEQ ID NO: 19006 - DNA, 146 bp, Zea mays
cccacgcgtccgcatttcgtcgtcatgctgggcaccaccgtcatcatactcagcgcgctcgttcctcagatgggaggcggaaatgaagagaaggctcgggtggttcagaccatactgttcgttgctggcataaacaccctgttcca

SEQ ID NO: 19007 - DNA, 158 bp, Zea mays
aagaaacttgtgtccgtgataaggcagttgaatctctgtgccgtattggtgcacaaatgaaggaaactgacatagtcgactggttcattccagtagtaaagaggctagcagctggtgagtggtttacagctcgtgtatcatcctgtggtcttttccac

SEQ ID NO: 19008 - DNA, 238 bp, Zea mays
gttggaggcttcctctcacagttggttctaggcaagggcattgaagactgcgtgagggcaggttgctatgccgcaaacgttatcatccagcgcccgggctgtacttacccggagaagcctgacttcaactagtgcaaaaactgaggcacgtcatgagagggactgttataggcacacttaattgttaaccagtgcgtggttcggtgtctacacaccctgtattcttccgaggcttctc

SEQ ID NO: 19009 - DNA, 154 bp, Zea mays
cttgtgaccctccctcagccgcgtcgcgtcgcatcctacgatccaaagctctctctgctcgcagccatggcgaagaactacccgaccgtgagcgccgagtacagcgaggctgtggagaaggccaggcgcaagctccgagccctcatcgccgaga

SEQ ID NO: 19010 - DNA, 184 bp, Zea mays
cccacgcgtccgcccacgcgtccggagtgggccgggctttgcaagattgactctgagggcaaggaacagtgacctggtgaaggcactctgcgctgagcacaatgttcacctggtcactgttcctgccgcgaagactcttggcgagtgggccgggctttgcaagattgactctgagggcaaggca

SEQ ID NO: 19011 - DNA, 172 bp, Zea mays
ctagtctcgtccacccgtcgtcctcctagctcctctactcgccagtcgccatgggcaagattaagatcggaatcaacggcttcggaaggatcggcaggctcgtggccagggtcgccctccagagcgaggatgtcgagctcgtcgccgtcaacgaccccttcatcaccacgga

SEQ ID NO: 19012 - DNA, 224 bp, Zea mays
attgtgaccgagatcgaccccatctgtgccctccaggctctgatggagggtcttcaggtccttcccttggaggacgttgtctctgaagctgacatcttcgtgaccaccactggcaacaaggatatcatcatggttgaccacatgaggaagatgaagaacaatgccattgtctgcaacattggccactttgacaatgaaattgatatgctcggccttgataccta

SEQ ID NO: 19013 - DNA, 98 bp, Zea mays
atgacggcgttcgagtaccacggcacggactcgcgcttcaaccgcgtgttcaacgagggcatgagcaaccactcggtgatcatcaccaagaagctgct

SEQ ID NO: 19014 - DNA, 216 bp, Zea mays
gccccttcctccgcggctacctcaaccgctgccacgacctcaagacgcgccgcatgaaggtcttcgaggacaacttcgtacaggagcgcaagaaggtgatggctcagactggtgagatccggtgcgccatggatcacatcctcgaggccgagaggaagggcgagatcaaccacgacaacgtcctctacatcgtcgagaacatcaacgtcgcagcga

SEQ ID NO: 19015 - DNA, 90 bp, Zea mays
gctgaactccgacctcaggaagctggcagtgaacctaatccccttcccccgcctccacttcttcatggttggcttcgcgccgctgacgtc

SEQ ID NO: 19016 - DNA, 218 bp, Zea mays
  unsure (1)..(218): unsure at all n locations
cggacggtggnttccgcatggagccggatgccttccgtggcactgcaccaatcaacctcacggaacgcctctgccagatcctgcgctggtcgggcggctcccttgaaatgttcttctcacactgcccgctccttgctggccgtcgactgaacttgatgcaacggatcgcctacaccaacatgacagcctacccaatctcatcggtcttccttgtgttc

SEQ ID NO: 19017 - DNA, 220 bp, Zea mays
gggcacgattgacccctactttgtcaagctcggtgacgccatggtcacctggatcgaggcctgggatgagctgaacccgtcgacccctgccgccgcaaatggcaaggccaagtagatgtgccatcacttcggcactggagtgaaaaagaaagtatgattgggtcctgcctaggccccatagatatagctcttttttgagaaggaagagagattaattcag

SEQ ID NO: 19018 - DNA, 194 bp, Zea mays
cccacgcgtccgcccacgcgtccgccacgcgtccgcatgatctttcacaacgatatggcaagataattgttgctgacttgactgataaacgaggtgatgaaggagatttgagcaatgcatttgctgctgaaatggacagaattcctggtgtcaggtatatacattttgatttccatcatgtttgtcgtggaggt

SEQ ID NO: 19019 - DNA, 213 bp, Zea mays
cggacgcgtgggaaaccctagccgcctgtctccctgtccggtctccactcgtccgggcgacgagaacacgacggagggtttctgcgggggatttgtttgtcgctgactcgccggcgaccaagatgaggccggttttcgtggggaacctagactatgatacccgccactcggagctcgaccacctcttctaccgctatggcaaggtcgagcgca

SEQ ID NO: 19020 - DNA, 218 bp, Zea mays
attgatcctactgcagctggtgcggtgtatgatagagaattcattgtttgttcgttggacctactgtctggacttgcagaaggtcttggcgctggtattgaaagtcttgttgcacagagcagtttgagagatctgcttttgcaatgctgcatggatgaagcagctgatgttcgacaaagtgcccttgcccttcttggagactttctagggtttgccca

SEQ ID NO: 19021 - DNA, 207 bp, Zea mays
ggtgctctcttatttatgaccccattatttactgatataccccagtgtgcattggctgcaattgtgatttctgctgttactggcctggtagattatgaagaggccatcttcttgtgggctattgataagaaagatttctttttatgggcaatcacatttatcacaacattagtttttggcattgagattggcgtccttgttggggtt

SEQ ID NO: 19022 - DNA, 274 bp, Zea mays
tgtacctcagtacggtcggaattccgggtcaccacgcgtccgggacgggctcgaattccgattcccaatccagcaaaccctaccagcctttagcaaactcagagagggacccgatggcacccaaggcggagaagaagccggcggcgaagaagcccgcagaggaggagcccgcggccccggcggagaaggcccccgctgggaagaagccgaaggggagaagcggctcccggcgggaaaatccgccggcaaggaaggcggtgttgacaagaagggg

SEQ ID NO: 19023 - DNA, 238 bp, Zea mays
ccacgcgtccgcaacgtcttatttcagcaggccatgacataagtgatggtggccttattgtttgtgttcttgagatggcatttgctggtaactgtggttttaagcttgacatagacttagaagataggagccttattgaaggactttttgcagaggagcttggcctcattattgaagtacactcgaaatatctcaacattgtgaagcaaaagcttgaaatagcaggcatttctgctaa

SEQ ID NO: 19024 - DNA, 237 bp, Zea mays
cccacgcgtccgcagctatcgggtttgagggctatgagaagcgccttgagatcacattctctgaggcacctgtctttgtggaccctcatgggcgtggtttgcgtgccctctccagggcccagattgactctgttctggatcttgcacggtgcacaattgtgtccgagctctccaacaaggatttcgactcatatgtcctctctgagtcaagcttgtttatctatcctctgaagattg

SEQ ID NO: 19025 - DNA, 238 bp, Zea mays
gaaccgccgtgccctccgtgagctcctattctgctgccctggtgctctccagtacatcagcggtgtgatcctcttcgaggagaccctgtaccagaagaccaaggatggcaagccttttgttgatgtcctcaaggagggaggcgtcctccctggcatcaaggttgacaagggcaccattgaggttgttggcactgataaggagaccaccacccaaggccatgacgaccttggcaagcgt

SEQ ID NO: 19026 - DNA, 233 bp, Zea mays
ggacgcgggctcgtcgacgaggcgtcggcgcgtgagagttcacccccggagtctgggactgggaggtacgccgtgatcttcgacgccggcagcacagggacccgtgtacacgtcttcaggttcgacaggaagctcgaactcctcgagatcggcgacgacggcatcgaggtgttcgccaaggtgaagcccgggctgagctcatacgctggacatccccaagaggctgcaaattc

SEQ ID NO: 19027 - DNA, 238 bp, Zea mays
gtgcacacatgggtatcttcacagaattgggagttctatatgctagataccgctctgagaagcttatggagcacatcaaacttttctccacccgtctgaatattcctaagcttattcgagcttgtgatgaacaacagcactggaaagaacttacctacctgtacatacagtatgatgaatttgacaatgctgccaccacaattatgaaccactctccagatgcatgggatcatatgca

SEQ ID NO: 19028 - DNA, 239 bp, Zea mays
  unsure (1)..(239): unsure at all n locations
gtgagtgcatgcgaggcctccggttgatccggctctctctcggtgcagttcgtccggganggggagataagcgaggtggagtggtgtggtcctaagccaagccaactagatcgagtcgtcaagaaggttggagaggagagagagatggggaagcaggcggcggtggtgctggccgtgaacggcaagcggtacgaggccgccggcgtggacccgtcgatgacgctgctagagtacctgcg

SEQ ID NO: 19029 - DNA, 239 bp, Zea mays
ctattacaggtctccagaggttctccttggctatccatatactaccgcgatcgacatgtggtcgtttggctgcatagttgctgaactgtttctaggtttgccattgtttcctggagcgtcagaatatgatgtgcttcagcgaatgatgaaaattcttgggggccaaccaccagatgaactgctaagggaagctaaaaacactgcaaggttttttaaacatgttggaagtatctatcctg

SEQ ID NO: 19030 - DNA, 234 bp, Zea mays
gcgcaaacgcgaccacagacagagcgcgcttcaaggccttttttttttgagataacaaggaggagaggaggagatggcggtcacgatcacctgggtgaaggcgaggcagatcttcgacagccgcggcaaccccaccgtcgaggtggacgtgggcctcagcgacggcagctacgcgaggggggccgtacccagcggcgcatccactggaatatatgaggcctttgagttgaggga

SEQ ID NO: 19031 - DNA, 234 bp, Zea mays
tgcaaccgcagatcatcctgctcaaggagggcacggacacgtcgcaggggcgcgctcaggtggtgagcaatatcaacgcgtgcacggcggtgggcgacaccgtgcggaccacgctggggcctcgggggatggacaagctcatccacgacgacaagggcggagtcaccatctccaacgacggcgccaccatcatgcgcctcctcgacatcgtgcaccccgccgccaaaatccttg

SEQ ID NO: 19032 - DNA, 232 bp, Zea mays
ggacggtggtgatggtccaacccaaggagctgggtataccgaccaaagcgtactacgctgtggaggaggttaaagagaatgcaactcagaaaagtcagaaggtatttgtccatgttccttcagaaattgcagctcatgaagttgaggaaattggagttgaacaccttctaagggatgtcaaggacacaacaataagcacacttgctacagaggtcactagcaagcttgcagc

SEQ ID NO: 19033 - DNA, 237 bp, Zea mays
cacacactcgagaactccatttcgatctcatttgaaatcaacccatcctcgtttcctccgtctagcagcctctcaccctcatggccaagatcaagatcgggatcaatgggtttggcaggatcggaaggctggtggccagggtggccctgcagagcgacgacgtcgagctcgtcgccgtgaacgaccccttcatcagcaccgattacatgacctacatgttcaagtatgacactgtgc

SEQ ID NO: 19034 - DNA, 230 bp, Zea mays
ggagaatgatcctcctccttggctgcacagaatgcgtgagttaggctatcctccgggctacctagatgtggttgacgatgaagatagaccttctggtatcaccatatttggagatggtgaggtgaaactagagtatgaggagggagagctttcagagcaaggcgaacatctccgcctaagaaaaagatgacagtggaattccctggaataaacgcccccatcccagaaaa

SEQ ID NO: 19035 - DNA, 230 bp, Zea mays
ccagaaaatctgagcggtattgatggcgcccaaggcggagaagaagccggcggcgaagaaggtggcggatgaggagccctcggagaaggcggctccggcggagaaggcccccgcggggaagaagcccaaggcggagaagcggctacctgcgggcaagtccgccggcaaggagggcggcgacaagaagggtaggaagaaggcgaagaagagcgtggagacctacaagatct

SEQ ID NO: 19036 - DNA, 267 bp, Zea mays
tgtaccctgcagtacgtcggaattccgggtcaccacgcgtccgggacggggcggacgcgtggtcgcctctgtcccttgcaagttcaatctcacctcgtaccatgggtagcgagaagtcccacatcaacattgtggttattggccatgtcgactctggcaagtcgaccaccacaggacaccttatctacaagcttggaggcattgacaagcgtgtgatcgagaggtttgagaaggaggctgctgaaatgaataagcggtccttcaagt

SEQ ID NO: 19037 - DNA, 225 bp, Zea mays
ccacggtccgggcttctccaggtggagcgagaatgcaagttttagagatcacccttcaatagttcagatttaaattgatggaaacaaaaggaaagcaactgatgttgatggaaaagtgttgcccacactggtttatatggctcgtgagaagagacctcaagaacatcatcacttcaaagctggatcactgaatgctttgataagggtatcatcagtgataagcaa

SEQ ID NO: 19038 - DNA, 224 bp, Zea mays
caacatgagaaggttcttgaggaaggtgtcctcaacccagaatcaactgttgttgcgatctttccctctccagtgcattatgctgggccaactgaggtgcagtggcatgctaaggctcgtattaatgctggtgcaaatttctatattgttggaagggatcctgctggtatgagccatcccacggagaaaagggacctctatgatgctgaccacgggaagaaggt

SEQ ID NO: 19039 - DNA, 226 bp, Zea mays
catagctactcctactactcagatccatccttattgagcttagtgtttgatccatggactcggaaggagtagcagcaaaggtggcagatgagactactaaaccggcaagccaagaagacggcgagagcaaggccgggatgactgatctgctgatgctgaccgacaagtcgcagctgcaggcgctacgcatgctgctgcggaacaacgaggagctcatgatgagcca

SEQ ID NO: 19040 - DNA, 226 bp, Zea mays
accacgcgcggtaaggcggacggtcgccagtggcagagaatccccaagcaagtaaacagggtacaggtagagggagaggtgaggagaggagaggagaggagaggttgggtctgggacaccatggctccgatgaagctgtacggggcggtgatgtcgtggaacgtgacgaggtgcgcaacggcgctggaggaggctggctccgactacgagatcgtgcccatcaact

SEQ ID NO: 19041 - DNA, 225 bp, Zea mays
atcaccagttcaccacccacctcccactcccagttcaccccgtcgtcctcggcgccaccactcctcgtcccccggcgctactcccccgctccacggtccaaggaaagatggcgtcccatattgttggataccctcgcatgggccccaagagggagctcaagtttgccttggagtctttctgggatgggaagagcagcgccgaggatttggagaaagttgccactg

SEQ ID NO: 19042 - DNA, 221 bp, Zea mays
gtgctctctctcgaaccttcttccaaagcacccgaaccctagtgatctcggaaccctagccgcgcgcggatctcggcttttccccttcctccacgccagccatggacgaggacttcgagatgcctcccgccggcgccgatgagatgatgggcgacgacgagatgggcgacttcggcggcgacgagggcccggtgatgaaggtgggcgaggagaaggaggtc

SEQ ID NO: 19043 - DNA, 213 bp, Zea mays
cgacgggcggacgctggcggaccgtggcttcaacatcggcctcacatcctacatcatcggcaacaccaccaacctcgtcgtccacgccgcaaccaacacattcaagatgagggacatggtgcggcgggtctcgatgttcgggagcgtcaaccggctgccgccggagctgagggagcagatgatggcgagcgcgcactctaggttcagcacagc

SEQ ID NO: 19044 - DNA, 225 bp, Zea mays
agagctggcacctcacaagcctcttgcaaagttcttgtgcatcaaagggattgtcttcttctctttctggcagggttttgcgctcgatgttttaacccaagcaggcgtgatcaaatcccaccatttctggctggacgtggagcacatccaggaggcgatccagaacgtcctggtgatccttgagatggtggtgttctccgtcatccagcagtacgcataccacgt

SEQ ID NO: 19045 - DNA, 224 bp, Zea mays
ccagtggccattttagatgctgcatttgttatttggatatttatttctctagctaagaccattggtaaacttcaggcaagaaggttgatggccaaacttgacatttataggaaatttgcaactgcattgatcatatctgttctggtgtctgttgggtggattggctatgagatttactccaaatcaacagatgtatttaatgaacgatggcagcatgcctggat

SEQ ID NO: 19046 - DNA, 226 bp, Zea mays
gaaaggccaccacgtcatatggttcccaggatgagaagggatcaaggaaggtcataatgtcatatgggtctaatggtgaggatgatccaagaaaggccaccacatcatatggaatacaagataaagagtatcccaggaggccaccacatcttatggagttcaaggtgagaaggacccaagggaagctaccatctcatatgggtcccaggatgatgaggattctaga

SEQ ID NO: 19047 - DNA, 228 bp, Zea mays
gtcggagaatatgaactggatactggctaattcaaagccttgtcccaaatgcaagcggcctattgaaaaaaatcagggatgcatgcacatcacatgcactccaccatgcaaatttgagttctgctggctatgtcttggtccatggtcagaacatggagagaggactggtggattttatgcttgtaaccgctatgagtcagcaaggcaagaaggagtgtatgatgaatc

SEQ ID NO: 19048 - DNA, 228 bp, Zea mays
caagaaatcatttgtgtcttacatcaaaaaatacatcaagaatctcactgctgtgttggagccagagaaagcggatgagttcaaaaagggtgtcgagggtgcaaccaagtttctccttagcaagctgaaggacctccaattttttgttggtgagtccatgaaggatgatgcgtctgtggtattcgcctattacaaggatggtgccactaatccgacattcctctattt

SEQ ID NO: 19049 - DNA, 216 bp, Zea mays
ggcgtctccgtgtacgcgttcgagggcatcggcatggtgctgccgctggaggcagaggcggcgaacaagagctagttcggcgtcacgctcgggctgtccatggcgttcatcgccgtcatgtacgggctgttcggcgtcatgggctacgtcgcgttcggcgagccacgcgggacatcatcaccaccaacctcggagccgggtggctgtcggccgccg

SEQ ID NO: 19050 - DNA, 218 bp, Zea mays
tgcgcctccatttcggcctctgtcccttgcaagttcaatctcacctccaaccatgggtaaagagaagtcccacatcaacattgtggttattggccatgtcgactctggcaagtcgaccaccacaggacaccttatctacaagcttggaggcattgacaagcgtgtgatcgagaggtttgagaaggaggctgctgaaatgaacaagcggtccttcaagt

SEQ ID NO: 19051 - DNA, 219 bp, Zea mays
tgcaatcacaacgaacaaaagctctcgatctcaccgacaccgaggaagaagagatcaatggcgtccgagcagggagtcgtgatcgcgtgccacagcaaggctgagttcgacgcccacatgaccaaggcccaggaagccggcaagctggtggtcatcgacttcactgccgcctggtgcggtccatgccgcgccatcgccccactgttcgtcgaacacgcc

SEQ ID NO: 19052 - DNA, 220 bp, Zea mays
ccacaagcgccgccgcagccggtgcctgctccttcccgatccccgaggcaaagctgcgactccgcaaccgccgccatggcgttcgagaagatcaaggtctccaacccaatcgtcgagatggacggtgatgagatgaccagggtattctggcagtctatcaaggacaagcttatcctcccatttctggacctggacatcaagtactatgatttggggatac

SEQ ID NO: 19053 - DNA, 220 bp, Zea mays
gaaacctctcaaaccctagccgcctcctgcaagtttcagagctcaggaatctgcgccatggcgagtgagacggagaccttcgcatttcaggctgagatcaaccagctgctctcactcatcatcaacaccttctactccaacaaggagatcttcctccgcgagcttatctccaactcttccgatgcgctggacaagatcaggttcgagagtctcactgaca

SEQ ID NO: 19054 - DNA, 223 bp, Zea mays
cctcatctcaagtgtgtagacgagacagagagacactgagagagcgccatggccagcctccaagtcactcctacttcggcgttcactgagtggaacgagctgaagttcgaaggcctgtacctgttccacacgcccctgggctcaggcgccaaccaagctcgggtcatagacaacaaggcgccgattggcatcggtgccaccgtagttaacaactggacagtgt

SEQ ID NO: 19055 - DNA, 224 bp, Zea mays
cccacgcgtccggcaagagcacgcagtagtgcagcagcactgaagcactacttcctgcactcactgtgctagctgctcaaaccgtagtagtaacagtccatcaccatcaccatcaccaccaatggctcccaaggttgcgctcttccttgccctaagcctcctgttcgctgccaccgcgcatggctgcgaaccctactgttccggcccagtcgtcccaacaccac

SEQ ID NO: 19056 - DNA, 233 bp, Zea mays
gcctcgccgctgttccccgcaacctatcgacccaatctcgtccgacccggcgcgtcgtcccctccagatctccgtcgccctctccaggtagcagaaactgttctgctgcagtctgacaaagtggagggcttaggagcttctgcttcttttatgtctgaacaatctttgctttatttgggattgttgggagagtactctcgtgcaactaggaaaaggcacaaggttccgtccca

SEQ ID NO: 19057 - DNA, 236 bp, Zea mays
attatttccatgttctgcgtcgccagatacaccgggacttcaggaagcctttgattgtgatgtccccaaagaacctccttcgccacaaggactgcaagtcgaacctatctgaatttgatgatcttgcgggccaccctggattcgacaaacaggggacacgcttcaagcgtctcattaaggaccagaataatcacaaggacctcgaggagggaatcaagcgcctagttctttgctct

SEQ ID NO: 19058 - DNA, 234 bp, Zea mays
gtccctcagccgcgtcgcaccgcatcgcattcaacgattcgaagctctctctgctcaagccatggcgaaaaattacccaaccgtgagcgccgagtacagcgagccgtcgagaaggccaggcgcaactccgcgccctcatcgccgagaagagctgcgcgcccctcatgctccgcctcgcgtggcactccgcggggacgttcgacgtgtcgtcgaggaccggcggtccttcggtac

SEQ ID NO: 19059 - DNA, 236 bp, Zea mays
gcaagcaattgtcaaccgactctatcttagctctctttgcaagccagtaggtcaccactcaaaagcttgtgaagcaggtgagatgggcaaggaggtggatgtgtccactctagaagccggcggcgtccgtgaccgtgactacgcggaccctccgccggcaccgctgatcgacatcgacgagctcggcaagtggtccctgtaccgcgccgtgatcgccgagttcgtggccacgctgc

SEQ ID NO: 19060 - DNA, 228 bp, Zea mays
cccacgcgtccggtttgctgtatgggttcttcattgctataatatgtggacagaggataactgaacggcattaccatgttcttgcaaagcaagagttaaccaaggagtatattgtagaagatcttgaaggcgctgactaggtgccagactgtttttcatgcgcctgttagagagttgaggattggggactatattaaacatagctgcatattacatcagataaacatg

SEQ ID NO: 19061 - DNA, 231 bp, Zea mays
ggagagcaatgaagagagagtacgaggaattcaaggtcagaatcaatgccttggttgctaaagcccagaaagttcctgaagaaggatggacaatgcaagatggaaccccctggcctggaaacaatgttcgtgatcatcctggaatgattcaggtcttccttggccaaagtggaggtcttgactgtgagggaaatgagctgccgcggttggtttatgtttcaagagagaaac

SEQ ID NO: 19062 - DNA, 184 bp, Zea mays
caatgataagcagctcaaaattgagcatgaattatgtgagagggtcataggccatcttgaggaagggaaagatgtccgtttaggagattggaaagctgctgacattgagatcttgaatacattccagctactttcagctaagccagttgtctatttggtgaatatgagtgagaaggatttccag

SEQ ID NO: 19063 - DNA, 157 bp, Zea mays
ctcaagtatccatccttatttgttgatccatggactcggaaggagttgtagcagcaaaggtggcagatgagactactaaaccggcaatccaagaagacggcgccgagagcaaggccgggatgactgatctgctgatgctgaccgacaagtcgcagct

SEQ ID NO: 19064 - DNA, 221 bp, Zea mays
gcgtacccgacgcggcccgacgtgatggtgttcaaggacctgagcctgaggatccgggccgggcagagccaggcgctggttggggcgagctggtccggcaaggtcaccgtcatcgccctcgtcgagcgcttctacgacccgctcgccgggaaagtgatgatcgacggcgaggacatccggcgcctgaacctcgagtccctgcacctcaggatcgggctggt

SEQ ID NO: 19065 - DNA, 209 bp, Zea mays
cttctacctgggcgcctaccaggcagccatcaacaacagcgacgtcccgggcctcgacgccgacgccgccgctgagcgcgacgccatcgtcttccgctcctacatcgccctcggctcctaccagctggtgatcagcgagatcgactcgtcagccgctacctcgctgcaggccgtgaagctgctcgcgctgtacctcagtggaaacaagg

SEQ ID NO: 19066 - DNA, 177 bp, Zea mays
tgatcttcttcccaagtacctgagctttttgaagggtattgttgactcagacacgctgcccctgaacgtgtcacgagaaatgcttcaacaacatagcagtctcaagaccatcaagaagaagctgatccgcaaagcccttgacatgatcaggaaacttgctgaagaagaccctgatga

SEQ ID NO: 19067 - DNA, 228 bp, Zea mays
aatcaacggcttcggaaggatcggcaggctcgtggccatgatcgccctccagagcgaggatgtcgagctcgtcgccgtcaacgaccccttcatcaccacggactacatgacctacatgttcaagtacgacaccgtccacggccactggaagcacagcgacatcacactcaaggactccaagacccttctcttcggtgacaagccggtcaccgtctttggcatcaggaa

SEQ ID NO: 19068 - DNA, 228 bp, Zea mays
cacaaggttcgagttcgtcaccgtctagtacgactgtgcgatggacgaagatgcgaggagaagatgcagatcttcgtgaagaccctgacggggaagaagatcaccctcgaggtggagagcagcgacaccgtcgacaacgtcaaagccaaaatccaggacaaggaagggattcccccagatcaacagcgactgatattcgctggcaagcagctggaagatggacgcacg

SEQ ID NO: 19069 - DNA, 230 bp, Zea mays
cccacgcgtccgcagttacacaaacggctaaggggatcacttccaagcagattctgattggtactattggtgatcaggttttggcactcgataagcgctatcttgatccacgccgttcagtgaacccgacacaacaagaaaaagaagagggcattataccattaacagattctttgcctataatacctcagtcctttgtgacgcactctcaccaagtggaggccctgcga

SEQ ID NO: 19070 - DNA, 207 bp, Zea mays
gaaaccaattgaacttgtacctgggaagaacaaaatagatcttctaagtgcaacagttgggctgtcgaattatggtgcattctttgacctggtaggtgctggaattactggcccagtaaaactgagtggactaaacggtgcgctcgatctgtcttctgcagaatggacatatcagattggactcagaggagaagatttgcacctaaa

SEQ ID NO: 19071 - DNA, 224 bp, Zea mays
ggcctctgtcccttgcaagttcaatctcacctccaaccatgggtaaagagaagtcccacatcaacattgtggttattggccacgttgactctggcaagtcgaccaccacaggacacctgatctacaagcttggaggcattgacaagcgtgtgatcgagaggtttgagaaggaggctgctgaaatgaacaagcggtccttcaagtacgcatgggtgctcgacaag

SEQ ID NO: 19072 - DNA, 219 bp, Zea mays
cacacgcgtccgaatcagaagagcggcggcgcgggcggacaaggagcaggcggaggaggagttgtgccaagccacaatgggtatctcgcgtgactcgatgcacaagcgccgagccaccggtggaaagcagaaggcctgggggaagaaccgaaagtataacctggttcgcaagccagcaaaaacaaggtgtgaagccattagaccgttaagagggtccgg

SEQ ID NO: 19073 - DNA, 138 bp, Zea mays
cccacgcgtccgcgccgccctaagccacgtgctgaggctttcgttggtctcttcgccggcgacgagcacccagcagttctgtagaaatggctgatggtgaggacatccagcctcttgtctgcgacaatggcactggaa

SEQ ID NO: 19074 - DNA, 227 bp, Zea mays
cccacgcgtccgcccacgcgtccgcccacgcgtccgcccacgcgtccgcccacgcgtccgcagggatattgagtaacaaacctgaagagaatcccgatttctacaactggaatagagtgaaggtccggtactgtgatggtggatctttcactggtgatggctctgatgcggctgcaggcctttatttccgaggtcagcgcatttggcaggccgctatggatgaccta

SEQ ID NO: 19075 - DNA, 227 bp, Zea mays
ctcctctgctctcccccacctcccggtccggcagcagagagcgggggtgcagagagatcgagatccggaggccgcgagtgggagcgccaccaccagcgactgcggcaatggcgggcacggtgacggtcccggggtcgtcgaccccctccacgccgctgctcaaggacgagctcgacatcgtgatcccgacgatccgcaacctcgacttcctggagatgtggcggccc

SEQ ID NO: 19076 - DNA, 227 bp, Zea mays
ctccggaggacacatcaacccagctgtgaccttcgggctgttcttggccaggaagctgtccctgactagggccatcttctacattatcatgcaatgcctgggtgccatctgtggagctggagtggtgaagggcttccagcaggggctttacatgggcaacggcggtggcgccaatgttgtcgcccctggatacaccaagggggacggccttggcgcagagatcgttg

SEQ ID NO: 19077 - DNA, 220 bp, Zea mays
ccattctcagccgccgtcaatcccttcccgtgctccgcaaccgctgagtgagaagaagagatggccggcaagggcgatggcccggctatcggcatcgatctcggcacgacgtactcttgcgtcggcgtgtggcaacacgaccgcgtcgagatcattgccaacgaccagggtaaccgcaccacgccctcgtacgtcgccttcaccgactccgagcgcctca

SEQ ID NO: 19078 - DNA, 220 bp, Zea mays
gttgctttgctttgctttgcttaccggcaaccatggccagcactcgtgcagcagcaactctccttttgctcctcgcgctcgccggcacctcgtcggcgcactgtccacgggcttctactcctactcgtgccccggcgtgtacggcgccgtcaagtcggtgatgcagtccgccatcgccagggagaagcgcatgggggcctccatcctccgcctcttcttc

SEQ ID NO: 19079 - DNA, 220 bp, Zea mays
ttaagaagggaacaaaaggagatgtttctgtactgaatcctactcttatgatttcagttcctgcaattttggatcgtatcagagatgcagtatttaagaaagttggtgagaagggtggcctgacaaaaaagctgtttgatttttcatataagcgaaatattgcagcaattgaagggagttggtttggatcttgggcaccagagaggatgttatgggatca

SEQ ID NO: 19080 - DNA, 145 bp, Zea mays
cccacgcgtccgcgtgatgctgcgtccttggttaacaatgatgatccaacttgtattgagatatggaaccttgtattcattcagttcaatagggaggcagatggcacattgagacctttgcaagcaaaccttttggcaactgggc

SEQ ID NO: 19081 - DNA, 222 bp, Zea mays
gaagcaagaaaactagaaaaggctcctcccgaccgcaacgcccctcatctccctcgaccccgacatccccgacccgatggcgcccaaggcggagaagaagccagcggagaagaagccggcggccgaggagaaggcggagaagacgaccgcacggaagaagcccaaggccgagaagcggctgcccgcgtccaagtcctccggcaaggagggcggcgagaagaa

SEQ ID NO: 19082 - DNA, 251 bp, Zea mays
actctatttttatggacctccctttattgttccgaccaaaggaaatggtgaagaacggtgagtttatctacaagtttgatcctacaaagaaaggtcgttttggtattctcccccgctatgcaaaggatgacaaactcatcagatggtttcaactccctaattgtttcatattccataatgctaatgcttgggaagagggtgatgaagttgttctcattacctgccgccttgagaatccagatttggacaag

SEQ ID NO: 19083 - DNA, 227 bp, Zea mays
ggatgctcgaactggcactgccccagctgttaaggttgagaaagctcacagtggagatgttcattgtgttgattggaatccccttgatgttaactatatcttaactgggtctgccgataactctgtccgaatgtgggatcgtcggaatctgggttcaggaggagctggttctccaattcacaaatgttgaaggccataaagctgctgtactttgtgttcagtggtca

SEQ ID NO: 19084 - DNA, 240 bp, Zea mays
gtctacctccgcagcttatatgccaactgcataatgtgactatgcatgctgatgctgagacagatgaggtgtatgcacagatgacactgcagccactcagtccacaagagctcaaggacccatttttgcctgctgagttaggcactgccagcaaccagccaacaaattatttttgtaaaacactaactgcaagtgatacgagtacacatggtgggttctctgttccacgccgagcagcgg

SEQ ID NO: 19085 - DNA, 242 bp, Zea mays
cggacagccacttatatcatgcgtatgcgtggctcaagcttttcaacttgcagaagagctacaataaaaacttgtctcagaaggatctacagttaatagcatcttctgttttacttgctgcactatccgtgtcaccttatgacaaaaaatatggtgcatttgagacagagaatgagaaagagcgcaacatgcgtctgtccaaccttgttaacttttcgcttgataacaagcgtgaaaacagg

SEQ ID NO: 19086 - DNA, 244 bp, Zea mays
cagagaggagagggagggtttcctcaaagagacccaaacccaagcagagaacactagcgttccctcaccagggcgtccatcccagcagccatggcgatggcgtacaagatggcgacggaggggatgaacgtgaaggaggagtgccagcgctggttcatggagatgaagtggaagaaggtgcaccgcttcgtggtgtacaagatcgacgagcggtcgcgcgccgtgctggtggacaaggtgggcg

SEQ ID NO: 19087 - DNA, 222 bp, Zea mays
ggcattgtcgtgaggcagctacctttgcatttggttctatccttgaaggtccctctgttgaaaaacttgctccactggtccaggctgggcttgatttcttgctcaacacaatgaatgatgcaaatagcgatgtaaaagatactactgcttggactcttgggagggtatttgagcttgtgcattcgccagcgggggcaaacccagtcataaatgattcaaacc

SEQ ID NO: 19088 - DNA, 238 bp, Zea mays
cccacgcgtccggatcttgtgaccctccctcagccgcgtcgcgtcgcatcctacgatccaaagctctctctgctcgcagccatggcgaagaactacccgaccgtgagcgccgagtacagcgaggctgtggagaaggccaggcgcaagctccgagccctcatcgccgagaagagctgcgccccgctcatgctcggcctcgcgtggcactccgcggggacgttcgacgtgtcgtcgagga

SEQ ID NO: 19089 - DNA, 242 bp, Zea mays
cccacgcgtccggcgcgggcggacaaggagcaggcggaggaggagctgtgccaagccacaatgggtatctcgcgtgactcgatgcacaagcgccgggccaccggtggaaagcagaaggcctggaggaagaagcgaaagtatgagcttggtcgccagccagccaacaccaagttgtcaagcaataagacagtgaggagggtccgtgttcgtggaggtaatgtgaaatggagggctcttcgcct

SEQ ID NO: 19090 - DNA, 240 bp, Zea mays
ccaaagactaagttagcgtctcctccatcgctcactgggtcagctatatcattggtttcggttatgcaggcaagaaataatgctcgggtgctgttatctggatcactcgatctgtttagcaaccggttcctgaagtctggtgttcaaaaggctgatagcaaaacaagatatgagagagctggaaacgagcaatttgtggcagagataagcaaatgggttctccatgaggggggacctcta

SEQ ID NO: 19091 - DNA, 231 bp, Zea mays
ctggtataggaccaaggatttggtgatcaagggggcagactggatagttaatgaaatgaagaaatcaggtcttcggggtcgtggaggtgcaggttttccttctggtctcaaatggtcctttatgcccaaggtttcagatggacgcccttcttatcttgtcgttaatgctgatgagagtgagcctggaacttgcaaagatagagaaatcatgcgccatgacccccacaagct

SEQ ID NO: 19092 - DNA, 233 bp, Zea mays
ggtcactcggcagtcggcacgcaggctagcagcacagcagcagccagagccatcccctctcctcgctacgcttcgcttcctcggcgccgattcctcctcctcctcctcctccctcgtccgtcccgttccggcgcgcgactcgcccgagatggcgaacgcgagatcgggtgtcgctgtgaacgatgagtgcatgctgaagtttggcgagctgcagtcgaagaggctgcaccgct

SEQ ID NO: 19093 - DNA, 231 bp, Zea mays
ggacctggcgagtttgctgatgacgttgctgcacaagcagcactagcacttggtggaaccgtgctatggcttttatcctgtcaaggttctgccatcaaagacagcaattttacctgtgaaccctaaatttcttcctcacactgatgatgagaaagaaatggtatccaggactgtgtattgtactaacattgacaagaagatcgcagaagatgaagtgaagcaattctttga

SEQ ID NO: 19094 - DNA, 235 bp, Zea mays
ggttccagaggggtctgaagaggaagcccatggcactcatcaagaagctgcgcaaggcgaaaaaggatgctcctgctggtgagaagccagagccagtcaagacacatctccgtaacatgatcattgtccctgagatgattggaagcattgttggggtctacaacggcaagacgttcaaccaggttgagatcaagcctgagatgatcggccactaccttgctgagttctccatctc

SEQ ID NO: 19095 - DNA, 222 bp, Zea mays
gacctgggtccctcgccttcgccgccgaatccgagactccgatctcgggttcacagcagcgcacagagcagccccgactcccggcccgatccgcgctctcctctccgtcgcttcagtcatggcaggaatggcacctgagggttctcagttcgatgctaagcactatgattctaagatgcaggagctgctgagcaccggtgagactgaggagttcttcacttc

SEQ ID NO: 19096 - DNA, 222 bp, Zea mays
cccacgcgtccgctctttccctggcattatcgtacccgacccttgctgctgtgccccacatgtttatcaatgggtacaagaacgtgcttgctgttgctgtggagacggactactcgtacccacacgccgacaagatcaaggagtacctcaaggacccgagcaagtttgctgttgctgctcctgtagctgctgcggactctagtgctgctgctgcccccaagg

SEQ ID NO: 19097 - DNA, 220 bp, Zea mays
cacacacgtccgcccacgcgtccgaagaaaataaaaccatttgggtcggtgacctccagtactggatggatgaaaactacctacataactgcttcgggcccagcggcgaggtggttacaataaaagttatccgcaataggcaaacaggacagtcagaggggtatggatttgttgagttcttttctcatgcatcagcagagaaagctcttcagaattttac

SEQ ID NO: 19098 - DNA, 219 bp, Zea mays
ggcgaatttgacttgttcaagatagctagggcaacaccagggtttgttggtgctgacttgaaagcattagtggataaagcaggaaatctagcaatgaagagaataattgatgaaagaagggctcggtgttgcattgagcaggacggtagtagcaagcatgactggtggagacaaccttgggatgaaagtgaggtggacgaactacatattaccatgatt

SEQ ID NO: 19099 - DNA, 221 bp, Zea mays
ccacgcgtccgaacgagaagaacggcggcgcgggcagacaaggagcaggcggaggaagagctgtgccaagccacaatgggtatctcacgcgactcgatgcacaagcgccgtgccaccggtggaaagcagaaggcctggaggaagaagcgaaagtatgagcttggtcgccagccggccaacaccaagttgtcaagcaataagacagtgaggagggtccgtgt

SEQ ID NO: 19100 - DNA, 220 bp, Zea mays
aaactgtggagtacaagaacatcagcttcactgtctgggatgtcgggggccaggacaagatcaggccactgtggaggcattacttccagaacacccagggtctcatctttgttgtggacagcaatgatagggaccgtgttgttgaagcaagggatgagcttcaccgaatgctgaatgaggatgagttacgtgatgctgtgttgcttgtgtttgctaacaa

SEQ ID NO: 19101 - DNA, 218 bp, Zea mays
ggcagcatctgcatctctcgcccacctccgctccgcctactgctgctggtggtagggaggcggagaaggaggcccttgcacccgcacgccggccggatcagagccgtagcaaccaccacccatggcggacgtgcacgaacctttggtgcgccgtaagaggaagaaggttttggtggactacttggtgaagttccgatggatcctcgtgatcttcgtgg

SEQ ID NO: 19102 - DNA, 216 bp, Zea mays
gaagaagaatggcgttgctcggcgagtacagcagtcaggagctgctccagggtcagctccagctctggcaccagttcctgggcttcttcaagtccctcgcactcgcagtcgccatggacctccgcatcgccgacgccatccaccgcctcggtggcgccgccacacttccccagatactcgcggaggccgggatcaagatcgacccgcgcaacaaca

SEQ ID NO: 19103 - DNA, 214 bp, Zea mays
cctgggcatctcgctcatcgagatcctctccaagcactcctccgacgaggtgtacctcggccagcgcgacgagcctgagcgctggacgtcggacgccagggcgctggacgcgttcagaaggttcggaagccggctggtggagatcgagaagcggatcaggacgatgaacgacagcccgacgttgaagaaccggaaggggccggtggagatgccg

SEQ ID NO: 19104 - DNA, 217 bp, Zea mays
gaagaaattgagaagtggcaaaaccccatactgaaggatgaaaggcttccagaatggtataagttcactctttttaatgagctttactttctggtagctggggggactgtttggacagatggtcaacccccagcaatcgatgagaaaaagagtcctggttttaatcaccagaagtcctcaaagaggggtactaaagacaccaatcagggatctgtta

SEQ ID NO: 19105 - DNA, 220 bp, Zea mays
ggacagactctcctcagtaactatagtttttttgttccttgggaggatagcaaaaatatatccttggttttcttgaacagataacatttcaggtgtgcttctgaagagagatttcgttgaacaggatgaatgcattggcagcaaccagcaggaacttcaagcaggcagctaagctgctgggcctcgactccaagctggagaagagcttgctcattccatt

SEQ ID NO: 19106 - DNA, 212 bp, Zea mays
gagagagaggcgaggaaggagggagagagcacgggggcttgatcgaagatggatgccggagcaaaggtggtgaagaaggccgcggcggggcgtcgcggcgggggcggccccaagaagaagccggtctctcgctccgtgaaggccggcctccagttccccgtaggccgtatcggccgctacctcaagcagggtcgctactcccagcgtgtcgg

SEQ ID NO: 19107 - DNA, 213 bp, Zea mays
gcggtcgtccctcagccgcgtcgcaccgcatcgcattctacgattcgaagctctctgctcgcaggggaccatggcgaagaactacccaaccgtgagcgccgagtacagcgaggccgtcgagaaggccaggcgcaagctccgcgccctcatcgccgagaagagctgcgcacccctcatgctccgcctcgcgtggcactccgcggggacgttcga

SEQ ID NO: 19108 - DNA, 212 bp, Zea mays
gcgacccgtaccccgcctcccggttcaaccaaatccctctcgcctcatccccaccagcgcaaagccgccctatcgtcctgtcgtgagaagcaatggcgggccgtggcaaggcgattggcgctggtgccgcgaagaaggcaacgtcaaggagctccaaggctgggctgcagtttcccgtcggcaggatcgctcggttcctcaaggccggcaag

SEQ ID NO: 19109 - DNA, 210 bp, Zea mays
ggcggtggcggacccgtccagcccgtacaaggtgcggctgctgatcgaggactacccgtacgcgagcgacgggctggccatctggcacgccatcgagcagtgggtgggcgagtacctggccatctactaccccgacgacggcgcgctgcggggcgacgaggagctgcaggcgtggtggaaggaggtgcgcgatgtcgggcacagcgacca

SEQ ID NO: 19110 - DNA, 211 bp, Zea mays
cccacgcgtccgcaccccggcagtgccatccgactccctgcacctgccatggctgccgctctcgtgtctgtgcctcgcatcaagttgggctcgcaggggctggaggtctccgcgcagggcctcggctgcatgggcatgtccgccttctacggcccgccaaaacccgagtctgagatgatcaagcttatcgaccacgccgtcgacgccgggg

SEQ ID NO: 19111 - DNA, 213 bp, Zea mays
ggccaagggagacaaccagagctggaagatcctgccctggggcgacgaagcctacgccgcgggaggcagcagcgccgccaacgcgccccgcttcggcggcggcggcgagcccaccgtccgcatctactgcaaggccgacgaggggttcagcgccacggtccgcaacggcgccgtgtgcctcgcgcccaccaacccgcgcgacgagtaccagca

SEQ ID NO: 19112 - DNA, 213 bp, Zea mays
gcggcggacacggaggcgaaggaggaggagcagcagcagcaggcggcgccgaggagcggcatcccactcagtgcttgcaaccatggctaggggattgaagaagcacttgaagaggctcaatgcgcccaagcattggatgctcgacaagcttggcggagcttttgctcccaagccatcttctggacctcacaagtccagggagtgccttcctct

SEQ ID NO: 19113 - DNA, 214 bp, Zea mays
gttcgcatcacggaggagaggatcctgctggacggctcacctgaaacacctatcgactacattcaagttcagattgccaatgtcgagtccaaatttcccagtgcgatatctgagactggagaaatcactgtggagggcagagtgaaggatggtgttcctcatctaacaaaggttggagcattccaggtggatgtgagcttggaaggaagcctca

SEQ ID NO: 19114 - DNA, 176 bp, Zea mays
gtggccgccagaggaatggctcacgcccacctcacttctgcaagagcagtggtgccatttcacgcaacatcctccagcagctgcaggagatgggcatcattgatgtcgatcccaagggtggacggcgcatcacctcccagggaaggcgtgatctggaccaggtggctggaaggggt

SEQ ID NO: 19115 - DNA, 185 bp, Zea mays
cccacgcgtccggccgccgccctaagccacgtgctgaggctttcgttggtctcttcgccggcgacgagcacccagcagttctgtagaaatggctgatggtgaggacatccagcctcttgtctgcgacaatggcactggaatggtcagtgctggttttgctggcgatgattcaccaagggcggttt

SEQ ID NO: 19116 - DNA, 170 bp, Zea mays
cccacgcgtccgcccacgcgtccgcttatcatccccatccgcacctctctccatctccctgctcctccgcctccttcttgatccagccaagccagggatcgccatgtcggactcggaggagcaccacttcgaatcgaaggccgacgccggagcgtccaagacctacccgc

SEQ ID NO: 19117 - DNA, 198 bp, Zea mays
ccagtgcttatcagagccagatgaatcttatgaccactttgaatgggctattgggacagatgaaggagaatccgatatttttggctttgaaaatgttggaatgaatgcacaagtccacagaaatggaatcgatcttgatcagtttgaggactacttcataacgttgcgagcttggaggcttgatggccagtgcacaga

SEQ ID NO: 19118 - DNA, 202 bp, Zea mays
gagccgcgcacctatctggcaagcgacgccgcggcctcgatcggagtcggaggcgaacacccccatggcggcggctggcggcggcgcaggagggaaggtatccttcaagatcatcctcacctccgaccccaagctccctttcaaagtgttcagcgtgcccgaggcggcgcccttcaccgcggtgctcaagtacgccgcggag

SEQ ID NO: 19119 - DNA, 220 bp, Zea mays
gcaaagtctgctgggatgccatgtcctgactataaccgcatgcatgagggcttcaagcttgcatacactgagatggcaagacagtacccttgctttggatttgcagctaagatgccgaacatcgaatggtggaggacatgtgttaagaattcattcgttaaggctggctatgattatgatgaggagacatttgagaaagtcttcaggcgcatttattcgg

SEQ ID NO: 19120 - DNA, 216 bp, Zea mays
tgcactttgctttaaccatgtaaactattacgtcgacatgcctgcagaaatgaaggaacaaggattcacagaaagccgtttacaactactctctgatatcagtggcactttttaggccagggggtctaacagcactagttggtgtgagtggagctggaaagaccactttaatggatgtcctggcaggaaggaaaactagtggagctattgaaggag

SEQ ID NO: 19121 - DNA, 127 bp, Zea mays
cccacgcgtccgatttgatttgcgttcactgcgttgcgtttccttggaggggattgttctctcctctcctttggattggaggtccctccttcttctccgctctctctcagaggaatgcctagggatc

SEQ ID NO: 19122 - DNA, 145 bp, Zea mays
ggatgactggagcacttatgccaaactcactgatgagattggacagaaagtgcagattgtaggagatgatcttctcgttaccaaccccaccagggtcgccaaggccatcaatgagaagacctgcaatgctctcctcttgaaggtg

SEQ ID NO: 19123 - DNA, 232 bp, Zea mays
cctcgttcctgtcgcgcaccacgacctccacttccacatctcccccggcgtcggcgcggtcagttgaaccatggcggactccaaggccacctcggcggtcaccctccgcacccgcaagttcatgaccaaccgcctcctggcccgcaagcaattcgtgcttgaggtgatccaccccggcagcgctaacgtctccaaggcgctgttcacggatcggcttgccacggcgtactag

SEQ ID NO: 19124 - DNA, 143 bp, Zea mays
cattgatgaagctcaccggataaaaaatgaaaattctcttctatcaaagactatgaggatttacaacactaattatcgtctcctcatcacaggcactccactccagaataatctccatgagctctgggctctcctcaatttct

SEQ ID NO: 19125 - DNA, 230 bp, Zea mays
caaagaacaaccaaaggatgatgacgatctactacagcaggcacttgcaatgtcaatggagggtggtgcttcaggatctgcagctgtgactgactctgctatggcagaagctggtgcagttgaccctgacttggcattggctcttcaaatgtctgtccaggatgcaaacatgtccagtgacactgatatgagtaaggtgtttgaagacagaacgtttgtgtcatctatcc

SEQ ID NO: 19126 - DNA, 235 bp, Zea mays
gccgacagggaaagccgtgttgcaagaaggggaattccgctgcgagatccgtgaacggttcagagatggcacagacggtgttcaccccctctttggaagcgatgaagcatgtcaaggcagagaacggagtcattctcaccaagcccttccttgatgtctgcaagcaaatattgcctgtcctcgataaatttggaggtgctatggcaattgtaaagagtgatatcggcggcaatat

SEQ ID NO: 19127 - DNA, 232 bp, Zea mays
aggagtccgatatcatgaaggaggacgacagcaactggcctgagcccgaccgcatcggccgacaggagctcgagatcgtcatgggcaacgaacacatttcattcaccacttccaagatcggctccctcgtcgatgtccagtccagcaaggacccggagggactccggatcttctactacctcgtccaggatctgaagtgcttcgtgttttcactcatcaacctccacttcaa

SEQ ID NO: 19128 - DNA, 231 bp, Zea mays
cgccgcaagccgtccgccttgcccttcacgaaggcttggtcctcctccttgtatctccactccccccttcacagatccgttcctccagctagggttagcgttcctctgcagcgatggcgatcaagcggaccaaggcggagaagaagatcgcgtacgacaagaagctgtgcagcctgctcgatgagtacaccaaggtgctcatcgccctcgccgacaacgtcggttccaagc

SEQ ID NO: 19129 - DNA, 229 bp, Zea mays
atccaaacaggccctttccgagtggtcaaaatgaaactcctctggtgaaatggagaatccaggggatggatgagtcatctttacctctgtcagtcaattgctggccgtcagtatctggaaatgaaacctatgtgaacattgaatatgaagcttctgagatgtttgatctgcacaacgttgtcatatctatacctctgccagcacttcgggaggctccgagtgttagaca

SEQ ID NO: 19130 - DNA, 225 bp, Zea mays
ccacggtccgcaagtccgttaaggaccttgtcatgctgctgttcgagacggcgctgctcacttctggctttagcctcgacgatcccaacacctttggcagccgcatccaccgcatgctcaagctgggcctgagcatcgacgaggacgaggaggctccggaggctgacaccgacatgccccctctggaggatgacgctggcgagagcaagatggaggaggtcgact

SEQ ID NO: 19131 - DNA, 227 bp, Zea mays
aatgaccttgatgagaacctgcagagggaattccacaggtacctggatctgcgtggcatttcacccaggaccacaaatttcttgcacctgtacatgatcaacaaggacagccgtgagtacctgctctggctgagaaagctgaaggatttcttcaagcagtaggtgtgaagacctgaagatcagctttatctctcttttgttcctgctagggccttctcggttattcc

SEQ ID NO: 19132 - DNA, 96 bp, Zea mays
gcagtgaaagattcaattgttcaagggttccagtggggtgctagagaaggtcctttgtgtgatgaaccaattaggaatgtaaaattcaagatctta

SEQ ID NO: 19133 - DNA, 209 bp, Zea mays
  unsure (1)..(209): unsure at all n locations
cggacgctggncgtgacgcgtgggtgacctaccaggccgggctggcgccgccgggcggggcgagcgcagtccaacgacggcacccacaccgcgggcgaccctgtgatgcacgactaccggagggcccggtaccttgccttcttctacagcaactccacctccttcgtggcgtccgtggtcgtcgtcgtgcttctgctgccggagtcgct

SEQ ID NO: 19134 - DNA, 217 bp, Zea mays
ggacctgggcaggatcttcaacctcagaggcgtcgctctgggcaacccggtgctggagttcgcgacggacttcaacgcccgcgccgagtacttctggtcgcacggcctcatctccgacgccacctaccgcgtgttcacctccgcctgcaactactcccgctacgtgaccgagtactacggcggctcgctgtcgccgctgtgcgcccgggtgatgaac

SEQ ID NO: 19135 - DNA, 102 bp, Zea mays
gaggagatgaagaaaaatgctcaagctgcaggagttactgctcattactatgaggatgagactgctcctactggcacatgtgctgtatgtgttgttggtggt

SEQ ID NO: 19136 - DNA, 160 bp, Zea mays
gctaagccgagctaagaagcacagcaagtctcaccagactagcggctagcgcgagaatggccaaggacatcgaggccgcggcgcacgagggcaaggactactcggacccgcctccggcgccgctggtggacgcggaggagctgaccaagtggtcgctgta

SEQ ID NO: 19137 - DNA, 197 bp, Zea mays
cttaaagatttgaagattagatacagacaagatgctcctcttgtattacatggaatcacctgcagtttccacggtggagataagatcggtatagttgggcgaacaggaagtggaaagacaactttaattggtgcactgtttcgtcttgttgagccaactggagggaaaataattatagactctatagacatcaccac

SEQ ID NO: 19138 - DNA, 158 bp, Zea mays
aacaactctcaagccctaagctcggctgtgtgcttcatgctggatcaacgggacggtgataacaccgcatttgttcagttcccacagcgcttcgacaatgttgaccccacggaccgctatggtaaccacaatcgtgtcttctttgatgggaccatgct

SEQ ID NO: 19139 - DNA, 231 bp, Zea mays
ggggaaacaagattgggcagccacacaccgtgccctgcaaggtcaccggcaagtgcgggtccgtcaccgtgcgtatggtgcctgcgcccaggggttctggcatcgtcgccgcgcgcgtgcccaagaaggtgctgcagttcgctggcattgaggatgtcttcacctcgtcccgtggctccactaagacccttggcaatttcgtcagggcaaccttcgactgcctcataaaga

SEQ ID NO: 19140 - DNA, 225 bp, Zea mays
ggacgcgtggtctggccaggtctctcccatatcgggttctcccttcctcttcctgtttccgcgcgacagatcgccgccccgggtgggctctagatcccgatggcctcgcgccgccgcaccctgctcaaggtcatcatcctcggcgacacggggttgggaagacgtctttgatgaaccattatgtgaacaagaatttcagcaaccagtacaaggctaggtttgggg

SEQ ID NO: 19141 - DNA, 241 bp, Zea mays
cccacgcgtccgcccacgcgtccgcccacgcgtccggccgcgcctcatggcgatcatctcctccatcgagcagaaggaggagggccgaggcaatgaggaccgagtaacactcatcaaggattatcgtggcaagattgagactgagctgaccaagatctgtgatggcatcctcaagctgcttgagacccatcttgtgacgtcttccactgcccccgagtccaaggtcttctatctcaagatg

SEQ ID NO: 19142 - DNA, 235 bp, Zea mays
agaagcctccaccctccagcgcctccaccctcctcgccgcctcactccctctgaggtcgcagatccgtccggttagacgaagccgcccgcacccatggcctccggtgagctcgcctgcacctacgccgccctcatcctcagcgacgacggcatcgccatcaccgccgagaagatcgccaccatcgtgaaggcggccaacatccaggtcgagtcctactggccggcgctcttcgct

SEQ ID NO: 19143 - DNA, 212 bp, Zea mays
aagtaagattggtgtcattgagtccttgctggcgaaggtcgatatcctcatccttggtggtggtatgatctacacattttacaaggcacaaggatattctgttggaaaatctctcgtggaagaggataaacttgagctcgcaacttctcttattgagaaggcgaaggcaaagggggtttctcttttgcttcccactgatattgtagtagcgg

SEQ ID NO: 19144 - DNA, 230 bp, Zea mays
gaaacatagctacctactactcaagtatccatccttattgagtacagtgttgatccatggactcggaaggagttgtagcagcaaaggtggcagatgagactactaaaccggcaatccaagaagacggcgccgagagcaaggccgggatgactgatctgctgatgctgaccgacaagtcgcagctgcaggcgctggcgatgctgctgcggaacaacgaggagctcatgatg

SEQ ID NO: 19145 - DNA, 233 bp, Zea mays
cgcgtgattccgcatcccgttcgcgagcgcgacacacgctgacagctcacggctgaccttcccgacggcctccagctccatcttgattcttgaggcgaagcccggtgcgtaagagtctgccatggccagcgagaataaggtctttgggttcgaggaagtcgccaagcacaacgtcaccaaggactgctggatcatcatcgccggcaaggtgtatgacgtccctccgtttatgg

SEQ ID NO: 19146 - DNA, 181 bp, Zea mays
gtctggtgtgtcgctgcttgcactcttcaaggagaagaaggagaagccaaggtcttagatcacttttgctggatcatctcacgccaagggcatcgttctggagaagattggtattgaggccaagcagccaaattcggccatccgtaagtgtgcccgtgttcagctggtgaagaatggaaag

SEQ ID NO: 19147 - DNA, 152 bp, Zea mays
tggcttgctgcttgatgtaccgcggtgatgttgttcctaaggatgtcaacgctgcagttgcaaccatcaagaccaagagaactgtccagtttgtggactggtgccccactggattcaagtgtggcatcaactatcagccaccctctgttgtc

SEQ ID NO: 19148 - DNA, 196 bp, Zea mays
gtggcctttggcgtaatgttgccaggtatctgagtccactttcagctgctcctttggtggcactagttggatttggactgtatgagctaggatttccatcggttgccaaatgtgttgagattggtctacctcaactcatccttcttgtgatctttacaatgtacctgccacatgctgttcacatgctgaagtctat

SEQ ID NO: 19149 - DNA, 232 bp, Zea mays
ccacgcgtccggagagatcagcgacttaacaacaataatggccaccgccatagttcccacggacgccgagctgctgcaggcgcaggccgacctgtggcgccacagcctctactacctgacatccatggcgctcaagtgcgcggtggagctccacatcccgaccgccatccacaacctaggcgggtctgccacgctgccggacctcgtggctgagctttccctggaaggggaa

SEQ ID NO: 19150 - DNA, 214 bp, Zea mays
gaaggagaaaagcagttcttcagctaggcaggagggcacaggaaggaggagatggcgtcaaagaggattcagaaggagctcaaggatctgcagaaggaccctcccacctcgtgcagtgcaggtcctgttggtgaagacatgttccactggcaggcaacaataatgggtccatctgatagcccatattctggtggagttttcctagttacaatcc

SEQ ID NO: 19151 - DNA, 217 bp, Zea mays
acaccatccgccacgaccacgactccacgagagagcggaggaggagggggagcaatggcagagccgggccagcagttgctgcggtcgttcgtggaggtggcagcgggctcgcacttccctatccagaacctgcccttcggggtcttccgccggcgggggtcgccaccgcatgctccgcgccccggggtggccatcggggacttcgcgctcgacctcg

SEQ ID NO: 19152 - DNA, 216 bp, Zea mays
ccaaggccggatcggcggcctctcagatctcgccggccgccgtgagacagagaccgaacggggggttgaccggtgctcgggaggaagatgtttagcgggacgcagcagaagtgcaaggtgtgcaccaagacggtgtacccgatggaccagctctccaccgacggcgtcgtcttccaccgctcctgcttcaagtgccagcactgcaagtctaccctc

SEQ ID NO: 19153 - DNA, 211 bp, Zea mays
cccacgcgtccggactagttctacatcgcggcgcgcgctcgatctagaactagcccacgcgtccgggccaaggaaattgacctgtattcaaccaaccaggactgtgtaaagatgcttgttggaaataaagtagacaaggaaagtgacagccctctcacgaaaaaggagggaattgaatttgccagggaatacggttgtttgtttctagaat

SEQ ID NO: 19154 - DNA, 214 bp, Zea mays
ctttatgacagcgattggaatccacaagctgatctgcaagctcaggaccgtgcacataggataggtcaaaagaaagaagttcaagtgttccgcttttgcactgagtacacaatcgaggaaaaggtgattgagagagcatataagaagctagcattggatgctttagttattcagcaaggacgattggcagagcagaaaactgtcaataaggatg

SEQ ID NO: 19155 - DNA, 215 bp, Zea mays
gaactcgagacctcgcccgcccaaatacaaaagcctcagatctcagtgaccagcgccgccgcttcgttcgtgtcgaatagagaagagaggaaatggcggcgagcgagggcgtgctcctggggatgggcaaccccctcctcgacatctccgccgttgtcgatgacgccttcctggcaaagtatgacatcaagctgaacaatgccattctcgctgag

SEQ ID NO: 19156 - DNA, 218 bp, Zea mays
gcaattgtcaaccgactctatcttagctctctttgcaagccagtaggtcaccactcaaaagcttgtgaagcaggtgagatgggcaaggaggtggatgtgtccactctagaggccggcggcgtccgtgaccgtgactacgcggaccctccgccggcaccgctgatcgacatcgacgagctcggcaagtggtccctgtaccgcgccgtgatcgccgagtt

SEQ ID NO: 19157 - DNA, 208 bp, Zea mays
gttgttgctgctgctgttttgtcgggtaaccgtaacttcgagggtcgtgtgcaccctttaactcgggctaactatcttgcttcgccacctcttgttgttgcttatgcacttgccggaactgttgatattgattttgagaaagagcccattggatttggaaaggatggcaaggaagtctacttcagggatatatggccctcgacagaag

SEQ ID NO: 19158 - DNA, 210 bp, Zea mays
gagacatgctaccaaatagctcttgcaatcaaaaaggaggttgaggatcttgaggctgctggtattcaggtgatccagatcgatgaggcagctctaagggagggtctgccactacgcaagtcagagcatgcattctacctggactgggctgtccactctttcaggatcaccaactgcggagtccaggacaccacccagatccacacccac

SEQ ID NO: 19159 - DNA, 209 bp, Zea mays
ggatggaagggaagaaaggaatttatgatcattcgccagagaattgtcaagctacaggctcatgtacgagggcatcaagtgaggaagaactatcggaaggtagtctggtcagtcggtatcgtcgagaaagtcatactgagatggaggagaaagaggcctgggttacgcggttttcggccccagaaacaactagaaggtccatcgcaaat

SEQ ID NO: 19160 - DNA, 211 bp, Zea mays
gacaaatgttattggtaccctgaacatgctaggacttgcaaagagagttggagctaggattttgttgacatcaacctctgaagtttatggtgatccacttgagcatcctcaaactgaggcctactggggcaatgttaacccgattggtgttaggagttgttatgatgagggtaagcgtgtagcagagacgctgatgttcgactatcacagg

SEQ ID NO: 19161 - DNA, 209 bp, Zea mays
ctcaagcgccactagctgaagcagaagcagcccttgaggcacgcaagaaacctccagaggacaatggtccccgtattgttggtgaaggccttgtgattgacgaatggaaggaacgaagagagaggtaccttgctcgccagcagatcgaaggtgttgattcggtgtagacacgaggcagccctgtaaactatgcagaatgaacataccgt

SEQ ID NO: 19162 - DNA, 206 bp, Zea mays
ggcgagatcacgaccaaggcgaccgtggactacgagaagatcgtgcgcgacacctgccgcgagatcgggttcacctccgacgacgtgggcctcgacgccgaccgctgcaaggtgctggtgaacatcgagcagcagtcccccgacatcgcgcagggcgtgcacgggcacttcacgaagcggcccgaggagatcggcgcgggcgacca

SEQ ID NO: 19163 - DNA, 212 bp, Zea mays
gcttcagccttcagctagccccaagtttagtcggccgatcgatcactgaagtagtaatggcctccgccaacagctggaccctcgagatcgcgtcgccggtggccccgcagcgcctgttccgcgccgccgtgatggactggcacaccctggcgcccaaggtcgcctcccacgtcgtcgccagcgcgcactccgtggagggcgacggcggcgtt

SEQ ID NO: 19164 - DNA, 243 bp, Zea mays
cccgatctagccggcggcaggcaccagatcccgccgcccgcaggtcccgggacgcgccccgccgaatccgccgctcctcgcactgcaacacgcccggaccacggtgcatttgatccgtcccggccgcctacacgatgtccaagtcgggagcgctggatcttgcttctggcctcggagggaagatcaacaaggtggaagtcaagtcggccgtcgatgagtatgagaaatatcatggatactatg

SEQ ID NO: 19165 - DNA, 240 bp, Zea mays
gggccacgcgtccgcccacgcgtccgcggcgtgccggcgtacaagtggtggtccgaggcgctgcacgggatctccaaccagggccgcggcatccacctcgacggcccgctccgcgccgccactagcttcccgcaggtcatcctcaccgccgcgtccttcaacccgcacctctggtaccgcatcggccaggtgatcggcgtcgaggcgagggcggtgtacaacaacgggcaggcggagggg

SEQ ID NO: 19166 - DNA, 235 bp, Zea mays
gccaatgtctctgaggtggcttacgccgtgggcaaggacacgagaattggccccaagttcctgaacgccagtgttgggttcggtggctcatgcttccagaaggacatcctgaacctggtgtacatctgcgagtgcaacggcctgcccgaggtggccaactactggaagcaggtgatcaagatcaacgactaccagaagagccggttcgtgaaccgcgtcgtggcctccatgttca

SEQ ID NO: 19167 - DNA, 231 bp, Zea mays
gcagttcacggccatgttcaggaggaaggctttcttgcactggtacacaggcgagggtatggatgagatggagttcaccgaggcagagagtaacatgaacgacctggtggccgagtatcagcagtaccaggatgccactgccgaggatgaggagtacgaggaggaggaggaagaagaggaagagacctaagtcattctccgcagtgcttggtacagatatgatattccttg

SEQ ID NO: 19168 - DNA, 229 bp, Zea mays
cagagaatccccaagcaaacaaacagggtagagggagaggagaggagaggagaggagaggttgggtctgggacaccatggctccgatgaagctgtacggggcggtgatgtcgtggaacgtgacgaggtgcgcaacggcgctggaggaggctggctccgactacgagatcgtgcccatcaacttcgccaccgccgagcacaagagccccgagcacctcgtccgcaacccg

SEQ ID NO: 19169 - DNA, 232 bp, Zea mays
cgcttccaagatgtcgaagcgaggacgtggaggttctgctggtaacaagttccggatgtcactgggtctaccagtggcagccactgtgaactgtgctgataacactggagccaagaacctttacatcatttctgtgaagggaatcaaggggcgccttaacaggcttccttctgcctgtgttggtgacatggttatggcaactgtgaagaagggaaagcctgaccttaggaag

SEQ ID NO: 19170 - DNA, 236 bp, Zea mays
cggaccgtggcggacgcgtgggtgactggcgaggcaaaagcgcaaacgcgaccacagacagagcgcgacttcaaggccttgttttttttgagataacaaggaggagaggaggagatggcggtcacgatcacctgggtgaaggcgaggcagatcttcgacagccgcggcaaccccaccgtcgaggtggacgtgggcctcagcgacggcagctacgcgaggggggccgtacccagcgg

SEQ ID NO: 19171 - DNA, 237 bp, Zea mays
acagagatgagttgattggcctcagcattttgttggggatcaactgctgatcactctacgaattagtccttggactatgcaaaattttctacatcaaggatcaccttgcgctgatgatggaactgctaggaatgatgcctcgaaagatcgcgttgggtggtcggtactcacgtgatttcttcaatcggtacggggatttgaggcacatccgacgcttgcggttctggcctctcaaca

SEQ ID NO: 19172 - DNA, 237 bp, Zea mays
tggacacggtgctcaaaaccatcgagacgttcccgccggtggtgttcgccggagaggcgcgccacctcgaggagcgcatggccgaggccgccatgggccgcgccttcatcctccagggcggcgactgcgccgagagcttcaaggagttccacgccaacaacatccgtgacaccttccgtatcctgctgcagatgggcgccgtgctcatgttcggtggtcaggtgccggtcgtcaagg

SEQ ID NO: 19173 - DNA, 228 bp, Zea mays
gtccggcagcagagagcgggggtgcagagagatcgagatccggaggccgcgagtgggagcgccaccaccagcgactgcggcaatggcgggcacggtgacggtcccggggtcgtcgaccccctccacgccgctgctcaaggacgagctcgacatcgtgatcccgacgatccgcaacctcgacttcctgcagatgtggcggctcttcttccagctctaggacctcatcat

SEQ ID NO: 19174 - DNA, 214 bp, Zea mays
gcggacacggaggcgaaggaggatgagcagcagcagcaggcggcgccgaggagcggcatcccactcagtgcttgcaaccatggctaggggattgaagaagcacttgaagaggctcaatgcgcccaagcattggatgctcgacaagcttggcggagcttttgctcccaagccatcttctggacctcacaagtccagggagtgccttcctctgatc

SEQ ID NO: 19175 - DNA, 224 bp, Zea mays
gaagatgataaaacgtgacctcggtcgaattgagaaatgggttatccgtaatgcatttgatgatgatgagaggccctatttacctaagcacattctctacaggcaaaaggaacagttcagtgatggtgttgggtatagttggatcgatggattgaaggaccatgccagccaacatgtctccgattccatgatgatgaatgctggctttgtttacccagagaaca

SEQ ID NO: 19176 - DNA, 109 bp, Zea mays
agggcaccatcttcttttcacacgagggggatggtccgaccaccgtgactggaagtatctctggcctcaagccagggctccatgggttccatgtgcacgcgcttggcga

SEQ ID NO: 19177 - DNA, 227 bp, Zea mays
cggacgctgggtatggcgactccaatgtccggccacttgaggttttcatgtgcagtgttgttcgcaagatgggctacggcgatggtttcaagtgggtctcccaatacatcaagtagggcccttgccggggcgcttgctcagcccagcgatttttttgccttgttatttgttctggttggtatttcgtcacgtgaacgatgatcatcatatcatgacagtatcatggg

SEQ ID NO: 19178 - DNA, 221 bp, Zea mays
cccacgcgtccggtaaggcgaaggagtagcagcagcaggcggcgccgagtagcggctccccatctcgagcttgccaccatggctagaggattgaagaagcatttgaagaggctcaatgcccccaagcattggatgctggacaagcttggcggagcttttgctcccaagccatcttctggacctcacaagtctagggagtgcctgccactgatcctcatcat

SEQ ID NO: 19179 - DNA, 218 bp, Zea mays
caataaggtaaggggtgacgaaaatggctccaacgaccgccaccaaggacgacagtggctacggcgacgagcgccggcgcgagctgcaggcgttcgacgacacgaagctgggggtgaaaggtctggtggactccggcgtcaagtccatcccgtccatcttccaccacccgccggaagccctgagcgacataatttctccggcgcctctgccgtcgtcg

SEQ ID NO: 19180 - DNA, 168 bp, Zea mays
caagtccatcggcatgggcagccggttcagtttcacggcaaccgatgggaacgacaaaatcaaggcgatgctccccacttactttgcgtcggaggtccactccggcaatctgaagaatttcggtctcatccgcatcctcgactacacttgcaactccgtcaaaggcaa

SEQ ID NO: 19181 - DNA, 201 bp, Zea mays
ctagatctgaaagctgcagtggttgacagctgagtgtgaaactgtgaatcgaagatgagcgtggtgggcttcgacctcggcaatgagagctgcatcgtggcggtcgcgcggcacgcgcattcgacgtggtcctcaacgaggattccaagcgcgagacacccgccatcgtctgcttcggggacaagcagcggttcatcggca

SEQ ID NO: 19182 - DNA, 154 bp, Zea mays
gtcttcttcgacatgaccgtcggcggcgccccggcgggccggatcgtgatggagctgtacgccaacgaggtgcccaagaccgcggagaacttccgcgcgctgtgcacgggcgagaagggcgtgggcaagtccgggaagccgctccactacaggg

SEQ ID NO: 19183 - DNA, 129 bp, Zea mays
agaaaagtcaacatgtcatatgggtctaatggtgaggacgacccaagaaaggccaccacatcatatgggtcccatggtgagtatgaatcaaataaggccacaatgtcatatgggttccaaggcatggaa

SEQ ID NO: 19184 - DNA, 153 bp, Zea mays
ccgctgcctccgcctctcgagtctcgtccacccgtcgtcctcctagctcctctactcgccagtcgccatgggcaagattaagatcggaatcaacggcttcggaaggatcggcaggctcgtggccagggtcgccctccagagcgaggatgtcga

SEQ ID NO: 19185 - DNA, 207 bp, Zea mays
cgccggagctcgacaaggacgaccgacgacgcacgcggagatccggcgtactgcaaattttgaaaactgaactgtaagatggcatcagcagagctttcccgtgaggaaaatgtgtacatggcgaactcgctgagcaggcggagaggtacgaggagatggttgagttcatggagaaggtagccaagactgttgactcggaggagctca

SEQ ID NO: 19186 - DNA, 171 bp, Zea mays
gaagttcaattagacaagaaggtaaagttgttggattgtcctggtgttgttatgctcaaatcttccaacagtggtgtgtctgtagcccttcgaaactgcaaaagggttgagaaaatagaagatccagtcgctcctgttaaggagatcctaagtatttgcccacatgagaag

SEQ ID NO: 19187 - DNA, 201 bp, Zea mays
accagaagagcggcggcgcgggcggacaaggagcaggcggaggaggagttgtgccaagccacaatgggtatctcgcgtgactcgatgcacaagcgccgagccaccggtggaaagcagaaggcctggaggaagaagcgaaagtatgagcttggtcgccagccagccaacaccaagttgtcaagcaataagacagtgaggagg

SEQ ID NO: 19188 - DNA, 222 bp, Zea mays
cctccaccctcctcgccgcctcactccctctgcagaggtcgcagatccgtccggttagacgaagccgcccgcacccatggcctccggtgagctcgcctgcacctacgccgccctcatcctcagcgacgacggcatcgccatcaccgccgagaagatcgccaccatcgtgaaggcggccaacatcaaggtcgagtcgtactggccggcgctcttcgctaagct

SEQ ID NO: 19189 - DNA, 210 bp, Zea mays
cccacgcgtccgtttattggttgtggaacaagttacaatgctgccttagctgcaagaccttttgtggaagaactgactggtattcctgtgactatggaggttgcaagtgacttgctggacagacaaggtcccatctacagagaagacactgcagtttttgttagtcaatctggggagacagcagataccctccttgctctagattatgca

SEQ ID NO: 19190 - DNA, 157 bp, Zea mays
cccacgcgtccgcggtgctcctgcccaagaagaccgctgagaaggcggcggccaaggaggccaagtcgcccaaacaggccgccaagtcccccaagaaggcatagaggggcgggcgcctttaccgctgtgatgttgaatgctcgtgttcagtagatct

SEQ ID NO: 19191 - DNA, 124 bp, Zea mays
acgcgatggaagagcttgtttccatggggctggtgcgcagatatggaatcagcaactacgacatcttcctcaccagagactgcctggcctacgccaagataaagccggcggtgaaccagatcga

SEQ ID NO: 19192 - DNA, 154 bp, Zea mays
gggacctggcgaggctggggggtggaaggaccggaccacggtggaggacatggatctggccatgcgggccagcctcaagggctggaagttcgtctacctcggtgacgtccaggtgaaaagcgagctgccgagtaccttcaaggccttccggttc

SEQ ID NO: 19193 - DNA, 169 bp, Zea mays
cccacgcgtccggaaacaagaccatggatgcctccaagctccgcgagcttcgcgacttcgtcgaggcgtgcaagaagaatccttcgctcctcgccgaccccaacctctccttcttccgggattacctccagagtttgggtgccaaaattcccgccgccgccccctcttt

SEQ ID NO: 19194 - DNA, 152 bp, Zea mays
gcgacaacatgattgagaggtccaccaaccttgattggtacaaaggcccaaccctgcttgaggctcttgaccagatcaccgagcccaagaggccttcggacaagcccctgcgtctgcccctccaggatgtgtacaagattggtggtattgga

SEQ ID NO: 19195 - DNA, 119 bp, Zea mays
ggatcaaccaacaaggttcatttcatccttaagcacaagaatcctaagactggaaagtatgttgagcatcatctcaaattcccaccatctgtcccatatgacaagctctctcatgtcta

SEQ ID NO: 19196 - DNA, 180 bp, Zea mays
ggggagtccgaccctaccatggtatcatacacggaattcttagagatgttcaatgatccggattggggatttgggatcctgagcactctggtgaagctcgaagagagtgaccacatacgccatggtagccacacatgctccatctgccggtaccctatcattgggtcacggtttaaggaa

SEQ ID NO: 19197 - DNA, 169 bp, Zea mays
caacccctacactcccggcggcggcgcaggagcagcagcaccagcacccgaggatggtgaagttcctcaagcccggcaaggccgtgatcctcctgcagggccggttcgccggcaggaaggcggtgatcgtgcgcgtgttcgaggagggcacccgcgaccgcccctacgg

SEQ ID NO: 19198 - DNA, 192 bp, Zea mays
gaaacatagctacctactactcaagtatccatccttattgagtacagtgttgatccatggactcggaaggagttgtagcagcaaaggtggcagatgagactactaaaccggcaatccaagaagacggcgccgagagcaaggccgggatgactgatctgctgatgctgaccgacaagtcgcagctgcaggcgc

SEQ ID NO: 19199 - DNA, 137 bp, Zea mays
atccagagcacttgtgctacatctggtgaagggttgtatgaggggcttgattggctttccaacaacatcgccaacaagtcttgaagcttttcagcagggctcctagcaagaggaagacgtctgaacaacttatggat

SEQ ID NO: 19200 - DNA, 203 bp, Zea mays
ccaaggcctcctgcatctccttcaaggactccgcctgccgctgcttcggctacatggtctccaagaagaagtacatctacaccatcgacgacgactgcttcgttgccaaggacccatctggcaaggatatcaatgctcttgagcagcacatcaagaacctcctcagcccatcaaccccgttcttcttcaaaacctgtacgacc

SEQ ID NO: 19201 - DNA, 282 bp, Zea mays
cgccgaggaaggtcgacatgtcgtctccgccgccgccggtgaagctgatcggcttcttcggcagcccgtacgcgttccggcggaggcggcgctgtgcctgaaagcgtgccgtacgagctgatcctggaggacctgttcggcagcaagagcgagctcctgctccaccacaaccccgtgcacaagaaggtgcccgtgctcctccacggcgacggcagggccatctccgagtccctcgtcatcgccgagtacgtcgacgaggccttcgacgggccgccgctgctc

SEQ ID NO: 19202 - DNA, 263 bp, Zea mays
ggcagcggcgtggggcgaggagtggaggacaccgatccccgccggagagcgcgtcacatcccaaatggcgactgccgcttcgcccgccgctgcctttccccacatcctctccctctcctcctaatcccctcccaatccccctctctctctctcttcctcgccagctggttcgttccgcacccgccgccgcattgggtgccgaggagggacgcaatggagcagtacgagaaggtggagaagatcggggagggcacgtacggggt

SEQ ID NO: 19203 - DNA, 297 bp, Zea mays
ggcaaaaccacatttgtgaagaggcatcttactggcgagtttgagaagaaatatgagcccaccattggtgttgaagttcaccctctggattttagcactaactgtggcaaaattcgcttctattgctgggacactgctgggcaagaaaagttcggtggcctcagggatggctactacattcatggtcagtgtgccatcattatgtttgatgtcacttcgaggctgacatacaagaatgttccaacatggcacagggacctgtgcagggtgtgtgagaacatccccatcgttctctgc

SEQ ID NO: 19204 - DNA, 317 bp, Zea mays
ctcagaccctcaccaaccaggcaaccaaaccttctccgatggccgcgcccgtgtcgcagccgccggtgtccgccagggcgtccacacggtttctcccccgcgggataggcgcgctcccggagtccgctcccacgtccctccggttatccgtcggccgccgtcgccgggccgccagcctagaggtgaaggcatcgggaaatgtgttcgggaactacttccaggttgcaacctatggcgaatctcatggagggggtgttggttgcgttatcagtggctgcccacccagaattcctctcactgaggcagacatgcaagta

SEQ ID NO: 19205 - DNA, 199 bp, Zea mays
ggccttcaagagcacagtgaatcggactcacttacggttagttcgtgaggtagaagccattggaggaaatgtctctgcatcagcttcccgtgaacaaatgagctatacctatgatgcattgaagagctatacaccagaaatggttgaagttctcattgacagtgtgaggaatccagcattcctcgattgggaggtcaaa

SEQ ID NO: 19206 - DNA, 298 bp, Zea mays
cttgatttccatccttttggagaattcttagccactgggtcttcagatacaaacatgaaaatatgggatactcgaaagaagagatgcatccacacatacaagggtcatacccaacgaattaatgtgcttagatttactcctgatggccgatggattgtttctggtggggctgataactcagtgatggtctgggatttgacggctggaaaactcatgcatgatttttgtcttcatgaaggtccagtcaactgcttagatgttcaccctatgagtttttattggctacagttcagttgat

SEQ ID NO: 19207 - DNA, 204 bp, Zea mays
ggcttgcttgattgttccaggtattcgcagtcgaccgtgtcctcggagcacgatgaaggttgttgctgcctacctgcttgctgtcctcgctgggaatgccagcccctccgctgaggatttgactggcattctggagtcagttggctgtgaagttgacaatgaaaggatggaactgctgctgtcccaactgagcggtaagggaca

SEQ ID NO: 19208 - DNA, 246 bp, Zea mays
cggacgcgtgggctgtagttctgttcctccccactcactcctgcgcttcctcgccgcgcggttccttctccctgatcctcctttggcttcgcggttcatggcgatgtggagggccgccgctaggagctggtcgaccgggcgctcggctcaagggccgcgcacacgtctacaggcagcaaaaagatagtcggggtgttctacaaggccggggagtatgccgacaagaaccccaacttcgtcggctgc

SEQ ID NO: 19209 - DNA, 248 bp, Zea mays
attttacctgtgaaccctaaatttcttcctcacactgatgatgagaaagaaatggtatccaggactgtgtattgtactaacattgacaagaagatcgcagaagatgaagtgaagcaattctttgagggaacatgtggtgaagtttctcgtctgaggctacttggtgattatgtgcactccacatgcatcgcttttgttgagtttgtccaagcagatagtgctattctcgctctgaactgcagtggcat

SEQ ID NO: 19210 - DNA, 122 bp, Zea mays
caacaagctgcaccgcagcaacgaacacgaaccttggcagaacgaagctgaagtagttcgctgtgaacccagtatggcaaacgcgccgaggatcctggccctcggcctgctagcgctcctgt

SEQ ID NO: 19211 - DNA, 242 bp, Zea mays
cgaactgcaagtagttcgctgtgcacccagtatggcaaacgcgccgaggatcctggccctcggcctgctagcgctcctgtgcgctgccgccggcccggccgccgcgcagaactgcggctgccagccaaacttctgctgcagcaagttcggctactgcggcacgaccgacgcctactgcggcgacgggtgccagtcgggcccgtaccgctcggtacacggcggcggcggctgcgtcggcggag

SEQ ID NO: 19212 - DNA, 238 bp, Zea mays
  unsure (1)..(238): unsure at all n locations
cccacgcgtccgcccacgcgtccgcccacgcgtccgcgtccgtctctgctccctcctctctctacctagcaagctagccagccttcctgtagcgcggcagagatggctgcccctgcctccaccacggcggcggcggcggcggcgctgctgctgctgctgctcgtgtcgctcgccgcggcggcggacatgtcgatcgtgtcctacggggagcgcacacngtaggaggcgcggcggatgt

SEQ ID NO: 19213 - DNA, 234 bp, Zea mays
cagagggtgccgtgcgtgaagaagggcgggatcaggttcaccatcaacggccactcctacttcaacctggtgctggtgaccaacgtggccggcgccggggacgtgcagtccgtgtccatcaagggctccagcaccgggtggcagcccatgtcccgcaactggggccagaactggcagagcaactcgctcctcgacggccagagcctgtccttccaggtcaccgccagcgacggc

SEQ ID NO: 19214 - DNA, 232 bp, Zea mays
cgcctcgggtcaaaccctaagcagggagttgatttatccgctgcagccatgagtaagttgcagtctgagtctgtcaaggatgccatctcccagattgttggggatgccaaggagaagaataggaagttcactgagactgtggaacttcagattggtctgaagaattatgatccacagaaggacaagcgtttcagtggctctgttaagttgccccatatccctcgtcccaaga

SEQ ID NO: 19215 - DNA, 234 bp, Zea mays
cccacgcgtccgggcgaccctccctccttcgctccttccgcgccgcctcccggccgtcgccgccatggtgaagtactcgcaggagccgggcaaccctaccaagtcggctaaggccatgggcagggatctgagggtccacttcaagaacacaagggagacagcctttgcgcttcgcaagttgtctttgaccaaggctaagcgataccttgaggatgttattgctcacaagcaggc

SEQ ID NO: 19216 - DNA, 226 bp, Zea mays
ggcagcgcaacaagtatgttggtgtatctcttgtgggaaaaactctcgctattctcggatttggaaaggtcggatctgaagttgctcgtcgtgctaaaggcttaggaatgcatgtgattgcacatgatccatatgcttctgctgaccgggctcgtgcaatcggggttgagcttgttagcatggaggaggccatgacaactgctgactttatctcgttacacatgcc

SEQ ID NO: 19217 - DNA, 226 bp, Zea mays
cccacgcgtccggaagaagtcaagtgctcatgatggacttgtgaagggtctccgtgaggctgccaaggccatcgagaagcacgccgctcagctttgcgtgcttgctgaggactgtgaccagccagattatgtcaagctggtgaaggcactctgcgcggagcacaatgttcacctggtcactgttcctgccgctaagacccttggcgagtgggctgggctttgcaag

SEQ ID NO: 19218 - DNA, 230 bp, Zea mays
ctgccctctcactcccgatccctgcaccactaccgcctcctccgcttcacccctctcgtcgcctcttgcggcgaccggcggcggatcgtccgcggcgcaagcacaaccatggggctcttcaccgtgacgaagaaggccaccacccccttcgaaggccagaagcccggtacctccggcctccgcaagaaggttactgtattccagcagcctcattatctgcagaactttgt

SEQ ID NO: 19219 - DNA, 196 bp, Zea mays
tgataagatccatgggctcattgtgccggctgatggcccacaccatgtacagatcttgcatgagccaattggtgttgcaggtcagatcatcccatggaactttcctcttctgatgtatgcctggaaagttggccctgctttggcatgtggaaatactctcgtgctcaagactgctgaacaaacccctctatcggct

SEQ ID NO: 19220 - DNA, 210 bp, Zea mays
cccacgcgtccgatcgatgactgcctctcggttatagcgttacctcttccacatcggccactctttcctgcattctacatgccgatcaatgtgaaggaccaaaagctgctgcaagccctaatagaaaatcgcaaaagatcagctccgtatgctggtgcctttcttgtgaaagatgaagaaggtactgaccctaacatcgtgactggttca

SEQ ID NO: 19221 - DNA, 183 bp, Zea mays
cgaggagcccatccggatggcctccatcctcgagccctccaagcccagctacttcccggcgatgaccaagatcgtcggcactctcggccccaagtcgcgctccgtcgacacgatctccgcctgcctcaaggccggcatgtccgtcgcccggttcgatttctcgtggggggacgccgcgtacca

SEQ ID NO: 19222 - DNA, 242 bp, Zea mays
cggacgctgggtcgaccacgcgtccgcccacgcgtccggcctccaaagccactcccaaacccccgtttcgcgagacttctcgaagcggccgccggctcctccactcgcaccgatggcgaaggaaccaatgcgcgtgctcgtcactggcgctgcgagacaaattggatatgccctggttcccatgattgctaggggtgttatgcttggtgcagaccagcctgttattctgcacatgcttgaca

SEQ ID NO: 19223 - DNA, 218 bp, Zea mays
gttttgctgctctccgaccccgagctccgaatgccgcagcatcaggcgcggcccccctcgcgtgtgaccgagatggcgctgccgaatcaggggaccgttgattaccccagcttcaagctcgtcatcgtcggcgatggtggaactggtaaaactacatttgtgaagaggcatctcactggagagtttgagaagaattatgaaccaaccattggtgggga

SEQ ID NO: 19224 - DNA, 227 bp, Zea mays
cgacgacttcaccgagaagagccgcgtgccagacccgcagaggatgatccgcgcctactcgcagtcggtggcgacgctcaacctgctccgcgcgttggcgaccggagggtacgctgccatgcacgcgtcacacagtggaacctcgatttcatggatcacagcgagcaaggtgataggtaccgtgaattggcccatagggtggatgaggctcttgggttcatgactgc

SEQ ID NO: 19225 - DNA, 232 bp, Zea mays
cccattcttaaacgaattagagcagtcttcaataaggttggtatcaaggattcggagtctgtggttgtgaggataactggatgccctaatggatgcgctagaccatatatggcagagcttggtttcgttggtgatggcccaaaaagttaccagatctggctgggtggaacaccaaaccagagtacgctagcagaatcatttatggacaaggtgaagcttgatgacatcgaga

SEQ ID NO: 19226 - DNA, 233 bp, Zea mays
gagattccatggttacccatactcatggataccatcttccatggatagctttcagcttgctcttcagtttggaatatcagttatggtgattgcctgtccttgtgccttagggctggcaactccaactgccgtgatggttgcaactggagttggtgcgtcacaaggcgttctgatcaagggtgggcaagctcttgagagtgcacaaaaggtaaactgcatcgtctttgataaga

SEQ ID NO: 19227 - DNA, 232 bp, Zea mays
ggatgccacccatactcagaggacctgtggaaaaccataaagataaacaacctaacattcctaggtgtgaagttatgcaaccgctgcaaggtgccaaccattaatcaagaggatggagtacctggtactgaaccaactgaaactctacagacttttcggtccgaccaagtgcttcgtccaagccacaaaaataaacgacaggtgtactttgggcagaatttagtctgcaagg

SEQ ID NO: 19228 - DNA, 215 bp, Zea mays
caagcacaagcgcactctagcaatggcttctgaggttgtccgccctagcgacgccgagctactaaaggcacaagccgacatatggcggctcagcctctcctacctcacgcccctgtcactgaggtgcgccgtggagcttggcatccccacggcgatctaccgccatggcggggctgcctcagccgctgagctggtcacggcgctgtctctcccct

SEQ ID NO: 19229 - DNA, 203 bp, Zea mays
ggtgaagtcattccctagggatgaccccaagaagccttgccatctcactgccttccttggctacaaggctggcatgactcacattgtccgtgaggttgagaagccaggatccaaactccataagaaggaaacttgtgaggctgttaccatcattgaaacccctcctcttgtcattgttgggctcgtggcatatgtgaagactc

SEQ ID NO: 19230 - DNA, 228 bp, Zea mays
ccacgcgtccggtgaagttgcctcatctcatccgtgctgttcgcaatgctggattaattgtcacatggattactgatcctatgcatggaaacaccatcaaggccccttgtggcctgaagactcgtccattcgactcaattctggctgaagtgcgcgcattcttcgacgtgcatgatcaagaaggaagtcacccaggaggcatccaccttgaaatgactgggcagaacg

SEQ ID NO: 19231 - DNA, 215 bp, Zea mays
gtcctgtgcgccaccctccggttgggccgttgcagagtggacagttgacgtcggcccgttagtgatggggggtcagggttcggggattttctcggccgggaccattgtttcggtctcttctgaatataataccgggagggcggtctttccctccccggccgagttttttttgtttctgtgaagaacttgaaagatttatttacagatgtacacct

SEQ ID NO: 19232 - DNA, 237 bp, Zea mays
gcgtgaccctctgaacaagcgtaggcggttggtgatgccgagaagagaagagacacttccaaaggactggcagaggaataaggataccccgtttgaagctcagatagtttccattcatacaggtgaaatgaagggatctgactggttccagatgaacttccccaaggcagaagtgctcatcctcaacttcgcctcaagcctgtactacctcccgccgttcatcgcgtcgatgcagaa

SEQ ID NO: 19233 - DNA, 258 bp, Zea mays
gtgagatttatgatcagtatggtgaagatgcccttaaggaaggaatgggcggtggaggatcccatgttgatccatttgacatcttctcatcattttttggaccctcttttggaggaggtggtggaagcagcaggggaagaaggcaaaggaggggagaagatgtagttcacccacttaaagtttctctggaagatctttacaatggcacctcaaagaagctctctctttcgcgcaatgtcatctgctccaagtgcaagg

SEQ ID NO: 19234 - DNA, 256 bp, Zea mays
catcatcagccaagtgtaaagagtgcgaagaagcagtagcaaaaggattccattctcgtgttcttggagtggtccatcgatcgagctccgtgaaagagagagagagagagcaagcaatggcgacagcagggaaggtgatcaagtgcagagccgccgtggcgtgggaggccggcaaaccgctgtccatcgaggaggtggaggtagcgccgccgcaggccatggaggtgcgtatcaagatcctctacaccgcgctctg

SEQ ID NO: 19235 - DNA, 256 bp, Zea mays
ccatcgtccatcgtcccacccaacccgcccctccgccccgcgcttcgcctgggtaccggcgtccgccgcgccccgtcccgtccaggaacaggaagagcagtaacccatccatcggggatcaccaggggagcaagatgtcgactgccgccgccccaagattgcccgctcccagatccggggcaagctatcactatcagacgaccgcggctccggtggccaacaccctctccttcgccggccacgcgaggcaggcggc

SEQ ID NO: 19236 - DNA, 205 bp, Zea mays
cagctggtaacaaggagcagattcaggctgtgatcaatgcaaatataattgcacctctggtgaactcctgcaaactgctgaatttgacatcaagaaagaagcagcctgggcaatttcaaatgccacttctggtggcacacatgatcagatcaagtaccttgttgcccagggttgcattaagccactctgtgatctgcttgtttgc

SEQ ID NO: 19237 - DNA, 251 bp, Zea mays
ggcagcgagcgtctctcctctcccacgcatcgcgccaaggaagagagagagatcgccgctccccttctcggcgtcggtggtgcgggtgccctccctcctcgagcgagatctgtctggtcacagatctatctgacaaaatggtgaagatctgctgcatcggtgctggctatgtcggtggcccaaccatggccgtcattgccctcaagtgcccagacattgaggtcgtcgtcgttgacatctccaagccccgc

SEQ ID NO: 19238 - DNA, 252 bp, Zea mays
cggcggcgcgggcggacaaggagcaggcggaggaggagttgtgccaagccacaatgggtatctcgcgtgactcgatgcacaagcgccgagccaccggtggaaagcagaaggcctggaggaagaagcgaaagtatgagcttggtcgccagccagccaacaccaagttgtcaagcaataagacagtgaggagggtccgtgttcgtggaggtaatgtgaaatggagggctcttcgccttgatactggtaactact

SEQ ID NO: 19239 - DNA, 242 bp, Zea mays
gcaccgcagcaacgaacacgaaccttggcagaacgaagctgaagtagttcgctgtgaacccagtatggcaaactctccgaggatcctggccctcggcctgctagcgctcctgtgcgctgccgccggcccggccgccgcgcagaactgcggctgccagccaaacttctgctgcagcaagttcggctactgcggcacgaccgacgcctactgcggcgacgggtgccagtcggtcccgtgccgct

SEQ ID NO: 19240 - DNA, 254 bp, Zea mays
tggtatttgtacttgcagctacaaatcttccctgggaattggatgcagccatgctccgccggcttgagaagcggattcttgtaccgcttcctgaaggtgaagcaaggcaagcgatgtttgaggaacttctgccagcaactacctcaaagttagaaatcccgtacgacatactagttgaaaagactgaaggttactctggttcagatattcgtctcgtgtgcaaagaagctgccatgcaaccactgagacgtctc

SEQ ID NO: 19241 - DNA, 251 bp, Zea mays
cccacgcgtccgctctagggtttttgattttagccgccgccgctgctcatctcacatccctcgagaagacgcctgctcctcgccgatcgatacgatggccgtcttctccgacctccacaccgccgacggcctcaagtccctcgaggctcacctcgccggcaaaacctatgtgtctggtgactccattactaaggatgacattaaggtcttcgccgcggtgccgtcgaagcctggcgctgagtttcctaatg

SEQ ID NO: 19242 - DNA, 243 bp, Zea mays
cccacgcgtccggtgccatgatatccaaccttgcatttgttttccgcaacatcttctcgaagaggggcatgaaggggaagtccgtcagtggcatgaattactacgcttgcctgtcaattatgtccctggtcatactgactccatttgctatagctatggaaggccctcaaatgtgggctgctggttggcaaaaggctcttgcagaagttggacccaatgttgtctggtggattgctgcacaga

SEQ ID NO: 19243 - DNA, 244 bp, Zea mays
ccacgcgtccggtggagagctagtccgtgtccttcgtccaaatctcgagacaacctcagttgattttaagccatacattggtccaatctataatgcaatactgggacgtttggccaatcaagatcaggatcaggaggtaaaagaatgcgccatatcttgcatgagtttggtggtctctacttttggtgatggtcttgaaagagaattaccagcatgccttcccatactcgttgacaggatgggt

SEQ ID NO: 19244 - DNA, 243 bp, Zea mays
caggttataggaactggaacattcggctgtggtacgttcatcattgagggggaagatttcattgcagagaatatcacgtttgagaactcagctccccagggctctgggcaggccgttgcagtccgggtaaccgcagataggtgtgctttctacaactgccggttcctcggttggcaagacacattatacttacactacgggaaacagtacttaagagactgttatattgaaggccattgtgac

SEQ ID NO: 19245 - DNA, 246 bp, Zea mays
cggacgctgggctacaaggacaagtgtgccgcttacgtggatgttgaagctattgtcaagaagcacgtcaaggccaccgatgctggcatgcaggccgggcttgtccgtctcttattccacgactgcttcgtccgtggatgcgacggctccgtcctcctcgacacgttcagcaacgacaccagcctgaccccagagaagttcggcgtgcccaacttccccagcctgcggggcttcgaggtgatcgac

SEQ ID NO: 19246 - DNA, 239 bp, Zea mays
gacgacggccgcttgccatgcgacaagacatacggcgtggacctcttctcgagcaccgactccgaggcggcgccgtgcatgacgtggcttgacaagcaggagccctgctccgtcgtcctcgcgtcgtacgggaccgtcgccaacctcaacaaggagcagctggacgagctcggcaacggactgtgcgattccggcaagcctttcgtttgggtgctgaggtccaacgaggcagagaagct

SEQ ID NO: 19247 - DNA, 238 bp, Zea mays
atggcatcagcagagctttcccgtgaggaaaatgtgtacatggcgaactcgctgagcaggcggagaggtacgaggagatggttgagttcatggagaaggtagccaagactgttgactcggaggagctcactgtggaggagcgaaacctcttgtctgttgcatacaagaacgtcattggagcccgccgcgcctcatggcgcatcatctcctccatcgagcagaaggaggagggccgagg

SEQ ID NO: 19248 - DNA, 235 bp, Zea mays
cccacgcgtccgcgcgtccgcgctcgtcttcctgctgatgctgctcgccgcctcagagatggggacgacgagggtggcggaggcgaggcactgcacgtcgcagagccaccggttcgtcggcgcctgcatgagcaagagcaactgcgagaacgtctgcaggacggagggcttcccgtggggcgagtgcaggtggcacggcatagagcgcaagtgccactgcaagcggatctgctag

SEQ ID NO: 19249 - DNA, 237 bp, Zea mays
cccatgcgtccgagttggttggtttgacgaagaagaaaacaactctagtcttgtggctgcgcgtctaggtgttgatgcagctgatgtgaagtcggctatagccgagagaatttcagtcatcctgcagaacatgacttctcttatgacttctttcgtcgttggatttatcatcgagtggagagtggcaatacttattctggccactttccctctgcttgtgcttgccaactttgctca

SEQ ID NO: 19250 - DNA, 239 bp, Zea mays
acaacatccttgcgccttgctaccatcatcccgaaatccaagaggtagagttcagcaacagcagcttgccgcggagtttcagaaggctaggagagacggacaggccgtttccagtgaggaagcggatgtcggggcgttcttggccgctccgtcttgctctcaaggacggccacgtcccgatgtggccaggccttggtggcagatcacttccctgcacgagtgatgaagtcgctacggcg

SEQ ID NO: 19251 - DNA, 237 bp, Zea mays
cccacgcgtccggcctatgaaccaatgaagcctttctttggagacaaaaggccaccaaattactggtggtttgtaaagggaactgaagggtggacaggtgtggtcatggttgtacttatgactatagccttcgtattggcccagccatggtttcggcgtaataggctcaaggattctaatcccctcaagaaaatgactggcttcaatgccttttggtttacgcaccacttatttgtt

SEQ ID NO: 19252 - DNA, 238 bp, Zea mays
gcttggtgatgcccagcatgttgaggaggccgagaagatgggacttgactacatggatgttgaggctctcaagaaaatgaacaagaacaagaagcttgttaagaggcttgccaagaagtaccatgctttcttggcatcagaggccatcatcaagcagattccccgtctccttggtcctggtctcaacaaggcaggcaagttcccgaccctggttactcaccaggaatccctcgagtcc

SEQ ID NO: 19253 - DNA, 237 bp, Zea mays
ctctaggttttttgattttagccgccgccgctgctcatctcacatccctcgagaagacgcctgctcctcgccgatcgatacgatggccgtcttctccgacctccacaccgccgacggcctcaagtccctcgaggctcacctcgccggcaaaacctatgtgtctggtgactccattactaaggatgacattaaggtcttcgccgcggtgccgtcgaagcctggcgctgagtttcctaa

SEQ ID NO: 19254 - DNA, 237 bp, Zea mays
gcctcaccaccattagagcgcgcgcgccaagctcgtggtgaggttttcgagatgaaggttatcgagaagatcctggaggcggcgggggatggccggacggcgttctcgttcgagtacttccctcccaagacggaggagggggtcgagaacctgttcgagcggatggaccgcatggtggcgcacggcccctccttctgcgacatcacctggggcgccgggggatccaccgctgacctt

SEQ ID NO: 19255 - DNA, 236 bp, Zea mays
cccgttccatttccccatctcccagatccaattcgcgagttctccctcctctgccgccatggcgctctctgtggagaagacctcgtctggacgggagtacaaggtcaaggatctctcgcaggcggacttcggccgcctcgagattgagctggccgaggtcgaaatgcccggcctcatggcgtgccgcgccgagttcggcccgtccaagcccttcgccggcgctaggatctcggggt

SEQ ID NO: 19256 - DNA, 221 bp, Zea mays
ggtgttctttcgcataaagaggtccacccagctgaagaagctgatgaacgcctattgcgaccgccagtctgtggacatgaatgccattgcattcctgtttgatggccgcaggttcgcggcgagcagacccctgatgagctggagatggaggacggcgacgagatcgacgccatgcttcaccagaccggaggcagcgttcctagcaccacctaaaagcagca

SEQ ID NO: 19257 - DNA, 219 bp, Zea mays
cccacgcgtccgcccacgcgtccgctccctcttgccggtcccgaataaagagcagcagcgcaagaggtcggtagagcgagaagaaggcaatggcggccgagagcttccttttcacctcggagtccgtgaacgaggggcacccgacaagctgtgcgaccaggtgtcggacgccgtgcttgacgcatgcctcgcgcaggaccccgacagcaaggtggcctg

SEQ ID NO: 19258 - DNA, 227 bp, Zea mays
ggacctggcggcaggcggcggccctcgggcattgtcccagcgggagcaggacatccagatgatgctcgccgccgatgtccacctcggcaccaagaactgcgacttccaggtggagcgctacgtgtacaagcgccgcactgatggtatctacattattaaccttggaaagacctgggacaagcttcagttggccgccagggtcatcgttgccattgagaatccgcaga

SEQ ID NO: 19259 - DNA, 230 bp, Zea mays
gcggcggcgcgggcggacaaggagcaggcggaggaggagctgtgccaagccacaatgggtatctcgcgtgactcgatgcacaagcgccgggccaccggtggaaagcagaaggcctggaggaagaagcgaaagtatgagcttggtcgccagccagccaacaccaagttgtcaagcaataagacagtgaggagggtccgtgttcgtggaggtaatgtgaaatggagggctct

SEQ ID NO: 19260 - DNA, 211 bp, Zea mays
gacattggaaggttctcaattggatgtggaattggccttctttcatatgtggttccagtctatatatcagagataacaccaaagaatcttagaggaggtttcgcaactgtaaaccagtttatgatatgttgtggggcatcacttgcttatgttctgggaacttttatctcctggcggactttggcaatcatcggagtggcacaatgtttgc

SEQ ID NO: 19261 - DNA, 233 bp, Zea mays
ggcgattcctgctccaaagcgaggagagatcgttaggcaaatcggtgatgcactgagagcaaagctccatcaccttggcaggcttgtgtcacttgagatggggaaaattcttcctgaagggatcggtgaggttcaggaaatcatcgacatgtgtgattatgctgtggggctaagtcgccaactaaatggatccattataccatctgaacgaccaaaccatatgatgatggagg

SEQ ID NO: 19262 - DNA, 246 bp, Zea mays
cccacgcgtccgccgcgtagagaccgaccccaagttcttcgacaagtcgtggcggaagctccatgacgccatccgcgagatctacaaccacaacgccagcggtctctccttcgaggagctctacaggactgcttataacatggtattgaacaagtttgctcctcagctctatgagaaactcacagaaaacatgaaagagcatcttgaagagatgcgcacatgtatagaggctgctcaaggtggttt

SEQ ID NO: 19263 - DNA, 221 bp, Zea mays
gcaacgctcgcgactcccacgttccggtgctggcgccgcttccgatcgggttcgctgtgttcatggtgcacctggcgacgatcccgatcactggcactggtatcaacccggcgaggagcctcggcgccgccgtcgtgtacaacaacagcaaagcctggagcgaccagtggatcttctgggtgggccgttcatcggcgcggcgatggagcgctataccacca

SEQ ID NO: 19264 - DNA, 106 bp, Zea mays
gcagcgcacactgaagcaccacttcctgcactcactgtgctagctgctcaaaccgtagtagtaacagtccatcaccaccaatggctcccaaggttgcgctcttcct

SEQ ID NO: 19265 - DNA, 107 bp, Zea mays
caagcccgtcgacgtctcccgcttcggcgtcatctacgccggcgcacagaagaacgtcgggccctccggcgtcaccatcgccatcgtgcgcaaggacctcatcggcg

SEQ ID NO: 19266 - DNA, 108 bp, Zea mays
gaaacatagctacctactactcaagtatccatccttattgagtacagtgttgatccatggactcggaaggagttgtagcagcaaaggtggcagatgagactactaaac

SEQ ID NO: 19267 - DNA, 137 bp, Zea mays
gcaggccattcttctcgccttactccctcacagaacccagtaaaatattgccagtcccgccgtcgagatggccccacgccgcctgctcgtcctcgccgtcgtcgccctcgcggccaccggcgccgcggccaactccg

SEQ ID NO: 19268 - DNA, 89 bp, Zea mays
ccacgcgtccggcctctacatttcttctctctctgctcctccgcctccgcctgatccatccaagacagggatcgccatgtcggactcgg

SEQ ID NO: 19269 - DNA, 113 bp, Zea mays
ggagttcattgcagatgtgcttggggtcgaggtgtttaggcagactattgctggaaatatccttgtggggagttactgcgccttctctaacaggggtggtttggttcatcccc

SEQ ID NO: 19270 - DNA, 231 bp, Zea mays
ggctctctctcctctccgcccctttttatcgcccgatctcacacattttggaacgaggagagagagagggagagattagagggagcgccctgcccaagcaaagagaaaccgcggcgcgagaagagggaggaagggcagacgggcgagcaggatgagagagatcatcagcatccacatcggccaggccgggatccagttgggaaacgcctgctgggacctctactgcctcga

SEQ ID NO: 19271 - DNA, 93 bp, Zea mays
gcaggcggagttcaagaagatgtacagcctcatcgacgagtacaagttgaagggccatatccggtggatctcggcgcagatgaaccgcgtccg

SEQ ID NO: 19272 - DNA, 238 bp, Zea mays
attattttgttcgtctgatgggacgaaaagcatctcatgttgcctttgaatgtgcacttcagtcacacccaaacatgctcatcttaggcgaggaggtagcattgtcaaaactcacactgatggaaattataagcaagatatgtgatggagtacaagcaagggcagaattagggaaatatcatggtgtgcttgttattcccgagagacttatagaaagcattccagaaatgtatgctct

SEQ ID NO: 19273 - DNA, 73 bp, Zea mays
gtattattactttcgttgaaaccgtgatgctattaagacttaatttttttatggaacatcgaatgtaaggcat

SEQ ID NO: 19274 - DNA, 163 bp, Zea mays
ggcggcgactctgttgctgctgtcgagaaggctgggctggccgacaagatgagccacatttcgaccggcggcggtgcgagcttggaactcttggaaggcaagactctacctggtgtccttgccctcgatgacgcctagatccgctgctgctgctgctactcag

SEQ ID NO: 19275 - DNA, 144 bp, Zea mays
caacatgaagccaaacatgtgatgcatcatgcttgtgctgaataataatgaagacgcatgcatgtcgtcgccaggaacaaagatcgagaaataatacaagaccagcacgcatgcatgggcatactctatatatatatatgtata

SEQ ID NO: 19276 - DNA, 224 bp, Zea mays
accttactgttcagaatttcttcaattcatcagttcctgtttctgtgcaagcaaccttcccctacaagttcgttgtgagcaagttcttgcagcctggagcatatgatctggttggttacatagtgtatgagatcgaccagcacccttaccagaatgtattctacaatggcactatcgaggttgttgaggctggaggcttactcagtgttgagtctgtgttcctc

SEQ ID NO: 19277 - DNA, 249 bp, Zea mays
cttgccatcaacaatggcgttacaccccaggcatgtctgcaagtctggcctacttcgactcgtaccgcaggacaggcttcccgccaacctggtgcaggctcagagagactacttcggcgctcacacgtacgagagggttgacatgcctggttctttccacaccgagtggttcaagattgcgcgcaactccaagatctgaacatggcctcgtgtttgcatatgccagtatgccaccgtgtcgagtaatca

SEQ ID NO: 19278 - DNA, 250 bp, Zea mays
gcgagaagaccagaaggtgagaagagagagagagagtgtgtgtgatcggtacaaggatcaccgctgtgcctgcgcgtgctgcttcaccgaatcgagtcagatcctgtccgaatccgagctaagggatggcaaccggtagtgaagcctcgaaggcagctgaggctgtggttgactggcataaacacgacagcaagaggatgctccatgcggtttaccggtgtggggatctggaccgcacatcaagtactac

SEQ ID NO: 19279 - DNA, 197 bp, Zea mays
gaggaatcccaacaaggtgtactcactaatcgggggattctgtggctcacctgtgaacttccacgcgaaagatggttctgggtacaagttcttgggtgagatcgttttgcagcttgacaagataaaccctcaggtggcctcccgcatggtttcagcattttctcggtggaggcggtacgacaagaccagacaagctc

SEQ ID NO: 19280 - DNA, 233 bp, Zea mays
gaaacaatcaaccagcaacactcttctcgtataacataatacagcgaaggtaactcacatggcaacttccatgggttgtctcgtcttgctctgccttgtttcttctctccttcccagtgccgtccttggccacccatggggtggcttgttcccacagttctatgaccattcgtgccccaaggcgaaggagattgtgcagtccattgtggcacaggctgtggccaagagaccag

SEQ ID NO: 19281 - DNA, 201 bp, Zea mays
ccacgcgtccgcccaagcgtccggcggcggcggcgcatgcggaggagaaatgcgacatgtctgtggggaaatgggtgagggagccgcggggccctgtgtacacgaacctgacgtgcccgacgctgccggacttcaagaactgccacaagtacggcaaggaccccgggcacctcttctggcggtggcagccgacggctgcga

SEQ ID NO: 19282 - DNA, 173 bp, Zea mays
cccatgcgtccgccatggttcccatccgtgtgcacacagtcctcatctctacccagcacgacgagacagtcaccaacgacgagattgctgctgacctgaaggagcacgtcatcaagccagtcatccccgagcagtacctcgacgagaagacaatcttccacctcaacccgtct

SEQ ID NO: 19283 - DNA, 238 bp, Zea mays
gtgaagcttatagctgtatatacaccgtacgtcgtcgtcgtcgttccggatcgatctcggccggctagctagcagaacgtgtacgtagtatgtaatgcacggagtgtggagctactagctagctggccgttcattcgattataattcttcgctctgctgtggtagcagatgtacctagtcgatcttgtacgacgaagaagctggctagctagccgtctcgatcgtatatgtactgatt

SEQ ID NO: 19284 - DNA, 222 bp, Zea mays
agggaagctaccatctcatatgggtcccaggatgatgaggattctagaaaagtcaacatgtcatatgggtctaatggtgaggacgacccaagaaaggccaccacatcatatgggtcccatggtgagtatgaatcagataaggccacaatgtcatatgggttccaaggcatggaagatataaggaaggccaccacatcatatggaatacgagatgaagagtat

SEQ ID NO: 19285 - DNA, 207 bp, Zea mays
tgctcctccgcctccgcctgatccatccaagacagggatcgccatgtcggactcggaggagcaccacttcgaatcgaaggccgacgctggggcgtccaagacctacccgcagcaggctggcaccgtccgtaagaacggcttcatcgtcatcaagaaccgtccctgcaaggttgtggaggtttctacctccaagcttggtaagcatgg

SEQ ID NO: 19286 - DNA, 185 bp, Zea mays
ccacgcgtccgccctgttaagaccatcaagacaaatgttattggtaccctgaacatgctaggacttgcaaagagagttggagctaggattttgttgacatcaacctctgaagtttatggtgatccacttgagcatcctcaaactgaggcctactggggcaatgttaacccgattggtgtaaggag

SEQ ID NO: 19287 - DNA, 236 bp, Zea mays
caagtatccatccttattgtaagtgctcttataagctactactagttacaagctggtttatatttaactacaagtagcaacgatttgtcttagtatatatggttcataatacatatatattggaactgagataatatatgcaggagtacagtgttgatccatggactcggaaggagttgtagcagcaaaggtggcagatgagactactaaaccggcaatccaagaagacggcgccg

SEQ ID NO: 19288 - DNA, 239 bp, Zea mays
ccacgcgtccgagagcggcggcgcgggcggacaaggagcaggcggaggaggagttgtgccaagccacaatgggtatctcgcgtgactcgatgcacaagcgccgagccaccggtggaaagcagaaggcctggaggaagaagcgaaagtatgagcttggtcgccagccagccaacaccaagttgtcaagcaataagacagtgaggagggtccgtgttcgtggaggtaatgtgaaatggagg

SEQ ID NO: 19289 - DNA, 226 bp, Zea mays
  unsure (1)..(226): unsure at all n locations
caatgcatcaaacaatgagcttgtgaggacacaaacccttgtgaagagtgccattgtgcaagttgatgctgccccattcaagcagtggtacctcactcactatggagttgacattggtaggaagaagaaaacccctgctgcaaagaaggataatgctgagggacaagaggttgaggcagcagctgaggaaacganaaagagcaacgatgtcacgaggaagcttgag

SEQ ID NO: 19290 - DNA, 163 bp, Zea mays
ccaagaaaggccaccacgtcatatggttcccaggatgagaagggatcaaggaaggtcataatgtcatatgggtctaatggtgaggatgatccaagaaaggccaccacatcatatggaatacaagataaagagtatcccaggaaggccaccacatcttatggag

SEQ ID NO: 19291 - DNA, 249 bp, Zea mays
aatttatcccttggaaagcatgtgaaggacaaaaattctgcaaacgaaattacttatgctttgcagtgtgggccagatattcttgtatgtgatgaagcgcatatgataaaaaatagaagggctgacattacacaggctctgaaacaagtaagaacacaaagaagaattgcgttaactggatctccattgcagaataatctgatggaatattattgtatggttgattttgtcagggaaggttttcttggg

SEQ ID NO: 19292 - DNA, 246 bp, Zea mays
ccaagagcaacgtggtggatgacatggtctcaagcaatgccattctctatgggcccggcgagcatcccgatcatgttgttgtcatcaagtacgtgccgtacgtgggagacagtaagagggctatggacgagtacacatcagagatcttcatgggcggcaagagcaccatcgtgctgcacaacacctgcgaggactcgctcctcgccgcgcctatcatccttgatctggtgctcctggctgagctca

SEQ ID NO: 19293 - DNA, 240 bp, Zea mays
cccacgcgtccgcttggctggacactggggtcttggcaagctgattgctttctacgatgacaaccacatttccatcgacggagacacggagattgcattcacagaggacgtgagcacccgcttcgaggctcttgggtggcacacgatctgggttaagaatgggaacaccggatatgatgacatccgcgcaccattaaggaggcgaaggcagttactgacaagcccccttgatcaaggtga

SEQ ID NO: 19294 - DNA, 245 bp, Zea mays
ggaccgtggcggacgcgtgggttgtgaccctccctcagccgcgtcgcgtcgcatcctacgatccaaagctctctctgctcgcagccatggcgaagaactacccgaccgtgagcgccgagtacagcgaggctgtggagaaggccaggcgcaactccgagccctcatcgccgagaagagctgcgccccgctcatgctccgcctcgcgtggcactccgcggggacgttcgacgtgtcgtcgaggaccg

SEQ ID NO: 19295 - DNA, 246 bp, Zea mays
gcccactcttaacgattgggagaaccatctaaaaacaatatttccagaggttaggctaaagaggtaccatgagatgagaggtgctgatggtggcccatggaggagattgtgtgcgttgcctgcattttgggatgggctgctgtacgacgaggaatcgttacaaagcattttagacatgacttttgattggacaaaggaggaaagagagatgctaagacggaaggtaccatcgactggtttgaagac

SEQ ID NO: 19296 - DNA, 244 bp, Zea mays
atcctcactcgccgccgccgccgctcgtccctcgccccatcgcgatggcccggatcaaggtgcacgagctgcgggggaagagcaaggcggatctgcaagcgcactataaggagtttaagtcggagctctccctgctacgcgtaccaaggtcaccggcggggctcccaacaagctctccaagatcaaggttgtgcgcacctccatcgcgcgcgtgctgaccgtcatctcgcagaagcagaagtcg

SEQ ID NO: 19297 - DNA, 244 bp, Zea mays
cttctcctccctcctgccgggtccttaataaagagcagcagcgcaagaggttggtagagcgagcgagaagaaggcaatggcggcggagagcttcctgttcacctcggagtccgtgaacgaggggcacccagacaagctgtgcgaccaggtgtcggacgcggtgctggacgcctgcctggcgcaggaccccgacagcaaggtggcctgcgatacctgcaccaagacgaacatggtgatggtgttc

SEQ ID NO: 19298 - DNA, 243 bp, Zea mays
cggacgcgtgggcctgccatctctatctcgattgatgaagagtgctattggtgagggcatgacacgtagataccattcggatgtgtctaatcagctttatgccaactacgcaattggaaaggatgttcaggccatgaaggcagtcgttggagaggaggcactctcgtctgaggatctgctttacttagagttccttgacaagtttgagaggaagtttgtgacacaaggagcatacgacacacg

SEQ ID NO: 19299 - DNA, 243 bp, Zea mays
  unsure (1)..(243): unsure at all n locations
ccgcagcagaacaactgggacctcaacgccgtgagcgcgtactgcgcgacgtgggacgccagcaagccgctgtcgtggcgcatgaagtacggctggacggccttctgcgggcccgccggccccaccggccaggccgcgtgcgggcagtgtcttctggtgactaacactgcgacgggggcgtccatcacggtgnagatcgtggaccagtgcagcaacggcggcctggacctggactacgacacg

SEQ ID NO: 19300 - DNA, 244 bp, Zea mays
cggacgcgtgggcaggtcaccgacctcaagaactcgccgcccatgctcggcaagcaccgcgccgtcacgcaccaggctctcgccctgctacaggacaactacccggagttcgtggccaagaaggtgttcatcaacgtgtcgtggtggtacctggcggcaaacaaggtgatgagcccattcctgactcagcgcaccaagagcaagatcgtcttctgcagccccggcaagtcggcggagaccctct

SEQ ID NO: 19301 - DNA, 242 bp, Zea mays
cccacgcgtccgcccgaactccgaactacaagtttcgcttctcgtcgcgacgactgggcgagaccgccgccgccgccgccgcctgagttctttagaaatggctgatggtgaggacatccagcctcttgtctgcgacaatggcactggaatggtcaaggctggttttgctggcgacgatgcaccaagggctgttttccctagtattgttggccgtcctcgccacactggtgttatggtaggga

SEQ ID NO: 19302 - DNA, 241 bp, Zea mays
cccacgcgtccgccgacaaggagatcctaaagatcgtcaaggagaacttcgacttcaggccagggatgatcaccatcaacctcgacctcaagaagggcggcaacaggttcatcaagaccgccgcatacggccactttggccgtgacgacgccgacttcacctgggaggtggtcaagcccctaaagaaggcatccgcttaagaatgtattgggaagttcactggacatgaggttcatcttcg

SEQ ID NO: 19303 - DNA, 239 bp, Zea mays
gtgctacttccacaaccgcctgaaacctgcaaagcttacctggacagcaatgtacaggaagcagcacaagaaggatatccatgctgaagcagtaaagaagaggcgccgcgccaccaagaagccatactccaggtcaattgtgggtgcttccttggaagtaatccagaagaagagagctgagaagccagaggtccgcgatgctgctagagaagctgctcttcgtgagatcaaggagcgca

SEQ ID NO: 19304 - DNA, 238 bp, Zea mays
cccacgcgtccgcacgacttccgtccgagtctgagctcatctccacgcgccgccgccgccgctcgacgcccaccgcgcaccatggcggaacagactgagaaggctttcctcaagcagcctaaggtgttcctcagctcaaagaaatctggcaagggtaagaagccaggcaagggtggcaatcgattttggaagagcattggccttggtttcaagactcccagggaagcaattgaaggga

SEQ ID NO: 19305 - DNA, 244 bp, Zea mays
cccacgcgtccgatttcaaacgtttccaagtgaaattcaagagaaggcgggctggcaagacagactacagggccaggataaggctgattaaccaagacaaaaacaagtacaacacacccaaatacagatttgttgtgcgatttaccaacaaggacatcactgcccaaatcatatctgctagtatagcgggtgatatggttcttgcttctgcctactcgcatgagttgccacgatatggtcttga

SEQ ID NO: 19306 - DNA, 216 bp, Zea mays
cgttgagcttcgccgcggccacggcgctccccttaagctccgtgacgcggcggcgcatgtcccgcactttctccccctccatggcatcccgtatgagcgccgtcacctcgccccgccggacgtcattaccgatctccatcccgatgccccactcggtgcgcttgtaccggcagtgggtctgctgctcagcgaagaagggccagcacaccatgggca

SEQ ID NO: 19307 - DNA, 233 bp, Zea mays
gaggcccttgagattacccgcaagttcatgaacaagccagtgagaatcctcgtgaagagagatgagctgactcttgagggtatcaagcagttctatgtgaatgtggataaggaagactggaagctggacacactgtgtgacctgtacgagacccttgccatcacccagagtgtcatctttgtcaacacccgccgcaaggtggactggctcactgacaagatgaggagcaggga

SEQ ID NO: 19308 - DNA, 236 bp, Zea mays
ggttcgagttcgtcaccgtctagtacgactgtgcgacggaggaagaggcgaggagaagatgcagatcttcgtgaagaccctgacggggaagaccatcaccctcgaggtggagagcagcgacaccgtcgacaacgtcaaggccaaaatccaggacaaggaagggattcccccagatcaacagcgactgatattcgctggcaagcagctggaggatggacgcacgctggctgactaca

SEQ ID NO: 19309 - DNA, 234 bp, Zea mays
gttctctgctgggctggtcgacgacagcaatgtcttcgagtggcaggtcaccatcatcggaccgcctgacactctatatgatggaggttacttcaatgcaataatgagcttcccacaaaattacccaaacagcccgccatcagtcagatttacctctgaaatgtggcatccaaatgtctatcctgatgggcgggtttgtatctctattcttcatccacctggtgaagatccaaa

SEQ ID NO: 19310 - DNA, 83 bp, Zea mays
gtcggacgcggtgctggacgcctgcctggcgcaggaccccgacagcaaggtggcctgcgagacctgcaccaagacgaacatgg

SEQ ID NO: 19311 - DNA, 230 bp, Zea mays
acacacgcatccgcagacgcgtggcgaaaatcatcgaagacttcaccgcgtacgcagacgtgtgcttccggagcttcggcgacagggtgaagcactggatcacggtgaacgagcccaacatcgagcccatcggcggctacgaccaaggctacctcccgccgcgccgctgctcctacccgtttggactgggcgtcaactgcacccacggcaacttccacgacggagacgta

SEQ ID NO: 19312 - DNA, 236 bp, Zea mays
cagacccagcagctattgtagtcgtccctcagccgcgtcgcaccgcatcgcattctacgattcgaagctctctctgctcgcagccatggcgaagaattacccaaccgtgagcgccgagtacagcgaggccgtcgagaaggccaggcgcaagctccgcgccctcatcgccgagaagagctgcgcgcccctcatgctccgcctcgcgtggcactccgcggagacgttcgacgtgtcgt

SEQ ID NO: 19313 - DNA, 216 bp, Zea mays
attgaatgcaacttctttgaatgttgaagtttattacaacaaagcagtcaactacacactgatggtcacttttatctctttccttcaagttttgctgctgattagacaaatggagcatagcaacacacaatctggagctgctaaagtttctattttaatgattggccaacaagctatcatggatgcatatctctgtctacttcacctgactgctgg

SEQ ID NO: 19314 - DNA, 241 bp, Zea mays
gcggcggcgcgggcggacaaggagcaggcggaggaggagctgtgccaagccacaatgggtctctcgcgtgactcgatgcacaagcaccgggccaccggtggaaagcagaaggcctggaggaagaagcgaaagtatgaacttggtcgccagccagccaacaccaagttgtcaagcaataagacagtgaggagggtccgtattcgtagaggtaatgtgaaatggagggctcttcgccttgata

SEQ ID NO: 19315 - DNA, 235 bp, Zea mays
gtaagcagcagcaggaaccctagcaccgccgcatccgcagccatgggtatcgacctcgttgccggtgggaggaacaagaagaccaagcgcacagcgccgaagtccgacgatgtttatctcaagctccttgtcaagctctaccgtttcttggtcaggaggaccaagagcaacttcaatgctgtcattctcaagaggctcttcatgagcaaaaccaatcgcccaccaatctccatgc

SEQ ID NO: 19316 - DNA, 235 bp, Zea mays
cctactactcaagtatccatccttattgagtacagtgttgatccatggactcggaaggagttgtagcagcaaaggtggcagatgagactactaaaccggcaatccaagaagacggcgccgagagcaaggccgggatgactgaactgctgatgctgaccgacaagtcgcagctgcaggcgctggcgatgctgctgcggaacaacgaggagctcatgatgagccaggcgatcaagtc

SEQ ID NO: 19317 - DNA, 132 bp, Zea mays
gaaggaagaagggcctcctgtctcctctcacttcctcagtcctcgtccgtctctgctccctcctctctctacctagcaagctagccagccttcctgtagcgcggcagagatggctgcccctgcatcaacaag

SEQ ID NO: 19318 - DNA, 238 bp, Zea mays
gagctgatgggtacatccttgagggtaaagagcttgagttctacatgaagaagctacagaggaagaagggcaagaacgctgtagcttagagcattctcatggattgtcttgcaccgaaatgtgtgtcctgatgagtacactttttttggttaatcgtctcaagttcagagcgttatgccatgttttcagacctgattagtacactgttttctaaaagcgattgagctctagtccaatg

SEQ ID NO: 19319 - DNA, 239 bp, Zea mays
gcccgctcatcgtctacggcaccgagggctccaaggtcgtcaaggccttccgcaaccttcccggtgtggatgttgccaacgtcgagcgcctcaacctactagaccttgcccccggtggccaccttgggcgctttgtgatctggacccagagcgcgttcaataagctcgaggaggtgtatgggagctatgacgccccgtcgcagaagaagaagggattcgtgctgccgaggcctaagatg

SEQ ID NO: 19320 - DNA, 228 bp, Zea mays
ggagcaggcggaggaggagctgtgccaagccacaatgggtctctcgcgtgactcgatgcacaagcgccgggccaccggtggaaagcagaaggcctggaggaagaagcgaaagtatgagcttggtcgccagccagccaacaccaagttgtcaagcaataagacagtgaggagggtccgtgttcgtggaggtaatgtgaaatggagggctcttcgccttgatactggtaa

SEQ ID NO: 19321 - DNA, 148 bp, Zea mays
ccacgcgtccgcccacgcgtccgcccacgcgtccggcagtgtgcatgcatataagagcaacaagatactggcgcagaggagcaatgcccggcatggatgccttcgctgctgtgtcactactcgccacactctttctggttcgtgcggc

SEQ ID NO: 19322 - DNA, 231 bp, Zea mays
ccgcggcgacggtgacgacgaccgcgcgaggccgccgactccctactgcatcaggtgcctcggccttcgtcgtgctctccgccggcaacgagtatagacgggcgcgcatggccaccttcgagctgtaccggaggtccaccatcggcatgtgcctcaccgagacgctcgacgagatggtctccaacggcaccctcagcccggagctcgctatccaggtcctcgtccagttcg

SEQ ID NO: 19323 - DNA, 231 bp, Zea mays
gtcggcgcctacgtcgactgcgttctcaccacccatcaccactgggatcatgctggtggcaatgagaagatgaggctgcaggtgccagggataaaggtatttggaggatccctgcacaatgtgaaaggctgcactgatcaggtggagaatggaatgaagttgtcacttgggaaggacattgagatactatgcctacacacgccttgccacactaaaggtcatatcagctac

SEQ ID NO: 19324 - DNA, 232 bp, Zea mays
acgagtacctggctggcgacgagttcaccctggccgacctctcccacctcccgaactcgcactacatcgtgaacaccgagagaggaaggaagctcttcactaacaagaagaacgtggccaagtggtacgagaagctctcgaagcgcgagacgtggaagcaggtcgctaagatgcagaaggaacatcctggtgcgttcgagtgattgcttgtcttggggggagctgcgagtgc

SEQ ID NO: 19325 - DNA, 242 bp, Zea mays
agagcgcaatcaagcaagacaagatggtgaagctcgccttcggaagcgtcggcgactccttcagcgccacctccatcaaggcctacgtggccgagttcatcgccaccctcctcttcgtcttcgccggcgtcggttccgccatcgcctacgggcaactgacgaatggcggcgcgctggacccggcgggcctggtggcgatcgcgatcgcgcacgcgctggcgctgttcgtgggcgtgtccgtc

SEQ ID NO: 19326 - DNA, 239 bp, Zea mays
gacctcgacatcaaatattttgacctcgggcttccacaccgtgatgctaccgacgacaaagtcacagtggaggctgcggaggccacactcaagtacaatgtggctatcaagtgtgccaccattacaccagatgaagcaagggtaaaggagtttggcttgaaggctatgtggaagagcccaaatggcacaattaggaatattctgaatggcactgtgttcagagaaccaatcatctgcaa

SEQ ID NO: 19327 - DNA, 240 bp, Zea mays
ccacgcgtccggatggttgttcttggggagcttggtggaaaagatgagtattcactagtggaagcattgaaacaaggaaaggttgagaaaccagttgttgcatgggtcagtgggacatgtgcacgtctattcaaatcagaagtgcagtttggtcatgctggtgccaagagtggtggtgagttggaatcagcacaagctaagaatcaggcactaagggaagctggtgcagttgtgcctaca

SEQ ID NO: 19328 - DNA, 236 bp, Zea mays
  unsure (1)..(236): unsure at all n locations
ggcgcagagaatccccaagcaaacaaacagggtagatggagaggtgatttgagnagaggagaggttgggtctgggacaccatggctccgatgaagctgtacggggcggtgatgtcgtggaacgtgacgaggtgcgcaacggcgctggaggaggctggctccgactacgagatcgtgcccatcaacttcgccaccgccgagcacaagagccncgagcacctcgtccgcaacccgttt

SEQ ID NO: 19329 - DNA, 208 bp, Zea mays
ccacgcgtccgcaccctccagctgggccgttgtagagtgggcaattgatcagcccgttagtgatggagggcagagtttgagggttttctcggtcgggatcatgtactgggagaacggtctttccctcctctgccgagtttttttagttctcatttttgctgtagaattatacattgtgcctgaagtttcaaggttcctggcattcaat

SEQ ID NO: 19330 - DNA, 238 bp, Zea mays
cgcctctcctcctctcctcccccacccgtccatcgcccctccctccggtctgcgctcccacagcctcacccctgcgcccccgccgattcgcgtcgccctttgttggaaggaacgatggagcagaccttcatcatgatcaagcccgacggcgtccagcggggcctgatcggggacatcatcagtcgcttcgagaagaaagggttctacctcaaggggatgaagttcatgaacgtggaga

SEQ ID NO: 19331 - DNA, 235 bp, Zea mays
cccacgcgtccgcccacgcgtccgcaagaatctcactgctgtgttggagccagagaaagcggatgagttcaaaaagggtgtcgagggtgcaaccaagtttctccttagcaagctgaaggacctccaattttttgttggtgagtccatgaaggatgatgcgtctgtggtattcgcctattacaaggatggtgccactaatccgacattcctctatttctctcatggtcttaaggag

SEQ ID NO: 19332 - DNA, 234 bp, Zea mays
atgagaaaaaacgcaaaatcaagaagacagaacgtgctcttaaagtcgctgaggaggaattaatgaggttgcagttagaagtaactgctaaatcaaaacagctgtcagaggttcatggagcatggttaccaccttggctaatggcacaatatgctcgttatgcggaggttgtctcaggtcactggaatcaacatgggaaacctgctgtgcagaatgttttgcataaggcatcag

SEQ ID NO: 19333 - DNA, 231 bp, Zea mays
gcggcgcgccgcacgacaacaacatcatgctctggaacgccgtcatattcgggccggatgatacgccgtgggacggtggcacgttcaagcttaccttgcagtttacagaagattacccaaacaagccaccaactgttcgatttgtctctaggatgtttcatccaaatatatatgctgatggaagcatctgtttggatatcctacagaaccagtggagtcctatatatgatg

SEQ ID NO: 19334 - DNA, 234 bp, Zea mays
caaggatttgctaaccaaacatgaagatgccgtctctgaatttctgagctcacattatgaacagttttttggactctacacaaaacttttatcttcaactaattatgtgacacgaagacaatcagtgaagtttctttcagagtttctgttggaggccccaaatgctcaaataatgaagcgttacattttggaagttcattacttaaacattatgatgggcctgctaaaggattc

SEQ ID NO: 19335 - DNA, 230 bp, Zea mays
cgccacccctacaggtaaggaagacgaggagggcaggatgtcgcaccgtaagttcgagcacccgaggcacggctccctcggcttccttcccaggaagcgctcctcccgtcaccgcggcaaggtgaagtcattccctagggatgaccccaagaagccttgccatctcactgccttccttggctacaaggctggcatgactcacattgtccgtgaggttgagaagccaggat

SEQ ID NO: 19336 - DNA, 179 bp, Zea mays
gcagcttctcaaccggataggtagcaccggagcaggtagaacgctgcacaatccccttcgccgccgccaagatggtgaacgttcctaagaccaagaagacgtactgcaagaacaaagagtgcaagaagcacacactccacaaggtgactcagtataagaaagggcaggattacctgtct

SEQ ID NO: 19337 - DNA, 247 bp, Zea mays
ctgggacttgatgttgcctcgtgcctcatcacaagggcacctataggcgaggaagctgagggaagaaggaaatatgttattcgcccgtacacacctatctctgatccagactctaaaggatattttgacctactgatcaaggtttaccctgatggaaaaatgagtcagtattttgcaagtttgaagccaggagatgttgttgaagtcaaagggcccattgaaaagctcagatacaacccgaacatga

SEQ ID NO: 19338 - DNA, 247 bp, Zea mays
cggacgcgtgggtgatgatacagacaaagggcagtaccattgcatcgattgtggcatatgcagggttggtggcaaggaaaacttcttccactgtgtgaagtgtggatcctgctattctgttatactccgtgataaccatcagtgtgtggagaactcaatgaggcagaattgcccaatctgttatgagtatctatttgactcattacaaggaacaagagttcttaactgtggacacacaatgcacttg

SEQ ID NO: 19339 - DNA, 245 bp, Zea mays
agaagcctttgaggtcttctgtaacaaaggtgtctctggcagttcgaatgctgagttgttggctaccttctgcgacaatattctgaagaaaggctgcagtgaaaagctcagtgatgaagccattgaagatgcccttgagaaggttgtgagattgctggcatacatcagtgataaagacctgtttgccgagttctatagaagattacttttcgacaaaagtgctaatgatgagcatgagagaagta

SEQ ID NO: 19340 - DNA, 239 bp, Zea mays
agccatgtggaggagggctttagcgatggtcctgttcatggctggcgccgcgctgctcgccggggctgccggcgccggcgcgcacagaggcgtgtggagcatcatcacccggcccatgttccagagcatgctgagccaccgcggcgacagcgggtgccagggcgccttctacacctacgacgccttcatcgaggccgccagctagttccccggcttcggcaccaccggcgacgagcaga

SEQ ID NO: 19341 - DNA, 243 bp, Zea mays
cccacgcgtccgcaatctacaaaactgtttgggagatcaagcagaaaactttagttgacatggcggttgaccgcggatgctacatcgaccaaagccagagcctcaatgtccacatggagcaagcaaactttgggaagctgacgtctcttcacttccatgcttggtccaagggcctgaaaactggaatgtactatctacgcacacgagctgctgctgatgcgatcaagttcacagtggatacca

SEQ ID NO: 19342 - DNA, 246 bp, Zea mays
gatgtactcatacaaagacgcagataggcgtcgggagtgggtcgctcatcttcaggctggtgcaggcattgttgccgacagtagcccagatgacgaacaacgtgaatgcgagaatacaggctgctgcactagctcgggccatcgatcttgcagagtcagcttttgtagacaaagaatagtgtgctatggttatcgtttagttcttgttcatgtttcttttacccactttccgttaaaaaaagatgt

SEQ ID NO: 19343 - DNA, 244 bp, Zea mays
cccacgcgtccgaagagagcacgctactactcatcactcgccaacgtgcagagatcagggaagcggcactccatccactgactgaccgctcatggcgaaggtccacctctacgtcgccgcggcctgcgccgtcgtcctcgcgctcgccaccccggccctcgccggtgaccccgacatgctgcaggacgtctgcccggctgactacgcctccccggtgaagctgaacgggttcgcgtgcaaggcg

SEQ ID NO: 19344 - DNA, 208 bp, Zea mays
cctagctcccgcaactgccgccgccactcccacgcccgcagccatgccgcccaagctcgacccgtcgcaggtggtggaggtgttcgtccgtgtgaccggcggcgaggtcggcgcacgtcttcgctggcccccaagatcggcccgctcggtctttcccccaagaagatcggagaggacatcgccaaggagacggcgaaggactggaaag

SEQ ID NO: 19345 - DNA, 244 bp, Zea mays
gtccccttccccgcgcccccagcagcagcggattcccctcgagagatccggcccttggcgcggtcgccggagagagcggcatggggctctgggactcgctcctcaactggctccggagcttgtttttcaagcaagaaatggagctctccctcgttgggttgcagaatgcttggaagacgtcgctgggcaatgccgttgctacaggtggctacagtgaggacatgattccaacggtaggcttcaa

SEQ ID NO: 19346 - DNA, 241 bp, Zea mays
cccacgcgtccgtggctgaggagaacatgcgtggaatttgctttgaggtctgtgatgtcgttcttcatgctgatgctatccacaggggtggtggtcaggtcattcccactgccaggagggtcatctatgcctctcagctcacggccaagccaaggctgctggagccagtctacctggtggagatccaggccccagaaaatgcacttggtggtatctacggtgttctgaaccagaagagagg

SEQ ID NO: 19347 - DNA, 242 bp, Zea mays
gtgacaacatgattgagaggtccaccaaccttgactggtacaagggcccaaccctacttgaggctctggacttgatcaatgagccaaagaggccttcagacaagcccctgcgtctcccccttcaggatgtgtacaagattggtggtattggaactgtccctgttggacgtgttgagactggtgtcattaagcctggtatggttgttacttttgggcctactggtcttactactgaggttaag

SEQ ID NO: 19348 - DNA, 239 bp, Zea mays
cccacgcgtccgatccgaccgcccgccggagcgcggaaccctgcccccggccgccatggagatgagcgatgcggacggctgttcttcttcgagatggcctgcaacaactccgaggtcgcgtacgagcagaaccccaacgacgccgacaacttgacgcgatggggcggacgctgctggagctatcgcaactgcgtaacggccccgacagcctcaagctcctccaagatgcggaagccaag

SEQ ID NO: 19349 - DNA, 242 bp, Zea mays
gagaagagctgcgcgcccctcatgctccgcctcgcgtggcactccgcggggacgttcgacgtgtcgtcgaggaccggcggtcccttcggtactatgaagtgcccggcggaactggctcacggcgccaacgcggggctggacatcgcggtgcggctgctcgagcccatcaaggaggagttccccaccctctcctatgccgatttctaccagcttgccggagttgtggccgtcgaggtcaccgg

SEQ ID NO: 19350 - DNA, 241 bp, Zea mays
cttcggagagcgagaggttacttgtttatccatatatgccaaatggaagtgttgcttctcaattgcgggaacatataaacggcaagccagctctagactggccaaggagaaagaggatagcgctaggcacggcacggggcctgctctaccttcacgagcaatgcgacccgaagataatccaccgggacgtaaaggcttccaacgtgcttctcgacgagtacttcgaagcgatcgtgggaga

SEQ ID NO: 19351 - DNA, 241 bp, Zea mays
agtttatattgttacatcacttgggtttgttcgccaatcatttgatgtgattgtcaatggaatcgagcaatgcattgttgaagctcacaacaatctccaccctgggaaaatctatgtgaacaaaggtgacctccttgatgccggtgtgaatcgcagcccaagtgcatatctaaataaccccgctgaagagagaggcaagtataagtacaatgttgataaagaaatgaccctcatcaagttt

SEQ ID NO: 19352 - DNA, 239 bp, Zea mays
ctggcttctaaataaagttggtatgggtggcaagggacccagtgtgttagatgatgaagggcagggcgtgcttcacttagcagctgcacttggatatgattgggctataaggccaacacttgctgctggcgtgaatattaatttcagagatattcatggctggactgcactccattgggctgccttttgtggccgagagagtactgtagttgcgcttattgcactgggagcagctcctg

SEQ ID NO: 19353 - DNA, 238 bp, Zea mays
cccacgcgtccggttgaagcattggaaggatgaatttatttctacactgcagcattattggttgggcactaagctactctgggcagatgttagaatctcatcaaggctgttagttaaacttgctagtggaaagagcctcacaagacgagagaggcagcagctcacacgcacaacagcagatctattcaggctagtaccttttgcagtttttattatcgttccattcatggagctcttg

SEQ ID NO: 19354 - DNA, 239 bp, Zea mays
cgcacgcgtccgcccacgcgtccggagcagaggaatccattccaggagtgtttaatggcgggaggcaaggaagcgcacgggtaggcagccagggatgtctctggtcacctctccccttaccacttctcacggagggttcagagagacgacgacgtcaccatcaaggtgctcttctgcgggctttgccgcactgacctccacgtcatcaagaacgagtttggcaacgccaagtaccccgt

SEQ ID NO: 19355 - DNA, 239 bp, Zea mays
gcgcctcgagatcacgttctctgacgcgcctgtctttgaggacccttgtggtcgtggcctgcgcgccctctcccgtgagcagatcgactcgtttctggatctcgcacggtgcaccatagtgtcacagctctccaacgagagcttcgactcatatgttctgtccgagtccagcctctttgtgtatccccacaaggttgttctgaagacctgtgggacgacgaagctgctgctcgccattc

SEQ ID NO: 19356 - DNA, 236 bp, Zea mays
cccacgcgtccggttattgagcactcctttggagaggagctcttgtgcttcagaactttgcaacgctacactgcagctactcttgagcatggcatgcatcctccgatttcccctaagccagaatggcgtgctctgatggatgaaatggctgttgtagcaactaaagaatatcgatcaattgtcttccaagaaccacgcttcggtgaatacttcagatcggctacacctgagactga

SEQ ID NO: 19357 - DNA, 235 bp, Zea mays
ggatggaggtgctggcggacggcatccaggacgactccggcaacgtgacccgcttcgtgacgctggcccgggagcccatcgtgccgcgcacggaccgccccttcaagaccagcatcgtgttcgcgcacgacagggagggcacctccgtgctcttcaaggtgctctccgccttcgccttccgcggcatctcgctgaccaagatcgagagcaggccgcaccggcgcaggcccatccg

SEQ ID NO: 19358 - DNA, 150 bp, Zea mays
ggaaaacgatacaatcacagtccagttggacaacaactacaacacctatagctttggtggcaagaagaagctggtgctttctaccgcaacctggctcgggggaaagaacgattttctgggccttgcgtacctcaccgtcggcggactctg

SEQ ID NO: 19359 - DNA, 149 bp, Zea mays
cactctcgttccatttccccatctcccagatccaattcgcgagttctccctcctctgcggccatggcgctctctgtggagaagacctcgtctggacgggagtacaaggtcaaggatctctcgcaggcggacttcggccgcctcgagatt

SEQ ID NO: 19360 - DNA, 255 bp, Zea mays
gtccggcagcagagagcgggggtgcagagagatcgagatccggaggccgcgagtgggagcgccaccaccagcgactgcggcaatggcgggcacggtgacggtcccggggtcgtcgaccccctccacgccgctgctcaaggacgagctcgacatcgtgatcccgacgatccgcaacctcgacttcctggagatgtggcggcccttcttccagccctaccacctcatcatcgtgcaggacggcgacccgaccaagac

SEQ ID NO: 19361 - DNA, 250 bp, Zea mays
cgtgtatcgtgtcagcttggatggggagttcttgcaagctgctttgtctagaacaaagcaggttgatgaatttacttcaaggctgctagaaattcatgataagatgatgtctataaatatgaaagaggatatacacttaggattgcaccggtctgactatatgctggattccgaaaccaattcactacttcaaattgagctcaacactatcccatcatcctttcctggccttggctcccttgtcagtgaa

SEQ ID NO: 19362 - DNA, 251 bp, Zea mays
gtacgcgaccagacgagcaccatcacggaggcgcacatcgcggggagcctggagggcctcaccgtgcagcaggcgctggacagcaaccggctctacatcctggaccaccacgaccactacatgccgttcctgatcgaggtcaacagcctgaacgacaacttcatctacgccaccaggacgctcctgttcctgcgcggcgacggcacgctcgcgccggtggccatcgagatgagcctccccgagctccggga

SEQ ID NO: 19363 - DNA, 244 bp, Zea mays
caacatgggccgcgttcctcggcattgccctttgcgcacggcagcgctcttccttttgcgtggccggcgcccggtctacaaccccccgccgggccccaagccatggccgatcatcggcaaccttaacctcatgggcgagctgccccaccgctccatgaacgagctctatcaagcggtacggtccactcatgcagctctggttcgggtcgttgcctgttgtcgtcggcgcgtccgccgagatggc

SEQ ID NO: 19364 - DNA, 251 bp, Zea mays
agcagccccaggatgagtccatacagccagacttctccaagctacagtccaacgtcaccgacttactctcctacatcaccatcatattcacaaccaagtccatcgtacagcccaacgagcccgttcaacacctctggaggacccagcccagactacagcccgacctctccaaattacagccctagcggaagctactcccccactgcaccgggctactccccgtcgtccacaggccagggtaatgacaagga

SEQ ID NO: 19365 - DNA, 113 bp, Zea mays
ccacggcggcgtgcacgacggcaccgccgtcggctctgggagtggtgcaagggcgacaaccagagctggaagatcctgccgtggggtcccgaggccaactcctccgcggccca

SEQ ID NO: 19366 - DNA, 182 bp, Zea mays
ctgagctacaattgaccataaagaagctaccagttttctacaaacatagggatttcttattcttccctgcatggacctttggagtggcaaacatactcttaaaagttcctatctcgctcgtggaatcagtagtatgggttgttctcacatactatgtgatgggctttgcacctgctgcaaga

SEQ ID NO: 19367 - DNA, 234 bp, Zea mays
cacctcctttcccacgactcccgagctagcgctctgcgtgtggcgcgcggcagcatggcgactgcgaacgggagcagcaaggggtcgttcgaggtgcccaaggtggaggtcaggttcaccaagctcttcatcgacggcaagttcgtcgacgccgtctccggcaagaagttcgagacccgggacactcgcaccggcgaggtgatcgccagcatcgcggagggagacaaggccgac

SEQ ID NO: 19368 - DNA, 241 bp, Zea mays
cccacgcgtccgaagtaaaacacttcgggattttcatgttgttgatattgaactcccagggcagtacttcacagatcaggaaatcgcaccggaccacactgttaagttggacagagttggacctgacattccaattgtccggaggcatggcagtagctttcgagggtgaaactcattggttctaagggttcaagcgccatttaattgtccagacatcactgactccgaatgctcggagtga

SEQ ID NO: 19369 - DNA, 204 bp, Zea mays
gtacgcggagtggatggcggcgcacggccggacctacaacgccgtcggcgaggaggagcggcggtaccaggtgttccgggacaacctccgctacatcgacgcgcacaacgccgccgccgacgcgggcgtccactccttccgcctcggcctcaaccgcttcgccgacctcaccaacgacgattaccgcgccacctacctcggcgc

SEQ ID NO: 19370 - DNA, 243 bp, Zea mays
ccgtcgcatcccatcccactaccacccatctcgtcgtccgccgattcgatccggttcttccaacccaggggctgtgatggcgacgaagaggagcgtgggcaccctcggcgaggcggatctgaaggggaagaaggtgttcgtgcgcgccgacctcaacgtccctctcgacgacgcccagaagatcaccgacgacacccgcatccgcgcctccgtccccaccatcaagttcctcctcgagaaggg

SEQ ID NO: 19371 - DNA, 240 bp, Zea mays
gtttgctgagctcataaccaagatcgataggcggtctggcaaggagcttgagaaggagcccaagttcctgaagaatggtgatgccggtatggtgaagatgattcccactaagcccatggtggttgagaccttctctcagtatcctcctctgggtcgttttgctgtccgtgacatgaggcagacggttgctgttggagtcatcaagagcgtggagaagaaggacccaactggtgccaaggt

SEQ ID NO: 19372 - DNA, 242 bp, Zea mays
ccacgcgtccgcgggcgtcttcctgtgatgtcttcttgtctgcccacgcctagtttctctgtcgattcctattcgtcgtctcttcagggctggtgctcactgctgcgccgttctgttaaccgaaacaagaactctgtgtattcctgtaccgagctgtgcatgttttttttttctttccatcgtggagaatttaagttattatccgtttgctgcaaggtttgccgtctcattttatgcgttgg

SEQ ID NO: 19373 - DNA, 240 bp, Zea mays
cccacgcgtccgtggaggtgatacaggcacagattgcattggcacatctattaggcatggttgcaccagccttgtaaatcttgaactcctgtcaaaaccaccaagcactagagctgctgacaacccatggccccagtggccaagaattttccgtgttgactatgggcatcaagaagctgctaccaagtttgggaaggatccaagaacttacggagtcttgacaaagcgttttattggcga

SEQ ID NO: 19374 - DNA, 239 bp, Zea mays
cccacgcgtccgggaggtttgtctaacacccacacatcttgctattgtcatggaatatgctgctggtggagagctatttgagaaaatctgctcagcagggcgattcagtgaagatgagtccaggtatttcttccaacagctgatatcaggggtcagctactgccattctatggaaatttgtcaccgtgatcttaaacttgagaacaccctccttgatgggagtccaacacctcgtgtga

SEQ ID NO: 19375 - DNA, 235 bp, Zea mays
gtcttgaaaggggagagagagagagagaagagagagagaagagagagagagagagaggagtgggagacccgcgagaggctgccgtgtagggaccgtagactcagcgactgcgaaggagggataaggggatggccgggatcggaccgatcaggcaggactgggagccggtcgttgtgcggaagaaggcacccaccgccgccgccaagaaggatgagaaggccgtcaacgccgcgcg

SEQ ID NO: 19376 - DNA, 236 bp, Zea mays
cccacgcgtccgcccacgcgtccgctttaaatcatctttggcttcgcagaaggtcatcacagttatcaccgcaaaggatattcctagtggtggacaaaatattggttccaccttcccgatgatgggagacgaagcactctttgcagatccagttactgaatttgctggtcagaatattggtgttgtgattgctgaaacacagaagtatgcctacatggctgcaaagcaagccatta

SEQ ID NO: 19377 - DNA, 174 bp, Zea mays
cccacgcgtccggagacgacagcgttgacagcgatcacccagttgacgcaccacggcatggtgttcgtgcctgtgggctacaccttcggcgccaagctgttcggcatggaccaggttcagggcggcagccactacggcgccggcacgttcgcacgcgacggctcgaggtggccg

SEQ ID NO: 19378 - DNA, 205 bp, Zea mays
aatatatctccccgcgtccgctagccctagccgccgtccgccgacttcatcgtcgccgtcgtctagacctcttcacgcactggaaagcttaaagtccgacatcaatggcgaacatcatcctgatctcatcatgtgccggaagcagcctggcatcgcgattggccgcctttgcgagaaatgtgatggcaagtgtgttgtctgcgac

SEQ ID NO: 19379 - DNA, 84 bp, Zea mays
agacgctggttggcttctcctccccctccggttcgggttcgggttcgtgaggatctccggggttcggcttcgtgggtgagcgga

SEQ ID NO: 19380 - DNA, 168 bp, Zea mays
ggaattagtgaattcttgacagagattaatgtcatatcaaatgttaggcacccaaaccttatcaagctgattggttgctgtgttgaagggagtaacagactattggtgtacgaatatgcagagaataatagtttggcgaatgctttgcttggaccaaagaccaaatgt

SEQ ID NO: 19381 - DNA, 202 bp, Zea mays
gcagcaggaaccctagcaccgccgcatccgcagccatgggtatcgacctcgttgccggtgggaggaacaagaagaccaagcgcacagcgccgaagtccgacgatgtttatctcaagctccttgtcaagctctaccgtttcttggtcaggaggaccaagagcaacttcaatgctgtcattctcaagaggctcttcatgagcaa

SEQ ID NO: 19382 - DNA, 144 bp, Zea mays
cactgagcgggcatccttcctcctcagtgaagatcaagaggagtaaggatgttgtcaagttcaaggtgcgctgctccaagtacttgtacacgctctgcgtcttcgatgctgagaaggcaaacaagttgaagcaatctcttcccc

SEQ ID NO: 19383 - DNA, 228 bp, Zea mays
cttgtgaccctccctcagccgcgtcgcgtcgcatcctacgatccaaagctctctctgctcgcagccatggcgaagaactacccgaccgtgagcgccgagtacagcgaggctgtggagaaggccaggcgcaagctccgagccctcatcgccgagaagagctgcgccccgctcatgctcggcctcgcgtggcactccgcggggactttcgacgtttcgtcgaggaacggg

SEQ ID NO: 19384 - DNA, 178 bp, Zea mays
ccgacatcgtctcttcgtccccacgagcaaccgataatccgccggcgctgagatgttggtttatcaagacctcctatctggcgacgagctcctgtcggattcattcacctacaaggagctcgagaacggcgtcctgtgggaggtcgagggaaagtgggtcacccaaggtcctgttgat

SEQ ID NO: 19385 - DNA, 175 bp, Zea mays
atttaaccctgcaatagtgtatgatcacttgggggagatatactctgctcttgtttttggaagctttgtattctgtatttttctctacataaagggccatgtatttccatcttcatctgactctggatcctctgggaatgtgataattgacttctactggggtatggagctgtac

SEQ ID NO: 19386 - DNA, 172 bp, Zea mays
gatacgtggttgcgtacctaaaaagatactcgtgtatggtgcatcattccgtggagaatttgaggattcgaagaattttgggtgggagattaacggagatattaacttcaattggaaaacgctattggaaaataagactaaagaaattgttagattaaatggtgtgtatcag

SEQ ID NO: 19387 - DNA, 199 bp, Zea mays
agagagttgggcgcagagaatccccaagcaaacaaacagggtagatggagatgagacgagaggagaggagaggttgggtctgggacaccatggctccgatgaagctgtacggggcggtgatgtcgtggaacgtgacgaggtgcgcaacggcgctgaaggaagctggctccgactacgagatcgtgcccatcaacttcgc

SEQ ID NO: 19388 - DNA, 143 bp, Zea mays
acctcctctgctctcccccacctcccggtccggcagcagagagcgggggtgcagagagatcgagatccggaggccgcgagtgggagcgccaccaccagcgactgcggcaatggcgggcacggtgacggtcccggggtcgtcga

SEQ ID NO: 19389 - DNA, 184 bp, Zea mays
cccacgcgtccgccatttctcaccaccgccgccgctccccccgttcaacaacaccatgagggagtgcatctcgatccacatcggccaggctggtatccaggtcggaaacgcgtgctgggagctgtactgcctcgagcatggcattcaggctgatggccagatgcccggtgacaagaccattggg

SEQ ID NO: 19390 - DNA, 181 bp, Zea mays
cccaacaccacctcgcctgcgatcttcgtagcctccgtcgcgtcgagcatcgatcatgtcggcctactgcggaaagtacaaggatgagctcatcaagaatgctgcctacattggcacccccggcaagggtatccttgctgctgatgagtccactggcaccattggcaagcgcctttccagc

SEQ ID NO: 19391 - DNA, 186 bp, Zea mays
cgagtacctggagcaggacctggggaaaaagagcgagctgctcctccgcgccaacccggtgcacaagaagatccccgtgctgctgcacgacggccgccccgtctgcgagtccctcgtcatcgtgcagtacctcgacgatgcgttcccggcggcggcgcgggtgctgctccccgtggacccttacgc

SEQ ID NO: 19392 - DNA, 169 bp, Zea mays
acgaaacatagctactcctactactcaaatccatccttattgagcttagtgtttgatccatggactcggaaggagtagcagcaaaggtggcagatgagactactaaaccggcaagccaagaagacggcgagagcaaggccgggatgactgatctgctgatgctgaccga

SEQ ID NO: 19393 - DNA, 246 bp, Zea mays
cacacctccgtctcccccctccgctgctccctctcaggagcgcgcgggggcccagatctagggtttcgtccgcggcaagatgagcagcccgcatggcggtctcgacgaccagatcgagcggctcatgcagtgcaagccgctcgctgagcctgaggttagagctctttgtgagaaggcaaaggagattctgatggaggaaagcaatgttcagcctgtaaagagtcctgttactatatgcggtgatat

SEQ ID NO: 19394 - DNA, 254 bp, Zea mays
tgtagcttcaaggataccctctcaggcatcacctcaggccccaaaggtagaaccaccagttcctaaggtggtttcacctcctcagccacaaaaatctcttgccaaagttgaggcaacaccccctaaagttgagaagccatcagttgcgccgcctcctaaagttgattatgctactgatctctttaacatgttatcaatggatggaacaacagagaaagagtcagagtcatctccagacgatgataatgcctggg

SEQ ID NO: 19395 - DNA, 201 bp, Zea mays
cccacgcgtccgccacgcgtccgattacaacatggaagatgccttattgaacgacgaaactcgacagcctctatctaggaaagttccacttccttcctccaggataaatccatacaggatggtcattgtgctgcgattgattgttctaagcatcttcttgcactaccgtatcacaaatcctgtgcgcaatgcatacccatt

SEQ ID NO: 19396 - DNA, 226 bp, Zea mays
gaaagtgcaaaatgaattgcttgctcagtatgcaaccccgctgttggagaaggagcattctggatgttctgctttgcttcgtgatgataaggttgaggacctttctaggatgtacaggctcttctccaaaatcagccgcggtctggagcctatttctaacatgtttaaaacgcatgttacaaatgagggcacagccttggtcaagcaagcagaagattctgctagc

SEQ ID NO: 19397 - DNA, 233 bp, Zea mays
tttcctccttcctcgcctccagccaccatgttatggttgagttctacgcaccttggtgtggccactgccaggagctcgccccggattacgccgccgccgccgcgcatctcgccgctcaccaccaccaggcccacctcgcccttgccaaggtcgacgccaccgaggaaaccgacctcgcccagaagtacgacgtccagggcttcccgaccatcctcttcttcatcgatggcgtc

SEQ ID NO: 19398 - DNA, 233 bp, Zea mays
aagatcctgaggatccaaggaacttccggaaaacgatcagcagaattcttggcgtgcaatactccatcccggattatgtgagagtgtcttcagactgcagacgccttctgtctcagatattcgttgccgatccttcaaagaggatcacgatcccggagataaagcatcacccgtggttcttgaagaacctcccgagggagatctcggagagggagaaggccaactacaaggac

SEQ ID NO: 19399 - DNA, 245 bp, Zea mays
ctaccgcgcccgaggagaccacaccacaccgcctcctccgcccgccgattcgtcgagctcgccctcccgctcgcctagctcccctgcctcttcccttcctccccacctcctaccccgcgaacgtgctcccgcatgccaccgcgctgacgcgcgcggcggacgacggggtcgggatcatggacaagtacgaggctgttcgggacatcgggtcgggcaacttcggggtggcgcggttgatgcgcaac

SEQ ID NO: 19400 - DNA, 243 bp, Zea mays
gcccagcggaggaagagtgcggattgcggcggcgccggcggacgaaacaatggcgtcggcgagggacgagcatcttgatgggattcgcgcgctgatggcggcccactcgccgccgctccacgggctggtcgtcccctccgaggatgcccaccagagcgagtacgtgtcggagcaggataaacggcgggagttcatctccgggttcacagggagcgctggcttggctcttatcaccatgaaaga

SEQ ID NO: 19401 - DNA, 248 bp, Zea mays
cccacgcgtccgcttccagtgtccgccgtcgtgcgctcgctacccctctccctcgaggcctttgccggcgaagagcgcccagtcgcccaccaggatgaagtttgttgctgcctacctgcttgctgtcctcgctgggaactccagcccctctgccgaggacttgacagccattctggagtcagttggctgtgaagttgacaatgaaaagatggaactccttctgtcccaactgagcggtaaggacatta

SEQ ID NO: 19402 - DNA, 246 bp, Zea mays
cctccctcagccgcgtcgcgtcgcatcctacgatccaaagctctctctgctcgcagccatggcgaagaactacccgaccgtgagcgccgagtacagcgaggctgtggagaaggccaggcgcaagctccgagccctcatcgccgagaagagctgcgccccgctcatgctccgcctcgcgtggcactccgcggggacgttcgacgtgtcgtcgaggaccggcggtccattcggcacgatgaagcatca

SEQ ID NO: 19403 - DNA, 244 bp, Zea mays
cattcgaacgccggagctcgacaaggacgaccgacgacgcacgcggagatccggcgtactgcaaattttgaaaactgaactgtaagatggcatcagcagagctttcccgtgaggaaaatgtgtacatggcgaactcgctgagcaggcggagaggtacgaggagatggttgagttcatggagaaggtagccaagactgttgactcggaggagctcactgtggaggagcgaaacctcttgtctgtt

SEQ ID NO: 19404 - DNA, 241 bp, Zea mays
gagagaaaagaggccaggttataaccatcacaagaaggctggtgccatgaatgcactggtccgtgtctctgctgtcttatcaaatgctgcatacctattgaacttggactgtgatcactacatcaacaatagcaaggccataaaagaggctatgtgtttcatgatggatcctttggtggggaagaaagtgtgctatgtacagttccctcagaggtttgatggtattgacaaaaatgatcga

SEQ ID NO: 19405 - DNA, 244 bp, Zea mays
caagcacaagcgcactctagcaatggcttctgaggttgtccgccctagcgacgccgagctactaaaggcacaagccgacatatggcggctcagcctctcctacctcacgcccctgtcactgaggtgcgccgtggagcttggcatccctacggcgatctaccgccatggcggggctgcctcagccgctgagctggtcacggcgctgtctctcccctccactaagctgccgttcctccgccgcctg

SEQ ID NO: 19406 - DNA, 239 bp, Zea mays
gttcttgcgcgtacggtacacagccccgatccgaatcgtcctcctcgcgagcctcgccgatcccccactcccctcccctcgcttcaagatgcagatctttgtgaagaccctcaccggcaagactatcaccctcgaggtggagtcttctgacaccattgacaatgtcaaggctaagatccaggacaaggagggcatccctcctgaccagcagcgccttatcttcgccggcaagcagcttg

SEQ ID NO: 19407 - DNA, 239 bp, Zea mays
cagcaacccaacgattttccaaaaggccatttcatcgtccagcgcatatgatgatcagttcaagcagctcatttcggctggaaaggacgcggagagcgcttactgggaactcgttataaaggatatccaagatgcgtgcaaactttttgagcccatctacgatgagactgatggggctgatgggtatgtctccgtagaggtgtctcctaggttggcaaatgacactcaaggaactgttg

SEQ ID NO: 19408 - DNA, 233 bp, Zea mays
cccacgcgtccgcccacgcgtccgcccacgcgtccgttttcgttgaagaggtgtattctcgacattgatgtccaaggagctcgatccgtgagggcttcttctcttgaagcaatattcatctttgtatgccctccatcattcgaggaactagagaagcgccttcgggcacggggtactgaaacagaggagcaaatccagaaacgactcagaaatgctcaggctgaacttgatca

SEQ ID NO: 19409 - DNA, 236 bp, Zea mays
ggcagctgatgagcgtgccgccgctgccaaggcctcttctaaaaagaaagaaagtggtaaatcctccgtccttatggatgtcaaaccatgggacgatgagactgatatgaagaagctggaggaggctgtccgcagtgtccagatggagggtctgacttggggagcatcaaagcttgtgcctgttggatacggcatcaagaagatgactatcatgttgacaattgtcgacgatcttg

SEQ ID NO: 19410 - DNA, 237 bp, Zea mays
cggacgcgtggccgagctcgtcaacgagttctacaacaacgggctcacctccaacctggccggcagagcgcaaccccagcctggactacggcttcaagggcaccgagatcgccatggcctcctactgctccgagctccagtacctgggcaaccccatcaccaaccacgtgcagagcgcggagcagcacaaccaggacgtgaactccctgggcctcgtctcggccaggaagaccgccg

SEQ ID NO: 19411 - DNA, 237 bp, Zea mays
atacaatttagaagcgcccctcctcctctcccccatccgtacccaatctaatcgacacccggccgagatgggccgcaagttcttcgttggtggcaactggaaatgcaatggaaccgcagatcaggttgagaagattgtcaaaaccctgaatgaaggaaatgttccctcttcagatgttgttgaggttgttgtcagtcctccttatgtgttcctcccggtggtcaagagccagctgcg

SEQ ID NO: 19412 - DNA, 284 bp, Zea mays
  unsure (1)..(284): unsure at all n locations
ttcnacgcgtccgcggacgcgtgggccgctgcactcaagcaggctggtgcccgtgtcattgtgaccgagatcgaccccatctgcgccctccaggctctgatggagggtcttcaggtccttcccttggaggacgttgtctcggaagctgacatcttcgtgaccaccactggcaacaaggatatcatcatggttgaccacatgaggaagatgaagaacaatgccattgtctgcaacattggccactttgacaatgaaattgatatgctcggccttgagacctaccc

SEQ ID NO: 19413 - DNA, 278 bp, Zea mays
gggcagcaaccacgaaagccttctgcgcggggtgctttcctcgcagcaaatattcctgccttttgcattccggctttgcaagttccttgctttgggcatatatattgtgaggtctctatatatataggtggttcgaggtgatcggcagaaccacacaggcaaagatggcgagcgtgcacaaggccaccacccttgttctcatgttctgcctgctagcgctggggagagcggagtacctcaagtacaaggacccaaagcagcccgtcgctgttcgcatc

SEQ ID NO: 19414 - DNA, 184 bp, Zea mays
ccacgcgtccgcccacgcgtccgggtgaatctagattcccagcgcaggtgaggatccgcgttaggaagctctgcaagccgttggaagaggattccttcaggccagttttgcaccactatgatggcccaaagtttcgccttgagctctccatcgcggagaccctgtccctgctagacctatgcga

SEQ ID NO: 19415 - DNA, 195 bp, Zea mays
gctgagctgaagctggttggtgagtatggcctgcggtgcaagcgcgagctgtggcgcgtgcagtatgccctgagccgtatcaggaatgcagccagggagctgctcaccctggatgagaagaacccacgccgtatctttgagggcgaggcgctcctccgccgcatgaacagatatggtctccttggtgagggacag

SEQ ID NO: 19416 - DNA, 205 bp, Zea mays
ccacgcgtccgcccacgcgtccggctcgacagcccggttcccgtagccggcgccagtaggggcagcgttggagctggagttgaggctgcggagagcaagacaccgggggccgcggcgccggcggctgcctcgagctcggttgttgaccccgtggagtacaacgcgatgctcaagcagaagctggagaaggacctcgctgccgttg

SEQ ID NO: 19417 - DNA, 168 bp, Zea mays
gatgaagggtgactactacagataccttgctgagttcaagactggagctgagagaaaggacgctgctgagaacaccatggtggcatacaaggctgcccaggacattgctttggctgagcttgctccaactcaccctattaggcttggactggcactcaacttctcagt

SEQ ID NO: 19418 - DNA, 175 bp, Zea mays
ggaggagggcaggatgtcgcaccgtaagttcgagcacccgaggcacggctcccatcggcttccttcccaggaagcgctcctcccgtcaccgcggcaaggtgaagtcattccctagggatgaccccaagaagccttgccatctcactgccttccttggcaacaaggctggaatgac

SEQ ID NO: 19419 - DNA, 274 bp, Zea mays
cagattttcaagggagactgtcagatccccaagtggctttcgcctgccgcgcaggaccttctcaagaggatcctccaaccgaatccgatgaagaggatcaacgtcgcggggatcagggagcacgagtggttcaagaaggactacgtgcctgctgttccgcacgatgatgacgaagacgtccttcctagtccagctccctcgataaagccaatcgatgagccggcgcaagagaagtgttctcctatcaacgcttttcagttgatcgggatggcct

SEQ ID NO: 19420 - DNA, 266 bp, Zea mays
ccagcactgaacacttgattgattcagtaggtagctagctagctgaatcacaatggatcctaccaagttccgtccgtccagtagccacgacacgacggtgacgacgacgaacgctggcgctcctgtgtggaacgacaacgaggcgctgactgtggggcctcgcggtcccatcctgctggaggactaccacctgatcgagaaggtggcgcacttcgcgcgggacgcatcccggagcgcgtggtgcacgcgcgcggggcctccgccaa

SEQ ID NO: 19421 - DNA, 237 bp, Zea mays
ggaaccagtagcggaggcttcgattttcggcgggcgcaataaatttcccgcatggctcggagggccgcgtcctcgctcgtctcccgctgcctcctggcgagggcccctgccggcgcgccgcccgctgccccctctgcgctgcgcaggacattgcctgcagatgggatgcacaggcttttcccaggtgtctttaagaggttcagcattgcagcagcatgagatgcccccatcaggcgg

SEQ ID NO: 19422 - DNA, 188 bp, Zea mays
atttcacccagaaaagagtggagctaccggactttctattctaaaagaatttctcagacctaactctcttgggaccaaggtcccagcacgtaggaaagcatcaaaacttgcgaagagagtgatagcatgccttgatgttcgttcaaatgataaaggagatcttgtggtaacaaaaggcgatcaatatg

SEQ ID NO: 19423 - DNA, 196 bp, Zea mays
cacaacccagtcgctcaaaaccctagagctctcgcctgctcgcctccgccgccggagcgagctccccatcttcatccgtcaaccatggcgacccagatcagcaagaagaagaagttcgtcagcgacggtgttttctacgccgagctcaatgagatgctgacgcggagactggcggaggatggctactctggcgtga

SEQ ID NO: 19424 - DNA, 267 bp, Zea mays
ccggtggtggacctctcggtgacgcggcgcgaggacctagtcgagcaggtgaggcacgcggccgggacggtgggcttcttctggctggtgaaccacggcgtggcggaggagctgatgggcggcatgctccgcggggtgcgccagttcaacgagggccccgtggaggcgaacaggcgctctactccagggacctggctcgcaacctgcgcttcgcctccaacttcgacctcttcaaggccgctgcggccgactggcgcgacacgctct

SEQ ID NO: 19425 - DNA, 168 bp, Zea mays
ggaacgcacacaccgcccgtccccgatctccgatcccctcgtcgatccaaagatgcagatcttcgtcaagaccctcactggaaagactatcaccctcgaggtggagtcttctgacaccattgacaacgtcaaggccaagatccaggacaaggagggcatccccccgga

SEQ ID NO: 19426 - DNA, 158 bp, Zea mays
agcaaactgaccgagatgtccgtgggcagaagaattactcgtttatgctccggacaaagaacccttgtgggaaagttccaaaccaactttatttagctatggatacactagccgatgagtttggcatcggaacactccgcctgacgaccaggcagaca

SEQ ID NO: 19427 - DNA, 171 bp, Zea mays
cgcagtgcagcacggaagcaacacttcctgcactcactgctagctgctcacaccatagtagtaacagtccatcactagtcaccaccaatggctcccaaggttgcgctcttccttgccctcagcctcctcttcgctgccgccgcgcatggctgcgaaccctactgtccaggc

SEQ ID NO: 19428 - DNA, 191 bp, Zea mays
tgggaaaccatggggcaaatttcacatacaggatgggttcctatttcgcgctaacaagctgtgtgtttcagctagctcggtttgtcttttgttgttacaggaagcgcatggaggcggtctcatggggcactttggcgtctacaagacacatgaggtgttggctgcccacttcttttggcctcggatgcgcg

SEQ ID NO: 19429 - DNA, 248 bp, Zea mays
gtttctgcaacgccagggcgcaaccatgggtcagcagcagcaagggccggcggccaggcggatggccacgctcgcctcccacctgcgccatccctccgtctctcaccctcagatggaagatgttcccctcttgaggggatccaattgccgtgcaaaaggtgcggcgccaggcttcaaagtcgcgatcttgggtgcagcaggtgggattgggcagccacttgcgctattgatgaagatgaaccctcttg

SEQ ID NO: 19430 - DNA, 191 bp, Zea mays
gcgccgccaccaagtccatcgagcgcgaggtcaactccgtcaacgacaacccggtcatcgacgtccaccgcggcaaggcgctgcacggcggcaacttccagggcacccccatcggcgtgtccatggacaacgcccgcctcgccatcgctaacatcggcaagctcatgttcgcgcagttctccgagctcgtc

SEQ ID NO: 19431 - DNA, 131 bp, Zea mays
cacacactcactatacactgctctgctgcagcaagaaggaagaagctagcgcctccctagctctcgttgtcagcaatggccaccaccgccgcgtccagcctcctcaagtcgtccttcgcgggctcccggct

SEQ ID NO: 19432 - DNA, 179 bp, Zea mays
gcaaaacagaggctatgacggctccttgtcagatctctggtcgtgtggggtgatcctctacgtgatgcttgttggctgccttcccttcgacgacaggaacctcgtcgttctttatcagaagattttcaagggagactgtcagatccccaagtggctttcgcctgccgcgcaggaccttc

SEQ ID NO: 19433 - DNA, 262 bp, Zea mays
ccacgcgtccgggtgccgcccggagaacgttgccttcctcaactgcaagaagaaggaccctaaccccgagaagtgcctcgagaagggccgccaggtcacacgatgcgtcctcagcctgttgaaagaacttcaccaaaagtgtcccaaggaaatggatgaatatgctggttgcatgtattactacaccaacgaattcgacttctgccgtaaggagcagcaagcttttgaggaagcctgccccatttctgagtagatcttgaga

SEQ ID NO: 19434 - DNA, 170 bp, Zea mays
acccactttacggatcttcactgattgattatgcccatattgagcagtggatggactttgctgcgacagaggttgatgccagcattggaaagtggttgtacccacgtatggggttttatccctatgctgctgtgacagaagaatcagccattgctgctttgaagagagca

SEQ ID NO: 19435 - DNA, 180 bp, Zea mays
cccacgcgtccgcaatgatgttgtcaataatatttgtgatgatgaggatattaaggctgtatcttttgttggttccaatacagctggtatgcatatttattctagggcatctgcagcaggcaagcgtgttcagtgcaatatgggagcaaagaatcatgcaattatccttcccgatgctga

SEQ ID NO: 19436 - DNA, 182 bp, Zea mays
gaagagctgcgcacccctcatgctccgcctcgcgtggcactccgcggggacgttcgacgtgtcgtcgaggaccggcggtcccttcggtaccatgaagtgcccggcggaactggctcacggcgccaacgcggggctggacatcgcggtgcggctgctcgagcccatcaaggaggagttcccca

SEQ ID NO: 19437 - DNA, 180 bp, Zea mays
gtttgctaaatttagccaagcagcctggtagcacaattcagatacttggtgcagagaaggctttattcagagctctaaagacaaagcattctactcctaagtatggcctcatctaccatgcatccttaattggtaaggcttctcaaaagcacaagggaaaaatctctcgttctcttgctg

SEQ ID NO: 19438 - DNA, 180 bp, Zea mays
atttactttaatcaagtcatggctgctattgggggaaacactgctggtccaggtgatgctgttctcaatgtatacataaatcatgacaagaaatttgcttttgtggagatgagatctgttgaggaagcaagcaatgcaatggccctggatggcattatgttcgaaggggcaccggtgaag

SEQ ID NO: 19439 - DNA, 225 bp, Zea mays
ggaggaagaaaaggaagaggacaaggagatgactctggaggaatttgagaaaataagagaggagaagaggaaagcactacttgcattgaaggctgaggagaggaaagttgaagttgacaaggatttgcagtctctgcagccactttcaaacaagagagagaatgatgaagttttcattaagctgggttctgacaaggataagaagaaggaaaatgctgagcgtga

SEQ ID NO: 19440 - DNA, 221 bp, Zea mays
ctctcatcaccaatctggaggggagcgatctgtatcgaccatcttgtatcttgtgtcacttcaagatcttaccaactgcccttttcgggttgttgatgagataaatcaaggaatggaccccataaacgagaggaaaatgtttcagcagcttgtgagagctgccagcgaaattgacacgccgcagtgcttccttctgaggcccaagcgcctacctgagctgg

SEQ ID NO: 19441 - DNA, 171 bp, Zea mays
atgagttgtatgcagcagcaaacaatgtgaagaaggtttcagaattggatgtgtatatgagtgagggtttggtgaaggtcaatgaaggtgatgctccatttgatatcctatcttggtggagggggcaagtgacaaatctgcctatcctttcgacccttgcgcgtgatgtgt

SEQ ID NO: 19442 - DNA, 169 bp, Zea mays
  unsure (1)..(169): unsure at all n locations
nctccctcgaccgtcgccgtcgccgtcccctttcggcgcgcaagatcgcccgagatggcaaacgcgagatccgctgtcgctgtgaatcaggagtgcatccgcaagttcggcgagctgcagtcgaagaggctgcaccgcttccgaactttgaagatggacgacaagttca

SEQ ID NO: 19443 - DNA, 221 bp, Zea mays
cactgtcagagcaggacttccgcaagcatatgcctagacttcaaccagagaatattgtcaagaatgctaagatattcgagcatgtgaatgcaatggcagctaaaaaaggatgcacaccatcacagctagcattggcatgggttcaccatcagggaaacgatgtttgccccatacctgggacaacaaaaatcgagaacttcaaccagaacgtgggggcgctt

SEQ ID NO: 19444 - DNA, 169 bp, Zea mays
gccaagggggagggcatccgctgcatcatccgcatggagaactagatttcgctgtctagtttgtgatctggcctgggcttggggttaataaaagaggcaatgctagcctgccctttcgatgaggaggtacatacacgctggcgatggaccgcgcttgtgtgtcgcgttc

SEQ ID NO: 19445 - DNA, 137 bp, Zea mays
cccacgcgtccgcacaagttcagaacaaggtcatccccatgagcagaatcgacgacgccgtctacaggatccttcgtgtcaagttcaccatgggtctgtgcgagaacccttaccccgagtctggcctcgcgggcgag

SEQ ID NO: 19446 - DNA, 215 bp, Zea mays
ggatgaactcaaggcccggaaacgtgttcttcgcacgctggggtacgttacgagtgatgatgttgtggaagttaagggccaagtggcgtgtgagataagttcagctgatgagcttacattgacagagcttatgtgtagtggtgctctgaaggatgctacagtagagcaggtggtggcactgctctcttgcgttgtgtggcaggagaagctccagg

SEQ ID NO: 19447 - DNA, 214 bp, Zea mays
gggcgcagagaatccccaagcaaacaaacagggtagaggtagagggagaggagaggacaggagaggagaggagaggttgggtctgggacaccatggctccgatgaagctgtacggggcggtgatgtcgtggaacgtgacgaggtgcgcaacggcgctggaggaggctggctccgactacgagatcgtgcccatcaacttcgccaccgccgagca

SEQ ID NO: 19448 - DNA, 161 bp, Zea mays
gaagaagcccaagaggagacagggtggaagcttgttcatggagatgtattccgacctcctgcaaactctgatttactctgtgtctgtgttgggactggtgttcagttctttggtatgctgctagtgaccatgattttggctgtgttgggtttggggtcgcc

SEQ ID NO: 19449 - DNA, 161 bp, Zea mays
aacgctatgaagacgtatgggaagggcatcttcttctcgctgtgcgaatgggggaggcaaaaccctgctacctgggcaggcggcatggggaacagctggagagcgaccgatgatatcgccgacaactggggcagcatgaggtctcgtgcagaccagagcga

SEQ ID NO: 19450 - DNA, 190 bp, Zea mays
aacgcatgttacaaatgagggcacagccttggtcaagcaagcagaagattctgctagcgataagaggccagagaagaaggatatagttggcatccaggagcaggtctttgtgtggaaaatcatcgagctgcatgagaaatatgtggcttatgtgacagagtttgtccagggacatacactcttccataag

SEQ ID NO: 19451 - DNA, 210 bp, Zea mays
agattttcttgggcgttcttcggcttcgttgtcacaaggttcgagttcgtcaccgtctagtacgactgtgcgagggaggaagaggcgaggagaagatgcagatcttcgtgaagaccctgacggggaagaccatcaccctcgaggtggagagcagcgacaccgtcgacgacgtcagagccaaagtccaggacaagggagggattcccccag

SEQ ID NO: 19452 - DNA, 212 bp, Zea mays
cgagaccgtcggtggagtcatgaccaagttgatcccgaggaacactgtcatcccgaccaagaagtcgcaggtgttcaccacctaccaggaccagcagaccactgtgtccatccaggtctttgagggtgagcgcagtatgagcaaggactgcggtggtcgcggcgagtgcgagctcaacggcattgcgccagcgtcaaggggcacaccccaga

SEQ ID NO: 19453 - DNA, 195 bp, Zea mays
tcggcgcacctggttggcagcgtgggtggacatgggcaaagaaggacgttatatggtcaatggttggggctcagaccactgaacagggcgactgctcaaagttcaagagcagcccaccccattgctgcaagagagatccaacaattgtcgatttacttccaggcactccatacgacatgcgaattgccaattgcg

SEQ ID NO: 19454 - DNA, 135 bp, Zea mays
ggtcgccaagtacaaggtgggggctcctgctcgtgttggtctggttgctccagttgatgttgttgtgccccctggcaacactgggctggatccgtcccagacctctttgttccaggtgcttaagatccccaccaa

SEQ ID NO: 19455 - DNA, 140 bp, Zea mays
caaagaaggataatgctgagggacaagaggttgaggcagcagctgaggaaacgaaaaagagcaaccatgtcacgaggaagcttgagaagcgcaaggagggacgtacccttgacccacacattgaggagcaatttggcagt

SEQ ID NO: 19456 - DNA, 139 bp, Zea mays
agccaccaagggaaatgagtttgaagactattttctcaagcgtgaactcctaatgggtatttacgaaaagggatttgagagaccctctcctattcaagaggaaagcgttcctattgcgttgactggtagtgacattctt

SEQ ID NO: 19457 - DNA, 134 bp, Zea mays
agagaaggtcctcccgtatgctgactacatcttcggcaacgaaactgaggcaaagatctttgccaaagtcagaggatgggagactgagaatattgaggagattgctttgaagatctctcaacttcctttggctt

SEQ ID NO: 19458 - DNA, 264 bp, Zea mays
cggacgccgtggggaacggactcaccttgcttggttggtggtacgagccttggacgcagactcccgacactgtcgcggcagccgcacggatgaacgacttccacatcggatggttcatgcatcctatggtgttcggggactaccctccggtgatgaggaggaacgtcgggtccaggctgccgaccttcacggacgaggaagcggcgcgagtgagtgggtctttcgacttcgtcggattcaaccactacatcgtcgtctacgtca

SEQ ID NO: 19459 - DNA, 126 bp, Zea mays
  unsure (1)..(126): unsure at all n locations
cggaccgtggcgcgagtgctccctcctctgccgccatggcgctctctgtggagaagacctcgtctggacccgagtacaagntctaaggtctctcgcaagcgnacttcggccgcctcgagattgagc

SEQ ID NO: 19460 - DNA, 239 bp, Zea mays
gcgaaggcgaccattccttcttcgctccttcgccgccgctatggttaagtactcgcaggagccgggcaaccctaccaaatcggccaaggccatgggaagggacctgagggtccacttcaagaacacaagggagacagcttttgcgcttcgcaagctgcctttgaccaaggctaagcgataccttgaggatgttattgctcacaagcaggcaattcccttccggagatactgtggaggtg

SEQ ID NO: 19461 - DNA, 236 bp, Zea mays
tgttggggtctacaatgcttccaatcatctcagggacaatgatcatgttacggagatgtgtcttgactggctctggcttctcaccagcaggagcatctccgtaacatgatcattgtccctgagatgattggaagcattgttggggtctacaacggcaagacgttcaaccaggttgagatcaagcctgagatgatcggccactaccttgctgagttctccatctcctataagccggt

SEQ ID NO: 19462 - DNA, 223 bp, Zea mays
tgttgagtgatggtggtgtccactcccgtcttgatcaactgcagttacttctgaaaggtgtcagtgagagaggggcgaaaaaaatccgtgtgcacatccttactgatggacgtgatgttttggatggaagcagtattggtttcgtggagaccctagagaatgatcttttggagcttagagcgaagggtgttgatgcacaaattgcatctggtggtggaaggat

SEQ ID NO: 19463 - DNA, 236 bp, Zea mays
cccacgcgtccgcggacgcgtggaaggtcttaaagcaggaacaaagaagcaaaagtatgagaaaattagcgagaagaaagttgcaacatcaattgaggctctatgccgtgggtatcctactgagtttgcatcatatttccattattgccgctcactgcggtttgatgacaagcctgactgttcatacctcaagcgattattccgtgaccttttcattcgcgaaggttttcagtttg

SEQ ID NO: 19464 - DNA, 230 bp, Zea mays
cccacgcgtccgcccacgcgtccgcggacgctggcggacgctgggctcgtccctagaaataaagcagctcatccgcggggcggcgaactactacccatcgccaaaaccctagctccgatccggtcgaggagcactacttcttggcatggcgggcacccctagccaggcaagcctcctgctccagaagcagctcaaggatcttgcgaagaaccccgtggatgggttctccg

SEQ ID NO: 19465 - DNA, 232 bp, Zea mays
ggggacagcatcactacagatcacatttcacctgcaggaagcatacacaaagacagtcctgctgctaagtatttgatggagcgtggtgtggaccggaaggacttcaactcatatggtagccgtcgtggtaatgatgaagtaatggcaaggggaacgtttgcaaacattaggatcgtgaacaagtttttgaacggagaagttggacccaagaccattcatgttcctactgggg

SEQ ID NO: 19466 - DNA, 230 bp, Zea mays
gatccgtcctgcaaatctcctctcatacttctccaccggatccctgtaagattcccggagatgtcggacgaggagcaccagttcgagtccaaggccgacgccggcgcctccaagacctacccgcagcaggccggcaccatccgcaagaacggctacatcgtcatcaagggacgtccctgcaaggttgttgaggtctccacttccaagactgggaagcatgccatgccaag

SEQ ID NO: 19467 - DNA, 228 bp, Zea mays
attggtttcaggaacacaaaacacttggggaatgcatcaggattggctattataaccgtcatgctggtcacaacgtgcctgatgtccctggtgatagtcttatgctggcataagagcatattccttgcgattggcttcatcctgttctttgggaccattgaggcactgtacttctcagccgcactcatcaagttcagggagggagcctgggtcccaatcgttcttgct

SEQ ID NO: 19468 - DNA, 232 bp, Zea mays
gtcaagtaccacctgggtacctcctatgatcgcccaactcgaggcggcaacaggatccatttgtccttggtcgccaatcccagccatctggaagccgttgatcctgttgtcattggcaagacgcgtgctaagcagttctactccaatgatgctgacaggacaaagaacatgggtattctgatccacggagatggcagctttgctggccagggtgtggtctatgagacactcc

SEQ ID NO: 19469 - DNA, 153 bp, Zea mays
caaaactcatcctgctgcgttgaccaccagaaaatatgggctttccagctgggaatcactcaaggcagtgatgtcaagagagcagctattgatgaagcgcaactctttcatctatattgtcaaggtcacccagtggatcatccatgcgctcat

SEQ ID NO: 19470 - DNA, 103 bp, Zea mays
gtcgggcccgaagtgtccgcgcacttcttcaagggcaacgaggccgagatgagccagcaggaggtgtacaggttcaacgtgcccaccttcggccccggggtcg

SEQ ID NO: 19471 - DNA, 229 bp, Zea mays
cccacgcgtccggccattgatcagcttggctggggtggttcaagcagacctgacttcacatgtaaaagtaccgaagaaactgaggcatggttcatagattctttcgaggagtggcgcaaggccaagaacctcagtaattttatattgcttggtcactcttttggaggatatgttgctgcaaaatatgcgctaaagcaccctgaacacgttcaacagttgattttggttg

SEQ ID NO: 19472 - DNA, 197 bp, Zea mays
cggacgcgtggctgggcaagacatgggataagctccagctcgcggcgagggttattgttgccattgagaaccgccaagacatcatcgtccagtcggcccgcccctacggccagcgtgctgtcctcaagttcgcgcagtacactggcgcccatgccatcgcggggaggcacacccctggtaccttacacagtcagctc

SEQ ID NO: 19473 - DNA, 235 bp, Zea mays
ccacgcgtccgctagggtttttgattttagccgccgccgctgctcatctcacatccctcgagaagacgcctgctcctcgccgatcgatacgatggccgtcttctccgacctccacaccgccgacggcctcaagtccctcgaggctcacctcgccggcaaaacctatgtgtctggtgactccattactaaggatgacattaaggtcttcgccgcggtgccgtcgaagcctggcgct

SEQ ID NO: 19474 - DNA, 230 bp, Zea mays
cagagatgaggatcacctcgcgctgatgatggagctgctaggaatgatgcctcgaaagattgcgttgggtggtcggtattcacgtgatttcttcaatcggtatggggatttgcggcacatccgacgcttgcggttctggcctctcaacaaggtgctgatggagaagtacgagttcactgaaataaatgctaatgggatggcagattttcttgtcccaatacttgattttg

SEQ ID NO: 19475 - DNA, 226 bp, Zea mays
ggcttaaaccctagttctcactcccatcgccgcttcagctccgccgctgcagatggagttctggggtctcgaggtcaagcctggttccactgttaagtgtgagcctggatatggctttgtgctgcacctttcccaggctgctcttggggaatcgaagaagagtgataatgccttgatgtatgtcaaaattgatgatcagaaacttgccattggaaccctctctgtt

SEQ ID NO: 19476 - DNA, 89 bp, Zea mays
cccttcgctgaggccaatgctggggactctggtgcggcagcagggtcaaaggactacgtacacgtgcgcatccagcagcgtaatggtcg

SEQ ID NO: 19477 - DNA, 209 bp, Zea mays
tgaagtttattacaacaaagcagtcaactacacactgatggtcacttttatctctttccttcaagttttgctgctgattagacaaatggagcatagcaacacacaatctggagctgctaaggtttctattttaatgattggccaacaagctatcatggatgcatatctctgtctacttcacctgactgctgggatattggttgagtcac

SEQ ID NO: 19478 - DNA, 205 bp, Zea mays
gttaactatgagattggaaatcttattaagtggagaaagaactttggaaatgttgtgatgatcatgcacgttagtgggcctgtggatcgcacagcacttgagtggaggctgctttatggaaggattttcaagacggttatcattcttgctgagcagagcaatgcagagcttgctgttgaacgctgcatactgttatacgcttatc

SEQ ID NO: 19479 - DNA, 223 bp, Zea mays
ggacgcgtggctcgccgtcaccacccccaatccagcaaacgcaaaccccatctcgccgccgccgccgccgcgatgtctcgccgctatgacagccgcacgacgatcttctcgccggaggggcgtctctaccaggtggagtacgcgatggaggcgatcggcaacgccgggtcagccctcgggatcctagcggccgacggcgtggtcctcgtcggcgagaagaagg

SEQ ID NO: 19480 - DNA, 223 bp, Zea mays
cacatacacaagcacaagcgcactctagcaatggcttctgaggttgtccgccctagcgacgccgagctactaaaggcacaagccgacatatggcggctcagcctctcctacctcacgcccctgtcactgaggtgcgccgtggagcttggcatccccacggcgatctaccgccatggcggggctgcctcagccgctgagctggtcacggcgctgtctctcccct

SEQ ID NO: 19481 - DNA, 211 bp, Zea mays
cgacggcgacggcaacgactggggcgacagtcgctgccgccctacttgccggttgctcggatcttcttcggcccgttagccgtcgacgagcaccaccagggcaaccagatacttcagtggcttcgcaaggatgtcctggtgcactattgagtctgatcctggtgtgttcactgagctgattcagcaaatgcaagtgaaaggtgtacaggtg

SEQ ID NO: 19482 - DNA, 219 bp, Zea mays
ggcaattttatgaaaaatatgtatgtaaagagaactcctgaaatgagcaaagacatacacatttactctagtgctctgaaggcgacactaacttggcagaatatgattacgattcaggagtgtcgcgaggcctgtggaggtcaaggtctaaagactgagaaccgcataggaattttcaaatctgaatttgatgtccagtccacatttgagggtgataac

SEQ ID NO: 19483 - DNA, 221 bp, Zea mays
cccacgcgtccgagggttttggcctcgccgcgcacgcctcctgaagcttctagacgttcgaggaggaggaggggaggctcccgccgccgccgccgcagccatggcgtccaccaaggtcagcgtatcatgacccagcccatcaacctcatcttccgtttcctccagagcaaagcgcgcatccagatctggctcttcgagcagaaggacctccggattgaggg

SEQ ID NO: 19484 - DNA, 219 bp, Zea mays
ctcgccagccaaagacgaccacgccctccgtgctccagccattccccatgatttcgccgacgaatctcctcccggcgcggaagatcacccctgtctcaaatggcggcgcacgacggcgagcccctcttctccctcggtggccgcacggccacggcgactcccttcaggcctccaatctgtgactggtagagggaaggtttccttggcagccatcactct

SEQ ID NO: 19485 - DNA, 218 bp, Zea mays
cagcaaataccccacaaggccactccaaagagctagtagtggaaccgaagatgttcgggaacatcggaaagatccccatcatcggcgacctgacgggcagcaacaagaatgcgcacctcaagggcaacgtggtgctcgtgcgcaagaccgtgctcggcttggacgtcaccagcatcgccggctccctcctcgacggcgtcggcgagttcctcggccgc

SEQ ID NO: 19486 - DNA, 216 bp, Zea mays
ctaccttggtgtgagaaatgcagcacagaggaagctactggatgagctgggcatcccagcagaagatgccccagttgaccaattcacccctctgggccgaatgctttacaaggcaccatctgacgggaaatggggggagcatgagcttgactacctgctgttcatcgtccgggacgtgaaggtgcagccgaacccagatgaagtcgctgacgtgaa

SEQ ID NO: 19487 - DNA, 195 bp, Zea mays
cccacgcgtccggagatgttgagtagaggctttaaggatcagatttacgatgtctacagatatctccctccagaacttcaggtggttttgatctctgcaactcttcctcatgagatcttggagatgactagtaagttcatgaccgaaccggttaggatccttgtgaagcgtgatgagctgaccctggagggcatc

SEQ ID NO: 19488 - DNA, 226 bp, Zea mays
ggcgctgctgacgatggcttcgtcggtgaaggggctggtgcctacgtcgtgcgcgtataaggatgtgtgccacccgacggacgcgcaggcggcggtggtgtccgtggcgctgtagctgatctcgctgggcacgggcgggatcaagccgtgcgtgtcctcgttcggcgccgaccagttcgacgagaacgacgagcgggataagaagacgcaagagctccttcttcaa

SEQ ID NO: 19489 - DNA, 228 bp, Zea mays
cggaacctgcccctggctcaggcctgatgggaagacccaggtgacagtcgagtaccgcaatgagggtggtgccatggtccccatccgtgtccacaccgtcctcatctccacccagcacgacgagacagtgaccaatgatgagatcgctgctgacctgaaggagcatgtcatcaagcctgtcatccctgagcagtaccttgacgagaagaccatcttccaccttaaccc

SEQ ID NO: 19490 - DNA, 229 bp, Zea mays
cggacgctgggagctggccatcctgatggcgcggctgtacaccggctcccacgacatcatctccctccgacaactcgtaccacggcaacgcggccgggaccatgggagccaccgcacagaagaactggaagttcaacgtcatccagagtggcgtgcaccacgcggtgaacccggacccctacagaggcgccttcggctccgacgccgagaagtacgtgcgggacgtgca

SEQ ID NO: 19491 - DNA, 227 bp, Zea mays
tggaggatctgattatcttggcaagggtgttcttaaggctgtcagcaacgtaaacaacattattggaccagcgattgttggaaaggaccccactgagcaggttgagattgacaacttcatggtccaacagcttgatggaacctccaatgagtggggctggtgcaaacagaagcttggagcaaatgccatccttgcggtttcacttgctgtgtgcaaagctggagcta

SEQ ID NO: 19492 - DNA, 231 bp, Zea mays
cccacgcgtccgcccacgcgtccgcccacgcgtccggttgggcgcagagaatccccaagcaaacaaacagggtagatggagaggagaggagaggagaggagaggttgggtctgggacaccatggctccgatgaagctgtacggggcggtgatgtcgtggaacgtgacgaggtgcgcaacggcgctggaggaggctggctccgactacgagatcgtgcccatcaacttcgcc

SEQ ID NO: 19493 - DNA, 232 bp, Zea mays
cccacgcgtccgcgcgcctctacatttcttctctctctgctcctccgcctccgcctccgcctgatccatccaagacagggatcgccatgtcggactcggaggagcaccacttcgaatcgaaggccgacgctggggcgtccaagacctacccgcagcaggctggcaccgtccgtaagaacggcttcatcgtcatcaagaaccgtccctgcaaggttgtggaggtttctacctc

SEQ ID NO: 19494 - DNA, 222 bp, Zea mays
gagcccaacaagggtgtcaaccctgatgaggctgttgcctttggtgccgctgtgcagggaagcatcttgagcggcgagggtggtgacgagaccaaagatatcctcctccttgatgtggttcccctcaccctgggtatcgagaccgtcggtggagtcatgaccaagttgatcccgaggaacactgtcatcccgaccaagaagtcgcaggtgttcaccacctac

SEQ ID NO: 19495 - DNA, 224 bp, Zea mays
cccacgcgtccggcctgctggggggctcgctcgtgctcagcttcagctggtgggtcatcgtcgcggcccagttcgggtacatcgtcaccagcgcccggtgcagggacacctggacgggattcaccacgcaggccttctcgggcctcggcaccttcttcaagctctcggcagcgtccgccgtcatgctgtgcttggagacttggtacttccagatcatcgtgctc

SEQ ID NO: 19496 - DNA, 222 bp, Zea mays
ggaagatggatggcgtagttgttttcaccgacgacagcaatgttcatagcatggagctgttcgatgaggtgcagaaggtccagtggatgggtgctgtatccgtcggaatccttgcgcatactggcacggcagaccaactacggctcagcgaggaggacaagcagaatatgcctcttccagtccagggccctgcttgcaactcctcagggcatctgattggat

SEQ ID NO: 19497 - DNA, 201 bp, Zea mays
agaggaattactgcagagggccaaggtgtgaaggctgaatcctcagcagttccttcagccccaactccagatgttgctgaagcacaggccccagttgctgaggaggacgacgacgatgatgttgaccttcttggtgcggagaccgaagatgagcagaaggctgctgaagaccgtgctgcagctgccaaggcttctggcaag

SEQ ID NO: 19498 - DNA, 217 bp, Zea mays
cccacgcgtccgcccacgcgtccgcagccaatctcctcctcctcctccgctctcagacgagcagcggttgccatcactctccacttcccacgcccgctgcgggctcgcaggcggcagagaattgtctgtgccgccgggtgggaatttgattcggtcggattcgctgcgccgcgatgccggagcggcaccagtccatcgacgcgcactgcggctgctg

SEQ ID NO: 19499 - DNA, 218 bp, Zea mays
gtccgataccccaagcaccagcgcggcggcggcgaccatggctgtcggaaagaacaagaggatctccaagggaaagaagggtggcaagaaaaagaccgtcgaccctttctctaagaaggattggtatgacatcaaggcaccgtcggtgttcagtgtgcgcaacatcgggaagactctcgtatccaggacacagggtaccaggattgcttctgagggtc

SEQ ID NO: 19500 - DNA, 218 bp, Zea mays
cttccaagaaccacgcttcgttgaatacttcagatcggctacacctgagactgaatatggtaggatgaatattggcagccgtccatcaaagaggaagcctagtgggggaatagaatcactccgtgcaattccatggatctttgcttggacacaaacaaggttccatctgcctgtctggcttggatttggtgcagcgataaagcacatcatgcagaagg

SEQ ID NO: 19501 - DNA, 220 bp, Zea mays
cgcagtcggctgccgcagactggtagtagccggcgcgccgtcaccgtatcctcagatcagaggcgagcagaaaccacaccactctactgacgcccgacgagcagtgtaacattttccttcagccatgggtaaggagaagactcacatcaacattgtggtcattggccatgtcgactctggcaagtcgaccaccactggccacctgatctacaagcttgga

SEQ ID NO: 19502 - DNA, 237 bp, Zea mays
accagaccaccaaacaagtgccagcgccctctcgcagtcgccgcaatggagagcaccttcatcatgatcaagcctgacggcgtccagaggggcctcattggtgagatcatcagccgttttgagaagaagggcttctacctcaaggccttgaagcttgtcaacgtggagaggtcgtttgccgagaagcactacgccgatctcgcctccaagcccttcttccagggcctcgtggactac

SEQ ID NO: 19503 - DNA, 230 bp, Zea mays
ctcataacagctttgcaaggccagagccatttatttctgatgagcagagggccgcaactaaggatgatgatgtttaccatttcataagctatttaccttttgaaggtgtcctgtatgagctggatggactgaaggaagggcctgtgaatcttgggcagtgcgatggtgctgatgatcttgattggctacggatggtgcagccagttattcaagaaaggattgagcgctac

SEQ ID NO: 19504 - DNA, 235 bp, Zea mays
cccacgcgtccggcaagtcgtccagcaagtgcgccaccgtgggcatccagggcatcgcgtggtccttcggcggcatgatcttcgcgctggtgtactgcacggcgggcatctccggcggccacatcaacccggccgtcaccttcggcctcttcctggcgcggaagctgtcgctcacgcgcgcgctcttctgcatggtcatgcagtgcctgggcgccatctgcggcgccggcgtcgt

SEQ ID NO: 19505 - DNA, 231 bp, Zea mays
gcaagtttgacaacctgtatggttgccgccactcactccctgatggtctgatgatggccaccgacgttatgatcgccggtaaggttgccgtggtctgcggatacggtgatgttggcaagggttgtgccgctgcactcaagcaggctggtgcccgtgtcattgtgaccgagatcgaccccatctgcgccctccaggctctgatggagggtcttcaggtccttcccttggagg

SEQ ID NO: 19506 - DNA, 234 bp, Zea mays
caatcaaccagcaacactcttctcttatgacatagtacagcgaaggtaactcacatggcaacttccatgggttgtctcgtcttgctctgccttgtttcttctctccttcccagtgccgtccttggccacccatggggtggcttgttcccacagttctatgaccattcgtgccccaaggcgaaggagattgtgcagtccattgtggcacatgctgtggccaaggagaccaggatg

SEQ ID NO: 19507 - DNA, 231 bp, Zea mays
gagcactcgccgccactcaccagcaaattcccaagccgccccttcccccatctctttcgcgccccatttgatcgattcctgatggcgcccaaggccgagaagaagcccgcggagaagaagccggcggaggagaaggccgagaagaagccaagggcggagaagcgcgtgccgagcaaggagggcggcgagaagaagggaaagaagaaggcgaagaagagcgtcgagacgtac

SEQ ID NO: 19508 - DNA, 226 bp, Zea mays
gatctggttcgccatctcctggatcctcgaccagttccccaagtagttccccatcgaccgcatgtagtacctcgaccgcatctacctcaggtacgagaaggaaggggagccgtcgctgctgtcggcagtagacctgttcgtaagcacggtggacccgctcaaggagccgccgctggtgaccgccaacaccgtgctctccatcctcgccgtagactaccccgtggac

SEQ ID NO: 19509 - DNA, 227 bp, Zea mays
tcttggacatagttgagagtgtaaaccttcttatgtcttcgaaagggagtgttctaagatgtgatgtgacgggaaagattcttatgaaatgcttccttactggaatgcctgatctgaagctgggattaaatgacaagattggacttgaaaaagaggcccaactaaagtccagaccagcaaagagtgggaagactatagaacttgatgatgtcacattccaccagtgt

SEQ ID NO: 19510 - DNA, 228 bp, Zea mays
cccacgcgtccggcgacttttttttcaagaagacaggagaagggagttgtagtgagttttaagaatggcgagtgcacaggcagtggggcaaggagaacgaggccacttcgttctgaagagcggacacaccattccggccgttggtctaggcacttggagggccggctcagataccgctcactctgttcggaccgccatcgccgaggctggatataggcacgtggacac

SEQ ID NO: 19511 - DNA, 226 bp, Zea mays
ctcatatctgggtcgaagcacagattgagagacattctagaagccgtatagaactcatggtgaaggcaaggagtcagttcaaggaaagaagcacagcaacaaatgttgaaattgaagtgcctgttccttcagatgccacaaacccaaatataagaacttcaatgggttctgctgcatatgctcctgagagagatgcaatggtctggaaagtaaaatcattccctgg

SEQ ID NO: 19512 - DNA, 225 bp, Zea mays
gagagcccacggcgagggcgccttctccggcaaggacccgaccaaggtggaccgcaacggggcctacgtcgcgaggcaggctgccaagagcatcgtcgccgccggcctcacccgccgcgccattgtccaggtctcctacgccatcggcgtgcccgagcccctttcggtgttcgtggacacgtacggcaccggcgcgatccccgacaaggagatcctgaagatcgt

SEQ ID NO: 19513 - DNA, 226 bp, Zea mays
ggatgaacaacgtgcacggggccatcgtctccggccagggcttcggcgccaccatccgggccatcaacggcgcgctcgagtgcgacggcaagaaccccaactccgtcaacaaccgcgtcgcctactacaagcagttctgccaggatttcggcgtcgacccgggcaacaacctcacctgctgaatgatctctctctcattgggttgttgtcctgtacttccacatgt

SEQ ID NO: 19514 - DNA, 178 bp, Zea mays
ctccgatccccaattcctccttcggatctcgcattcagcgcacgcaggtgtgaaggaagggggacgcggaggaagatggggctcgcgttcgggaagctcttcagccggctcttcgccaagaaggagatgcggatcctcatggtcggcctcgacgccgccggtaaaaccaccatcctct

SEQ ID NO: 19515 - DNA, 222 bp, Zea mays
gcctcgggtcaaaccctaagcagggagttgatttatccgctgcagccatgagtaagttgcagtctgagtctgtcaaggatgccatctcccagattgttggggatgccaaggagaagaataggaagttcactgagactgtggagcttcagattggtctgaagaattatggtccacagaaggacaagcgtttcagtggctctgttgagttgccccatatccctc

SEQ ID NO: 19516 - DNA, 210 bp, Zea mays
ccacgcgtccgggacagagttcagagactgcactgtcatcactgtcgctcaccgtatacccactgtcatggactgcagtatggtacttgcactgagcgacgggaaactggtggagtatgacaagcctacgaagctcatggaaaccgaaggtctctcttccgtgacctcgtcaaagagtactggtcgtacgcatcgaatgggaatatctag

SEQ ID NO: 19517 - DNA, 115 bp, Zea mays
tctgggatgtcgggggtcaggacaagatcagacctctctggaggcattacttccagaacacacagggtcttatctttgttgtggatagcaatgaccgtgaccgtgttgttgaagc

SEQ ID NO: 19518 - DNA, 235 bp, Zea mays
attgcatctcatagtagcaaaaagtttcttgtagttttagatgatgatccaactgggactcaaacagttcatgatatagaagttttaactgaatggcctgttgaagcccttgttgaacagttcctcaagctaccaacttgcttttttattttgacaaactctcgttccatgactgctgataaggccatgctgctagtacaaactatctgtaaaaatcttaaagctgcggcagaga

SEQ ID NO: 19519 - DNA, 242 bp, Zea mays
ccatccaccgcaaacgccaaacggccggcacacaactacacaagccgctggcaaagatggcctcctccttggtcctcatcgcagcggccctgcttgcgctggcctcgtcgtggcagcaggccatcgcctacgatcctagccccctccaggacttctgtgtcgcagcaagaactcgcctggtacttcgcgtcaacgggttcccttgcaaggacccgatggcggtcaccccggacgacttcttc

SEQ ID NO: 19520 - DNA, 120 bp, Zea mays
gcggaggcccgggtgccgctcgcctaccgcgaccagtgcgcgcacctcctcatcccgctcaacaagtgccgcgtcgccgagttctacctcccctggaagtgcgagcccgagcgccacgcc

SEQ ID NO: 19521 - DNA, 205 bp, Zea mays
gaaagagagtctgaaggttctgctctcctcgaggtatgtgagggatctagctaccctagtggttgcttatggcattagtatcaatcttgtcgaagtcacgtggaaatcaaaactcaaggcacagttccctagtccaaatgaatattcatctttcatgggtgatttctcgactgcaactggaattgcaactttcacaatgatgctg

SEQ ID NO: 19522 - DNA, 113 bp, Zea mays
tttcgacgtggatttgggatctggagtcaccaaccacccagtgctgctccagtacagccacgcggatcccaatcgcacagtggtgaacccctacgtgcacttcggccagcggt

SEQ ID NO: 19523 - DNA, 239 bp, Zea mays
cccacgcgtccgggatgagaaccttgagaagctgaagaaggtgctagaggtgtacgaggcacgcctgaccaagtgcaagtaccttgctggagacttcctcagcctcgccgacctgaaccatgtgtctgtcactctctgcctgttcgctacgccctacgcatctgtgctcgacgcctacccgcatgtgaaggcctggtggtctggtctgatggagaggccgtctgtccagaaggtcgctg

SEQ ID NO: 19524 - DNA, 238 bp, Zea mays
gaaattggaaatgacatattcagtgaagtgggtagcgactgatgtgtcatttgcacgccgttttgaagtgtacctggactatcctttctttgaacaccagattcactggttctccattttcaactctttcatgatggttattttcctaactggtttggtttcgatgatattgatgcggactttgagaaacgattatgccaaatatgctcgtgaagatgatgatctagagtccctggag

SEQ ID NO: 19525 - DNA, 112 bp, Zea mays
cgcgttccatttccccatctcccagatccaattcgcgagttctccctcctctgccgccatggcgctctctgtggagaagacctcgtctggacgggagtacaaggtcaaggat

SEQ ID NO: 19526 - DNA, 233 bp, Zea mays
ccacgcgtccgggctggatctatggatcagttacagaagatattctaactggtttcaagatgcattgtcatggttggcggtcaatttactgcatacctaaacgggttgcattcaaaggttctgcacctctgaatctttcagatcgtcttcaccaggtgcttcggtgggctcttgggtctattgagatcttcttcagcaatcattgccctctttggtatgggtatggtggcggt

SEQ ID NO: 19527 - DNA, 235 bp, Zea mays
cccacgcgtccgcccacgcgtccgcgatcgacctgctccctccccaccaccgagcccatggcggaccagctcaccgacgaccagatcgccgagttcaaggaggccttcagcctcttcgacaaggacggggatggttgcatcacgaccaaggagctgggcactgtcatgcgctcgctggggcaaaatcctacagaggctgagctccaggacatgatcaacgaggtcgatgctgatg

SEQ ID NO: 19528 - DNA, 232 bp, Zea mays
ccgcaaatacccagcaccacgtggctacttcttcaagcttctgaaactgaatgcacctgaatggccttatgcagtattgggggccattggttctgtcctctcaggatttattggcccaacttttgccatcgttatgggtgaaatgctcgacgtgttctactacagggaccccaatgagatggagaagaaaaccaagttatatgtgttcatctatattggcacaggcatatac

SEQ ID NO: 19529 - DNA, 233 bp, Zea mays
gacgcacaccagcacctgccctcctcgccgtcgccgcctccctccgcgcgaccgatctaccctccgccgccaccatgtcgctgatcgccggggaggacttccagcatatcctgcgtttgctgaacaccaacgtggatgggaagcagaagatcatgttcgccatgacctcaatcaagggtgtcgggcgccgcttctccaacatcgtctgcaagaaggccgacatcgacatgaac

SEQ ID NO: 19530 - DNA, 245 bp, Zea mays
cccacgcgtccgtgatggtgtgagccacactgtgcccatttacgaaggatatgcccttcctcatgccattcttcgtttggatcttgctggtcgggacctcacagactccctcatgaaaattctcactgagaggggttactccttcacaacctcagccgagcgagaaattgtaagggacatcaaggagaagctagcatatatagcccttgactatgagcaagagttggaaactgccaagaacagct

SEQ ID NO: 19531 - DNA, 201 bp, Zea mays
  unsure (1)..(201): unsure at all n locations
gccaacgccgcctgctgccgcagccgccatgggggcgtacaagtatgtgtcggaactatggaggaggaagcagtcggacgtgatgcgcttcgtgcagcgcgtgcgctgatgtggagtacaggcagcagccgnccatcttccgccacaccaggcccacccgccccgacaaggcccgtcgtctctgcgacatagccaagcagg

SEQ ID NO: 19532 - DNA, 119 bp, Zea mays
gtctgctctggtttcacatccaaaatgtgctgaggctgctgttgttggtattgatcatgaggttaaaggtcagggaatatatgcttttgtgactttggtggatggtgttccctacagtg

SEQ ID NO: 19533 - DNA, 175 bp, Zea mays
ccacgcgtccgccaagccaagatacttaatgtggttgatgtttcgtatggtggcgagaacggtttcaaccaagctattgaattatctgctgagattctagcaaatgtgaaattcattcaagaaaagaagttaattggcaagtattttgaagagatcagtcaggagactgggaaat

SEQ ID NO: 19534 - DNA, 285 bp, Zea mays
  unsure (1)..(285): unsure at all n locations
gcggacctgagtacggccggaatccgggcgaccacgcgccgggacgctggttttataagggtttcggcggaggcgcccggtcgctggcgatggccgacgacggcgagaccacgagggcagcggcggcggcggaggcgtccgggagcaggaccggttcctgcccatcgccaacatcagccggatcatgaagaaggccgtcccggccaacggcaagatcgccaaggacgctaaggagaccctgcaggagtgcgtctccgagttcatatcatcgngtacagcgaggcc

SEQ ID NO: 19535 - DNA, 214 bp, Zea mays
cggacgcgtggcggacgcgtgggcggacgcgtgggtcaaatccttcgatcgcgcagccgcccgccatctcgcagctcactccgatggcccgcacgaagcagacggcgaggaagtcaactggcggcaaggcgccgcggaagcagctggccaccaaggcggcgcgcaagtcggctccggccaccggcggcgtgaagaagccgcacaggttccggcc

SEQ ID NO: 19536 - DNA, 252 bp, Zea mays
ccccgacaagctgtgcgaccaggtgtcggacgccgtgcttgacgcatgcctcgcgcaggaccccgtcagcatggtggcctgcgagacctgcaccaagaccaacatggtgatggtgttcggcgagatcacgaccaaggcgaccgtggactacgagaagatcgtgcgcgacacctgccgcgagatcgggttcacctccgacgacgtgggcctcgacgccgaccgctgcaaggtgctggtgaacatcgagcagca

SEQ ID NO: 19537 - DNA, 242 bp, Zea mays
tgaagaatcggcattgatgacagattatatgtaccatacgttagctgccaaagctagtggagagctgtgcttgaaatatatattttccttcggggcatttgcaaggaaacctcttcgtcagtgcgcgaccgaatggaaagagccgaccaccttcaaatatgggcagcaagactggatgaacgatcaaggcgcccatcaagcacggaagggacagaaagaccttgtgtaaaaatcagggccac

SEQ ID NO: 19538 - DNA, 239 bp, Zea mays
agcggcttgtgccaagcctatcatacctcaggactgagctttgctctaccaatatgagtgaagcgtgcttctggaagatatattttgtgcttctccattcgaaactcagcaagcaagatgctgaaattctttcaacaccacaaatcctggaagcaagagaaggactactgcaaagttcaccgacaaagcacaagctggtatcaggaagcaggaatactagagaacctgaagagagtgag

SEQ ID NO: 19539 - DNA, 236 bp, Zea mays
cccacgcgtccgggtagctgtgaaggtgcagagacctggtatcgaggatgctattgggcttgatttttatctacttagaggactcgggtttcttataaataagtatgttgacattgtaaccagcgatgttgttgcccttatggatgaatttgcacggagagttttccaagagcttaattatgttcaggaaggccaaaatgcaagacaggttaaaaaactatagccgagaagcaaga

SEQ ID NO: 19540 - DNA, 230 bp, Zea mays
ggagctgatcctcaccggcgtcgccatcgtaatcgccttggacagcggcaccagaacctctgcctccgcagggtgcttgctggtatcattacaatctggtagttttagtggttgggcttgacttcctactattcagaaacacagtaccgagaagtctttaggtggggtcaaagatggtgtcgctgaagttgcaaaagcgccttgccgcgagctacctcaagtgtgggaaa

SEQ ID NO: 19541 - DNA, 252 bp, Zea mays
cggacgcgtggcggacgcgtgggcggacgcgtgggggctgaaattttcacaactggagttgtccttggatggatatcaggcaatgatgactgacatcttcttttgggctgcatacaagacaaactttttcccaaaaatatttcatgtggaaagccttgagaagacagctcaagatgatttccaaaagcttgcatctgctgtttacctgcaagttagcaccatcagccaggccctcatcttcgtgacaaggtc

SEQ ID NO: 19542 - DNA, 122 bp, Zea mays
cccacgcgtccgaagtaaaacacttcgggattttcatgttgttgatattgaactcccagggcagtacttcacagatcaggaaatcgcaccggaccacactgttaagttggacagagattgac

SEQ ID NO: 19543 - DNA, 209 bp, Zea mays
cctcacttctgcgccgccacccactacaggtaaggaagaggaggagggcaggatgtcgcaccgtaagttcgagcacccgaggcacggctccctcggcttccttcccaggaagcgctcctcccgccaccgcggcaaggtgaagtcatttcccagggatgaccccaagaagccttgccatctcactgccttccttggctacaaggctggca

SEQ ID NO: 19544 - DNA, 236 bp, Zea mays
caacatgaagtcaagggctgggagaggctttacccttgaggagctgaaggctgctggcatcccaaagaagcttgctccaaccattggtatttctgttgatcaccgccgcaagaacaaatcccttgagggactgcaggccaatgtccagaggcttaagacatacaaggccaagctggttatcttcccaaggcgtgcacacaaggttaaggctggtgactctactccagaggagcttg

SEQ ID NO: 19545 - DNA, 241 bp, Zea mays
ccacgcgtccgcggacgcgtgggtggtgctcatggtgttttcgctaatccagatctttttcccgctgggtaagatatctgtgatgatatacggtgggttggcatcgcttatcttctgtggatacatcatctatgacacggacaatgtcatcaagcgctacacctacgatgaatacatatgggctgctgtttcactctacctcgacgtcatcaacctgttcctgtctctgctgcagctgctg

SEQ ID NO: 19546 - DNA, 283 bp, Zea mays
tcgtacagtcgcagtacggtccgaattccgggtcaccacgcgtcccgagggcgacgccctctctctctttccccgagctcgcgaaaccctaggtgcgtgccgaccggcggcggcggcgaggtgatggcgatggacccggacgcggtggcgaaaccttcgtggagcactactaccggacgttcgacaccaaccgcgcggcgctggtggggctgtatcaggagacctccatgctcaccttcgagggccagaagttccagggcccatccgccattgccggcaagct

SEQ ID NO: 19547 - DNA, 245 bp, Zea mays
ctgtgatccttcgtatttaccaaacaaggttaggaagattggtagagttgttcgtgcaattgctatcatgagccacccaatccctaatacaaatgagtcccactcggttcaaattattttgcctcagaaacaacttggacgtagatcagacatgtatgttttctgttgttcatacacgcacaatgttgcgccaagagggaagttcattgcatttgtgtctgcagaagcagagactgataacccgc

SEQ ID NO: 19548 - DNA, 244 bp, Zea mays
tcctgaggttcaagatcagataaataataatgcgacaaagcatgttttgcctggtggaattgaggatctttcagggaaggttccacaaaagttctccttgtccagtttttgccacggtatcatgactgaaattggtcgcttcagcaaagatatgaaagaactactacaagagaaggtttttgtcatcgttgttttaggttatatatcctacaatttcgtcattggtgcttattcctactggggc

SEQ ID NO: 19549 - DNA, 244 bp, Zea mays
gacaacgcaaagggagaggacagaggaggagcagaggacgatgggcagcggcggcgctaacactgcccccctcatcaccccctacaagatgggaaaattcgatgtttcccacagggtagtcctcgcaccactgacgagacagcggtcctacggcaacgttcctcagcctcatgccatactgtactatcagcagagggcgactaaaggaggtcttctgatagctgaggccacgggggtttcagac

SEQ ID NO: 19550 - DNA, 241 bp, Zea mays
gcgccgggctcaccaactcgctgttcctccccacgggcgccgtcttcatccagatcaacccgtacggcaagatggagcacatcggggaggtggacttcggcatccccgccgtggacatggggctcaagtacatcgcctactccgccggcgtcgaggagaccaccctggtggacacgctggggcgcgaccacccggccgtcaaggacccggagtccatccaccggagtgggtgggggaaggt

SEQ ID NO: 19551 - DNA, 236 bp, Zea mays
ctcgaggctcgcgccggtgtccatttcaaagaggaagccgcggtacactggtagcggcacagtaaggggaagatgtcgtcggcgttcagcggcgatgagaccgcccctttcttcggcttccttggcgcctccgctgcgctcgtcttctcatgcatgggggcggcgtacgggacagccaagagtggcgttggcgtggcgtccatgggtgtcatgcgcccagagctcgtcatgaagtc

SEQ ID NO: 19552 - DNA, 240 bp, Zea mays
cccacgcgtccgagagaagtcgtcctttgggtttgtggactactatgatcgaaggtctgctgctctagcaatcatgacccttcatggccgtcacatatatggacaagcaatcaaggtgaactgggcatacgcaagtacacagagggaggatacgtcggggcatttccatatttttgttggtgatttaagttctgaagtgaatgatgcaactctttatgcctgtttctcagcatatccttc

SEQ ID NO: 19553 - DNA, 239 bp, Zea mays
gcatggagccaccagtccgcaggaagttgttgagtttatgtcagatgctcgctctcacctgtggagcatgcgacggagcaaagctaacttcttccgccttatgcaagtcttctcagggttcattgctgcagggaaatggtttgctgatgtttgtcagtggaaaaacccggtcaccacagtgctggtccatgtgctctttatcatgcttgtgctctatccagaccttatcctgccaacaa

SEQ ID NO: 19554 - DNA, 239 bp, Zea mays
gcgggcagctgttctcggccatggtggtgcgcaggccggcgcactagttcctggacgagctgggcgtgggctacgacgaggccgaggactacgtggtggtcaagcacgcggcgctgttcacgtccaccgtgatgagccggctcctggcgcggcccaacgtgaagctgttcaacgccgtggcggtggaggacctgatcgtgcggcgggggcgcgtcggcggcgtggtcaccaactgggcg

SEQ ID NO: 19555 - DNA, 240 bp, Zea mays
cgacgcgtcgggaccgcgtgggcgcgatcgcgtgtctgcgccaggcgccgctgccaatgccgcctacggccgcagccgccatgggggcgtacaagtatgtgtcggaactatggaggaggaagcagtcggacgtgatgcgcttcgtgcagcgcgtgcgctctgtggagtacaggcagcagccgtccatcgtccgcctcaccaggcccacccgccccgacaaggcccgtcgtctcggctaca

SEQ ID NO: 19556 - DNA, 239 bp, Zea mays
ccccaacccggacgaccctcttgtcccggagattgcccacatgtacaagacggaccggccgaagtacgagtcgacggcccgcagctggacgcagaagtacgcgatgggctgacgaacgctttcctgctcgtctgggcgccattgttcccttggatttgttgttggtcgtatgtatccctgatccatctaggatcatcgtattgtattgtagtgtatgtatgtcgtcggcctaccatcgt

SEQ ID NO: 19557 - DNA, 230 bp, Zea mays
cggaggacgagacgcgtggtccgaactacaagtttcgcttcacgtcgcgacgagcgggcgagaccgccgccgccgccgccgcctgagttctttagaaatggctgatggtgaggacatccagcctcttgtctgcgacaatggcactggaatggtcaaggctggttttgctggcgacgatgcaccaagggctgttttccctagtattgttggccgtcctcgccacactggtg

SEQ ID NO: 19558 - DNA, 236 bp, Zea mays
cccaacaccacctcgccgcgatctccgtagcctccgtcgcgtcgagcatcgatcatgtcggcctactgcggaaagtacaaggatgagctcatcaagaatgctgcctacattggcacccctggcaagggtatccttgctgctgatgagtccactggcaccattggcaagcgcctttccagcatcaatgtcgagaacgttgaggagaaccgccgtgccctccgtgagctcctattctg

SEQ ID NO: 19559 - DNA, 233 bp, Zea mays
gtcgtgaccagagcgcgagagctagctagagggccgtgaaaatgccgatcaataggatcgccctggggagccaccaggaggtgtaccacccgggcgccctcaaggcggcgttcgctgagttcatctccaccctcatcttcgtcttcgccggccagggctccggcatggccttcagcaagctgaccggcggcggcccgacgaccccggcgggcctgatcgcggcggcggtggcg

SEQ ID NO: 19560 - DNA, 235 bp, Zea mays
ctgggatctccgcccccttggcttgactggaaacaaggtcgaaaagctatgtgatctttgccacatcacattgaacaagaatgctgtcttcggtgacagcagtgcattgtctccgggtggtgtccgcattggcgcgccagcaatgacctcgaggggtctactggagaaggatttcgagcagattggggagttcctccaccaggcagtgaccatctgcctgaacatccagaaggag

SEQ ID NO: 19561 - DNA, 231 bp, Zea mays
cgacgcgtttcatatcaaggtacttcgagaaacagagtttgacagctgcatttgcaactgcacccgctgatccaacagtagacctaaacatgcaactgacaaaactagcgcatggtttgctctctggtaaatattctgctccagcaaaggcggggcaagaagggatacgttctcgcatgtttaagtcagttatcactgcgaaccatcctgaattttcaagcatgagacaac

SEQ ID NO: 19562 - DNA, 236 bp, Zea mays
cccacgcgtccgcccacgcgtccgagcagatcctcgtgcaacgcaaagcgctagccttcctactgtcccgatggcccgcacgaagcagacggcgaggaagtccactggcggcaaggcgccaaggaagcagctggccaccaaggcggcgcgcaagtctgccccggcgaccggcggagtgaagaagccccaccgtttccgccccggcaccgtcgcgctccgggagatccgcaagtacc

SEQ ID NO: 19563 - DNA, 235 bp, Zea mays
ccataaccacaacctcttctcccctgtttcctctcgtgcgttctccgcagagcgtaggagggctcgcggcagcggcagggtctccggtgtttttgttccagaatctgtagcaaatggctgacggcgaggacatccagccccttgtttgtgacaatggaactggcatggtcaaggctggttttgctggtgacgatgcgccaagggctgttttcccaagcattgttggacgcccacg

SEQ ID NO: 19564 - DNA, 238 bp, Zea mays
ggctgccacatcaccatcctcaccggcatcctctactggtttgcccagcttctcggcgcttccgtggcgtgctttctcctgcagtacgtcacacacggacaggctatcccgacgcacggcgtctccgggatcagcgagatcgatggcgtggtgatggagatcgtgatcaccttcgcgctggtgtacaccgtgtacgccaccgaggccgacccgaagaaggggtccctgggcaccatcg

SEQ ID NO: 19565 - DNA, 237 bp, Zea mays
cagctaataaggtaataaggggcgacgaaaatggctccaacgaccgccaccaaggacgacagtggctacggcgacgagcgccggcgcgagctgcaggcgttcgacgacacgaagctgggggtgaaaggcctggtggactccggcgtcaagtccatcccgtccatcttccaccacccgccggaagccctgagcgacataatttctccggcgcctctgccgcggtcgtcgtcgccctcc

SEQ ID NO: 19566 - DNA, 247 bp, Zea mays
cccacgcgtccgaagtcgtcgtaggcagcgagcgtctctcctctcccacgcatcgcgccaaggaagagagagagatcgccgctccccttctcggcgtcggtggtgcgggtgccctccctcctcgagcgagatctgtctggtcacagatctatctgacaaaatggtgaagatctgctgcatcggtgctggctatgtcggtggcccaaccatggccgtcattgccctcaagtgcccagacattgaggtc

SEQ ID NO: 19567 - DNA, 243 bp, Zea mays
cgagactacagactactcacagctcactgtctcacttgaagctctaacagcaagccatggcaggacgagaagcggacaaagacccagagctgaaggtgctcggcgtgtggtcgagcccgttcgttatcagggcccgggtgcgctaacctcaaggggcttcgctaccgatacgtggaggacaacctggacagcaagagcgagttcttcttggcttcaaacaacgtgcacgggagagtgccggtg

SEQ ID NO: 19568 - DNA, 177 bp, Zea mays
gtccagcagacttgaggttccgagcggccggaaaccagcggcaaccgtcggcatggcgctcgtattgcattctggggctggaaacaaaaatgccttcaaggcacttattgctgcagaatacagtggggtcaaggttgagttgaccaaggattttgagatgggtgtctcgaacaagac

SEQ ID NO: 19569 - DNA, 247 bp, Zea mays
atccaactctggcaaaaatgcttcttatgggggagcagctagagtgccttgatgaggtgctgaccattgtatccatgctatcagtgccgtcagtcttcttccggccaaaagaccgagcagaggagagtgacgcagcaagggagaaattctttgtcccagagtctgaccacctgacactcctgaacgtgtatcttcagtggaagtcgaatcagtatcgaggcgattggtgcaacgaccacttcctcca

SEQ ID NO: 19570 - DNA, 148 bp, Zea mays
cccacgcgtccgatgatctgcgtctatttgagctgttaagactgatgaacattgttccacgtcacgttgtgtttgatgggcattgttccagatcacgttgttaagactgcagaactgtgtctgacatggaacaagtatgatacttgaa

SEQ ID NO: 19571 - DNA, 247 bp, Zea mays
cattctcagccgccgccaatcccttcccgtgctccgcaaccgctgagtgagaagaagagatggccggcaagggcgatggcccggctatcggcatcgatctcggcacgacgtactcttgcgtcggcgtgtggcagcacgaccgcgtcgagatcattgccaacgaccagggtaaccgcaccacgccctcgtacgtcgccttcaccgactccgagcgcctcatcggagatgcggccaagaaccaggtcgc

SEQ ID NO: 19572 - DNA, 242 bp, Zea mays
cccacgcgtccgcccacgcgtccgcccacgcgtccgtgcattgtgtgtgacggtaatggaacaagctaccaagttcatgtacgatcaagagcaacaggctcctcggacatagccaactaccattctggaatgctagaggcttccttataagtggatgactcatcaacaacattcactttaggaaagccatacctatcatcaggacgaatagtgctacaatctcgaagattatacggtggacc

SEQ ID NO: 19573 - DNA, 242 bp, Zea mays
ctaggttttttgattttagccgccgccgctgctcatctcacatccctcgagaagacgcctgctcctcgccgatcgatacgatggccgtcttctccgacctccacaccgccgacggcctcaagtccctcgaggctcacctcgccggcaaaacctatgtgtctggtgactccattactaaggatgacattaaggtcttcgccgcggtgccgtcgaagcctggcgctgagtttcctaatgccgcc

SEQ ID NO: 19574 - DNA, 236 bp, Zea mays
tcttgcagtgatgctactaccgaagacttcttaaagtaagagatgcatacccttttggtgtggaccctgtctggcatggtagccgcagtgagctaccgtttctcaactcactgaagatgaagatgtcgattcttcttggagttgcacaaatgaaccttgggattgtgattagttacttcaatgcaaaatttttcaggaacagtattaatgtgtggtaccagttcattccccagctg

SEQ ID NO: 19575 - DNA, 238 bp, Zea mays
ctccgaccccgagctccgaatgccgcagcatcaggcgcgccccccctcgcgtgtgaccgagatggcgctgccgaatcaggggaccgttgattaccccagcttcaagctcgtcatcgtcggcgatggtggaactggtaaaactacatttgtgaagaggcatctcactggagagtttgagaaagaatatgaaccaaccattggtgtggaagttcatccgttggatttccacactaactgt

SEQ ID NO: 19576 - DNA, 237 bp, Zea mays
ggaattggctgctcaggcaaaggagaggcacatcctcagaacgcaaacccttctttgtgatatgctcctgcgggatgctcctgttgggatatttactcggtcacctaatgtgatggatctagtaaagtgcgatggagctgcattgtattaccagaaccagcttttggtgcttggatcaacaccctctgagtcagagataaagagcattgcaacatggctgcaagataatcatgatgg

SEQ ID NO: 19577 - DNA, 222 bp, Zea mays
gtcgtctgctccgggctgctgttctgcgcctccacaaggctttggcctctgttgtaagccatgggtaaggagaagtcccacatcaacattgtggttattggccatgtcgactctggcaagtcaaccaccaccggccacctgatctacaagcttggaggcattgacaagcgtgtgattgagaggttcgagaaggaagccgctgaaatgaacaaacggtccttc

SEQ ID NO: 19578 - DNA, 224 bp, Zea mays
gtccacttcgccgtccccgccggccgcctggacggcttcgtctccaaggccgaggaggcccaggcggactcccggactccaaccaagacgtgcagcagctcatcgacaacttcgccaggaagaacttcacggtggaggagctcgtcatcctcaccggggcgcactccatcggccagggccactgctcgtccttcaccggccgcctctccgagccatcgcagcag

SEQ ID NO: 19579 - DNA, 218 bp, Zea mays
cccacgcgtccggccgcaagccgtccgccttgcccctcgaaggcttggtcctccttgtatcccgacctcctccgccacagacccgtttccccgctagagttatcgttcctctgcagcgatggcgatcaagcggaccaaggcggagaagaagatcgcgtacgacaagaagctgtgcagcctgctcgatgagtacaccaaggtgctcatcgccctcgccg

SEQ ID NO: 19580 - DNA, 227 bp, Zea mays
aacaaccatggcgcaccaggatgccggtgtcggcggcaaagatcaccgcgagctgcaggcgcacacaccaccgacaccgaggagctgctggcagcccaccgcgagctttggagccatgccctgggctacgtcaagtccatggcgctcaaatgcgcattggaccttggcatccccgataccatccaacgctacggcggaggcgccacggtaggcgaactcgccgccgc

SEQ ID NO: 19581 - DNA, 239 bp, Zea mays
gatcagatccctcgacaatggcactccaggcagcctacgagtacctgcagcaggccgtcggccatggcgcgtggtcgtccacgcagacgctgacgctgctgctcatcgccgtacccaccgtactactgctgctagcgtccctcgccaagagcacgtcgtcgtccggtaggggcaagccgccgctccctccctcgccgctgggcaccctccccatcgtggggcacctacaccacatcggg

SEQ ID NO: 19582 - DNA, 231 bp, Zea mays
cccacgcgtccggggaattgaggctgatgacatggaagctctgtacaagaaggtccatgctgccatccgtgctgatccttctgtggtcaagtcaaccaagcagccaccaaaggagcacaagaggtacaaccccaagaaactgacgtacgagcagaggaaggccagtctcattgaaaggctcaaccaactcaactcctcgggcggcgcagatgacgacgatgaggatgacga

SEQ ID NO: 19583 - DNA, 224 bp, Zea mays
gttctcagggaatgggaattcctgtaggcaaacttgctctatacactgctcttggaggagttcgtccatcagcttgtttgcctatcacaatcgatgttggcacaaataatgagaaactgcttaatgatgagttttacattggactccggcaaaaacgtgcaactggcgaggagtatcatgagcttatggaagagttcatggctgctgttaacaaatctacggcg

SEQ ID NO: 19584 - DNA, 233 bp, Zea mays
agatcgccagagcctccgacccccttcctctctccctccgccgccgctgcgcacgagggaacaagcgacatgggcgtctacacctttgtgtgccgcaacaacggcggcgagtggaccgccaagcagcactccggcgagatcgaggcttccgccgctaccccatacgagctgcagcgccggctcgtcgctgccgcctccgcgggcgactctgcctacggcgtccagtcgtcctt

SEQ ID NO: 19585 - DNA, 128 bp, Zea mays
tgtaaagagtgcgaagaagcagtagcaaaaggattccattctcgtgttcttggagtggtccatcgatcgagctccgtgagagagatagcaagcaatggcgacacagggaaggtgatcaagtgcagagc

SEQ ID NO: 19586 - DNA, 234 bp, Zea mays
ggacgctggcacaagcgagcgagggacccggggcggaagaagagagagaagacgtctgtctcctctcggcgtccccgttccccaacctctcgtctgctgcctgcctgcctgcctgcctgcaaaaaggagtttgtcatggcgtctaagcgcatcctcaaggagctgaaggacctgcagaaagacccccccacatcatgcagtgcaggtcctgctggtgaggacatgtttcattgg

SEQ ID NO: 19587 - DNA, 236 bp, Zea mays
gtttcgaattctagggttttgctgctctccgaccccgagctccgaatgccgcagcatcaggcgcggcccccctcgcgtgtgaccgagatggcgctgccgaatcaggggaccgttgattaccccagcttcaagctcgtcatcgtcggcgatggtggaactggtaaaactacatttgtgaagaggcatctcactggagagtttgagaagaaatatgaaccaaccattggtgtggaagt

SEQ ID NO: 19588 - DNA, 225 bp, Zea mays
tgttgttggagtgttctggacttctggtcaacttggtatgatttaaaactaagttcgggcataatcaggaaagtgaagcagccagctcaaatgaagaatggtgtatcttggcgctgaaacgattgaaagaggcctctccgttagctttgaaggtctcactgcgatcgatacgcgagggtagatatcagacacttgatgagtgccttgtccgtgagtaccgcatgt

SEQ ID NO: 19589 - DNA, 221 bp, Zea mays
gcggcgaccctcgggcgttcctaccctgcgccctctccggaccccacgccgtcgggaacagccgggcaagagcccgatccagaccccgcgagcaatccttgatatacctgatggctatgattgatgagcctctgtacccaattgctgtactgattgatgagcttaagaatgaggacatccagttgcgtctaaactccattagaagactttcgacaattgca

SEQ ID NO: 19590 - DNA, 223 bp, Zea mays
aacaaccctcaaatgcgcgactcattgatcgcaatccggatcttgctcatgtcctcaatgatccaagcatcatgcgccagacttttgaagcagttcggaatcctgaactcatgagggagatgatgcggaacacagacagagccatgagcaacattgaatcttctccagagggattcaacatgctccgtcgcatgtatgaaactgttcaagagccttttctgaa

SEQ ID NO: 19591 - DNA, 223 bp, Zea mays
cccacaccgggcacaccccccgagctcagcttagctccactccagctccaatcacagtcgtgaccagagcgcgagagctagctagacggccgtgaaaatgccgatcaataggatcgccctggggagccaccaggaggtgtaccacccgggcgccctcaaggcggcgttcgctgagttcatctccagcctcatcttcgtcttcgccggccagggctccggcatg

SEQ ID NO: 19592 - DNA, 227 bp, Zea mays
actagtcgcaactcgcaatcaaatcgaacgaacccagccgaagcgcgactgagcaaggcggaagcggcgatggagcggctgcagcggatctttggcgcctccggcatggggcagccgccgacggactcgccgctgctcgactcttccgagcaggtctacatctcctccctcgcgcttctcaagatgctcaagcacgggagggccggcgtgcccatggaggtcatggg

SEQ ID NO: 19593 - DNA, 225 bp, Zea mays
ccgactccctactgcatcaggtgcctcggccttcgtcgtgctctccgccggcaacgagtatagacgggcgcgcatggccaccttcgagctgtaccggaggtccaccatcggcatgtgcctcaccgagacgctcgacgagatggtctccaacggcaccctcagcccggagctcgctatccaggtcctcgtccagttcgacaagtccatgacggatgctctggagaa

SEQ ID NO: 19594 - DNA, 178 bp, Zea mays
aaattccgggcatattatcttggaactcacaatggcaggagattgacatggcaaacaaacatgggtacagctgatataaaagccacatttggaaaaggccagaagcatgaactaaatgtatccacttatcagatgtgtgttctcatgctgtttaacaatgctgatggattgacctaca

SEQ ID NO: 19595 - DNA, 159 bp, Zea mays
ggcgactctgaagggctcttgaaactccctactgacaaggttcttgtggaagatcctgaattccgtcagcatgtccaactatatgccaaggatgaagatgcatttttcagggactacgcggagtcacacaagaagctgtcagagctaggcttcaccccc

SEQ ID NO: 19596 - DNA, 69 bp, Zea mays
atcacgggccgccagaactccgtcgcggtgggccccgacggcaggaaggtgggcgccgccgatgcgttc

SEQ ID NO: 19597 - DNA, 217 bp, Zea mays
atccatccttattgagtacagtgttgatccatggactcggaaggagttgtagcagcaaaggtggcagatgagactactaaaccggcaatccaagaagacggcgccgagagcaaggccgggatgactgatctgctgatgctgaccgacaagtcgcagctgcaggcgctggcgatgctgctgcggaacaacgaggagctcatgatgagccaggcgatca

SEQ ID NO: 19598 - DNA, 162 bp, Zea mays
acctgacatccatggcgctcaagtgcgcggtggagctccacatcccgaccgccatccacaacctaggcggtgctgccacgctgccggacctcgtggccgcgctgtccctgccagcggccaagctcccgttcctcgggcgcgtgatgcagctgctggtcacgt

SEQ ID NO: 19599 - DNA, 169 bp, Zea mays
gtctggccaggtctctcccatatcgggttctcccttcctcttcctgtttccgcgcgcgagatcgccgccccgggtgggctctagatcccgatggcctcgcgccgccgcaccctgctcaaggtcatcatcctcggcgacagcggggttgggaagacgtctttgatgaaca

SEQ ID NO: 19600 - DNA, 168 bp, Zea mays
cgctacttcctgcacgctgttgggcaatgttagaacaacgcaggcctcccagacagcggtgaagagcccttcgtctctaagcttcttcagccaagttacgaaggttccaagcctgaagacctccaagaaactggatgtctccgccatggctgtatacaaggtgaagct

SEQ ID NO: 19601 - DNA, 165 bp, Zea mays
gcgcagagaatccccaagcaaacaaacagggtagatggagaggagaggagaggagaggagaggttgggtctgggacaccatggctccgatgaagctgtacggggcggtgatgtcgtggaacgtgacgaggtgcgcaacggcgctggaggaggctggctccgacta

SEQ ID NO: 19602 - DNA, 158 bp, Zea mays
cagcaacttaacaacaataatggccaccgccatagttcccacggacgccgagctgctgcaggcgcaggccgacctgtggcgccacagcctctactacctgacatccatggcgctcaagtgcgcggtggagctccacatcccgaccgccatccacaacc

SEQ ID NO: 19603 - DNA, 196 bp, Zea mays
acgaaacatggctcctctgactcctagactggtagtgcccatagacgtgaagaagcagccatgggagcagaaggttcctctccacaaccgctggcatccagacatccctcccgttgctgatgtaaccgaaggggaactgttccgggtcgagatggtagactggactggagggagggttagagacgataactctgca

SEQ ID NO: 19604 - DNA, 158 bp, Zea mays
cgcctcgcctatccgatctgccacctcgccgtctcgcacgttcctttccccaactccccagcgcctctccgcgccgcgatccagatccaggttgttcagcatgggtctggtgaaggaaggcgtcgacatggaggagggaccctagagatcggcatgga

SEQ ID NO: 19605 - DNA, 155 bp, Zea mays
cccacgcgtccgaagtggggaacggactacatcctcaagaccttcaattcgtctgccgacacgatagacaggatcgtcgctcaggtgggtgtaggtgacacctctaaaggcagcagtcagcctaacgaccattactgctggatgaggccagagga

SEQ ID NO: 19606 - DNA, 155 bp, Zea mays
cagccaatcaaggagtctgctctggggaacatcccgaccattgccttctgcgacactgactctcccatgcggtatgtcgatatcggcatcccagccaacaacaaggggaggaacagcattggatgcctgttctggcttttggccaggatggttct

SEQ ID NO: 19607 - DNA, 159 bp, Zea mays
ccagcccccaacaacacactccccactatcatcaccaagttcaagcgccagggcctcaatgttgttgatgttgtcgccctctcaggtggtcacaccattggtatgtctcggtgcactagtttccggcagaggctatacaaccagacaggcaatggcatg

SEQ ID NO: 19608 - DNA, 159 bp, Zea mays
cacgacgcacgcagagccgcagagatccgtcacactgcaagttttgaaaactgaactgtaagatggcatcagcagagctttcccgtgaggaaaatgtgtacatggcgaactcgccgagcaggcagagatgtacgaggaaatggttgatttcatggagaa

SEQ ID NO: 19609 - DNA, 177 bp, Zea mays
caactcaccatcatactgaagcttccaagccgttaccttgtttccccaccagagatagatagaacatctggggagtacttggtgaagaatggcatccgcacctttgcttgcagtgagacagttaaatttggccatgtcacatttttctggaacggtaaccgttcgggatactttgat

SEQ ID NO: 19610 - DNA, 83 bp, Zea mays
aaattatatgcactcgcaagcgagcagaatggcgaggtccagtggtagtagaccagtggccctcgtgctgctggcgctgtgcg

SEQ ID NO: 19611 - DNA, 250 bp, Zea mays
ggctgagcaacccctctctctctccctcttatccccaaggcgaggagcggacgcagaggagggcccttctgcttgtttctccgctttgcaagatgtcgtccccgagcaagcgccgcgagatggaccttatgaagctgatgatgagcgactacaaggtggagatggtgaacgacgggatgcaggaattcttcgtcgaattcaagggcccggccgaaagtatctaccaaggtggtgtctggaaggttcgggt

SEQ ID NO: 19612 - DNA, 252 bp, Zea mays
cgcacaccagcacctgccctcctcgccgtcgccgcctccctccgcgcgaccgatctaccctccgccgccaccatgtcgctgatcgccggggaggacttccagcatatcctgcgtttgctgaacaccaacgtggatgggaagcagaagatcatgttcgccatgacctcaatcaagggtgtcgggcgccgcttctccaacatcgtctgcaagaaggccgacatcgacatgaacaagaggggcggcgagctgacg

SEQ ID NO: 19613 - DNA, 253 bp, Zea mays
cggacgctgggccgccgccgaatccgagactctgatctcgggttcaccgcagcgcacagagcacccccgaactcccgtcccgatccgcgctctcctctacgacgcttcagtcatggcaggaatggcacccgagggttctcagtttgatgctaagcactatgattctaaaatgcaggagctgctgagcactggtgagactgaggagttcttcacttcatatgatgaagtttttgaaagttttgatgacatgggc

SEQ ID NO: 19614 - DNA, 251 bp, Zea mays
aggatctccaagggaaagaagggtggtaagaaaaagaccgtcgatcccttctctaagaaggactggtatgacatcaaggccccatcggtcttcagtgtgcgcaacattgggaagactctcgtgtccaggacacagggtaccaggattgcctctgatggtctgaagcacagagtctttgaggtttgtctagctgatcttcagggtgacgaggatcaggcttacaggaaaatcaggctccgtgctgaagatgt

SEQ ID NO: 19615 - DNA, 251 bp, Zea mays
aacgatacaggaatacgatacgccgctcgcctgaatcgagaccaccaccgctcccgctctgcctcacctcgccgactagagtttttgccgccgcggatctcgccgtccccgccatggatacgtcgggctcctccgcagccgccggcgacgccccgaccaccggggagcaccggatggggaccaccattgtcggggtctgctacgagggtggcgtcgtcctcggcgctgattccagaaccagcactggaatg

SEQ ID NO: 19616 - DNA, 244 bp, Zea mays
agccagcggcgagccaaaccgagcgtacgccatggatcgcgagtggggctccaagcccggcagcggcggtgcccctccgcccagaatgaggctattgaccggcgggagcgtctccgccgcctggccctcgagaccatcgacctcgccaaggatccctatttcatgcgcaaccacctcggcagctatgagtgcaagctgtgcctgacgctgcacaacaacgaggggaactacctagcccacacgc

SEQ ID NO: 19617 - DNA, 249 bp, Zea mays
cggacgcgtggccgcagttcccccgcgcccgagacgcaaccccgcgccaggagtaagtttgttcttttatcgatattatcgatatggcgagggaggagaatgtctacatggccaagctggctgagcaggccgaaaggtatgaagagatggttgagtatatggagaaggtggctaagactgtagatgtggaagagctcactgttgaggagcgtaacctcttgtcggtcgcatacaagaatgtgattgggg

SEQ ID NO: 19618 - DNA, 248 bp, Zea mays
gctgacttgtgaacgaggcagcatcatagttcagtttggaaacatgtcatcgaagaagatagagttggatcacaaggacatggtccatgattctgccatcgactactatggcaagcgccttgccactgcctcttcagacttcaccgtgaagatcgtcaacattggtgctgcaaatgccccatcccaggtccttgcaacgctaagtggccactatggtcctgtgtggcgtgttgcttgggcccatccaa

SEQ ID NO: 19619 - DNA, 240 bp, Zea mays
ccacgcgtccgacgacggcaagctcgccggctacgacatccccgccgagtccaagatcctcgtcaatgcctggttcctcgccaacgaccccaagaggtgggtgcggcccgacgagttccggcccgagcgcttcctggaggaggagaagtccgtggaggcccacggcaacgacttccgcttcgtgcccttttgggtcggccgccggagctgccctgggatcatcctcgcgctgcctatcat

SEQ ID NO: 19620 - DNA, 249 bp, Zea mays
atgccggcggccatggcggctgcggcggcgcagaggctcctcgcggcgagcacgaaaatcatcggcgttgggcgcaactacatagcccacgccaaggagctcggcaatccggtccccaaggagcccgtcctgttcctgaagccgacctcgtcgtttctccacgctggtgtggccaccgccgccgtcgagatcccggagccgctcgagtcgctacaccacgaggtcgagctcgccgtcgtcatctcccgg

SEQ ID NO: 19621 - DNA, 245 bp, Zea mays
  unsure (1)..(245): unsure at all n locations
cccacgcgtccgaattctagggttttgctgctctccgaccccgagctccganagccgcagcatcaggcgaggcccccctcgcgtgtgaccgagatggcgctgccgaatcaggggaccgttgattaccccagcttcaagctcgtcatcgtcggcgatggtggaactggtaaaactacatttgtgaagaggcatctcactggagagtttgagaagaaatatgaaccaaccattggtgtggaagttca

SEQ ID NO: 19622 - DNA, 241 bp, Zea mays
atttggagctttctttgctcttgccaacagaattgaccgaatacataaaaattcttggatagggtttcagtcctggagaggtacagcaagaaaggcaaacttatcaaacaatgccgaatttgcaatcttagaagctgttcaatctcaaaagcatggagattccttctatttttgggttcggatggatcaagatccaagaaaccacacatataaagattttgggtcctcctgtgatgcgatc

SEQ ID NO: 19623 - DNA, 245 bp, Zea mays
aagatattgagacacgaacaccaatgcttatatcttctcacttatgacttcatggcaactcctattgattatccaccagttcagcactgcttcctacaaagatgctttaccagagatactggaggtcctgagagcagcttgcttgacccacaagctgccattagctcagacatgggtcacatgtgctcaacaagggaaacgaggcagccgacattccgacgagaactaccggtactgcatctcca

SEQ ID NO: 19624 - DNA, 244 bp, Zea mays
tgcgcctctacatttcttctctctctgctcctccgcctccgcctgatccatccaagacaggatcgccatgtcggactcggaggagcaccacttcgaatcgaaggccgacgctggggcgtccaagacctacccgcagcaggctggcaccgtccgtaagaacggcttcatcgtcatcaagaaccgtccctgcaaggttgtggaggtttctacctccaagactggtaagcatggccacgccaaatgc

SEQ ID NO: 19625 - DNA, 241 bp, Zea mays
cggacggtgggcggacgcgtgggtggatctgaaggagaaagggagagagacactcgtcccccgtaccgtggcggaggcagacgtcgtggttacaggaatgttgagtttgctgatgactctgagaggccaccacggagaaactatgagcgccacagcgggactggccatggctatgagatgaagcgtgatggcgcagggcgtgggaactggggcactgccactgatgaacttattgcccagg

SEQ ID NO: 19626 - DNA, 239 bp, Zea mays
gctcgagccctcgcccgctcagtcacaaagcctcagatctcagtcgcctgcgccgccgcttcgttcgtgtggaggggagaagacaggaaatggcggcgactgagggcgtgctcttggggatgggcaaccccctcctcgacatctccgccgtcgtcgatgacgccttcctgacaaagtatgacatcaagctgaacaatgctattctcgctgaggagaagcacttgcctatgtatgacgag

SEQ ID NO: 19627 - DNA, 239 bp, Zea mays
gcggaaagtacaaggatgagctcatcaagaatgctgcctacattggcacccctggcaagggtatccttgctgctgatgagtccactggcaccattggcaagcgcctttccagcatcaatgtcgagaacgttgaggagaaccgccgtgccctccgtgagctcctattctgctgccctggtgctctccagtacatcagcggtgtgatcctcttcgaggagaccctgtaccagaagaccaag

SEQ ID NO: 19628 - DNA, 264 bp, Zea mays
acaacaaccacactcttgcaccgagctagcagccaagatggcgaccaaacacctggctctttgcctccttgttctctttagcataggcatgggcatggccaccgctgctgcaaaccgcaaactgggttatggccccgggggaggaggtggcggtggtggtagcggtggcggtggaggcggtggttacggaggaccaggctatgggtccggatcagggtatggtgagggcggtggcagcggaggtgctgctggagggtatggaca

SEQ ID NO: 19629 - DNA, 265 bp, Zea mays
gcgggaggcatcgtggagagcgtcggagagggcgtgaccgagctcgcgccaggcgaccacgtcctcccggtgttcaccggcgagtgcaaggagtgcgcccactgcaagtcggaggagagcaacatgtgcgacctcctcaggatcaacgtcgaccgcggcgtgatgatcggcgacggtaagtcccgcttcaccatcagcgggcagcccatcttccacttcgtcgggacgtccaccttcagcgagtacaccgtcatccacgtcggct

SEQ ID NO: 19630 - DNA, 262 bp, Zea mays
tgaaggctatgccctcccgcatgccattcttcgtctcgatcttgctggtagggacctcactgattccctcatgaagatcctgactgagaggggttactctttcacaaccactgctgagcgggaaattgtccgtgacatcaaggaaaagcttgcatatgtcgcgctcgactacgaacaagaactcgagaccgccaagagcagctcatcagttgagaagagctatgaactgcctgatggacaagtgatcacaataggcgcagag

SEQ ID NO: 19631 - DNA, 262 bp, Zea mays
gaaaatgtgacttggacaataagatgttgcttgagttacttacatttcttaaaagtattgattagtcttgcatctggatgcaggagctctgcagtaaaggaagtgtgtagtcaccatggtccatttcaagaataggtacatggtggtggagatctttatagatgcaggtagaggtgaacaggaccctgtaatcctcacccaatttaatataacaaaagttataaaagacagcattcagctcaactttggagagtgtggccta

SEQ ID NO: 19632 - DNA, 260 bp, Zea mays
agcatcgatccgccattgctcaccgcacaagtgcacgctcacctcacacacgcagctaagtagctaacgccgtaggcagaacaagaaaaggctcgacatggccgaggagaagaagcagggcctgcagctgctggacttctgggtgagcccattcgggcagcgctgccgcatcgcgctggacgagaagggcctggcctacgagtacctggagcaggacctgaggaacaagagcgagctgctcctccgcgccaacccggtgc

SEQ ID NO: 19633 - DNA, 234 bp, Zea mays
gttttcagggggtccggccatttcatccaggtcgtgtgaccactctgatctggattcctcttgcagccgcttcgggcgcgggtgggatcggcccgtggccggcggagatgtccggattcgtcggtgtcgtcgtgtccgacccctcgctgcaggggcagttcacgcaggtcgagctccgatcgctcaaggccaagttcgtgtctctgaagagagattccggccatgtcaccacta

SEQ ID NO: 19634 - DNA, 258 bp, Zea mays
atcccagcgcgcacatgctccagcagttccagaaccctgccaacgtcaaggtgcactacgacacgacgggaccggagatctgggaggacacgcttggccaggtcgatatcttcgtcatggggatcgggagcggcggcaccgtcacgggagtcggcaagtacctcaaggagaaaaaccctaacgcaaagatctatggagttgaacctgccgaggcaaatgttctgaatggtggaaagccaggacctcacctcatcactg

SEQ ID NO: 19635 - DNA, 256 bp, Zea mays
ccgacatcgtcccttcgtccccacgagcaaccgataatccgccggcgttgagatgttggtttatcaggatctcctatctggcgacgagctcctgtcggattcattcacctacaaggagctcgagaacggcgtcctgtgggaggtcgagggaaagtgggtcacccaaggtcctgttgatgtggacattggtgccaatccatccgccgagggtggtgaggacgaaagcgttgatgacacagctgtgaaggtggttgat

SEQ ID NO: 19636 - DNA, 254 bp, Zea mays
tggtgctgaagagtcggatgagcaatgctgtaattcttgcgaagaagtcagggaagcatataagaagaaagggtgggctctaacaaatcctgacctaattgaccagtgtgcaagagaggattttattgatagagttaaaactcagcaagatgaaggttgcaatgtccttggctttttagatgtcagtaaagttgctggaaattttcacttcgccccaggcaaaggattttatgaatcaaacatagatgtgcctg

SEQ ID NO: 19637 - DNA, 257 bp, Zea mays
cccacgcgtccgccctcttgccggtcccgaataaagagcagcagcgcaagaggtcggtagagcgagaagaaggcaatggcggccgagagcttccttttcacctcggagtccgtgaacgaggggcaccccgacaagctgtgcgaccaggtgtcggacgccgtgcttgacgcatgcctcgcgcaggaccccgacagcaaggtggcctgcgagacctgcaccaagaccaacatggtgatggtgttcggcgagatcacgac

SEQ ID NO: 19638 - DNA, 254 bp, Zea mays
tggaacccgaccaacatcctgttcaaggtggacggcgacgtgatccggtgcttcaagcgctacgccgacctgccgtacccgaacgcgaggcccatggcgctgcacgccacgctgtgggacggcagctactgggccaccgagaagggcaaggtgccggtggactggtccgccgcgcccttcgtcgtctcctaccggggctactccgccaacgcctgcgtcacggcggggcctgcggcggcggcggcgacgacggg

SEQ ID NO: 19639 - DNA, 255 bp, Zea mays
cccacgcgtccgccgccatggacagctccgccactgacggcgcgaggctaccgccgccaagggccgggagtcgcctctgcgtcaggtgcggtgagaggaaggccgcgctgaagcggcccaaaaccctagaacagatctgtagggaatgcttctatatcatctttgaggacgaaattcatcaaactattgtccagaattctctgtttaaagctggtgagcgtgtggcaatcggagcttctggtggaaaagattcaa

SEQ ID NO: 19640 - DNA, 251 bp, Zea mays
cgctcccagctcgtgttccgcttcttgcagccgtcgcggaagctccagagaacttccgtcaacatggggaagacacgtggtatgggagccgggcgcaactcaagacccaccgcaggaaccagcggtgggctgacaaggcatacaagaagagccatttgggcaatgagtggaagaaacccttcgctgggtcatcccatgccaagggcattgtcctggagaagattggtattgaggccaagcagcccaactcc

SEQ ID NO: 19641 - DNA, 256 bp, Zea mays
cctggagaagaacgccgtgatattcgagagagtcaacgcgatggcggcgaggaaggggtgcacgccgtcgcagctggcgttggcctgggtacaccaccagggagccgacgtgtgccccatacccgggacgacgaaggtcgagaacttcaacagcaacgtggcggcgctttcggtggagctcacgcctcaggacatggctgagctcgagtcttacgcgtcggcgggcgtccagggcgatcgctaccatgacttcctc

SEQ ID NO: 19642 - DNA, 255 bp, Zea mays
ggagcgagcagccaaggaaaggagtcaagcaatggagaaggccgtcgacaggcagcgggtcctgctgcggcacctgaaccccgccgcggcggccagccccgccccgcacgccatctccgcaagcgcgtgcgcggcgggggacagcgcggcgtaccaccggaggccggccttcgccgacgacgtcgtcatcgtcgctgcttacaggacggcaatttgcaaggccaagagagggggtttcaaggatacctttgctga

SEQ ID NO: 19643 - DNA, 248 bp, Zea mays
cagttgcttgaaagaattttatctgtcaccaaagctcgttctatcttattgaatggtgctgttagaaagggggaacgcctagttccccctgtttcatttgacttgttcatgagagccacatttccggtttctggtgctcgggtgaaggctacagaaaggtttgaagtagcttatcgaacaatcaaggagttggctcttgccggttctcctggctctaaaactgtgaaacaagcatcacagcaactttt

SEQ ID NO: 19644 - DNA, 252 bp, Zea mays
ctacgccgggggcggcagcagcgccgccaacgcgccccgcttcggcggcggcgagcccaccgtccgcatctactgcaaggccgacgaagggttcagcgccacggtccgcaacggcgccgtgtgcctcgcgcccaccaacccgcgcgacgagtaccagcactggatcaaggacatgcgccacagcaacagcgtcaaggacgaggaagggtacccggccttcgcgctcgtcaacagggtcaccggcgaggccat

SEQ ID NO: 19645 - DNA, 250 bp, Zea mays
ccacgcgtccgtgctgttagctccacacaaaagagagaaccggcggcgagctaggagctagccatggacggacacggcgcggtctcgccgtggagcgtgctaggcggggcggcggctgtgctgttcctgtggttggcgtcgcaggtgctggagtgggcctggtgggcgccccggcgcgtgaaccgtgcgctgagggcgcagggcctgaggggcacccggtaccgcctcctctgcggcgacctcatcgagg

SEQ ID NO: 19646 - DNA, 250 bp, Zea mays
gcgggcagcaggtacgagaacgaggaggcggccggcgtcgcgcattttgtcgagcacatgctgttcaagggcacagggaagcgtacgccgcgcactggagcaggagattgaggacatgggtggccacctcaacgcttacacgtcgcgggagcagacgacctactacgccaaggtgcttgacaaggacgtgccccgtgcgatggaggtcctcgcggacatcctgcagaactccaatctcgaccaggcccgc

SEQ ID NO: 19647 - DNA, 251 bp, Zea mays
gacgacgagatctcgccctacctcatcgccccggacaccgtcagcgtcctcagggacatcgccgacgtcatgctgcgcgccggctacgcgcccgagctgtgccaggtatacggggaggtgcgccgggacacgctcatggaatgccttgccgtgctcggggtcgacaagatgagcctcgaggaggtgcagcgggtggagtggggcgtgcttgacggcaagatgaggacatggatccaggcgctcaaggtcgt

SEQ ID NO: 19648 - DNA, 258 bp, Zea mays
aagacattggagaaaggaaagcatgctgagggtggtgaagatgacaactttgctattgtgtttgctgctatgggagtgaacatggaaacagctcaattcttcaaacgtgattttgaagagaatggttccatggagcgggtcaccctttttctgaatctggctaacgaccccaccattgaacgtattatcacccctcggattgctctaacaacagcggaatatttggcatatgaatgtgggaagcatgtacttgttatc

SEQ ID NO: 19649 - DNA, 253 bp, Zea mays
agcagaagtggaaggaagcaggcggccaccatggtgaagggacgcacgggacagcgcgtcaggctctacgtccggggcaccatcctcggatacaagaggtccaagtcgaaccagtacgagaccacgtcgctcattcagatcgagggggtgaacaccaaggaggacgtcgcgtggtacgctggcaagcgcatggcgtacatctacaaggctaagaccaagagcagcgagacccgctacaggtgcatctggggca

SEQ ID NO: 19650 - DNA, 234 bp, Zea mays
caagcaagagcctttccgagtgtgtggagcagcagccgtaagaaaggggagggcaaagtaagcttcatatattttccatggcaaagctcttcggaaaggtggcgatcgtcacgggcgccgccagcaaactgggcgaggccatcgccaggaagttcgtcgacaacggcgccaaggtcatcctcgccgacatcaaccgccactcctgcgagaacatagtaacggctctcaacaaga

SEQ ID NO: 19651 - DNA, 245 bp, Zea mays
agtatactcgccagagtacgtagagtgtagttgagcgtcgtccaaggatggcgtggacctcccgccgcatggtcgcgtccgcgctcgtcttcctgctgatgctgctcgccgcctcagagatggggacgacgagggtggcggaggcgaggcactgcacgtcgcagagccaccggttcgtcggcgcctgcatgagcaagagcaactgcgagaacgtctgcaggacggagggcttcccgtggggcgag

SEQ ID NO: 19652 - DNA, 247 bp, Zea mays
cccacgcgtccgatccttggttgccgcttcctccaaagccactccaaacccccgcttccagaaccttctcgaaactctccgcctcctcctctactcgctccgatggcgaaggaaccgatgcgcgtgctcgtcactggcgccgcagggcaaattggatatgctcttgttcccatgattgctaggggagttatgcttggtgcagaccagcctgttattctgcacatgcttgatattccgccagcagctg

SEQ ID NO: 19653 - DNA, 247 bp, Zea mays
ctgatacaagagagcacgctactactcatcactcgccaacgtgcagagatcagggaggcggcacactccatccactgaccgctcatggcgaaggtccacctctacgtcgccgcggcctgcgccgtcgtcctcgcgctcgccgccccggccctcgccggcgaccccgacatgctgcaggacgtctgcccggctgactacgcctccccggtgaagctgaacgggttcgcgtgcaaggcgaacttttcgg

SEQ ID NO: 19654 - DNA, 247 bp, Zea mays
gtcgccgcccaagcctagcagatccgccggcgagcgcgcgggggcaatgggtgtcgtctcggcagcggcggacgcgattgtcgcggttttctccctcaccatcgtcgtcgcggcgccgctactcgacgcgcagtccgtcctcccgcataccctctacccggcgccgctcctggaactcaagcgctggtacgccgccgagtttggcgactacctcgtggcccagtcccccggcttcttccgtggcctt

SEQ ID NO: 19655 - DNA, 237 bp, Zea mays
ccgaggtttcagaatcagtttccagcagtggcaacggtctggaagatctgagctccgccgccgtctctcggccggccacactgggcctgctcctgcagggcgtgtttgagaacaccagcgcggaggtggtcagagagaaggacggcgggcaggctgttctgggaaccccgacagagagggcgatcttggagtttggactgaagctagaagcacgacgtcgtgatgctggagacagga

SEQ ID NO: 19656 - DNA, 237 bp, Zea mays
cggacgcgtgggctgctctcccccacctcccggtccggcagcagagagcgggggtgcagagagatcgagataccggaggccgcgagtgggagcgccaccaccagcgactgcggcaatggcgggcacggtgacggtcccggggtcgtcgacccctccacgccgctgctcaaggacgagctcgacatcgtgatcccgacgatccgcaacctcgacttcctggagatgtggcggcccttc

SEQ ID NO: 19657 - DNA, 233 bp, Zea mays
gtcgcttccagccgccgccgcgtccgcctcgccaagcgcacagccgccgcagcacatcgctctcttgatctcagccatggcggaggtggagcagcaacaggacacgccgaagctcttcaaccgctggaccttcgatgatgtccaggtgaacgacatctcgctgaacgactacctcgctgtgaacgcgacgaagcacgcgatgtacctgccgcacaccgcggggcgctactcca

SEQ ID NO: 19658 - DNA, 236 bp, Zea mays
ccacgcgtccggcgaggccgagctggctgccatacataggtattgtgtggtgtgtgtgagagagagagaaacagagttcttcagtttgctatctctctctgcatgtttggcgtcagtctttgtgctcatgtacgtacgtgtgtctacctgcatgttggttgatccgattgcatctgctgtaaccatatattaattggtccacgatgatatgatttgatactatatatatactaaaa

SEQ ID NO: 19659 - DNA, 152 bp, Zea mays
ctccgaggtgatcaaggaggttgcctgggttatattcgatgagatacattacatgaaggatcgtgagagaggggtcgtgtgggaggagagcatcattttcttgccccctgccatcaagatggttttcctttcggctaccatgtcgaatgcga

SEQ ID NO: 19660 - DNA, 238 bp, Zea mays
tggaggagggcgagttctccgaggctcgtgaggatctggctgcgctcgagaaggactacgaggaggtcggtgctgagtttgacgagggtgaggacggcgacgagggtgacgagtactagacgctctactggcgcggcgtcgtcgggcttgtgtgccactgctatcctgtgatctgccctgagtggctcctatcgtgttatgtttctgtcggttcttatctatctgtcgttgtgtggtt

SEQ ID NO: 19661 - DNA, 240 bp, Zea mays
accgactctatcttagctctctttgcaagccagtaggtcaccactcaaaagcttgtgaagcaggtgagatgggcaaggaggtggatgtgtccactctagaggccggcggcgtccgtgaccgtgactacgcggaccctccgccggcaccgctgatcgacatcgacgagctcggcaagtggtccctgtaccgcgccgtgatcgccgagttcgtggccacgctgctgttcctgtacatcacgg

SEQ ID NO: 19662 - DNA, 165 bp, Zea mays
gaacaactggcgagaagagtttctaattcaggctagcccatcagatcctgataatttcccttttgttctgttgggtaacaaagttgatgtagatggtggcaacagccgcgtggtatctgagaaaaaggcaaaggcatggtgtgcttccaaagggaacatcccgta

SEQ ID NO: 19663 - DNA, 267 bp, Zea mays
acgagcagctgtccgtggccgaaatcaccaacagcgccttcgagccatcctccatgatggccaagtgcgacccccgccatggcaagtacatggcatgctgcctcatgtaccgtggtgatgtggttcccaaggacgtgaacgctgctgtggccacaatcaagaccaagcgcaccatccagttcgtggactggtgcccgactggcttcaagtgcggaatcaactaccagcctcccagcgtcgtccccggcggtgacctggccaaggtgc

SEQ ID NO: 19664 - DNA, 262 bp, Zea mays
ctcgggtccgacatcctggccggcattgacgccgctgttgctgatggcgtgggcgtgctgtcgctgtccctcggcggcggctcagcgccgtacttccgggacaccgtagcggtgggcgcctttggtgcggcggcggccggagtgttcgtctcttgctccgccgggaactccggcccatccggatccaccgtctcaaactccgctccgtgggtcgccaccgtcggcgccgggacactggaccgcgacttcccggcatacgtga

SEQ ID NO: 19665 - DNA, 254 bp, Zea mays
ggagtagatagcgacaaggagatgctcatgtcccacatgaacttcgagaagcggttcgggcagtccgcggcgttcgtcacgtcgacgctgatggaggaaggcggcgtccctccttcgtcgagccccgccgcgctcctcaaggaggccatccatgtcatcagctgcggctacgaggacaagaccgactgggggctggaggtaaaggcaccgaaaccatcgatttccctaagctctccatgtgcgttgctcctccg

SEQ ID NO: 19666 - DNA, 265 bp, Zea mays
cccacgcgtccgcccacgcgtccgctcattcagaagtgcgtcaaggggcatcagaggttgcactttcaaggttcagtagttgtattatgcttgtggcgtatgccagctatctctatttccaattaagtggacggagcaacatttacagtccaataggcagtgaagaggcgcctattgaggatattgcagaggaagatgaagaagctgagattggcatgtgggaggcagtaacatggcttgcggttttaacactctgggtgtcttt

SEQ ID NO: 19667 - DNA, 262 bp, Zea mays
cccacgcgtccgcgcccccgcccccgcccacgcccactcctcgctgccaccactcctgtcacctcttcacgcgccgacgcagccgccatggaccccgtcgccacatgggggctaaccccgctcgcgggcgccgacccggagatctacgacctcctggagcgcgagaagcggcgccagcgtcgcggcatcgagctcatcgcctccgagaacttcacctccttcgccgtcatggaggcgctcggctccgcgctcactaacaagt

SEQ ID NO: 19668 - DNA, 263 bp, Zea mays
atttaagactggtgctgagaggaaggaatctgctgagagcacaatggtggcctataaggctgctcaggacattgctctggctgagctggcacctacccatccgataaggctgggacttgctcttaatttttcagtgttctattatgagattctgaactccccagacaaagcttgcaacctggcaaagcaggcgtttgatgaagctatctctgagttagacagccttggtgaggagtcatacaaggatagcactctgatcatgc

SEQ ID NO: 19669 - DNA, 265 bp, Zea mays
cccacgcgtccggctgaggctttcgttggcctcttcgccggcagcgagcacccaccagcagttctgtagaaatggctgatggtgaggacatccagcctcttgtctgcgacaatggaaccggaatggtcaaggctggttttgccggcgatgatgcaccaagggctgtattccctagcatcgttgggcgtcctcgtcacaccggtgtcatggtagggatggggcagaaggatgcatatgttggtgatgaggcacagtccaagagagg

SEQ ID NO: 19670 - DNA, 262 bp, Zea mays
gtgggcgcgcgccctggtgcagatctcgccctacaccttctccgccatcggcatcgccgtctccatcggcgtctcggtcctcggcgcggcatggggtatcttcatcacggggagcagcctcatcggggccgccatcaaggcgcccaggatcacatctaagaacctcatcagtgtcatcttctgtgaggctgttgcaatttatggtgtaattgtggcaatcatcctccagacaaagcttgaaagtgtgccaacatcccaaatg

SEQ ID NO: 19671 - DNA, 260 bp, Zea mays
ctcgccgcgatctccgtagcctccgtcgcgtcgagcatcgatcatgtcggcctactgcggaaagtacaaggatgagctcatcaagaatgctgcctacattggcacccctggcaagggtatccttgctgctgatgagtccactggcaccattggcaagcgcctttccagcatcaatgtcgagaacgttgaggagaaccgccgtgccctccgtgagctcctattctgctgccctggtgctctccagtacatcagcggtgtga

SEQ ID NO: 19672 - DNA, 258 bp, Zea mays
gctcgttcgatctgtgcagcagatctgaggtcccgggcgaccgtgaagcagcttcaatcgtcggcatggcgctcgtattgcatagtggggctggaaacaagaatgccttcaaagcacttattgctgcagaatacagtgggatcaaggttgagttgaccaaggattttgagatgggtgtctccaacaagacccctgagtttcttaagatgaacccccttgggaaggttcctgttctggagactcctgatggccctgttt

SEQ ID NO: 19673 - DNA, 261 bp, Zea mays
ctctgttacttctccctccgccgccactcccctcccattcaccgccaccgccaattccataccgtcctccgccacctctgctgagagcgagaagagatggcaggcaagggtgatgggccggcaatcggcatcgatctcggcacgacgtactcttgcgtcggcgtctggcagcacgaccgtgtcgagatcatcgccaacgaccagggtaaccgcaccacaccctcgtacgtcgccttcaccgactccgagcgcctcatcgga

SEQ ID NO: 19674 - DNA, 258 bp, Zea mays
ggacgcggacggacgcgtggggctcgcgccgctgccgcatctcctctacaggtaagaaagcgagaaagagagcgaaatggtgaagcacaacaacgtcatccccaacgggcacttcaagaagcactggcagaactatgtcaagacatggttcaaccagcccgcccgcaagcagaggcgccgcatcgcacgtcaaaagaaggctgtgaagatattcccacgaccaactgctggccctcttcgtcccattgttcaatgcca

SEQ ID NO: 19675 - DNA, 257 bp, Zea mays
gaagctgctcagcaggaccgacctggtcgctctctcaggcgcgcacacgatcgggctggcacagtgcaagaacttccgggcgcacatatacaacgacaccaacgtgaacgcggcgttcgcgacgctgcgcagggccaactgccccgcggcggccggcaacggctacggcaacctggcgccgctggacaccgccacgcccaccgcgttcgacaacgcctactacaccaacctgctggcgcagagagggctgctacact

SEQ ID NO: 19676 - DNA, 254 bp, Zea mays
ctccttttgctcggaacgcacacaccgcccgtccccgatctccgatcccctcgtcgatccaaagatgcagatcttcgtcaagaccctcactggaaagactatcaccctcgaggtggagtcttctgacaccattgacaacgtcaaggccaagatccaggacaaggagggcatccccccggaccagcagcggctcatctttgctggcaagcagctcgaggacgggcgcacacttgccgactacaacatccagaagg

SEQ ID NO: 19677 - DNA, 252 bp, Zea mays
atcgcggcctacggcgagggcaacgagcgccggctcaccggcaggcacgagaccgccgacatcaacaccttcagctggggagtcgccaaccgtggcgcgtcggtgcgcgtgggccgcgagacggagcagaacggcaagggctacttcgaggaccgccggccggcgtccaacatggacccctacgtggtcacctccatgatcgccgagaccaccatcgtctggaagccctgaggcaccccgtggccgtgtcgt

SEQ ID NO: 19678 - DNA, 252 bp, Zea mays
gatttcgatttcagggttcatagagacgacgacgtcaccatcaaggtgctcttctgccggctttgctacactgacctccacgtcatcaagaacgagtttggcaacgccaagtaccccgtcgctcccgggcacgatatcgtcggcgtcgtcaccgacgtcggctccggcgtcacaagcttcaagcccggcgacacggtgggcgtgggctacttcgtcgactcctgccgcatctgcgacagctgcagcaagggg

SEQ ID NO: 19679 - DNA, 254 bp, Zea mays
cccacgcgtccggagagagagatcagcaacttaacaacaataatggccaccgccatagttcccacggacgccgagctgctgcaggcgcaggccgacctgtggcgccacagcctctactacctgacatccatggcgctcaagtgcgcggtggagctccacatcccgaccgccatccacaacctaggcggtgctgccacgctgccggacctcgtggccgcgctgtccctgccagcggccaagctcccgttcctcgg

SEQ ID NO: 19680 - DNA, 250 bp, Zea mays
ggacgtgggggtctgtccgctacccctccccgaccagatcgctacgagacgccgcgcgagtcggacccaggccgacgccgacgacccctctcgccgccggggccatggcgtacggcgaccgcgtcaccaccttcgaggactccgagaaggagagcgagtacggctatgtccgcaaggtctctggacctgtggttgtggctgatggaatgggtggtgctgccatgtatgaacttgttcgtgtcggacatga

SEQ ID NO: 19681 - DNA, 251 bp, Zea mays
ggaccgtgcacaaacacaagtcgtcgtaggcagcgagcgtctctcctctcccacgcatcgcgccaaggaagagagagagatcgccgctccccttctcggcgtcggtggtgcgggtgccctccctcctcgagcgagatctgtctggtcacagatctatctgacaaaatggtgaagatctgctgcatcggtgctggctatgtcggtggcccaaccatggccgtcattgccctcaagtgcccagacattgaggt

SEQ ID NO: 19682 - DNA, 167 bp, Zea mays
gcacaccaatcgcccacaagcgctcgcaggagaggtcgaaaccctagcttttgcggcggcggcgagagaagatgatctacgacgtgaactcccccctcttccgttccttcctcagccagaagggcggcgccgacaagaggaaaatggaggagcataaaccaaaggag

SEQ ID NO: 19683 - DNA, 242 bp, Zea mays
gttcaactgctcctacaaatggtagtcctggtggtacgggatatccgcgcccatctctctcaaatggcaatgttctaaaacctggcggacttcctttgctacgccttcctgtggttacaacccaagaaacaagccttgctgcgagttgccgaagagtatatgctcatgcacatgactatcatataaattcaatatcaaataacagtgatggtgagacatttatatcagctgatgatttgcgg

SEQ ID NO: 19684 - DNA, 161 bp, Zea mays
agctgaccttattgccatgaaccacactgatttcatcatcaccagcacattccaagaaatcgcgggaagcaaggacaccgtggggcagtacgagtcccacatcgcgttcactcttcctgggctctaccgtgtcgtccatggcatcgatgttttcgatccca

SEQ ID NO: 19685 - DNA, 237 bp, Zea mays
gaaatttgaaaagaatattcaagaggtagctgagaagttccaaaacactaacttgtatctgaagaacttagatgataacattgatgatgaaaagttgcgtgaaatctttgctgagtatggcaatattacttcttgcaaggttatgcgggattcttatggtgttagcagagggtctggatttgtttctttcaaatctgctgaagatgctaaccgagctcttaccgagatgaatggcaa

SEQ ID NO: 19686 - DNA, 215 bp, Zea mays
accacgcgccgccagcgcccgacggcgggcgacaggacccaaaccccaattccacaatgcggccgtcagcgatgagatccacctcccagctcctccgccgccggagctactcctccgcatccgggcagcccgagcggaaggtggccatcctcggggcggcggggggcatcgggcagccgctgtcgtgctcatgaagctcacccatcgtctcccct

SEQ ID NO: 19687 - DNA, 181 bp, Zea mays
cccacgcgtccgggtcaagcagatcggagtcattggatggggctcgcagggtcctgcccaagcccagaacctgagagattcactggctgatgccaagtcagatattgttgtgaagattggtctccggaaaggatccaaatcttttgaggaagcacgtgccgctggattcaccgaagagagc

SEQ ID NO: 19688 - DNA, 132 bp, Zea mays
gagcgtttgacccgtatcgccatcgtcagcgaggacaagtgcaagcccaagaagtgccgccaggagtgcaagaagagctgccccgtcgtcaagactgggaagctttgcattgaagtaacttcggcatcaaaa

SEQ ID NO: 19689 - DNA, 222 bp, Zea mays
ggcaagggcggcaaccgattctggaagagcattggccttggcttcaagactcccagggaagcaatcgaagggacctacattgacaagaaatgcccattcactggaactgtttctatcagaggcagaattattgctgggacatgccacagtgctaagatgaacagaactatcattgttcgcaggaactacctccactttgtaaagaaataccagaggtatgag

SEQ ID NO: 19690 - DNA, 225 bp, Zea mays
cccaacaccacctcgcctgcgatcttcgtagcctccgtcgcgtcgagcatcgatcatgtcggcctactgcggaaagtacaaggatgagctcatcaagaatgctgcctacattggcacccccggcaagggtatccttgctgctgatgagtccactggcaccattggcaagcgcctttccagcatcaatgtcgagaacgttgaggagaaccgccgtgccctccgtga

SEQ ID NO: 19691 - DNA, 239 bp, Zea mays
catcgaccgcgagacgtacctcgaccgcctctccctcaggtacgagagggaaggggagccgtcgctgctgtcggcggtggacctgttcgtgagcacggtggacccgctcaaggagccgccgctggtgaccgccaacaccgtgctctccatcctcgccgtagactaccccgtggacaaggtctcctgctacgtctccgacgacggcgcgtcgatgctgacgttcgagtcgctgtcggaga

SEQ ID NO: 19692 - DNA, 165 bp, Zea mays
caaagacccctgtcccgctaggattcccccgaaaccctcccccaaaaccccagagcggagaagagcgcaagatgttcggcttcgggcaccacggccaccacggccagaacccgccggcgcacggcggcgtgcaccagcccaccttcaagatcttctgcaaggccg

SEQ ID NO: 19693 - DNA, 240 bp, Zea mays
ggagaacaagctggagccggagcgcaagacggagctggcgcgcaagctgggcctgcagcctcgccaggtggccgtctggttccagaaccgccgcgcccggtggaagaccaagcagctcgagcgcgacttcgaccgcctcaaggcctccttcgacgctctccgagcggaccacgacgccctcctccaggacaacaaccgcctccgctcacaggttgtgtcgttgaccgagaagctgcaaga

SEQ ID NO: 19694 - DNA, 234 bp, Zea mays
ggcagctcaactacagcgactcggacgcgctgctcgacttctgcgaccgctacggcaagcccgtgcgcggccactgcatcttctgggccgtcgccaacaccgtgcagcagtgggtcaagaacctggacgacgaccagctcgcgtcggccgtgcgggcccgcctgcagagcctgctcacccgctacgccggcaggttcccgcactacgacgtcaacaacgagatgctgcacggca

SEQ ID NO: 19695 - DNA, 233 bp, Zea mays
ggacgcgtggttcgacctgatggcacagggggagggcatccgctgcatcatccgcatggagaactagacttcgctgtctagtttgtgatctggcctgggcttggggttaataaaagaggcaatgctagcctgccctttcgatgaggaggtacatacacgctggcgatggaccgcgcttgtgtgtcgcgttcagtttggcttttgccaagcagtagggtagcttcccgtgtcgg

SEQ ID NO: 19696 - DNA, 237 bp, Zea mays
cggacgcgtgggggaaggtattctgtgatttggccagtgcacacaagaactctcgcataggagttttctaatgtggatctccgacgctcacaaaacaactgaaggatctttcgaaagaattcagccagacaaccacaacccggttccatttccacaaagagaacttctgagacgtgtacccgaagatccgatggactggaaacataattgtatagggaaaaaatacgatagcattgg

SEQ ID NO: 19697 - DNA, 246 bp, Zea mays
gagaaggaggctgctgaaatgaacaagcggtccttcaagtacgcatgggtgctcgacaagctcaaggctgagcgtgagagaggtatcaccattgatatcgctctgtggaagtttgagaccaccaagtactactgcacggtcattgatgcccctggacaccgtgacttcatcaagaacatgatcactggtacctcccaggctgactgtgctgtccttatcattgactccaccactggtggttttgag

SEQ ID NO: 19698 - DNA, 229 bp, Zea mays
gatcaaggagccagagagcgggacgcagcgagcgttccgccagagatcgagaccgtagctagggtttgaggcgccgggctgcggtggacgagatgtcgacgccggcgaggaagcggctgatgcgggacttcaggcgcctgcagcaggacccgcccgccgggatcagcggcgcgccgtacgacaacaacatcatgctctggaacgccgtcatattcgggccggatgatac

SEQ ID NO: 19699 - DNA, 212 bp, Zea mays
aagatagactaaaagcttccaacttgatcattcaccagttacagaaacacaaccaccagtttatagtagtaataacacagtcctccatcgccactagcctcagctatcggtctcggatactgaatgaccagtgtacccgagcctctccgatatcaaatttacagcatcgcgccccccttcttggccgctttacttcttggccttacgggacg

SEQ ID NO: 19700 - DNA, 232 bp, Zea mays
gtgcaggtacatttgcctcctacatgacggtgagtgctttgactctcgtcttcgtcatcctttgggtaccagagacgaagggaagaacccttgaagagatacagtggtccttccagtgagctccggcattcatatgtacatgcaaatagcgtggcaaatcctccaggatcccaataaaagatatagtgaaatatagcagaagctatttcatttagcattttttatagtttaa

SEQ ID NO: 19701 - DNA, 214 bp, Zea mays
ccacgcgtccggagaaagatggcattctgtgcccaattcctcagtaccccttgtactcggcctccatagctcttcatggtggagctcttgtcccctattaccttgatgaaaaaactgggtggggtttggagatctctgatcttaagaaacaactcgaagatgctcggtcaaaaggcattgatgttatggccttggtggttatcaatccaggaaa

SEQ ID NO: 19702 - DNA, 224 bp, Zea mays
tggcgaggcaaaagcgcaaacgcgaccacagacagagcgcgcttcaaggccttttttttttgagataacaaggaggagaggaggagatggcggtcacgatcacctgggtgaaggcgaggcagatcttcgacagccgcggcaaccccaccgtcgaggtggacgtgggcctcagcgacggcagctacgcgaggggggccgtacccagcggcgcatccactggaata

SEQ ID NO: 19703 - DNA, 88 bp, Zea mays
gttgaaatttcttctggtagagggaaaccaccagttgttgttgacaaggatgagagtcttgcaaagtttgatccagtaaagctgaaga

SEQ ID NO: 19704 - DNA, 227 bp, Zea mays
gtcgctgctcgaggattggatatcccaaatgtagatctggtgatacattttgaattgccaaactcgtcagagttgtttgttcacagatctggccgaactggccgtgctgggaagaagggcactgcaattgtgatgtacaactatgaccaaagtagagctgtacgggtcattgaacgtgacgttggatgcaagtttacagagctgccaaaaattactgttgatggatc

SEQ ID NO: 19705 - DNA, 253 bp, Zea mays
cgttttcttctttttcccctgtgatttgaaggacttgtttggagctgggacggagaccacatcggtcacgacagaatgggccatgtcgcttctcctgaaccacccggaggctctgaagaaggcacaggcagagatcgacgcggtggtgggcaactcccgccgcctgatcaccgccgacgacgtgccccgcctcggctacctgcactgcgtcatcaacgagaccctgcgcatgtacccggccgctccgctgctg

SEQ ID NO: 19706 - DNA, 254 bp, Zea mays
gacgcacgcagagccgcagagatccgtcacactgcaagttttgaaaactgaactgtaagatggcatcagcagagctttcccgtgaggaaaatgtgtacatggcgaactcgccgagcaggcagagaggtacgaggaaatggttgagttcatggagaaggtagcgaaaactgttgactcggaggagctcactgtggaggagcgcaacctcctgtctgttgcatacaagaacgtcattggagcccgccgtgcctcat

SEQ ID NO: 19707 - DNA, 250 bp, Zea mays
catcacggacatgaactactacccggtggccaagtaccacttcgacctgagcggcacggcgttcgggtccatggccagctggggcctgaacgacaagctccggcacgccgggatcatcgacatgcagttcaggcgggtgccgtgcaacttccagggcctgaccatcaccttccgcgtccagcacggctccaaccccatgtacctggccgtgctcatcgagcacgagaacaaggacggcgaggtggtgcag

SEQ ID NO: 19708 - DNA, 240 bp, Zea mays
cccacgcgtccgccgttcgcgagcgcgacacacgctgacagctcacggctgaccttcccgagtcccgacggcctccagctccatcttgattcttgaggcgaagcccggtgcgtaagagtctgccatggccagcgagaataaggtctttgggttcgaggaagtcgccaagcacaacgtcaccaaggactgctggatcatcatcgccggcaaagtgtatgacgtcactcccgttatggatga

SEQ ID NO: 19709 - DNA, 167 bp, Zea mays
cgtgagatctctagggaggcttgtcggcttcgtcgggcgggaggggaggagatgggcgcccggaacagcgctgccgccacgccggtgctgctcaacgtgtacgaccttacggccgcgaacgattacctctactggctcggcttcggcgtcttccactccggaatcga

SEQ ID NO: 19710 - DNA, 245 bp, Zea mays
cccggtctcctccgcccgttgccttcgtcccctccatctccggctgcgtcgccggcgagcccgacaccgcgaatcggatccgccgacaaggtgagagggaagagatggggctcacgttcaccaagctgttcagccggctgttcgccaagaaggagatgcggatcctgatggtgggactcgacgccgccggaaagaccaccatcgtctacaagctgaagctcggcgagatcgtcaccacaatccca

SEQ ID NO: 19711 - DNA, 248 bp, Zea mays
ctctcccagatccgtctcccggcgtcagacgcgcatcttccagcaatggcggacgagaagcttgccaagctgcgcgaaccaccgccggcctcacgcagatcagcgagaacgagaagtccggcttcctcagcctcgtcggccgatacctcagtggcgacgaggagcacatcgagtgggccaagatccacacgcccaccgacgaggtggtggtgccgtacgacaccctggagtccccgccagaaggcact

SEQ ID NO: 19712 - DNA, 215 bp, Zea mays
  unsure (1)..(215): unsure at all n locations
agggtgtgcacggccacttcaccaagcgccccgaggagattggagctggtgaccaggggcacatgtttgggtatgcgactgacgagacccctgagctgatgcccctcagccatgtccttgccaccaagcttggtgctcgtctcacggaggttcgctagaactggacctgcncctggctcaggcacgatggggagatcgcagtgacagtggagtac

SEQ ID NO: 19713 - DNA, 252 bp, Zea mays
ccacgcgtccgccactcatcatcgccttcgcaggcatcgccctctcgccgggccgtccgattccgccatggcttccgatgagagcaaaaattcaaaaccagagaagccatcttcagcagctggtgcaggcctccccaatccgtttgatttttcttctatgagcaacttgctcaatgacccatcgataagagagatggctgagcaaattgcaagtgaccctgtgttcaaccagatggctgaacagcttcagaa

SEQ ID NO: 19714 - DNA, 240 bp, Zea mays
ggaccgtggtggacatggccagtctcagaaaggcatgattctagactgggttagagagctaaaggaggacaagagaccggataagctggtcgacagggatctcagagattcatttgatattcttgagctggagtgttcagttgacgtgatcatccaatgcacgcagacgaaccctatgctgcggcctaagatgtccgaaattctgcacgctcttgaagccaatgtcacgctggcggaaac

SEQ ID NO: 19715 - DNA, 161 bp, Zea mays
gagagagaaaaaatatggctccactcgtcgctactgccacgatgaaccacgctgtggcccatctgctaggacccaatcatgagagtttctcacggcaccatctttcttcctcgctgcagcaaaacagtaagcgaaggtgtaatcttagcttcaggccacga

SEQ ID NO: 19716 - DNA, 243 bp, Zea mays
cccatctcccagatccaattcgcgagttctccctcctctgccgccatggcgctctctgtggagaagacctcgtctggacgggagtacaaggtcaaggatctctcgcaggcggacttcggccgcctcgagattgagctggccgaggtcgaaatgcccggcctcatggcgtgccgcgccgagttcggcccgtccaagcccttcgccggcgctaggatctcggggtctctccacatgaccatccag

SEQ ID NO: 19717 - DNA, 163 bp, Zea mays
tccatttcggcatttccaacgccttcgccctaccagccacgtcgtttcgaggccgatcgaccgagcagcagcagctggtggcaatggcggcggcggcggaggtcgtgctgctggacttctgggtgagccccttcgggcagcgctgccggatcgcgctggcgga

SEQ ID NO: 19718 - DNA, 249 bp, Zea mays
cggacgcgtgggcaggggctgttcctcagcaccctgtcgctgggattcttcgtcagctccgcgctcgtcgccgccgtgcacagggtcacgggcgaccgccacccctggatcgccaacgacctcaacaagggccgcctcgacaacttctactggctgctcgccgccgtctgcctcgccaacctactagtctacctcgtcgccgcccgctggtacaagtacaaggcgggccgccccggcgccgacggcagc

SEQ ID NO: 19719 - DNA, 246 bp, Zea mays
cccacgcgtccgacaagcctcagatctcagtcacctgcgccgccgcttcgttcgtgtggaggggagaagagaggaaatggcggcgaccgagggcgtgctcctggggatgggcaaccccctcctcgacatctccgccgtcgtcgatgacgccttcctgacaaagtatgacatcaagctgaacaatgctattctcgctgaggagaagcacttgcctatgtatgacgagttggctagcaagagcaatgt

SEQ ID NO: 19720 - DNA, 234 bp, Zea mays
aacatgattgagaggtccaccaaccttgactggtacaaaggcccaaccctgcttgaggctcttgatcagatcaccgagcccaagagaccctcagacaagcccctgcgtctccccctccaggatgtgtacaagattggtggtattggaactgtgccagttggtcgtgtggagactggtgtcatcaagcctggtatggttgtcacctttggtccaactggcctgactactgaggtg

SEQ ID NO: 19721 - DNA, 238 bp, Zea mays
gaaatattctgtgagggtgagcctattaagagggaggatgaggaaagactcgatgaagttggctatgatgatgttggtggagttagaaagcagatggcccaaatcagagaactggttgaacttcccctgcgtcacccccagcttttcaagtctattggtgtgaagccaccaaagggaatattgctgtatgggcctcctggctctggcaagacccttattgctagagctgtagctaatg

SEQ ID NO: 19722 - DNA, 218 bp, Zea mays
acaaccctgataagattgcctttgtccccatctctggtttgagggcgacaacatgattgagaggtccaccaaccttgactggtacaaaggcccgaccctgcttgaggctcttgaccagatcaccgagcccaagagaccttcggacaagcccctgcgtctccccctgcaggatgtgtacaagattggtggtattggaactgtaccggttggtcgtgtgg

SEQ ID NO: 19723 - DNA, 186 bp, Zea mays
agcaaatcaaggatgatggactgctgcacacaacttgtgggactccaaactatgttgcaccagaggtccttgaagatcaaggctacgatggagcaatggctgatctgtggtcatgtggagttatcctgtttgttctgctagcagggtatttgccgtttgaggactctaatctcatgactttgtata

SEQ ID NO: 19724 - DNA, 160 bp, Zea mays
gccgccaccaattgctagcgcaatcctagccctagcccagcgccccctccggccctccctgcttcgtgcttggtagcgatggcgtcgttttctgaagcgcccccggggaacccaactgctggcgagaagatcttcaagaccaagtgcgcgcagtgccaca

SEQ ID NO: 19725 - DNA, 175 bp, Zea mays
cccacgcgtccgcgttcacatttattctcagcatagacaagcagcaaagatggtctgcgaccaaaggccatcggggacgaccctcgatagggaggcagaaatatgaacggtgcccctggacgctggatccatgctggttttggacacggttgtctttttgtgtttaacttatctg

SEQ ID NO: 19726 - DNA, 147 bp, Zea mays
cggacgcgtggctgagagtgtgtgagagagagaggatgatgggtggcagcggcagggctgctctgctactggccctggtggccgtgagcctggccgtggagatccaggccgacgccgggtacgggtacaccccgacgccgacgccgg

SEQ ID NO: 19727 - DNA, 224 bp, Zea mays
gcagctagcgcgctcctcgagcccagcagagaaatgccggcctacccactctctctctctctctctccagtctccaccggcagcgctaatcgtaatagccatgggctccaccgccggcgacgtggccgcggtggtggacgaggaggcgtgcatgtacgcgatgcagctggcgtcgtcgtccatcctgcccatgacgctgaagaacgccatcgagctgggcctgc

SEQ ID NO: 19728 - DNA, 162 bp, Zea mays
cgatgaacgagtacggtcggatatccgggacgaccacgcgtccgtgccaaggtccgcctcgtcatgcgtcaggcgaagacgcttaagatctgtgctaaccatcttgtggtggcgacgactaagatgcaggagcacgcagggagcgacaagtcgtgcgtgtgg

SEQ ID NO: 19729 - DNA, 156 bp, Zea mays
ggagctgtgccaagccacaatgggtatctcacgcgactcgatgcacaagcgacgtgccaccggtggaaagcagaaggcctggaggaagaagcgaaagtatgagcttggtcgccagccggccaacaccaagttgtcaagcaataagacagtgaggag

SEQ ID NO: 19730 - DNA, 219 bp, Zea mays
ctcttgctcatcagcatcagctagccacccgaccaggcttcagaaaacaaaaaaatgaagctctcggcggcagtcctctgcgcgcttgtggctgttcaggcggcggtgcttctcgccaccgtgccgacggcgcaggccagcgagctggaggtcgggtactacagcaagaaatgcaagggcgtggagaacgtggtgaagtggcacgtcatcaaggcgatc

SEQ ID NO: 19731 - DNA, 144 bp, Zea mays
attttctacaaccctcgggctagcccttctgagtttgtcattccactggctaagtatgtgaaagctgtttaccacacgcgcgtatctgttggaatgcggtttcggatgctttttgagacagaggaatcaagtgtcagaagatac

SEQ ID NO: 19732 - DNA, 264 bp, Zea mays
cagagcgccagccaagtcttgcggtcgcgaagagcaacgcaacaagatggtgaagctcgcattcggaagcgtcggcgactccttcagcgtcacctccatcaaggcctacgtggcggagttcatcgccaccctcctcttcgtcttcgccggcgtgggttccgccatcgccttcgggcaactgacgaatggcagcgcgctggaccctgcgggactggtggcgatcgcggtggcgcacgcgcttggccctcttcgtgggcgtctcag

SEQ ID NO: 19733 - DNA, 187 bp, Zea mays
gaaatttgtgggtgctggaaagaaggctacaaccttcgccaacagaatttggttagattatgctgatgcagcagccattagcaagggtgaggaagtaacccttatggattgggggaatgctatcgttaaagagatcaaggtggagagtggagtaattactgaactagttggagaattacatcttgag

SEQ ID NO: 19734 - DNA, 237 bp, Zea mays
gaagattatgttagcaagcttactgggcataaatctgaggtttgtggactcaagtggtcttatgacaatcgtcagcttgcatctggaggcaacgacaatggactttttgtttggaatccacattcagtacaaccagtactgaagtatactgagcacacagcagctgtcaaagctattgcctggtcacctcatctccacggtctgcttgcgtctggtaggagactgcagatagatgca

SEQ ID NO: 19735 - DNA, 99 bp, Zea mays
ggaccgtggcgagaagctcgataagcttcgcgccgaggtcgccaagctcgaccagatcagcgagaacgagaagtccgggttcatcagcctcgtgtcacg

SEQ ID NO: 19736 - DNA, 249 bp, Zea mays
cgcagagacaggcgtcttcgtactcgcctatctccgcgactcaaagctttccccaattcccccccttctctcatttctcaccaccgccgccgctccccccgttcaacaacaccatgagggagtgcatctcgatccacatcggccaggctggtatccaggtcggaaacgcgtgctgggagctgtactgcctcgagcatggcattcaggctgatggccagatgcccggtgacaagaccattgggggaggtg

SEQ ID NO: 19737 - DNA, 246 bp, Zea mays
ctttccccttccctccctccctcttcccgcgggccgccagaggcaatttcgccctcgattcgaccccgattcgtccgcccgcgaccgggattccctccgccaagcgcggatctgaacgctgcgctccgtgtcgccgctcgaatccggcatgaaaggggccaaatccaagggcgccgccaaggccgatgccaagctggcggtgaagagcaagggggctgagaagcccgccaatgctaggaaagggaa

SEQ ID NO: 19738 - DNA, 248 bp, Zea mays
gacaagacttatgatcttaatttcaaggaggagaacaacgatggctcaaacaaaatttcaggcgacagctgaaagacctgtacaagtcctttgtttctgagtaccctatcgagtcgatcgaagacccatttgatcaggatgactggagcacttatgccaaactcactgatgagattggacagaaagtgcagattgtaggagatgatcttctcgttaccaaccccaccagggtcgccaaggccatcaat

SEQ ID NO: 19739 - DNA, 243 bp, Zea mays
cactcttccttgccctgagcctcctgtttgctgccaccgcgcatggctgcgaacccaactgttctggcccagtcgtcccaacgccgccagtcgtgccgactccgtcgtcgcacagccacgggcgctgcccgatcgacgcgctcaagctcaaggtgtgcgccaacgtgctaggcctcgtcaaggtcggcctaccccagtacgagcaatgctgcccgttgctggagggtctggtggacctcgacg

SEQ ID NO: 19740 - DNA, 240 bp, Zea mays
cctccacaagcagcgaaatccaatctagaagcacccctctccctctctctctcttcgccgtccgaagctccgcaccccaatctaatcgacacctcaccgagatgggccgcaagttcttcgtcggtggcaactggaaatgcaatggaaccacagatcaggtcgagaagattgtcaaaaccctgaatgaaggacaggttcccccttcagatgttgtggaggtcgttgtcagccctccttatg

SEQ ID NO: 19741 - DNA, 238 bp, Zea mays
cccacgcgtccgcgggctgatcgcatggttatgcttgcgaaagcactagagtatgcagattttaacaactttgaccgtgtacgtgtccccaaaattcgatatgctgggatgcttcagtatgatggtgagttgaagcttccaagtcgctaccttgtttccccaccagagatagatagaacatctggagagtacttggtgaagaatggcatccgcacctttgcttgcagtgagacagtga

SEQ ID NO: 19742 - DNA, 238 bp, Zea mays
caagaataaaaagaagactacaaaaccaaagacggagaagaagaaaagattatttttcaagaaagcagaaaacccatctcctgcatatgctttgggtgaaattgatgaaggtgctccaggtgctgatatcgagaaggccggaatcgtaaatcaacagaaactagagaagaaatttgggcagtcttctgtttttgtcgcatcaacacttcttgagaacggagggaccctgaagagcgca

SEQ ID NO: 19743 - DNA, 242 bp, Zea mays
cccacgcgtccggaaacatagctactcctactactcaaatccatccttattgagcttagtgtttgatccatggactcggaaggagtagcagcaaaggtggcagatgagactactaaaccggcaagccaagaagacggcgagagcaaggccgggatgactgatctgctgatgctgaccgacaagtcgcagctgcaggcgctagcgatgctgctgcggaacaacgaggagctcatgatgagcca

SEQ ID NO: 19744 - DNA, 244 bp, Zea mays
ccccatccgcacctctctccatctccctgctcctccgccttcttcttgatccagccaagccagggatcgccatgtcggactcggaggagcaccacttcgaatcgaaggccgacgccggagcgtccaagacctacccgcagcaggctggcaccgtccgtaagaacggcttcatcgtcatcaagaaccgcccctgcaaggttgtggaggtttctacctcaaagactggtaagcatggtcatgccaa

SEQ ID NO: 19745 - DNA, 232 bp, Zea mays
ccacgcgtccgccatttcctgtgttggcggcgatggcgcggcacttcgtgctcaacaccggcgccaagatcccctccgtggggctcggcacctggcagtctgaccccggcgtcgttggcaacgctgtctacgccgccgtcaaggcgggttaccgacatatcgattgtgccagagtttacggcaacgaaaaggagattggtttggcgctgaagaagctatttgaagagggtgt

SEQ ID NO: 19746 - DNA, 209 bp, Zea mays
cacgacttccgtccgagtctgagctcatctccacgcgccgccgccgccgctcgacgcccaccgcgcaccatggcggaacagactgagaaggctttcctcaagcagcctaaggtgttcctcagctcaaagaaatctggcaagggtaagaagccaggcaagggtggcaatcgattttggaagagcattggccttggtttcaagactcccag

SEQ ID NO: 19747 - DNA, 239 bp, Zea mays
cccacgcgtccgccacgcgtccgaacgtaacggccgtgcagaagctctccgagtcactgacggcggcggcgtgccatgacctgacgtacccctacgccgtgttctactgccacacgaccaacccggcggccacgtacctggtgaagctggcagcccaggatggcggggcgccggacatggaggcgttggtcgtgtgccacctcgacacgtcgttgtggagtcccagacacccatttttg

SEQ ID NO: 19748 - DNA, 229 bp, Zea mays
gccacggacgggtgcgtgcggctgtacccggaggtgttcctgccgctcgccaccacccgctctccgggcttcctcggcctccacctggggaacgagggcttctggagccgctccggattcgggcgcggggtggtgattgggatcctggacacggggatcctgcgcagccacccgtccttcggcgacgacgggctccagccgccgcccaaggcgtcgaaggggacctgcg

SEQ ID NO: 19749 - DNA, 234 bp, Zea mays
gcgacggcatcccgctgccggcgcagaccgggttgggcgccatccgcagcatcgtcccgcgcgtggtcaagctggtggaggacaccaccgagcacgtcctccgcttcgagctgccggacatgatagagagagaccgcttctcgtggttcaaagacgaggagttcgcgaggcagacgatcgcggggctcaacccgctgtgcatccagctcctgacggagttccccatcaggagca

SEQ ID NO: 19750 - DNA, 233 bp, Zea mays
cgaacgccggagctcgacaaggacgaccgacgacgcacgcggagatccggcgtactgcaaattttgaaaactgaactgtaagatggcatcagcagagctttcccgtgaggaaaatgtgtacatggcgaactcgctgagcaggcggagaggtacgaggagatggttgagttcatggagaaggtagccaagactgttgactcggaggagctcactgtggaggagcgaaacctctt

SEQ ID NO: 19751 - DNA, 232 bp, Zea mays
gtagcctagctctatagctcgagtattgcttgctctccacaagatacaaggcagagcaccaacaatggccgccgcctcctcgtcctcggtcctcctgctgctcctggccgccgccttggctggcatgagcgccaacgccgccaccttcaccatcaccagcaactgcgggttcaccgtgtggcccgcggccaccccggtgggcgggggcacgcagctgatcccgggcgggacg

SEQ ID NO: 19752 - DNA, 235 bp, Zea mays
ccctccctcagccgcgtcgcgtcgcatcctacgatccaaagctctctctgctcgcagccatggcgaagaactacccgaccgtgagcgccgagtacagcgaggctgtggagaaggccaggcgcaagctccgagccctcatcgccgagaagagctgcgccccgctcatgctccgcctcgcgtggcactccgcggggacgttcgacgtgtcgtcgaggaccggcggtccattcggcac

SEQ ID NO: 19753 - DNA, 236 bp, Zea mays
cggacgcgtgggcggacgcgtgggtactggtggtgcaccgagcgctgcctcgactggggcgaggcgggcggccacgacctcatcgtcgacgacggcggcgacgccacgctgctcatccacgagggtgtcaaggccgaggaggattacgagaagaccggcaagatccccgacccggagtcatccgacaacgctgagttcaagatcgtgctcaccatcatccgcgacgggctcaaggc

SEQ ID NO: 19754 - DNA, 236 bp, Zea mays
cccacgcgtccgcatccctcactctcctccgaagccatcgtccccgtcccagcctccccggactccaggggcaaaagctgcagcgtcgagatggtgaaggggcgcacggggcagcgcgtgaggctctacgtccggggcaccgtccttggatacaagcggtccaagtcgaaccagtacgagactacgtcgctggtgcagatcgagggggtgaacaccaaggaggacgtcgcgtggta

SEQ ID NO: 19755 - DNA, 228 bp, Zea mays
cggacggtgggttgtttttttttttagataattatctttgtgccattggatgcgataatgtgcaacaggatgcttcgtttcttagacactagagaaaagtattcattttttcgcaactgaatgtaatataacaccatcagatgcagcgaagaaacaagagagaaaatgctgggtgcagtaattccaaaaatcagaattattcttggcttgtagcatcgtttgtcgcct

SEQ ID NO: 19756 - DNA, 227 bp, Zea mays
cccacgcgtccgcgccctcaaggactccaagacgcttctcttcggcgagaagccggtcaccgtctttggcatcaggaaccccgaggagatcccgtggggtgaggctggtgctgagtatgtcgtggagtccaccggtgtcttcactgacaaggacaaggctgctgcacatctgaagggtggtgccaagaaggttgttatctctgccccaagcaaagatgcgcccatgt

SEQ ID NO: 19757 - DNA, 226 bp, Zea mays
caatgctcttgagcagcacatcaagaacctcctcagcccgtccacaccgttcttcttcaacaccctgtacgacccctaccgtgagggtgctgactttgtgcgtggataccccttcagcctcagggagggtgcccacactgctgtctcccacggcctgtggctgaacatccctgactatgatgcacccacccagctggtcaagcctaaggagaggaacgaaaggtac

SEQ ID NO: 19758 - DNA, 277 bp, Zea mays
caaagaaccgcccttgttctctgcgactctgcccggccggtctccgaggcgggcggagggaaccagagagcaaggcgaggagcgcggaagggctgagggaaggggcggcggggcatggctcgccggccggcgtcgtgggagcagggcggcgacgagtacgactatctcttcaaggtcgtgctcatcggcgactctggcgtggggaagtccaacctgctctcccgcttcaccaagaacaccttcgccctcgactccaagtccaccatcggcgttgagt

SEQ ID NO: 19759 - DNA, 287 bp, Zea mays
caaactactacaaagccacttcctgctctcgctccgccgccgccgcctccctccccagtcgatcaccaaacctcagtccaaactccaaacccccgccgcatcagaaaaaaaccctaggccatggacgccgcggcgctggagtcgctcatcctggacctccacgccatcgaggtcgtgaagctgggctccttcacgctcaagtccggcatcaaatcgcccatctacctcgacctccgcgcgctcgtctcccacccgcgcctgctctccgccgtcgcctcgctccttca

SEQ ID NO: 19760 - DNA, 283 bp, Zea mays
agcaaaccgaacgaacccaaccgaagcgagagctgagcaaggcagaggcgtcgtgaccggcgatggagcggctgcagcggatctttggcgcctccggcatggggcagccgccgacggactcgccgctgctcgattcctccgagcaggtctacatctcctccctagcgcttctcaagatgctcaagcacgggagggctggggtgcccatggaggtcatgggcctcatgctcggcgagttcgttgacgactactaccgtcaggtcgtcgacgtcttcgccatgcc

SEQ ID NO: 19761 - DNA, 267 bp, Zea mays
ggacctggcgcggccaacttccccatccagaagttcctgcaggcgcagagcatcgtggcgcccagagcttacatctccgtggccacgctggcgctgcacctggggctcagctgggtcgccgtctacaggctgggcctgggcctgctggggggctcgctcgtgctcagcttcagctggtgggtcatcgtcgcggcccagttcgggtacatcgtcaccagcgcccggtgcagggacacctggacgggattcaccacgcaggccttctcg

SEQ ID NO: 19762 - DNA, 272 bp, Zea mays
ctcatgggattccaaatccacttacattcatgagcccccttactttaaggacatgaccatgtccccacctggcccctctacagtgaaagatgcctactgcttgctgaacttcggggacagcatcactacagatcacatttcacctgcaggaagcatacacaaagacagtcctgctgctaagtatttgatggagcgtggtgtggaccggaaggacttcaactcatatggtagccgtcgtggtaatgatgaagtaatggcaaggggaacgtttg

SEQ ID NO: 19763 - DNA, 272 bp, Zea mays
ccccaatcgaatgacgccgacggcgagcctcctcctcccggctcccccattcgtctctatctccgatgtgcgccgcctccagctccccccgcgcggcggccaccggcctcgcccctgctggaagggcttggagtgcggctccgtacagacgcggatggtctcttctttcgttgggagcagaacacgccgcagaaacgttatatgtgcttccctgttcggagttggagctcccgaagcactggtcattggagtagtcgccttgttggtgttcg

SEQ ID NO: 19764 - DNA, 266 bp, Zea mays
ggcgcacgtcttccacccggggagcaacctggccaccaagggcatgggcgccaacctcttcgaccggccgcagcccaactcccccaccgtctacgactggctctacagcgacgagaccaggagcaaccaccgctagatcgggcgagatggatggacagtgaagaggccatgtttgctggtccttgtggttatctaaaacgcacgcatgctctattatagctagtcatcactatatatatacttgtgtttgtgtattgttgttcttg

SEQ ID NO: 19765 - DNA, 271 bp, Zea mays
gccgcgtcgcaccgcatcgcattctacgattcgaagctctctgctcgcaggggaccatggcgaagaactacccaaccgtgaacgccgagtacagcgaggccgtcgagaaggccaggcgcaagctccgcgccctcatcgccgagaagagctgcgcacccctcatgctccgcctcgcgtggcactccgcggggacgttcgacgtgtcgtcgaggaccggcggtcccttcggtaccatgaagtgctcggcggaactggctcacggcgccaacgc

SEQ ID NO: 19766 - DNA, 272 bp, Zea mays
gaaaatatctgagatcgagtgaagctagcttttcatcgatatggcgcttgtactgcatgctggcagtagtaacaaaaatgcattcaaagcactaattgccgcggattacagcggcatcaaggttgagttggtaaaagactttcaaatgggggtttccaacaaaacaccagagttcctcaagatgaaccctattgggaaggttcctgtcctggagacacctgatggtcctgtctttgagagcaatgcaattgcaagatatgttactcgcttga

SEQ ID NO: 19767 - DNA, 271 bp, Zea mays
gattaccaccacctccacctcgtcgtctcccaccaccgccgagcgcgaccctagcccgatctagccggcggcaggcaccagatcccgccgcccgcggcgtcccgggacgcgccccgccgaatccgccgctcctcgcactgcaacacgcccggaccacggtgcatttgatccgtcccggccgcctacacgatgtccaagtcgggagcgctggatcttgcttctggcctcggagggaagatcaacaaggtggaagtcaagtcggccgtcgatg

SEQ ID NO: 19768 - DNA, 262 bp, Zea mays
cccacgcgtccgcagagggagagattggagggaggcccctgcccaaggcaagagaaaccgcggcgcgcggagagggaggaagggcagacgcagacgggcgaacaagatgagggagatcatcagcatccacatcggccaggccgggatccaggtcggcaacgcctgctgggagctctactgcctcgagcacggcatcgagcacgatggcaccatgcccagtgattcctcggttggcgtcgcacatgatgccttcaacacgttc

SEQ ID NO: 19769 - DNA, 264 bp, Zea mays
acttaccattattaaaagtatttgagtatctacctcgtggcagtccatctgaagcatgccttatgaggatatttgtggcaacggttgaagctatacttaggagaacttttccttctgaaacatcagagcaatccagaaagccaagaagtcaatctaagaaccttgctgttgctgaacttcacacaatgatacattcactctttgttgaatcctgtgcctcaatggaccttgcctcccggttgctatttgtggtgttaactgttt

SEQ ID NO: 19770 - DNA, 265 bp, Zea mays
aaaatgctggaatcacttgacatgcggagagatgttcaggagatcttcaaaatgactcctcatgataagcaagtcatgatgttttcagcaacgctcagcaaggagatccgtcctgtatgcaagaaatttatgcaagatccgatggaaatatatgttgatgatgaggcaaagttgaccctccatggtcttgtacagcactatataaaacttagcgaggcagagaagaaccggaaactgaatgatctcttggacgctcttgatttca

SEQ ID NO: 19771 - DNA, 190 bp, Zea mays
catatatcatctcgatggcaactgccccatctgatgtgcttgcggtggagcttttgcagcgagagtgccatgtaaaacaaccactgagagttgttccactcttcgagaaacttgcagatcttgaagcagctccagcagctgtagcgcgactcttttcaattgacgggtacatgaataggattaatggtaa

SEQ ID NO: 19772 - DNA, 244 bp, Zea mays
attgtcaaccgactctatctagctctcttcgcaagccagtaggtcaccactcaccactcaaaagcttgtgaagcaggtgagatgggcaaggaggtggatgtgtccactctagaggtcggcggcgtccgtgaccgtgactacgcggaccctccgccggcaccgctgatcgacatcgacgagctcggcaagtggtccctgtaccgcgccgtgatcgccgaattcgtggccacactgctgttcctgt

SEQ ID NO: 19773 - DNA, 246 bp, Zea mays
cacaggcacacagctcctcttggcggcgcctctgacttcgtcgcccttctcctttttcgtcgcccttctcctttttcgtcgccttcgatcggcggctgcctccttcctccacttccgtcccttcaccgagccgccgccgccactatgaagggacccggcctcttctccgacatcggcaagaaggccaaggatctactcagtaaggactacacttacgaccagaagctgaccatctccaccgccagc

SEQ ID NO: 19774 - DNA, 248 bp, Zea mays
tcgggctactcttcaccaacagtttactttatacaccagaaccaaagaaattgtgcgatcagattctacaacgcacaactgatgtctgccaccgattcatgtggagcatattgtttgatgcgaggacatggcatacacctcatgagacacattaactttagattggtgattgacaaagagactggcaagccaaaaggttatggcttttgcgagtacaaggatgaggaaactgttttaagtgcatgtcg

SEQ ID NO: 19775 - DNA, 183 bp, Zea mays
cactcccacaccaaccaaccaacctcctctgcctgccgcttctcctgctgcgggcgggcactgctgcaagtactagaggaggacatccgcttccattactgcgcctgcggaggatcggaggaaccagtagcggaggcttcgattttcggcgggcgcaataaatttcccgcatggctcggaggg

SEQ ID NO: 19776 - DNA, 241 bp, Zea mays
cccacgcgtccgcgcagattgacgacgagcaattcaacaagatcttgcgctacattaggtatggtgttgacggtggagctacccttgtgacgggtggtgataggttgggtgacaagggtttctacatccagccaacgattttctcagatgtccaggacggcatgaagattgctcaggaggagatatttgggcctgtgcagtcgatcctcaagttcaaagacctcaatgaggttatcaagag

SEQ ID NO: 19777 - DNA, 233 bp, Zea mays
gagaaggggatgcaacacaaccagaagatcaccttccctggtgaagctgatgaagcgcctgatactgtcactggagacattgtattcgtcctccagcagaaggatcactccaaattcaaaagaaagggtgaagatctcttctatgagcacaccttgtctctgaccgaagcactatgtgggttccaatttgttcttacacatctggacaacaggcagcttctcatcaaatcaga

SEQ ID NO: 19778 - DNA, 200 bp, Zea mays
atccccatccgcacctctctccatctccctgctcctccgccttcttcttgatccagccaagccagggatcgccatgtcggactcggaggagcaccacttcgaatcgaaggccgacgccggagcgtccaagacctacccgcagcaggctggcaccgtccgtaagaagggcttcatcgtcatcaagaaccgcccctgcaagg

SEQ ID NO: 19779 - DNA, 162 bp, Zea mays
cggacgctgggtcaagctcagagcctcagagcgccaccaagtcttgcggtcgcgaagagcaacgcaacaagatggtgaagctcgcattcggaagcgtcggcgactccttcagcgtcacctccatcaaggcctacgtggcggagttcatcgccaccctcctct

SEQ ID NO: 19780 - DNA, 237 bp, Zea mays
cggacgcgtgggtcatttacagcttacaccaatttcagaacactctagattcagaactattccagacagcaaggctgtcgccatcatctttgagatactacggtattggactcgagaatggaaactacacagtcacacttcaatttgcagagtttgactttgaagattcacaaacttggaagagtgttgggagaagggttttcgatatctatctccagggcgagcgtaaggagaaga

SEQ ID NO: 19781 - DNA, 237 bp, Zea mays
gcccgatcccgatccagcgaggcggcgaccctccctcctccccttgcttcgctcgtccagccctgaccacccgcatccccgtcagtcatggcagcggcagcaggcggaggcgcggtgcgtgcgctgtcccagaaggagcaggacatacagatgatgctcgccgccgacgtccaccttggcaccaagaactgcgatttccagatggagcgctatgcctttaagcgccgcaccgacggc

SEQ ID NO: 19782 - DNA, 212 bp, Zea mays
cccggtgaagctggtgccgttcaacccggagtaccaggacgagtcggtgctgtggacggagagcggcgacgtgggcaagggcttccgctgcatccgcatggtgaacaacatccgcctcaacttcgacgccttccacggcgacaagggccacggcgtcgtgcacgagggcacgaccgtgttgcttgtgggagtgggccaagggagagaaccag

SEQ ID NO: 19783 - DNA, 212 bp, Zea mays
cgccgccactcaccagcaaattcccaagccgccccttcccccatctctttcgcgccccatttgatcgattcctgatggcgcccaaggccgagaagaagcccgcggagaagaagccggcggaggagaaggccgagaagaagccaagggcggagaagcgcgtgccgagcaaggagggcggcgagaagaagggaaagaggaaggcgaaaaagagc

SEQ ID NO: 19784 - DNA, 136 bp, Zea mays
cacaaaaatcgttctgcctcctgccaaggctggtcataagagagactttggctttgttcactttgcagaaagatcaagtgcattgaaggcagttaaaggaagtgaaaaatatgaaatcgatggtcaagtactggaa

SEQ ID NO: 19785 - DNA, 201 bp, Zea mays
ggccctcgggctgccgtcatggccgacttagccaagacgacgacgaccatcgccattaccacgacgatgatcgacggcgtgagccagatcaccacgaagattgctatgctggaggactccgactccctagcgcacctgctacagcagcccgggacagaggacgtggaggcttcgcgctcgggcttggcctctccgactacc

SEQ ID NO: 19786 - DNA, 121 bp, Zea mays
gatcggaatcaacggtttcggaaggatcggcaggctcgtggccagggtcgccctgcagagcgaggatgtcgagctcgtcgccgtcaacgaccccttcatcaccacggattacatgacgtac

SEQ ID NO: 19787 - DNA, 169 bp, Zea mays
tccctacaccgccgccgccgtcgcacgcagccgcatccgccatgggggcgtacaagtatgtctcggagttatggaggaggaagcaatccgacgtgatgcggttcgtgcagcgcgtgcgctgctgggagtacaggcagcagccggccatcgtccgcctcacaaggcccac

SEQ ID NO: 19788 - DNA, 82 bp, Zea mays
atcttctccacgcaggaccacgccgccgccgccatcgcgcgcgactcggccgccgtgttcgcctggaagggggagaccctcg

SEQ ID NO: 19789 - DNA, 235 bp, Zea mays
cttggactcatgcctgatattttggcatgtcgcagtacacagccacttgaagaacacgtgaaagtgaagctcgcacaattttgtcatgtcccgataccaaatatcattaatctccatgatgtcaccaacatttggcacattcctttgttgctcagagatcagaaggcccatgaagctattttgaaggtgttagaccttcagtgcgcgagtaaagttgctcgagacccctatttgt

SEQ ID NO: 19790 - DNA, 230 bp, Zea mays
ggacctggcgcgccccttggaggagggtctcgctgaggccatcgatgacggccgtaagcggcccacgtgatgatccgaagtgcgctcccagatcctctctcaggagtttgggtgggacaaggacctggccaagaagatttggtgttttggacctgagaccactggcccgaacatggttgtagatatgtgcaagggagtgcagtatctcaatgaaatcaaggattctgttg

SEQ ID NO: 19791 - DNA, 232 bp, Zea mays
cgacgcagtgttccagagcaaactcccaaggaggagttcggtgacctcgtggccgcgctgccgagcaggcacagtccatcctggagctgcgcctgtaccagggcttctggctgccggagcactgggtgccggggaccatcgtgttccagcgccgcttcacgccgcgccccgacgacgtgatcctcgcgagctaccccaagtgcggcaccacgtggctgaaggcgctggcctt

SEQ ID NO: 19792 - DNA, 233 bp, Zea mays
cccacgcgtccgcccacgcgtccgatgatggttaggcatgatctttctataggttaaaagaacagattatccaacagctgatggaacctgcattagagatattatgttgatgtcacaaatttagttgatgctcatgtgaaagcgctcaacaaggcagacactagaaaagtcagtatttacaacgttggaacaggaagaggtttggtaacacgagaattgtttatttatttgta

SEQ ID NO: 19793 - DNA, 176 bp, Zea mays
cccacctctagcccgacaggtgaagccgccgccgctgcagtgtccatagccaccgcagagactgagatggggggttttgtcaagacccacaagaccaatgcgtacttcaagcgtttccaggtgaagttcaagagaaggcgcgctggcaagacagactacagggccaggataaggct

SEQ ID NO: 19794 - DNA, 130 bp, Zea mays
gcacgcggagatccggcgtactgcaaattttgaaaactgaactgtaagatggcatcagcagagctttcccgtgaggaaaatgtgtacatggcgaactcgctgagcaggcggagaggtacgaggagatggt

SEQ ID NO: 19795 - DNA, 104 bp, Zea mays
ggacgtggtccagctcgccgtccgcaacgacgaggagctctcccgcttgctgggcaacgtgaccatcgccagcggtggtgtcatgcccaacatccataacctgg

SEQ ID NO: 19796 - DNA, 238 bp, Zea mays
gcgtgcgaaccaagcagaccccagcagaagaagcgaagtcgtcgccggagcaggaggcagagcgagcagcaagatgtcgtggcaggcgtacgtcgatgaccacctgctgtgcgacatcgaaggccagcacctcagcgccgccgccatcgtcggccacgacggcagcgtctgggcacagtccgagaacttccccgagttaaagcctgaggaggttgctgggatgataaaggactttgac

SEQ ID NO: 19797 - DNA, 137 bp, Zea mays
gagactgataatccccagtctgagctaaagcctggaattgatctacttggttctgtagatgagattttctatgatatctatgacagatatgaaccagtgaatgaaccatctcttgataattgctttgtctcgacaag

SEQ ID NO: 19798 - DNA, 159 bp, Zea mays
ggaggtcaaactgttctatttgttggggatttgtcgtatgctgatagatatgaacataatgatggtattcgttgggattcctggggtcgattcgttgagcgcagtactgcataccagccatggatttggaatactggaaaccatgaaatagaatacagg

SEQ ID NO: 19799 - DNA, 165 bp, Zea mays
ccccagtctcggaagagaactatccagaagcgcaagactccaaagccgtcgccttcctatccatcccttcctcgccacgggggtcgcctgaaatcacataaacaatggtgaaggctgttgctgtgcttggtagcagcgatggtgtcaagggcaccatctttttca

SEQ ID NO: 19800 - DNA, 239 bp, Zea mays
cgccggcaagcgcaagaaggccaccacgagcggcaagcccaagcgcccgccctccgccttcttcgtcttcatgtctgaattcaggcaggagtatcaagttcaacaccctggcaacaagagcattacggctgttagtcaccttgcactctgctctccctttattttttggtgcgtttgcagatgtcttctttgttcgtattggtggatcaggtgagcaaggcagcaggggagaagtggca

SEQ ID NO: 19801 - DNA, 236 bp, Zea mays
agctacaatcctaaaaccatctgcttcagctagccccaagtttagtcggccgatcattcactgaagtagtaatggcctccgtcaacagctggaccctcgagatcgcgtcgccggtggctccgcagcgcctgttccgcgccgccgtgatggactggcacaccctggcgcccaaggtcgcctcccacgtcgtcgccagcgcgcactccgtggagggcgacggcggcgttggcagcgtc

SEQ ID NO: 19802 - DNA, 236 bp, Zea mays
ggacgctggccgcgctctgcatctcctctccactcctgctatttagcgccgccctgcgcctcccactaccgaattcccctcacctccctgctcgaatccagcgctcacccgcgccgcgtcgagacatgtcgaagaaaatcgtggtgaagctggacctgcacgacaacaaggacaagcagaaggcgctgaaggccatctccgtgctcgtcggcatcgacgccgtgtcggtggacatg

SEQ ID NO: 19803 - DNA, 194 bp, Zea mays
cggacggtggggcggacgcgtgggcggacgcgtgggcggacgcgtgggtgcggatggaagcatctgtttggacatcctacaaaaccagtggagtcctatatacgatgactgggcaatattgacctctattcagtccctgctgtgtgacccaaacccaaattctcctgccaactctgaagcagccagaatgttca

SEQ ID NO: 19804 - DNA, 174 bp, Zea mays
cgcacccgcgcgccaccgagatcatcttcgtcctcgagggcacgctcgaggtcggcttcatcaccaccgccaacgcgctctgcaccaagaccgtcaccaagggcgacgtcttcgtcttcccgcgcggcctcgtccacttccagcagaacaggggccacggccccgccgccgtcg

SEQ ID NO: 19805 - DNA, 206 bp, Zea mays
atcagacgagcgtgacacacctgttcccgatcaccaagtacgtcggattgcttgccactggccttacagctgatgctaggtcattggtttcccaagcaaggaacgaagcagctgagtttcgtttcaaatggggctacgagatgccagttgatgtgttagcaaaatggattgctgacaaagctcaagtttacacgcagcatgcatac

SEQ ID NO: 19806 - DNA, 184 bp, Zea mays
ggctcttctcctcctcgcctcctctccctagtctccacgacgcaagggagagtgacggaaagcgacgcggcgcgagcgaggagggccaaggcgaagaggggaagcaccgcaccaggacccttgttcgccgccgccgcctctgatctccgcgaggttgtcaggattcaatatgtcgaccagcaca

SEQ ID NO: 19807 - DNA, 133 bp, Zea mays
gtgatgactgggagggtctttttgagtctatcactggctatggccttggtgggtcgtccatggctctctttggaagagttggtggaggcatctacacaaaggctgctgacgttggtgccgatcttgttggaaa

SEQ ID NO: 19808 - DNA, 230 bp, Zea mays
cgattggaacccagatccgcacgccgcagcacaagagggtgggatcggatcggatcggagcagagcaaaggggacaaccgaccagaatccgccggcgaccaccatgggctccgcgagccgtgccgtctcgtgcctgtgctgcccctgcaagtgcctggcgtgcgggctcctgagctgcctgtgcagcatcctcgtctcgctcgccgtcgtcctgggcgtcgtcgccctca

SEQ ID NO: 19809 - DNA, 172 bp, Zea mays
gacgttctgcttcctgaacacagtcgcaatagcgtacagcgccacggcagccctgcctttcggcaccatcatcgtcatcatcctcatctgggcgctcgtgacctctcctctcctcgtgctgggcggcatagccgggaagaacagcgacactgagttccaagccccctgccgc

SEQ ID NO: 19810 - DNA, 153 bp, Zea mays
cccacgcgtccggcatcacaatcaaatctactggtatctctctttattaagagatgactgatgagtcactgaagaactacaagggtgagagggatggtaaccaatacttgataaaccttattgactcacccgggcacgtcgatttttcttcgg

SEQ ID NO: 19811 - DNA, 225 bp, Zea mays
gcctttctcttgtcggtgctggtggtattgccactgcgattcaacaccatggacaggaaatgtcttacaacaactacttggatgcggatgctgcatggaactgtgtatcggagtttgatagtcctacttgtgttgtgcttgagcacacaaatccatgtggtgttgcctcacgaaaggatattcttgaagcttacaggttagctgtaaggggagatgctgtcagtg

SEQ ID NO: 19812 - DNA, 205 bp, Zea mays
ctgaagttgaaggattacaaggaagctgcgaactttgcaccaaggttctggaactagacagccaaaatgtcaaggctctctacaggagggtgcaagcttacattcaacttgctgacctagagctagcagaggccgatatcaaaaaggcactggaaatcgatcctgacaacagggatgtcaagttggaatataagatccttgaaga

SEQ ID NO: 19813 - DNA, 154 bp, Zea mays
agcagctattgtggtcgtccctcagccgcgtcgcaccgcatcgcattctacgattcgaagctctctctgctcgcagccatggcgaagaattacccaaccgtgagcgccgagtacagcgaggccgtcgagaaggccaggcgcaagctccgcgccc

SEQ ID NO: 19814 - DNA, 141 bp, Zea mays
gcttagctccactccagctccaatcacagtcgtgaccagagcgcgagagctagctagagggccgtgaaaatgccgatcaataggatcgccctggggagccaccaggaggtgtaccacccgggcgccctcaaggcggcgttc

SEQ ID NO: 19815 - DNA, 226 bp, Zea mays
gccgccgacaactctctctaccgtccgataccccaagcaccagcgcggcggcggcgaccatggctgtcggaaagaacaagaggatctccaagggaaagaagggtggcaagaaaaagaccgtcgaccctttctctaagaaggattggtatgacatcaaggcaccgtcggtgttcagtgtgcgcaacatcgggaagactctcgtatccaggacacagggtaccaggat

SEQ ID NO: 19816 - DNA, 175 bp, Zea mays
caaggagatcactgcgctcgcgccaagcagcatgaagatcaaggtcgtcgctccaccagagaggaagtacagtgtctggatcggaggatcaatccttgcatccctgagcacatttcagcagatgtggatctcaagggctgagtatgaggagtctggtccagctattgtccacagg

SEQ ID NO: 19817 - DNA, 140 bp, Zea mays
gacccgtacaagcaccgcccgtcgagcgccttcaacgccccgtactggactaccaactccggcgcccccgtgtggaacaacgacagctccctcaccgtcggcgcacgaggtcccatcctgctggaggactaccacctggt

SEQ ID NO: 19818 - DNA, 172 bp, Zea mays
agagctaagctaagccgagctaagaagcacagcaagtctcaccagactagcggctagcgcgagaatggccaaggacatcgaggccgcggcggcgcacgagggcaaggactactcggacccgcccccggcgccgctggtggacgcggaggagctgaccaagtggtcgctgtac

SEQ ID NO: 19819 - DNA, 170 bp, Zea mays
gcaatcgcaagcgagcagaatggcgaggtccagtggtagtagaccagtggccctcgtgctgctggcgctgtgcccgccgccctctcgtcggccacggtgaccgtgaatgagcccatcgccaatggcctctcctggagcttctacgacgtttcctgcccgtcggtggaggg

SEQ ID NO: 19820 - DNA, 176 bp, Zea mays
agagaatcctaccaaacctagctaccaactcgatcgtcgtcatcacgctcgaccgcacaactgcaccaaggggggaggagacctaaaaactactacatcttttatagctacatctctagctaaagatcgagagggtaaataaggacgagcgggcgcgagctagaagagcagctgca

SEQ ID NO: 19821 - DNA, 116 bp, Zea mays
cagaagagcggcggcgcgggcggacaaggagcaggcggaggaggagttgtgccaagccacaatgggtatctcgcgtgactcgctgcacaagcgccgagccaccggtggaaagcaga

SEQ ID NO: 19822 - DNA, 121 bp, Zea mays
ggaggctgcagccccggtttcgcaagccgcgccgtggtttgcttgcccacaggcggccaaaccgcaccctccttcccgtcgtttcccatctcttcctcctttagagctaccactatataaa

SEQ ID NO: 19823 - DNA, 113 bp, Zea mays
ctcacgcgtccgcccacgcgtccgcccacgcgtccgctctctccagtctccaccggcagcgctaatcgtaatagccatgggctccatcgccggcgacgtggccgcggtggtgg

SEQ ID NO: 19824 - DNA, 115 bp, Zea mays
cccacgcgtccgggaggacatccttaaatggggtgttccaaacaagattgacatgattgccttgtcatttgttcggaagggttcggatcttgtggaggttaggaaggtacttggt

SEQ ID NO: 19825 - DNA, 158 bp, Zea mays
gtcaagcgtccgggacgcgtggttcttggtgagggacagaacaagcttgattacgtgcttgctctcactgttgagaacttcctccagcgccgactccagaccatcgtcttcaagaatggcatggccaagtccatccaccatgctcgtgtcctgatcag

SEQ ID NO: 19826 - DNA, 138 bp, Zea mays
cctgactaccgaggtgaagtctgttgagatgcaccacgaggcacttcaggaggctcttccgggtgacaatgttggcttcaacgtgaagaatgttgctgtcaaggatctcaagcgtgggtttgtggcctccaactccaa

SEQ ID NO: 19827 - DNA, 163 bp, Zea mays
gcgccagcaagtcttgcggtcgcgaagagcaacgcaacaagatggtgaagctcgcattcggaagcgtcggcgactccttcagcgtcacctccatcaaggcctacgtggcggagttcatcgccaccctcctcttcgtcttcgccggcgtgggttccgcaatcgc

SEQ ID NO: 19828 - DNA, 255 bp, Zea mays
aacagaagagcggcggcgcggacggacaaggagcaggcggaagaggagttgtgccaaggcacaatgggtatctcgcgtgactcgatgcacaagcgccgagccaccggtggaaagcagaaggcctggaggaagaagcgaaagtatgagcttggtcgccagccagccaacaccaagttgtcaagcaataagacagttaggagggtccgtgttcgtggaggtaatgtgaaatggagggctcttcgccttgatactggt

SEQ ID NO: 19829 - DNA, 218 bp, Zea mays
ctagggtttttgattttagccgccgccgctgctcatctcacatccctcgagaagacgcctgctcctcgccgatcgatacgatggccgtcttctccgacctccacaccgccgacggcctcaagtccctcgaggctcacctcgccggcaaaacctatgtgtctggtgactccattactaaggatgacattaaggtcttcgccgcggtgccgtcgaagcct

SEQ ID NO: 19830 - DNA, 258 bp, Zea mays
attggatttgctgaagaatgctgagagtaacgctgatgtgaaaggcttggacgtggacaacctctatgtttcacacatccaggtgaaccaagcccagaagcagaggcgccgcacctaccgtgctcacggacgcattaacccttacatgtcctccccttgccacattgagctgattctgtcagagaaggaagagcctgtgaagaaagaggctgacaacattgtcgcggcaaggaaccattaaagtatgttaccctgctg

SEQ ID NO: 19831 - DNA, 245 bp, Zea mays
tcttgaggcactccgacccaagcttcagcctacgcaacagaatgcccgcgcccgccgaacttcatatgcgtctgcggacagtgacgacactttgaatctgtcccccgaggatctggtcccgcaaggagaacccagccagcagggagaaccagtcgaggacaagaacaaggaataaacacatgcccagcatagctactgtactgtaccccttttcatacacaagatgccattttccgcggtcgcac

SEQ ID NO: 19832 - DNA, 260 bp, Zea mays
cccacgcgtccgcaacacagcacaggcagctcgagagagagagagagagaaagatgtcgtggttcgggcaccaccaccacaaccagccggctcccccggcgtcgggccccaaccaggtgttcaagatcttctgccgcgccaacgagaactactgcctggccgtccgcgacggcgccgtcgtgctggccccggtcaaccccaaggacgaccaccagcactggtacaaggacatgcgcttcagcacccgggtcaaggacgag

SEQ ID NO: 19833 - DNA, 261 bp, Zea mays
ggtgaagtcattccctagggatgaccccaagaagccttgccatctcactgccttccttggctacaaggctggcatgactcacattgtccgtgaggttgagaagccaggatccaaactccataagaaggaaacttgtgaggctgttaccatcattgaaacccctcctcttgtcattgttgggctcgtggcatatgtgaagactcctcgtggcctccgcacactcaactctgtttgggcccaacatcttagcgaagaagtgag

SEQ ID NO: 19834 - DNA, 262 bp, Zea mays
gaatcccgagcacaggccgccgctcgctcgctcgctgcagctacgcacgcacgcgcctgctcctccccttagcttccacaaggctcgactcggccggcggcgatggcgcggaagaagatccgggagtacgactccaagcgcctcctccgggagcacctcaagcgcctcgccggcatcgacctccagatcctctccgcgcaggtcacacagtcaacggatttcactgagcttgcaaaccaggagccgtggctctcatctatga

SEQ ID NO: 19835 - DNA, 253 bp, Zea mays
ctccagctgaaggccccagttatcgtggtggggtgcaagctggacctgagggacgaacaacaagttagccttgagcaggttatggcgcccatcatgcagtccttccgcgagattgagacctgcattgagtgctccgctcttcgccagatacaggtgcctgaggttttctactatgcccagaaggcagtacttcaccctactgcccccctttttgatcaagaattacaatctctgaagcctcgatgtgtgagag

SEQ ID NO: 19836 - DNA, 208 bp, Zea mays
cccacgcgtccgcccacgcgtccgcccacgcgtccgcgccgaccccaacagggtggcgcaggacgccgtgatcgcgttcaagacggcgctctggttctggatgaacaacgtgcaccgtgtgatgccgcagggcttcggcgccaccatcagggccatcaacggcgccctcgagtgcaacgggaacaaccccgtccagatgaacgcgcgc

SEQ ID NO: 19837 - DNA, 257 bp, Zea mays
caacagcttgatggaacctccaatgagtggggctggtgcaaacagaagcttggagcaaatgccatccttgcggtttcacttgctgtgtgcaaagctggagctatggtgaagaagattcctctttaccagcacatcgcaaatcttgctgggaacaaaactctggtgctccctgtacctgcctttaatgtgattaatggagggtcacatgctggaaacaagcttgccatgcaggagttcatgatcctcccaactggtgc

SEQ ID NO: 19838 - DNA, 257 bp, Zea mays
gcgaagccgagccttcccttccctccaatcgatcacccgcttcgatccgctagctagctagcagcgcgatggcttccctcaccgtgtccacgaagaccgcggcggccggcggcaacaagcagcgcgagggcgcggaggtcatcacgggcgcggaggcctgcttcgcgcactccaagcagatgctccaggcgctgggcttcccgggcggcgtgatgccgctgcgggggctggaggagtgcggctgggtgcgcgagacc

SEQ ID NO: 19839 - DNA, 255 bp, Zea mays
ccctcactcccgttccatttccccatctcccagatccaattcgcgagttctccctcctctgccgccatggcgctctctgtggagaagacctcgtctggacgggagtacaaggtcaaggatctctcgcaggcggacttcggccgcctcgagattgagctggccgaggtcgaaatgcccggcctcatggcgtgccgcgccgagttcggcccgtccaagcccttcgccggcgctaggatctcgggggctctccacatg

SEQ ID NO: 19840 - DNA, 226 bp, Zea mays
cccgcctccactcccccctcccaggtgctgcccaggtaagtcggcggcggcgatgacaacgcgcttcaagaagaaccgcaagaagcgcggccacgtgtccgccgggcacggccgcatcggcaagcacaggaagcacccgggaggtcgcggtaacgccggtggcatgcaccaccaccgtatcctcttcgacaagtaccatccgggctacttcggcaaggttggcatg

SEQ ID NO: 19841 - DNA, 222 bp, Zea mays
cggacgcgtgggctctactgttgttaagggcaccccaggctatctcgatccagaatatttcctgacccataaactgacggaaagaagtgacgtgtatagcctaggtgttgtttttcttgaactattgactgggatgaagccaatccagcatggtaaaaacattgttagagaggtaaacatcgcttaccagtcaggcgacgtttccgggatcataaacagccg

SEQ ID NO: 19842 - DNA, 254 bp, Zea mays
ctatcatcgtgtcaagatgatagacaataaatcccttcatgagaccttttcttcatttggtaccattctctcatgtaaggtagccatggatgaaggaggccaatccaaaggctttggctttgttcagtatgaaaaagacgtagcagcacagaacgctataaaaagtcctaacggaatgcttataaatgatacacctgtttttgttggaccttttcttcgcaaccaagaaagggctcactcttttgacaagacaa

SEQ ID NO: 19843 - DNA, 254 bp, Zea mays
ggcatccaaacatagttaaatttaaggaggttgtgctaactcccacacatttggccatagttatggaatatgctgctggtggtgagctatttgaaaggatctgtaatgctggaagatttagtgaggatgaggcgagatttttcttccaacaactgatttcaggagttagttattgccactcaatgcaaatatgccatagagatttgaaactagaaaacactctcctggatgatagtatagcacctcggctaaag

SEQ ID NO: 19844 - DNA, 106 bp, Zea mays
ggcgcttcggtcggacccctcgtcaagctcgccgtggaatttgacccaagcatcctggtgacggcgttcgtggggactgccatcgcgttcgcgtgcttctccggcg

SEQ ID NO: 19845 - DNA, 271 bp, Zea mays
cgggaacgaggaaggaaggttccagcgaccgcggtcgtggagtaggactgtaggatgaaagcgcgatggggaagaagcggcagcttatctgcctcgcagccgccgtcgccgccgcggccatcctcctgacagcgtcggccaagaagtccagcgacgtcaccgagcttcagatcggcgtcaagtacaaacctgagtcatgtatcctgcaagcacacaaaggagacaaaattaaggttcattatcgtggggcactcactgacggatcagtttt

SEQ ID NO: 19846 - DNA, 135 bp, Zea mays
cccacgcgtccgaaacccctcatgtgcataaagacgcatttgttgctccaagtgcatcccttattggcgatgttcaagtcgggtcaggagcttccatttggtatgggtgcgtcttaagaggggatgcaaacatca

SEQ ID NO: 19847 - DNA, 250 bp, Zea mays
agcggctgggcctcgccaaggcgatcggcgtgagctacttcaccaccaggcacctcgacggggtcctggccgtcgccacggtcccgcccgcggtgaaccaggtggagctgaacccggcgtggcagcagcggacgctcagggcgtactgcgccgacaggggcatccacgtcgcggcctactcgccgctgggagggcagaactgggacgggcagggcagcgccgtgctggactccgaggtgctcgcagcgat

SEQ ID NO: 19848 - DNA, 262 bp, Zea mays
cgtgtactggggcccctggcagagggcccgggccacctggtacggccagcccaacggcgccggccccgacgacaacggtggcgcgtgcggattcaagcacaccaaccagtaccccttcatgtccatgggctcctgcggcaaccagccattgttcaaggacggcaagggctgcggctcctgctacaagattcggtgcaggaaggacccgtcctgctccgggcggacggagacggtgatcatcaccgacatgaactactacccg

SEQ ID NO: 19849 - DNA, 267 bp, Zea mays
accggatcccctacatctacacggtgtgccggcaggagagcaccgcgctcggagacgactcgcccaagcggaggtctatcgtgctctcggagttcgtcggttgctccccgtccctgagcggcgcgatccgcgtcaacccgtggagcgtggagtccgtggcggaggccatgaacgccgcgctgcggatgccggaggccgagcagcggctgcggcacgagaagcactacaagtacgtgagcatccacgacgtcgcctactgggcgcggt

SEQ ID NO: 19850 - DNA, 244 bp, Zea mays
attgaagtttctggttcatcagcaaaggatgttgctaagcagctcaaggaacaacaaatggtgatgccaggccatcgtgagtcgaacttgcagaaggaacttaaccgatacatccccactgccgctgcatttggtggtgtatgcattggcgcattgaccgtcctggctgatttcatgggtgcgattggttcaggaactggtatattgctcgctgtgacaatcatataccaatacttcgaaacct

SEQ ID NO: 19851 - DNA, 254 bp, Zea mays
gcgaaggcgaccctccctccttcgctccttccgcgccgcctcccggccgtcgccgccatggtgaagtactcgcaggagccgggcaaccctaccaagtcggctaaggccatgggcagggatctgagggtccacttcaagaacacaagggagacagcctttgcgcttcgcaagttgtctttgaccaaggctaagcgataccttgacgatgttattgctcacaagcaggcaattcccttccggagatactgtggggg

SEQ ID NO: 19852 - DNA, 256 bp, Zea mays
tggaaataacgaagaccgtctccggcgtcctatactttggctacatgctcattgcctcctacgccttctttgtgctcaccggcaccattggcttctacgcctgcttctggttcaccaggctcatctactcttcggtcaagatcgactagagagtaacagctgcaacactgctccgtgggttttcgaaatcagagatcaagagagaatactaggtaacgaaccatcagaatttgagagggtagtgtgcgttattttt

SEQ ID NO: 19853 - DNA, 255 bp, Zea mays
tctagggccaaggggtaattctctaaagcgagttgaatcatcaactggctgccgtgtttttattagagggaagggttccgtcaaagatacagaaaaggaggacaaacttaaaggaaaacctgggtatgaacatctgaacgagccactgcatatattaatcgaggctgagttaccagcgaacattgttgatacaagactgagacaggcacaagaagtcatggaggaattgctaaagccagtggacgagtcacaaga

SEQ ID NO: 19854 - DNA, 254 bp, Zea mays
ggacaaggatgatgagaaaatagtactgtgcgatggctgcgacgaggcttatcacatctactgcatggacccgccgtgcgagtctgtcccgagaggtaaatggttctgcacgcggtgtagcgcgcggaggtcagtgcaagggatgcagaggtatgagaagtcgatcctggagaaagtcaagcgtgctcctggtgccaatgggccgaagtgcaggcatctgctggtccagaaaaataggcagcagtgtggatgat

SEQ ID NO: 19855 - DNA, 171 bp, Zea mays
ctcaaggagtggaacggcgggtcgatgtgcttgcgctggttgatggccacgagcaccttgttgagctcctcgccgggggatctggtcctctcgccggtcaggtactcggtgccgacctcctcgcgcacgagccggtacagcgggtaggagcggcactccctgatcctgttg

SEQ ID NO: 19856 - DNA, 240 bp, Zea mays
ctttcgtcctacgctccagtcatttctgctgagaaggcctaccacgagcagctgtccgtggccgaaatcaccaacagcgccttcgagccatcctccatgatggccaagtgcgacccccgccatggcaagtacatggcatgctgcctcatgtaccgtggtgatgtggttcccaaggacgtgaacgctgctgtggccacaatcaagaccaagcgcaccatccagttcgtggactggtgcccg

SEQ ID NO: 19857 - DNA, 241 bp, Zea mays
atagctgacaacgctggcggtattgttgagatgtgccagcagcctgaaagtgtgagggaaatcacagatgttctagatgctgtgggcaacacaactaaagctactacgaaaggatttgccatagggtcagcagctctgagcttcctctcctcctgtttagtgcatatatggctgaagtatcttcttctgctcaattgccattcaaggaggttgatatagcagtcccagagatttttgatgg

SEQ ID NO: 19858 - DNA, 241 bp, Zea mays
ccccgctccgcctccactcctcgcgccgctgccgcatctcctctacaggtaagaaggagagaaagagggcgaaatggtgaagcacaacaacgtcatccccaacgggcacttcaagaagcactggcagaactatgtcaagacatggttcaaccagcccgcccgcaagcagaggcgccgcatcgcacgtcaaaagaaggctgtgaagatattcccacgaccaactgctggccctcttcgtccc

SEQ ID NO: 19859 - DNA, 237 bp, Zea mays
ccacgcgtccggcaagcatgggttgtctggagcatgtgcaatttggagaacaagattatatcagtagagagaatcctgcaatacataagcattcctgcagagccccctctttccattccagaagataggctggctctggctcagaactggccatccgaagagagattcagctccttgacctccatgtaaaatatgccccgcagctgccatttgttctgaagggacttacagtcacct

SEQ ID NO: 19860 - DNA, 235 bp, Zea mays
agcgattgcaattggaagaacatttgcagccctcaaggattaccagatagatgggaacaaagaaatgatggctctagggaccatgaacattgttggttcactgacttcttgctacgtagccacaggttctttctcgcggtcagcagttaattacatggctggctgcaaaacagcagtgtcaaacgttgttatgtcaattgtcgtaatgcttactttgctactgatcaccccattg

SEQ ID NO: 19861 - DNA, 236 bp, Zea mays
ccacgcgtccggctcgttcgatctgtgcagcagatctgaggtcccgggcgaccgtgaagcagcttcaatcgtcggcatggcgctcgtattgcatagtggggctggaaacaagaatgccttcaaagcacttattgctgcagaatacagtgggatcaaggttgagttgaccaaggattttgagatgggtgtctccaacaagacccctgagtttcttaagatgaacccccttgggaagg

SEQ ID NO: 19862 - DNA, 236 bp, Zea mays
cccacgcgtccgagcgagcgagggacccggggcggaagaagagagagaagacgtctctctcctctcggcgtccccgttccccaacctctcgtctgctgcctgcctgcctgcctgcctgcaaaaaggagtttgtcatggcgtctaagcgcatcctcaaggagctgaaggacctgcagaaagacccccccacatcatgcagtgcaggtcctgctggtgaggacatgtttcattggcaa

SEQ ID NO: 19863 - DNA, 235 bp, Zea mays
gtgaagactctacgatcctcaagtcacatggtggaatcagtggaatatctaggaaaatcaaggcatcattggatgatggcatcaaggaaactgaaatagcaaccagacagaagctgtatggcagcaacaagcacaccgagaaacctcctagaagcttctggacgtttgtctgggacgcgttgcatgacctgacgttgattattctaatcgtttgtgccgttgtttctctaatggg

SEQ ID NO: 19864 - DNA, 239 bp, Zea mays
cccacgcgtccgttgacgagaatgtggcgagggagatcataaaccaccgctcgttgcggcaccccaacatcatccgcttcaaggaggtcgtgctcacgcccacgcacctcgctatcgtcatggagtacgccgccggcggcgagcttttcgacaggatctgcagcgccgggaggttcagcgaggacgaggcgaggtatttcttccagcagcttatctgcggtgtcagctactgccacttc

SEQ ID NO: 19865 - DNA, 231 bp, Zea mays
aggacgtagccgatgacaaggccgtcatccccgcgaccgacccgccgccgccgccgccgccggccgacgactccaaggccctggccatcgtcgagaaagttgcagatgaacctgctcccgagaagcctgcccctgcgaacaagggggctccaatgacagggatctcgctcttgcaagggtggaaacagagaagaggaactctttgatcaaagcttgggaagagaatgagaa

SEQ ID NO: 19866 - DNA, 232 bp, Zea mays
ctcggtgcggcgcgtcgttcggacacggagatacagcggcgattccggcgatggagtacgtgaaccccctcaccggcttccgcgtcgacggccgccgccccaacgagatgcggcaactcaagggcgaggtcggcgtcgttgtgcgcgcagacgggtcggcgctgtttgagatgggcaacaccagagtcatcgccgccgtctacggcccgcgagaggttcagaacaaaggtca

SEQ ID NO: 19867 - DNA, 230 bp, Zea mays
aaacaatcaaccagcaacactcttctcgtataacataatacagcgaaggtaactcacatggcaacttccatgggttgtctcgtcttgctctgccttgtttcttctctccttcccagtgccgtccttggccacccatggggtggcttgttcccacagttctatgaccattcgtgccccaaggcgaaggagattgtgcagtccattgtggcacaggctgtggccaaggagac

SEQ ID NO: 19868 - DNA, 232 bp, Zea mays
attccccctgtcccgctaggattcccccgaaaccctcccccaaaaccccagagcggagaagagcgcaagatgttcggcttcgggcaccacggccaccacggccagaacccgccggcgcacggcggcgtgcaccagcccaccttcaagatcttctgcaaggccgacgaggggtactgcctcaccgtccgcgacggcaacgtggtgctggcccccgccaacccgcgcgacgagc

SEQ ID NO: 19869 - DNA, 232 bp, Zea mays
ccacgcgtccgcccacgcgtccggcaacgtaggcctcatcttcaccaagggagacctcaaggaggtgcgcgaggaggtcgccaagtacaaggtgggggctcctgctcgtgttggtctggttgctccagttgatgttgttgtgccccctggcaacactgggctggatccgtcccagacctttttcttccaggtgcttaacatccccaccaagattaacaagggtaccgtggaa

SEQ ID NO: 19870 - DNA, 231 bp, Zea mays
gaagctctcctgttgaagagaaaatcagaagaagttctgttctacttaaacgggaggtgtatttacttagtgggaatgatgggttctggaaaaagtactgtggggaagatcatgtctgaagtcttgggttattcgttctttgatagtgacaaattagtggagcaagctgttggaatgccttcagttgctcaaatattcaaagttcacagtgaagccttctttcgggataat

SEQ ID NO: 19871 - DNA, 232 bp, Zea mays
cgcagagaatccccaagcaaacaaacagggtagaggtagagggagaggagaggagaggagaggagaggagaggttgggtctgggacaccatggctccgatgaagctgtacggggcggtgatgtcgtggaacgtgacgaggtgcgcaacggcgctggaggaggctggctccgactacgagatcgtgcccatcaacttcgccaccgccgagcacaagagccccgagcacctcgt

SEQ ID NO: 19872 - DNA, 232 bp, Zea mays
cccacgcgtccggccaagatccaggacaaggaagggatcccgccggaccagcagcggctgatctttgccgggaagcagctggaggatggccgcacccttgcggactataacatccaaaaggagtctacgctccacctcgtgcttaggctccgcggtggaatcattgagccctctctgcaggcgctcgctcgcaagtacaaccaggacaagatgatctgccgcaaatgctatg

SEQ ID NO: 19873 - DNA, 244 bp, Zea mays
acgcgctctgctacctccacaccagctccgtaccgccgatcgtccactgcgacgtcaagcccagcaacgttctcctcggcgaggacatgagggcggtggtgggcgacttgggccttgcgaagctgctacatgagtccgggagccatgacacttgcaacgacacaagcacagttggcttgagaggcacggttgggtatatcccgccagagtacggcacgacagggaaggtgtccacgcacggcga

SEQ ID NO: 19874 - DNA, 242 bp, Zea mays
ctgttccagaactggctttgccatctcttctaaagccacatcagcaggaccactggtttcttcgaattgcaagaaggttgttgtgagggcaatgtcgcagagaggtgcccaaggacttcccattgatctcacaggtaaaagagcatttatagctggagttgctgatgataatggttatggttgggcaattgctaaggctcttgctgctgctggtgctgagattcttgttggtacatgggtgc

SEQ ID NO: 19875 - DNA, 242 bp, Zea mays
accgggatagtagttgaatccggggagtgggctattgttgggggcaccggtcagtttgccatggcaaacggtgtcatctccaagaagttacatgggaagaccagcgaaggggacatcatacaactcaccatccatgctttctgtccggtgctcggaccgacaaagcgctcggccacaaaagttggaccgtggggtgggagcggcgggtctccgatggacatcacggcagaccccagcgtctg

SEQ ID NO: 19876 - DNA, 234 bp, Zea mays
cagcccccaactacccccagcctcggaaggaaccttccagaagcgcaagactctaaggccgtcgccttcccattcttcctcgccgcgggggtcgcctgagatcacataaacaatggtgaaggctgttgctgtgcttggtagcagcgatggtgtcaagggcaccatctttttcacccaagagggagatggccctaccgctgtcaccggaagtgtctctggcctcaagcctggcct

SEQ ID NO: 19877 - DNA, 187 bp, Zea mays
ctacccggcgctcgcgcggctttctttcccaactccgacgaaggctagctacaccacctggtgcgggctcgtctccatcgcccgccacccgctccgtcgtcgtcgtccccgccgcgccgatcccgaatcgaatggggagcctggcgtccgagaagaaggtagtcgggtgggccgccaaggacgccac

SEQ ID NO: 19878 - DNA, 198 bp, Zea mays
gtcgttgtcttcccttttttttttcctcagccacctctctccctcgctagagcaaaaaccttgccacgaatcgccgacactccaacccggaagaggcaacgaggtgactccgcgcctcggtcatgggtgacagccaatactccttctcgcttaccactttcagcccgtcgggaaagcttgtgcagatagagcacgcgc

SEQ ID NO: 19879 - DNA, 235 bp, Zea mays
cggacgcgtggctggaagaatctgggactaaggtgagagtgttaatcaagggaaccattgttacagcttcacttaatggccggctatctgtggtacgaatatatctacaagctggacaaacatacatataacaagtaccatccctacacgtcgtggattcctataactatttatgtctgcctacgcaattgcacccaacaattgaggagtacccatttgtctctttttgtttggc

SEQ ID NO: 19880 - DNA, 237 bp, Zea mays
ggaccgtggctggggactctggtgcggcacagggtcaaaggactacgtacacgtgcgcatccagcagcgtaatggtcgcaagagcctgactaccgtccagggattgaagaaggagttcagctacagcaagatcctcaaagatctcaagaaagagttctgctgcaatggtacagtggtccaggacccagaacttggacaggtcattcagctccagggtgatcagaggaagaacgtctc

SEQ ID NO: 19881 - DNA, 240 bp, Zea mays
agcccccaaggccccaactacccccagtctcggaagagaactatccagaagcgcaagactccaaagccgtcgccttcctatccatcccttcctcgccgcgggggtcgcctgagatcacataaacaatggtgaaggctgttgctgtgcttggtagcagcgatggtgtcaagggcaccatcttcttcacccaagagggagatggccctaccactgtcaccggaagtgtctctggcctcaagc

SEQ ID NO: 19882 - DNA, 238 bp, Zea mays
gcattcgaagctgggcgaaaaggcaaaatcagagttaacaccatatcagcaggccctcttgggagccgagctgctaaggcaattggatttattgagaagatgatagagtactcatatgttaatgcaccattgcagaaggagctgttggctgatgaggtggggaacacagctgcattcctggtttcttcattggcttctgccatcaccggctcgactgtttatgttgacaatgggctca

SEQ ID NO: 19883 - DNA, 164 bp, Zea mays
cgcctcgccgctgttccccgcaacctatcgacccaatctcgtccgacccggcgcgtcgtcccctccagatctccgtcgccctctccaggtagcagaaactgttctgctgcagtctgacaaagtggagggcttaggagcttctgcttcttttatgtctgaacaat

SEQ ID NO: 19884 - DNA, 160 bp, Zea mays
gctgaagaatgctgagagtaacgctgatgtgaaaggcttggacgtggacaacctctatgtttcacacatccaggtgaaccaagcccagaagcagaggcgccgcacctaccgtgctcacggacgcattaacccttacatgtcctccccttgccacattgag

SEQ ID NO: 19885 - DNA, 202 bp, Zea mays
ggagaatatgaaccagaggagcacccagaacctgacactgattacatccgggctcaagaggctaggaggtttatgatctatgttcataccaaaatgatgatagtggacgacgagtacatcatcattgggtccgccaacatcaaccagaggtccatggacggtgccagggactccgagatcgccatgggcgcgtaccagccgt

SEQ ID NO: 19886 - DNA, 236 bp, Zea mays
gtcgccgccttcaacagccagctccagggcacgcaggccatcgccatgacgctcttcggcgccgtgccgcccgtgccctccgacatcctcgccaaggccttccgcatcagcagcggcgaggtggaccacatcaaggccaacttcgcgcccaagtagagatccaacgtctgcattcccttgattttctcaataataaatccccgcggtgtgcagttcgatttgttcgtcttcgcttg

SEQ ID NO: 19887 - DNA, 231 bp, Zea mays
gccatatctgttcctctatcactgtatatagagatctacataatggacgagaggaggactattttgatggaccgttacgaaatcgggaggcagttaggccaaggaaacttcgccaaggtatactttgctcggaacctgaccgacgggcagtccgttgcgataaagatgatcgataaggacaagatcacgagggttgggctaatagtgcagataaagagggagatctctata

SEQ ID NO: 19888 - DNA, 233 bp, Zea mays
ctcaaacacaagcctcagatctcagtcacctgcgccgccgcttcgttcgtgtggaggggagaagagaggaaatggcggcgaccgagggcgtgctcctggggatgggcaaccccctcctcgacatctccgccgtcgtcgatgacgccttcctgacaaagtatgacatcaagctgaacaatgctattctcgctgaggagaagcacttgcctatgtatgacgagttggctagcaag

SEQ ID NO: 19889 - DNA, 234 bp, Zea mays
  unsure (1)..(234): unsure at all n locations
ctacgcgtccgaatgagcacgtcatcaagcccgtcatcccggagaggtacctggacgacaagaccatctcccccctggagccgtcntggcgcttcgtcatcggcgggccccacggggacgccggcctcaccggccgcaagatcatcatcgacacctacggcggctggggagcccacggcgggggcgccttctccggcaaggaccccaccaaggtggaccgcatcggggcctact

SEQ ID NO: 19890 - DNA, 233 bp, Zea mays
cggacgcgtggtgccgcctcaccgcctctctcaatctgataccgcagatccgtcgtccggtgagtggaagcacgcacgaacccatggcctccggcgagcttgcctgcacctacgccgctctcatcctcagcgacgatggcatcgccatcaccgccgagaagatcgccacgatcgtgaaggcggccaacatcaaggtcgagtcctactggccggccctcttcgccaagctcctg

SEQ ID NO: 19891 - DNA, 231 bp, Zea mays
tgacgacgaagatgatgatatgcctgaccttgagtctcttaattatgatgaccttgatagtgtctcaaagttgcaaaagacacaacgctataatgatataatgcaaaaagttgaaaatgcacttcagaaaggtactgatttctctaatcaaggttccatcctggaggaggatccagagtaccagcttattgttgactgcaatgctttaccagtagatattgagaatgaaat

SEQ ID NO: 19892 - DNA, 168 bp, Zea mays
cccacgcgtccgcccacgcgtccgcccacgcgtccgcacagacataagaccctcgccggacgctcgctctcgccggggacaactcaatcacgaggccaggatggcccgctacgatcgcgcgatcaccgtgttctcacccgacggccacctcttccaggtcgattacgc

SEQ ID NO: 19893 - DNA, 249 bp, Zea mays
gggcgaaatggtgaagcacaacaacgttatccccaacgggcacttcaagaagcactggcagaactatgtcaagacatggttcaaccagcccgcgcgcaagcagaggcgccgcatcgctcgtcaaaagaaggctgtgaagatattcccacggccaactgctggccctcttcgccccattgtgcaatgccagactctcaagtacaacatgaagtcgagggctgggagaggatttacccttgaggagctgaa

SEQ ID NO: 19894 - DNA, 241 bp, Zea mays
gactgacgaggcagatcgagcaactgcacaacgaccactgcgcgcacgtcgaggagctcgtctacctcaagtgggtcaacgcctgcctccgccatgagctccgtgaccatgacggccagcccaccgccgagcaacaaggccccagcgccggctccagatacctgtcggccctggagctgagcaagagcatgagcttccggtccagcgataggggcaagcagctcatgctgaggtacggtag

SEQ ID NO: 19895 - DNA, 238 bp, Zea mays
ccacgcgtccgcctcgtgtggccgtcgtctcccgttcggaacgccaagccccccctccggcgaaatggcccccaagcgaggtggcagggcgccggtgccggccaagaagaagacggataaagtgacgaaccctctattcgagaagaggccgaagcagttcggcatcggcggcgcgttgccgcccaagaaggacctgcaccggttcgtcaagtggcccaaggtcgtgcgtatccagcgg

SEQ ID NO: 19896 - DNA, 86 bp, Zea mays
aggccgggtacgtccggatggcgcgcaacgtcagggtgagggccggcaagtgcggcatcgccatggagccgctgtacccggtgaag

SEQ ID NO: 19897 - DNA, 234 bp, Zea mays
cccacgcgtccgcccacgcgtccgacaacatccagaaggagagcaccctccaccttgtgctccgactcaggggaggcatgcagatcttcgtgaagaccctgaccggcaagactatcaccctcgaggtggagtcctccgacaccattgacaacgtcaaggccaagatccaggacaaggagggcatccctccagaccagcagcggctcatctttgctgggaagcagcttgaggacg

SEQ ID NO: 19898 - DNA, 236 bp, Zea mays
gagaaactccccggctcgaggagatcgtgacattgagaggacgatgggagggcgcgcgctcctcctcctcctcctggtctcggcgttggtctttcagatccacgcctccgacccgctgctgtacgagccgttcgatgaggactttgaggggagatggatcgtctccaagaaggatgaataccaaggtgtgtggaggcatgccaagagtgatggtcatgaggactatggcctccttg

SEQ ID NO: 19899 - DNA, 242 bp, Zea mays
gctgctctcgtccctagaaataaagcagctcctccgcggggcggcgaactactacccatcgccaaaaccctagccccgatccggtcgaggagcactacttcttggcatggcgggcacccctagccaggcaagcctcctgctccagaagcagctcaaggatcttgcgaagaaccccgtggatgggttctccgctaggcttgtagacgatagcaacgtcttcgagtggcaggtcaccatcatcg

SEQ ID NO: 19900 - DNA, 233 bp, Zea mays
cccgcagctcccatcctctcgctcgccaggagaagcagccgccgttgctgctgccgcgtccacagaatggggggtttcgtgaagactcataagaccaatgcgtatttcaaacgtttccaagtgaaattcaagagaaggcgggctggcaagacagactacagggccaggataaggctgattaaccaagacaaaaacaagtacaacacacccaaatacagatttgttgtgcgatt

SEQ ID NO: 19901 - DNA, 230 bp, Zea mays
gcccaggtaagtcggcggcggcgatgacaacgcgcttcaagaagaaccgcaagaagcgcggccacgtgtccgccgggcacggccgcatcggcaagcacaggaagcacccgggaggtcgcggtaacccggtggcatgcaccaccaccgtatcctcttcgacaagtaccatccgggctacttcggcaaggttggcatgcgttacttccataagctccgcaacaagttctact

SEQ ID NO: 19902 - DNA, 226 bp, Zea mays
cccacgcgtccgccgccgctcaaggagttctcgctcgcggactgcgcgccgccacggccggcttcgcggcggggaacatcgtgtcggagagcggcgagaaggcgcccaatttcgtgtacaggggccgcctcgacgccggccgccgcgcgatcgccgtcaagaagttcaccaagatggcgtggcccgatcccaagcagttcgcggaggaggccaagggcgtcgggaa

SEQ ID NO: 19903 - DNA, 231 bp, Zea mays
ggtcaatggacaagaacaggccaaacggagaacacaacctggttgaatgggcacgcccttatctgggagaaagacgcagattctataagcttgtagaccctcgtttggatgggaacttctccataaaaggcgcccagaagacggctcagctggcccatgcctgcctcagccgtgaccccaaggctaggcctctgatgagccaggtggtggaggtgctgaagcctctccaga

SEQ ID NO: 19904 - DNA, 232 bp, Zea mays
attggatggtgcggaaatgcttgcctgtggcctggcaactcattttgtcccgtcaaagaggttgccattgcttgaggaatcgcttaaaaagctggacacgtccagtacttttgctgtgtcgggtattatcgaccagttttcacagaggccattagtgaaagatagcagctctttaaataggatggaaaccatcaacaaatgcttctccaaaaggacagttgaagaaatcata

SEQ ID NO: 19905 - DNA, 237 bp, Zea mays
gcactacccggcgctcgcgcggctttctttcccaactccgacgaaggctagctacaccaccttgtgcgggctcgtctccatcgcccgccacccgctccgtcgtcgtcgtccccgccgcgccgatcccgaatcgaatggggagcctggcgtccgagaggaaggtggtcgggtgggccgccagggacgccaccggacacctctccccctactcctacaccctcaggaacacaggccctg

SEQ ID NO: 19906 - DNA, 152 bp, Zea mays
aaaccctacactcccggcggcggcggcggcggcgcacagcggcagcagcatccgaagatggtgaagttcctcaagcccggcaaggccgttatcctcctccagggccgcttcgccggcaggaaggcagttatcgtgcgcgtgttcgaggaggg

SEQ ID NO: 19907 - DNA, 231 bp, Zea mays
cggacgcgtggagagtgtgtcgttggaagagagacgacggcggccatggcgacctccttccaggggccgaccaccaagtgcaccgcctgcgacaagacggtgtaccttgtggacaagctcaccgccgacaaccgcatctaccacaaggcctgcttccgctgccaccactgcaagggcaccctcaagctcgccaactacaactccttcgagggagtgctctactgcaggcct

SEQ ID NO: 19908 - DNA, 228 bp, Zea mays
gcatctttgggaagagagcggacagttagtgtcctcatagcaaatggagctgcagcaggagcactaaccgatccaacttctgagttcccttctggaagaagtccagctgatttagcttcagtaaatggacacaaggggattgctggttttctcgcagaatctgctttgacaagccatctgtcagcacttactattagggaatcaaatgatagcactgtagaagcgtgt

SEQ ID NO: 19909 - DNA, 228 bp, Zea mays
cccacgcgtccgtgatcagtttctaaaggacggggtcaacgaccgcacagacaaatacggtggcagtctggagaaccgctgccggtttgcactggaagtaactcaagccgtggtcgacgaaattggagctgacaaggtcgggataaggctgtcaccattcgctagctactcggaggcgccggactcagacccggaagctctgggcctgtacatggcgaacgcgctgaa

SEQ ID NO: 19910 - DNA, 226 bp, Zea mays
gctcaagttcatcgacacatcgtccaaatttgggcacggtcgcttccagactaccgatgagaagcagaggttctttggcaagctcaaggcgtaaggtgctgcggtgcagcgaagtcccatttctcaaaatcatcaaactgtgatacttttgtttgtaaccttgctgtaccaagttttgtagccggatggtttaggagcatggtccggtcttctatggatcgttcca

SEQ ID NO: 19911 - DNA, 226 bp, Zea mays
cccacgcgtccgccaaaagcttccatctcattctgtagttgcaatgtgcaatttcaaaacaattaaggatgctgctgatgttgccattgcaacaatgctttctgggatacaggtttcaagagtggaattgttggacgaggttcagataaaggcaataaatatggcaaatggcaaaaatttgcctgaagtgccgaccttgatgtttgaattcatagggacagaagca

SEQ ID NO: 19912 - DNA, 216 bp, Zea mays
gcatgtactaccaaggggtgaatctgggctcgtcgtccatggcaacggccatgaccaacttgatccccgccatcaccttcgtcatggcggcatcagtcggcctagagagggtggaggccaggatgccgaggagcctggccaagatcttcggcacggccgtctgcgtgagcagcgccatggccatggctttcttcaaaggcccgaagctgctcggcg

SEQ ID NO: 19913 - DNA, 234 bp, Zea mays
ggaaggcaaagagtacgacatccccaagggccacatcgtcgcgacatcgccatcctttgccaacaggctgccccacatctacaagaaccctgactcgtatgaccctgatcggttcggtcctggaagggaagaggacaaagctgcaagcgccttctcatacatctccttcggtggcggcaagcatgggtgcctcggtgagcccttcgcctaactgcagatcaaggcaatctggac

SEQ ID NO: 19914 - DNA, 248 bp, Zea mays
caccaaacacagttttagcaaagcaagttgcctccatcaatgcaacccaatgaaggacagcatatccaagcgccaggagaagactatcatgaaactggtagttgatgctgaaactgacaaagtacttggtgcatccatgtgtggaccagacgcacctgaaattatccagggcatcgctattgcggttaaatgtggagccaccaaagcagacttcgacagcactgtcggaatccacccttccgctgctg

SEQ ID NO: 19915 - DNA, 253 bp, Zea mays
gagaagatcagccagcggatgaagcttctgcaggatctcgtcccgggctgcaacaaggtactcgctcgctcgctcactcagttgatggaataccatgcgctcgctgtcactccactagtttggcgtgctcagctcagattgggatttgggggaatgtttctcgtttcaggtggtcggcaaggcggtgatgctggatgaaatcataaactacgtgcagtccttgcaacggcaagtcgagttcctgtccatgaaa

SEQ ID NO: 19916 - DNA, 251 bp, Zea mays
atcagatatcaaagaagtagccattaagttaacgatggcttccgccgacctcgcagagccatcgagcccagcaggaagaagaagagcaacgtcaagtatgcctccatctgcgccatcctcgcctccatggcctccgtcatccttggctacgatattggggtgatgagcggacggcacatgtacatcaagaaggacctgaagatcacggacgtgcagctggagatcctgatagggatcctcagcctctactc

SEQ ID NO: 19917 - DNA, 254 bp, Zea mays
tccctacaccgccgccgccgtcgcacgcagccgcatccgccatgggggcgtacaagtatgtctcggagttatggaggaggaagcaatccgacgtgatgcggttcgtgcagcgcgtgcgctagctgggagtacaggcagcagccggccatcgtccgcctcacaaggcccacccgccccgacaaggcccgccgcctcggctacaaggccaagcaggggtatgttgtttaccgtgtccgtgtcaagcgtggcggcag

SEQ ID NO: 19918 - DNA, 251 bp, Zea mays
acgcaacttgcaagctttcttctcgaattttggtgttgaaggtctcattgtgtctgccatgtgctctgctgcccagtcagtggtttctcctaaacaaagccagcacatttggcatcatttggctatgtttttccgagatgaactgttatcttggtcgtggaggcggcctctgggcattccatcagtccctgtcgctgctggaatgatcaacccatcagatttccaacagaaggtggtaaacaatgtggagc

SEQ ID NO: 19919 - DNA, 251 bp, Zea mays
gaggattcgagggtagatggatcgtctccaagaaggatgaataccaaggtgtatggaagcatgccaagagtgatgggcatgaggactatggcctccttgttagtgacaaggcaaggaaatacgccataatcaaggagcttgatgagccagttaccttaaatgatgggacagtggtcctgcagtttgaagtgagacttcagaatggccttgaatgtggaggtgcctacattaagtacatccgccctcaggat

SEQ ID NO: 19920 - DNA, 250 bp, Zea mays
tcactcgtcctcccacgcgtccggccatgcgtccgcccacgcgtccgcccacgcgtccgcccacgcgtccgctgatgtcttgagagaaaacactgaagcagttttcgcggcttgtgatgctgcccatggacgatgggctaagctactaggtgttcgtgctggattacatcccaggttaaggcttgcagaattcttgatcatctacagcataacagaagaatttatagctgctacagagaagattggaggc

SEQ ID NO: 19921 - DNA, 252 bp, Zea mays
gtcggaaggtttcgaggaactcccgggctcgaggagatcgggacgatgatgggagggcgcgctctgctgctgctcctggtctcggcgctgctcgttcagatccgcgcctctgacccgctgctgtacgaaccgttcgatgaggacttcgagggaagatggatcgtctccaagaaggatgaataccaaggtgtatggaagcatgccaagagtgatgggcatgaggactatggtctccttgttagtgacaaagca

SEQ ID NO: 19922 - DNA, 242 bp, Zea mays
cgtttgcctcttctccctcttgccggtcccgaataaagagcagcagcgcaagaggtcggtagagcgagaagaaggcaatggcggccgagagcttccttttcacctcggagtccgtgaacgaggggcaccccgacaagctgtgcgaccaggtgtcggacgccgtgcttgacgcatgcctcgcgcaggaccccgacagcaaggtggcctgcgagacctgcaccaagaccaacatggtgattgtg

SEQ ID NO: 19923 - DNA, 246 bp, Zea mays
cccacgcgtccgtggacgcgtggggttggcttctcctccccctccggttcgggttcgggttcgtgaggttctccggggttcggtttcgtgggtgagcggatcgagatggcggcgtcggatgttgagtaccgctgcttcgtcggctgcctcgcctgggccacggacgaccactccctccacaacgccttcagcacctacggcgaggtcctcgagtccaagatcatcctcgatctggagacgcagatg

SEQ ID NO: 19924 - DNA, 254 bp, Zea mays
ccgatctgccacctcgccgtctcgcacgttcctttccccaactccccagcgcctctccgcgccgcgatccagatccaggttgttcagcatgggtctggtgaaggaaggcgtcgacatggaggagggaaccctagagatcggcatggagtacaggactgtatctggtgtggccgggcctctggttatcttggataaagtaaagggcccaaagtaccaagaaatagtaaacatccgacttggagatggcccactcg

SEQ ID NO: 19925 - DNA, 255 bp, Zea mays
gtacttgttggaccagtctcgtacctgttgctctcaaagcctgccaagggtgtggagaagggattccctcttctttcccttcttagcagcatcctcccagtctacaaggaggtcattgctgagttgaaggcagctggggcttcatggattcagtttgatgagcccactcttgtcctcgaccttgattctgacaaattggctgcattctctgctgcatacgcagaacttgaatctgtactttctggattgaatgtg

SEQ ID NO: 19926 - DNA, 248 bp, Zea mays
gcggcgctgcgtcgccagctcgcagcgatttcaaggtgctggtgaatctggcttggccacatagatcttttttattgttgtcctcagaagacaggtttgctgagactgctttctgtctactgtaaattgatgaaattttggtgatcatatactatggaaaaaaagacagttcacgttctggctgagggtaatggtgagattgaaaatggtacgagctctagtcagaatcctgagacccttgagcatcc

SEQ ID NO: 19927 - DNA, 247 bp, Zea mays
cttattcaagtttgaaagtagaacactgagaagatggctgagaaagagaatattctaatgcagagatatgagatgggaaagttacttggaaaagggagttttgccaaagtttaccatgctcgcaatgttaagacttcagaaagcgttgctatcaaggtgattgacaaagataagatcaagaagtgtggtcttatggatcaaataattcaagagatttcggtgatgaagttggtaaaacatccaaaca

SEQ ID NO: 19928 - DNA, 246 bp, Zea mays
accgggcacaccccccgagctcagcttagctccactccagctccaatcacagtcgtgaccagagcgcgagagctagctagagggccgtgaaaatgccgatcaataggatcgccctggggagccaccaggaggtgtaccacccgggcgccctcaaggcggcgttcgctgagttcatctccaccctcatcttcgtcttcgccggccagggctccggcatggccttcagcaagctgaccggcggcggcc

SEQ ID NO: 19929 - DNA, 244 bp, Zea mays
gtgatggctggataggttgatgttgaggaagagcagaggaatccattccaggagtgtttaatggcgggatgcaaggaagcgcacgggtgggcagccagggatgtctctggtcacctctccccttaccacttctcacggagggttcagagagacgacgacgtcaccatcaaggtgctcttctgcgggctttgccacactgacctccacgtcatcaagaacgagtttggcaacgccaagtaccccg

SEQ ID NO: 19930 - DNA, 247 bp, Zea mays
gtcggcctcggcggcctcggccacgtcgccgtcaagttcggcaaggccttcgggatgaaggtcaccgtaatcagcacgtccgccagcaagcgccaggaggccatcgagaacctcggcgcggacgagttcctcatcagccgggacgaggaccagatgaaggcggcgacggggaccatggacggcatcatcgacacggtgtcggcgtggcacccgatcacgccgctgctggcgctgctgaagccgctgg

SEQ ID NO: 19931 - DNA, 248 bp, Zea mays
gcaaagcgaggccaagccactaacagccaaagccttgcagaaagactagggagaaagaagataagtgagaggatgaagcttcttcaagatcttgttcctgaatgcagtaagatcattggcaaggcaatcatgctcgatgagattatcaactatgtgcagtcattgcaacgacaagtcgagatcatatccaaacaagtaaagccacccactcgatcaccatatctccctctaggatcaagcggccttac

SEQ ID NO: 19932 - DNA, 230 bp, Zea mays
gacaaaatattggttccaccttcccgatgatgggagacgaagcactctttgcagatccagttactgaatttgctggtcagaatattggtgttgtgattgctgaaacacagaagtatgcctacatggctgcaaagcaagccattattgagtatagcacggaaaatctgcagccaccaattctgacgatagaagatgcgttccaacgaaacagctacttccaggtcccccca

SEQ ID NO: 19933 - DNA, 250 bp, Zea mays
caaaaccctagagctctcgcctgctcgcctccgccgccggagcgagctccccatcttcatccgtcaaccatggcgacccagatcagcaagaagaagaagttcgtcagcgacggtgttttctacgccgagctcaatgagatgctgacgcgggagctggcggaggatggctactctggcgtggaggtgcgcgtcacgccgatgcgcacggagatcatcatccgcgccacgcgcacgcagaacgtgctcggcg

SEQ ID NO: 19934 - DNA, 245 bp, Zea mays
cccaccaacaagaggtacaacgccgccaagatcttcagcagccctgaggtcgccgccgaggagccgtggtatggtattgagcaggagtacaccctcctccagaaggacaccaactggccccttgggtggcccatcggtggcttccccggccctcagggtccttactactgtggaatcggcgccgaaaagtcgttcggccgcgacatcgtggacgcccactacaaggcctgcttgtatgcgggcac

SEQ ID NO: 19935 - DNA, 243 bp, Zea mays
gaaagtaatcgcgaggaccattgggctgcatcacttggttttgttgaacttctacccgtatcttcaaagatacgttcaacctcatcaacgagatgtgacgactctactcgctgcagcagttcaggcgtgccatgatatggtacctccagatgctgttgaaccactgttcaagcagatagtaaatcacgttgtgcatgaccgttctcgtccagaggctattgctgttggcttaaatgttgtgag

SEQ ID NO: 19936 - DNA, 239 bp, Zea mays
accgcagagacaggcgtcttcgtactcgcctatctccgcgactcaaagctttccccaattcccccccttctcttatttctcaccaccgccgccgctccccccgttcaacaacaccatgagggagtgcatctcgatccacatcggccaggctggtatccaggtcggaaacgcgtgctgggagctgtactgcctcgagcatggcattcaggctgatggccagatgcccggtgacaagacca

SEQ ID NO: 19937 - DNA, 240 bp, Zea mays
tggagactggtgtcatcaagcctggtatggttgtcaccttcggtccaactggcctgactactgaggtgaagtctgttgagatgcaccacgaggctcttcaggaggcccttcctggtgacaatgttggcttcaacgtgaagaacgttgctgtgaaggatctcaagcgtggttttgtggcctcaaactccaaggatgaccctgccaaggaggctgccagcttcacgtcccaggtcatcatca

SEQ ID NO: 19938 - DNA, 242 bp, Zea mays
agtccattgagaagacctcccaggcgctcaagatcctcaagcagatcggcgcccacgccgacgccgagaaggccaaggactccgtcggcatccgccccggcaagggtaagatgcgcaaccgtcgctacatcaaccgcaagggcccgctcatcgtctacggcaccgagggctccaaggtcgtcaaggccttccgcaaccttcccggtgtggatgttgccaacgtcgagcgcctcaacctacta

SEQ ID NO: 19939 - DNA, 239 bp, Zea mays
ctgccggcaaggcgtggtacaagaccatggtctcggacagtgactacaccgagtttgagaacttcaccaagtggctcggagtgacgcagtgaagcggcctttgaggcctagttaagttttgagtagttgtgtcgctgaacttgtattgagacgaaatagtatttttatcaatctgtcttatcctgcgtcttcacaacaagttgcctatctgtggactttaagcctgcatgttcgtttta

SEQ ID NO: 19940 - DNA, 235 bp, Zea mays
cgtcagttgctgctccccccaccttctcctcctgctcctgccctcggtttctgatcagcgaacatgggaacccgcggcgtcgccctgctgctcctcgctgcggtgctgctcctccaggcgctcctccccgcgtcgtcggatggcctggtgctggtcgcgctgaagaagctgcccgtcgaccagaacggccgcgtctccgcgcgcctctccgccgaggagatgcagcgcctcctcc

SEQ ID NO: 19941 - DNA, 238 bp, Zea mays
gcacgtctcgtctccctcccacaaaaaaaaaaaactgctcggttgctgctcctgctccgccgcgccggcatcatgtgtggcatcttagccgtgcttggttgctccgactggtctcaggcaaagagggctcgcatcctcgcctgctccagaaggttgaagcacaggggccccgactggtcgggcctctaccagcacgagggcaacttcctggcgcacagcggctcgccgtcgtctcccc

SEQ ID NO: 19942 - DNA, 238 bp, Zea mays
ccacggtccggacgagaggaagctggtggacgcggtgaacgggacggagtacgtgcccacgtacgtggacaaggatggcgactggatgctcgtcggcgacgtcccctggaagatgttcgtggaaacctgccagcgccttcgtctgatgaaaggttcagaggccgtgaacttggcaccgagagccgcccgatgaggcacactccgttgggcgttggcacgcactggcgtcttgaaggaa

SEQ ID NO: 19943 - DNA, 225 bp, Zea mays
ggcggcgccgcgcgtcgagaagctctccgcagcggctgagaaagcaagagctaagagcaatgggctcaccaaagaggcttcagtgccaaaggatgccaacggcaatgccatctcagcgcagactttcaccttccgtgagctcgccaccgccaccaggaacttcaggcctgaatgcttcctgggagaaggaggttttggacgtgtttacaagggccgcctcgagag

SEQ ID NO: 19944 - DNA, 227 bp, Zea mays
  unsure (1)..(227): unsure at all n locations
ctcttgaggagatactgtaacgaaacatggctcctctgactcctagactggtagtgcccatagacgtgaagaagcagccatgggagcagaaggttcctctccacaaccgctggcatccagacatccctcccgttgctgatgtaaccgaaggngaactgttccgggtcgagatggtagactggactggagggagggttagagacgataactctgcagacgacatcaaa

SEQ ID NO: 19945 - DNA, 133 bp, Zea mays
ccctcttcagcgccatgctgtggatctactacgcgctgctcaagtccaacgagctcctgctcatcaccatcaactccgccggctgcgtcatcgagaccctctacatcgccatgtacctcctctacgcgcccaa

SEQ ID NO: 19946 - DNA, 109 bp, Zea mays
gtgccctccaggctctgatggagggtcttcaggtccttcccttggaggacgttgtctctgaagctgacatcttcgtgaccaccactggcaacaaggatatcatcatggt

SEQ ID NO: 19947 - DNA, 226 bp, Zea mays
caacagcttgatggaacctccaatgagtggggctggtgcaaacagaagcttggagcaaatgccatccttgcggtttcacttgctgtgtgcaaagctggagctatggtgaagaagattcctctttaccagcacatcgcaaatcttgctgggaacaaaactctggtgctccctgtacctgcctttaatgtgattaatggagggtcacatgctggaaacaagcttgcca

SEQ ID NO: 19948 - DNA, 221 bp, Zea mays
caacaatgggattattacttttgaagaatggagagattttcttctactgtaccccaatgaggcgaccattgagaacatttatcatcactgggaaagagtctgccttgttgatataggtgaacaggctgctataccagaaggcataagtaaacatgtcaatgcaagcaaatatcttattgctggagggattgctggtgcagcatctcgtactgcaactgctc

SEQ ID NO: 19949 - DNA, 228 bp, Zea mays
gcctcagagcgccaccaagtcttgcggtcgcgaagagcaacgcaacaagatggtgaagctcgcattcggaagcgtcggcgactccttcagcgtcacctccatcaaggcctacgtggcggagttcatcgccaccctcctcttcgtcttcgccggcgtgggtttcgccatcgccttcgggcaactgacgaatggcggcgcgctggaccctgcgggactggtggcgatcgc

SEQ ID NO: 19950 - DNA, 210 bp, Zea mays
acgcgctccaattggttgtgcagaactcttcgacactagttgctggtttggtaattgcattcgtatcaaactgggagctatctctaatcatcttagctttgataccactcattggcctaaatggatggatccagatgaagtttattcagggcttcagcgcagactcaaagatgatgtatgaggaggcaaccaggtggctaatgatgcagt

SEQ ID NO: 19951 - DNA, 207 bp, Zea mays
agatcggcaaggccaatcccgagcagtggtgcgaaacctcgagcgctcgcgccggtgaccataacaaagaggaagccgcggtagcactggtagcggcacagtaagggggagatgtcgtcggcgttcagcggcgatgagaccgcccctttcttcggcttccttggcgcctccgctgcgctcgtcttctcatgcatgggggcggcgtac

SEQ ID NO: 19952 - DNA, 222 bp, Zea mays
cggacgcgtggctccgcctgcaccctctcacgagcgcccgctcgcccagatctagggttccatcatcgggcaagatgagcagcccccatggcggcctcgacgaccagatcgagcggctcatgcagtgcaagccgctcgctgagcccgaggtaagggctctgtgtgagaaggcaaaggagattctgatggaggaaagcaatgttcagcctgtaaagagtcctg

SEQ ID NO: 19953 - DNA, 215 bp, Zea mays
atggttctctgtacaatggaagaatctggtgagcatatcattgctggagctggtgagcttcatcttgagatttgcctgaaggatctgcaggaggacttcatgggtggtgctgaaattattgtttccccacccgtcgtctccttccgtgaaacgttcttgagaagtcctgccgtactgtcatgagcaagtctcccaacaagcacaaccgtctgtac

SEQ ID NO: 19954 - DNA, 138 bp, Zea mays
gcagcctccaaagccactcccaaacccccgcttccagaaccttctcgaagctccccgccgcctcctccactcgcaccgatggcgaaggaaccaatgcgcgtgctcgtcactggcgccgcaggacaaattggatatgcc

SEQ ID NO: 19955 - DNA, 215 bp, Zea mays
cccacgcgtccgccgcttccaagatgtcgaagcgaggacgtggaggttctgctggtaacaagttccggatgtcactgggtctaccagtggcagccactgtgaactgtgctgataacactggagccaagaacctttacatcatttctgtgaagggaatcaaggggcgccttaataggcttccttctgcctgtgttggtgacatggttatggcactg

SEQ ID NO: 19956 - DNA, 244 bp, Zea mays
catgttgccaatgccaaaaagtacaggggctttattacatatgagcgagagagtatttcatacagagatccaaaagagcgtgttagagattggaaggaagttgcaatcgaatctacacctggtccactattaaatacacaatctgctcgttgcatggactgtggcactcctttctgtcatcaggaaagctcaggtgctggttgtcctcttggaaataagatcccagaattcaatgaattagttc

SEQ ID NO: 19957 - DNA, 246 bp, Zea mays
ggtctctccacatgaccatccagaccgccgtcctcatcgagaccctcaccgcgctcggcgccgaggtccgctggtgctcctgcaacatcttctccacgcaggaccacgccgccgccgccatcgcgcgcgactcggccgccgtgttcgcctggaagggggagacccttgaggagtactggtggtgcaccgagcgctgccttgactggggcgaggcgggcggccccgacctcatcgtcgacgacggcg

SEQ ID NO: 19958 - DNA, 248 bp, Zea mays
gcgactgcgagcgcccgtccaatggcgtccctctccccttccctccacctcccttgcaattcaagaactggcttccttggaaagacacgtgggattcgtccttgtgttttccctgctggaagagttggatttgtcagaacagtagtggaatgcaaggaatctagaattggaaagcagcccatcgaagttccatcaaatgttactctcacattagaagagcagtttgtcaaagctaagggtccgctggg

SEQ ID NO: 19959 - DNA, 246 bp, Zea mays
cgccactctcacacctaccaggaaaccaatcaaaacttaaaaccaatcgaaattagaccggcgacgaggattagcgctcgccggcgatggattctgactacggcgtgcctcgcgagctctcggaggtgcagaagaagcgcacgctctaccagcccgagctgcccccctgcctccagggcaccactgtcagggtggagtatggtgatgctgcaattgcagctgacccggcaggtgctcatgtgatca

SEQ ID NO: 19960 - DNA, 238 bp, Zea mays
accgtgacaggtccgcgaccgtggcgacctggcatccaaggccctcccaaagtcccaaaggccgccgccgcccgccagcacaccatggccccgcagtccttcctcctcgccgccactgccgccgccaggtcccccgcggtcttcgccgctccctattcctccgcacgccctttccactcggtccacttcgtcgccggcccgtggggcgccgccgccgccaaggcgctcgtcgtcgcgg

SEQ ID NO: 19961 - DNA, 239 bp, Zea mays
cccacgcgtccgatcacactgatccggcctggagcgctggacagcagcagcagcagcagcatcgagctcgaggccgctccgccaccccgcactcgcctgtcgcctcttctcgctttcgccaccggggcagcgctccgccatggctggacctgctgttctcaatgagcgtatcctttcttccatgtcccagaaacatgttgctgctcacccatggcatgatttggagataggaccagggg

SEQ ID NO: 19962 - DNA, 240 bp, Zea mays
cctcgttcctctagccgtctcgcgcaccacagcctccatttctcctccgacggcggtgcggctagctcaaccatggcggactccaaggccacctcggcggtcaccctccgcactcgcaagttcatgaccaaccgcctgctggcccgcaaacaatttgtgcttgaggttatccaccccggccgcgccaacgtctccaaggcggagttgaaggagaggcttgccaagatgtacgaggtgaag

SEQ ID NO: 19963 - DNA, 238 bp, Zea mays
ggtaattgttgctacacggaggattgtgaggccacccaagaagggttcagctgttctgcgccctcgcaccaggactctgactgctgttcacgatggcatcttggaggatgttgtctacccagctgagattgtggggaagcgtgtcagataccgtctggatggttccaagattatcaagattttcttggacccaaaggagaggaacaacactgaatacaagctggagacctgcactgcg

SEQ ID NO: 19964 - DNA, 238 bp, Zea mays
caacctcctctgctctcccccacctcccggtccggcagcagagagcgggggtgcagagagatcgagatccggaggccgcgagtgggagcgccaccaccagcgactgcggcaatggcgggcacggtgacggtcccggggtcgtcgaccccctccacgccgctgctcaaggacgagctcgacatcgtgatcccgacgatccgcaacctcgacttcctggagatgtggcggcccttcttcc

SEQ ID NO: 19965 - DNA, 240 bp, Zea mays
cggacgctgggtcgcgccgccgcctccttcgccacccagcgctcgagctcctcgctccctgcgagcgcgcgaccgcaacgccaccatgaagttcaacatcgcgaacccttccaccgggtgccaaaagaagctggaaatcgatgacgaccagaagctacgtgccttttatgaccgaaggatatcccaggaggtcagtggtgatgctctgggtgaggagttcaagggttatgtcttcaagat

SEQ ID NO: 19966 - DNA, 242 bp, Zea mays
aggaatttcttgaccacggagttctcactcttctaaaaaattggcttgagccattacctgatggaagcatgccaaacatgaatattcgatctgctgtactgaaattattaactgattttccaattgacttggaacagtatgaccgaagagagcagcttaagaaaagtggtctgggaaaggtcattatgtttttgtccaaatctgacgaggagactactgcaaataggaaattggctaaggag

SEQ ID NO: 19967 - DNA, 241 bp, Zea mays
caaaaccaaagagggtactgaagacaacaaatgcttacttttattgggtgacacgtgaacaagggtcttttgattggtttaaaggggtcatgaatgaaatcgctgaactagatcagaggaatatcattgagatgcacaattatctcacaagtgtttacgaggaaggggatgctcggtcagcactcattacgatgctacaagctctcaaccatgccaagaatggtgttgatatagtttctgg

SEQ ID NO: 19968 - DNA, 240 bp, Zea mays
cattgttaaaggaaaggctcgccttggatcgattgttcacaagaagaatgcatcagtcttgtgtcttaccactgtcaagaacgaggataagcttgagttcagcaagattttggaggctattaaggcaaacttcaacgacaagttcgatgaggtcaggaagaagtggggaggtggcatcatgggatccaagtcgcaggccaagaccaaggcccgggaaaagctgctcgccaaggaggctgc

SEQ ID NO: 19969 - DNA, 236 bp, Zea mays
cacgccatcagcagctagcgcgctcctcgagcccagcagagaaaggccggcagcgctaatcgtaatagccatgggctccaccgccggcgacgtggccgcggtggtggacgaggaggcgtgcatgtacgcgatgcagctggcgtcgtcgtccatcctgcccatgacgctgaagaacgccatcgagctgggcctgctggaggtgctgcagaaggaggccggcggcggcaaggcggcgc

SEQ ID NO: 19970 - DNA, 237 bp, Zea mays
gttgctcgagattctgtacagctttcagaagactgaattctggtacgtcaatgacaaagggcagaaagacgattccgtcgcgacgccgtgccgtccggtgagccaccgcggcgaggagaagtggtggctgcccgtgccgtgcgtcgccaagcccgggctgacggagacggcgcggcgagacctgcagcagaagcgcgactgcgcgagccagatccacaaggcggccatggccatcaa

SEQ ID NO: 19971 - DNA, 235 bp, Zea mays
cggacgctgggaaacaatcaaccagcaacactcttctcgtataacataatacagcgaaggtaactcacatggcaacttccatgggttgtctcgtcttgctctgccttgtttcttctctccttcccagtgccgtccttggccacccatggggtggcttgttcccacagttctatgaccattcgtgccccaaggcgaaggagattgtgcagtccattgtggcacaggctgtggccaa

SEQ ID NO: 19972 - DNA, 215 bp, Zea mays
gctagcgcgctcctcgagcccagcagagaaaggccggcagcgctaatcgtaatagccatgggctccaccgccggcgacgtggccgcggtggtggacgaggaggcgtgcatgtacgcgatgcagctggcgtcgtcgtccatcctgcccatgacgctgaagaacgccatcgagctgggcctgctggaagtgctgcagaaggatgccggctgcggcaa

SEQ ID NO: 19973 - DNA, 236 bp, Zea mays
gtcccctcctgctcgcccatggctcccatcgctgtcggcgacgccctccccgacggccagctcgggtggttcgacgagaacgaccagctgcagcaggtctccgtccacgcgctcgccgccggcaagaaggtcatcctcttcggcgtccccggcgccttcaccccgacctgcagcaaccagcatgtgccaggcttcatcacacaggctgagcagctcaaagccaagggggtagacga

SEQ ID NO: 19974 - DNA, 238 bp, Zea mays
cgtacggcaatcgcataggttgacattgactttgagaaagagcccattggagttggaaaggttgggaaggaagttttcttgagggacatatggcctttaaaccaagagttgatgaggttgtggagtccagcgtgcagactcacttgttaattcaagaaagtgtacgactccatcatggaactcaaattttggtggttgcactagtgtggagacttgaattcatgtatacacttagtta

SEQ ID NO: 19975 - DNA, 230 bp, Zea mays
cggacggtgggcggacgcgtggggggattgccaatctttacagcctgcactcttggattgggataggaacaattactttgtatggtattcagtggataattggattcgtcacgttcttcttccctggtgctgcgccaaacgtgaagaagggtgttcttccttggcacgtactctttgggctctttgtctacatcttagcactggctaatgcagaactcggctttcttgag

SEQ ID NO: 19976 - DNA, 147 bp, Zea mays
cagagagctggtcgtgctggacgaacgcaacctgggaagtgctttaggctatacacagagaagagctttaatgaggatttgcaaccacagacatacccagaaattcttcggtcgaacctggcaaatacagttcttaccttgaagaaa

SEQ ID NO: 19977 - DNA, 202 bp, Zea mays
gccgtcgccgtcgcatctgccatgggggcgtacaagtacgtctcggagttatggagaaggaagcaatccgacgtgatgcggttcgttcaacgcgtgcgctgttgggagtacaggcagcagccggccatcgtccgcctcacaaggcccacccgccccgacaaggcccgccgcctcggcttcaaggccaagcaggggtatgttg

SEQ ID NO: 19978 - DNA, 145 bp, Zea mays
gacaagatacgggagtacgcggcgccggcggcggtaggcccatggctatgctgagcttcggcggcacggttctgggcgtccggccgtctccggtcgtggcggcgttcagctcccgcggccccaacaccgtggtgccggagatctt

SEQ ID NO: 19979 - DNA, 228 bp, Zea mays
ggttaaacgtggctgggatgctcaggtgctcggagaagcccctacaaattcaaaagtgcacttgaggctgtgaaaacactgagagcacagcccaaggctaatgatcaatacttgcccccatttgtgatagttgatgacagcggcaaagctgttggacctgtattagatggtgatgcagttgtcactatcaacttccgggctgatcgcatggttatgcttgcgaaacac

SEQ ID NO: 19980 - DNA, 220 bp, Zea mays
aggaggaagaggatgacatcatcacattgaaaatgatgattgagcaacatcgtcgcaacactgagagtgttttggctagagatatactctccgattttgataaccttcttccaaaatttgtaaaagtatatccaagggactataagagggttctagaaagcatgaaggtggaaaaggctgttgctaagcatgcaaaggagcctaagatggcaaatggaat

SEQ ID NO: 19981 - DNA, 133 bp, Zea mays
ctcagtcgcctgcgccgccgcttcgttcgtgtggaggggagaagacaggaaatggcggcgactgagggcgtgctcttggggatgggcaaccccctcctcgacatctccgccgtcgtcgatgacgccttcctga

SEQ ID NO: 19982 - DNA, 204 bp, Zea mays
agcggtccttcaagtatgcttgggtgctcgacaagctcaaggctgagcgtgagaggggtatcaccattgatattgctctgtggaagtttgagaccaccaagtattactgcaccgtcattgatgcccctggacaccgtgacttcatcaagaacatgatcactggtacctcccaggctgactgtgctgtccttatcattgactcca

SEQ ID NO: 19983 - DNA, 224 bp, Zea mays
tgtttctaccatacttcactgtgatgaattccatggattgtttccctcgaataccagagtcaaatgcctagctgatgctggaatgtttcttgacactgttgatgtttctggccgtcgggaaatgagatcctttttcaatggcattgtgagattgcagggttctggaagaagcttgcctaggtcttgcacctcacacatggacaaaacctcgtgctttttccccc

SEQ ID NO: 19984 - DNA, 128 bp, Zea mays
caagcctcagatctcagtcacctgcgccgccgcttcgttcgtgtggaggggagaagagaggaaatggcggcgaccgagggcgtgctcctggggatgggcaaccccctcctcgacatctccgccgtcgt

SEQ ID NO: 19985 - DNA, 211 bp, Zea mays
gccttctgcgcctccatttcggcctctgtcccttgcaagttcaatctcacctccaaccatgggtaaagagaagtcccacatcaacattgtggttattggccacgttgactctggcaagtcgaccaccacaggacacctgatctacaagcttggaggcattgacaagcgtgtgatcgagaggtttgagaaggaggctgctgaaatgaacaag

SEQ ID NO: 19986 - DNA, 254 bp, Zea mays
cccacgcgtccgcccacgcgtccgcccacgcgtccgcgtggaggagaaccggcgggctctccgtgagctcctgttctgctgccctggtgccctccagtacatcagcggtgtgatcctcttcgaggagaccctctaccagaagaccaaggatggcaagccttttgtcgatgtcctcaaggagggaggcgtcctccctggcatcaaggtcgacaagggcaccattgaggttgttggcaccgacaaggagaccacca

SEQ ID NO: 19987 - DNA, 253 bp, Zea mays
cccacgcgtccggagacagtcaacaaccatcccagtgctgggtggacagcctcacgtaatccttacttttcaaactataccattgcgcaatttaagcacatacttggagtgaaaccagcaccacagaatgcactaagcaatgttcctgtcaaaacttattcaagatcactggaacttccaaaagagtttgacgctagatctgcatggtcccgttgcagcacaattgggaacatacttgatcaaggtcactgtg

SEQ ID NO: 19988 - DNA, 251 bp, Zea mays
agagagcctcacttgtatgcattctcattcaagaacgggagactggaggtaactgagatcttcaacttttcccaagatgatttgttaactgaagacatgatgatacttgacacacatggtgaggttttcatttggattggtcagtgcgtggaatcaaaagagaaacagaaggcatttgatattggccagaaatacgtggagcatgcaaattctattgatgatctttctccatatgcaccactatataaagt

SEQ ID NO: 19989 - DNA, 251 bp, Zea mays
cccacgcgtccgctcccctgttctctcgcccgaacacggcgaccgtcgctccaaaacacgaccttcacgtgctcgccttcgtcctcctcgtcaccgccgtcaaggacgcgtacgaggactggcgacgccaccgctccgaccgcgccgagaacggccgcctcgccgcggtcctcttcccggacgcccccgggggcgcccagttcgtcccgacagagtggaagcacgtccgagtcggcgacgtcgtgcgcgtc

SEQ ID NO: 19990 - DNA, 209 bp, Zea mays
cccacgcgtccgctcctcgtgcgcctcgtggattcgtgggtcgcgactcgcgaccagacgacaaacgtcgagaggggccgatcgtgatcgagcagcgatgtcgacgtcgcggaggcggacactgctcaaggtcatcgtccttggcgacacgagggtcgggaagacgtcgctgatgaaccaatatgtccacaaaaagttcagtcagcagt

SEQ ID NO: 19991 - DNA, 242 bp, Zea mays
gcttcccagagacccagccatggcgatctcccagatctcacgcatattcctggccatccttctcctggccgccgccttcgccgccgccccagctgcgcttgcggacggcgacgacgtggtggcccttaccgaatccacgttcgagaaggaggtcggaaaggaccgcggcgccctcgtcgagttctacgccccctggtgtggtcactgcaagaagcttgctcctgagtatgaaagacttggtg

SEQ ID NO: 19992 - DNA, 242 bp, Zea mays
cgcttccagccgccgccgccgcgtccgcctcgcccagcgcacagccgccgcagcacatcgctatctcgatctcagccatggcggaggtggagcagcaacaggacacgccgaagctgttcaaccgctggaccttcgatgatgtccaggtgaacgacatctcgctgaacgactacctcgctgtgaacgcgacgaagcacgcgatgtacctgccgcacaccgcggggcgttactccaagaagcgg

SEQ ID NO: 19993 - DNA, 243 bp, Zea mays
atcgcttcctgtctagggtttcacccgcgtgccttatatatcctatcacttcccgcccagccgccatctccgcatttccatcttcccgtgggatcccagtcgccgccgcaagaagaagagctcggggacttccaggtctcgcgagaagatgccgaagcagatccacgagatcaaggatttccttctcaccgcgaggaggaaggatgcccggtcagtgaagatcaagaggagcaaggatgttgt

SEQ ID NO: 19994 - DNA, 196 bp, Zea mays
cggaacgcacacaccgcccgtccccgatctccgatcccctcgtcgatccaaagatgcagatcttcgtcaagaccctcactggaaagactatcaccctcgaggtggagtcttctgacaccattgacaacgtcaaggccaagatccaggacaaggagggcatccccccggaccagcagcggctcatctttgctggcaa

SEQ ID NO: 19995 - DNA, 224 bp, Zea mays
ctcgcctcgccttggtgttcacgccgtcgctagcgcctgccgcggcgaacttctgtcctccccggcgccgggctcgggtcgtcgtcggccaggaagatggctggcggcttcagggtactgcatctggtccagccttttctggctttcttgccagatgtgcagagcgcggataggaagataccgttcagagaaaaagttatatacacggttatttccctcttcat

SEQ ID NO: 19996 - DNA, 111 bp, Zea mays
gcagctgaaatatctgaagcaggttcacccgaggactctctgagggatattcatgacatatcacttaacttaaagctttccttggacagtgaaaaatcaggcagcaaagaa

SEQ ID NO: 19997 - DNA, 235 bp, Zea mays
cggacgcgtgggcgagcggccggaaaccagcggcaaccgctcggcatggcgctcgtattgcattctggggctggacaacaaaaatgccttcaaggcacttattgctgcagaatacagtggggtcaaggttgagttgaccaaggattttgagatgggtgtctcgaacaagacccctgagtttctaaagatgaacccccttgggaaggttcctgttctggagactcctgatggccct

SEQ ID NO: 19998 - DNA, 234 bp, Zea mays
tttaccgccgtcttcgcgtacatcatgaccgtcaagcgcgagtcgtggatcacctacctcaccctcgtgcccgtcgttactggagtcatcatcgccagcggcggcgagcctagctttcatctgtttggattcatcatgtgcataggagcaactgcagcaagggcgttgaagacagtactgcaaggaattcttctgtcttctgatggggagaagcttaattctatgaatctgtta

SEQ ID NO: 19999 - DNA, 234 bp, Zea mays
gctcgccgcgctcatctccgcctacggcagggccgccatcccgcaggaggccgttaagctgttccggatgatgcccaacataggcgtcccccgcacggcgctctcctacaacgccgtactcaaggccatactctgccgcggacgcgaggccatggccaggcggatctacaacgccatgatcgcggacggggtggcgccggacgtgtccacctacaacacgctcatctgggggtt

SEQ ID NO: 20000 - DNA, 260 bp, Zea mays
cagaaatcctgcaaatgctcttttagagttccgcgggaatgctggaagccacgatctccaactctcagtggaaacactcgagtcactgatcaagctaacgaaggaaggtatgaagatgaaggttccacggtatgacaagtctgcgtttgggggaaggggtgaccgggctgatccttctgtatggccagaggttgaagggcccttagaggttgttctgttcgaaggatggatgcttggatttaaacctcttccaaatgaag

SEQ ID NO: 20001 - DNA, 153 bp, Zea mays
gcaagccggagctcgacaaggacgagcgacgacgcacgcggagatccggcgtactgcaaattttgaaaactgaactgtaagatggcatcagcagagctttcccgtgaggaaaatgtgtacatggcgaactcgctgagcaggcggagaggtacg

SEQ ID NO: 20002 - DNA, 213 bp, Zea mays
ccacgcgtccggcggaccacatggccatccttgcggcgccagagacccgggtcaccacactgcccaacggcctgcgcatcgccacggagtcttccctcgccgcgcgcacggctacggtcggcgtgtggatcgatgcgggcagcaggtacgagaacgaggaggcggtcggcgtcgcgcattttgtcgagcacatgctgttcaagggcacgggga

SEQ ID NO: 20003 - DNA, 259 bp, Zea mays
caactcctgagcactttctcctcgtccccgacaagccaatcgaagccgagatacggccatggactccaccggcaccggagcagggggtaaggggaagaagggagcggccgggcgcaaggtcggcgggccaaggaagaagtcggtgtcgaggtccgtgaaggccgggctccagttccccgtcggccgcatcgggcgctacttgaagaagggccgctacgcgcacgtgtcggcaccggcgcccccgtctacctcgccgctg

SEQ ID NO: 20004 - DNA, 256 bp, Zea mays
cttttgagatgcttggtcaaaacctgtatgaactgctcaaaaggaatcacttaagaggtctgaaattgaaatatgttcaagccttctcaaaacagatattggatgccatggttgtgatgagagaagctggaataattcattgtgatctgaagccagaaaatatcctgttagctcccagcgtcgcaacagctgcagcagtgaaagttattgattttggatcagcgtgcctggagggtaaaacagtttactcgtacat

SEQ ID NO: 20005 - DNA, 253 bp, Zea mays
caatgggtacaagaatgtgcttgctgttgctgtcgagacagactactcatacccacatgctgacaagatcaaggagtacctcaaggacccaagcaagtttgctgttgccgccccggttgctgctggggactctggcgctgcagctgctcccaaggaagaagagaaggctgcggagcctgaagaggagtcggacgaggaaatgggctcagctcttcgacgactagagctgctgttttcgtcaaactgctgcaag

SEQ ID NO: 20006 - DNA, 181 bp, Zea mays
cagctagctagctagcatggccgggaaagagcttacgctgctggggttatgggcgagcccgttcgtgctccgggcgcgcatcgcgctcagcctcaaaggcctcacctacgcatactccgaggagaacctcgacgacaagagcgagcttctcctcagctccaaccccgtgctcaagaaggtc

SEQ ID NO: 20007 - DNA, 148 bp, Zea mays
gccgtcctcatcgagaccctcaccgcgctcggcccgaggtccgctggtgctcctgcaacatcttctccacgcaggaccacgccgccgccgccatcgcgcgcgactcggccgccgtgttcgcctggaagggggagacccttgaggagta

SEQ ID NO: 20008 - DNA, 147 bp, Zea mays
ccctcgaggagtactggtggtgcaccgagcgctgcctcgactggggcgaggcgggcggccccgacctcatcgtcgacgacggcggcgacgccacgctgctcatccacgagggtgtcaaggccgaggaggattacgagaagaccggca

SEQ ID NO: 20009 - DNA, 130 bp, Zea mays
gtccgcgcacctgttcgccgtgttccagggtatcctcaagatgattgccgggctggacaccaacttcacggtcacggcaaaggccacggacgacactgagttcggggagctgtacctgttcaagtggacg

SEQ ID NO: 20010 - DNA, 243 bp, Zea mays
cccacgcgtccgccacgcgtccgtgtagccgcaactgtgatgaacctccattggcgagcccagggatttgaatgtcgttccggaatttcactccggggtgaagaccagggcctccaatggcaaccggcaccggctgaagggtatgcgaggttagaatctggataccaccattcttgtcgagcaacggcttgccagatttgttccttttcaccatatcctcagcattgccctagttctagatcg

SEQ ID NO: 20011 - DNA, 113 bp, Zea mays
cccacgcgtccgccacgcgtccgcccacgcgtccgggcaggcaacaataatgggtccatctgatagcccatattctggtggagttttcctagttacaatccattttcctcccg

SEQ ID NO: 20012 - DNA, 247 bp, Zea mays
gtgccagaccaccgggacgatgaaagtgcattgggtccggaagttccccttcttctgcagtgacagagagtacataattgctcgccggatatggaaactggggggcgcctattattgtgtcacaaagggtataccatgctcgtccattccacggcgcaacaaacctcgaagagttgatctgtattattcaagctggtgcatccgtgcagtggaatccaggagagggaacggagggtcgacagcttgt

SEQ ID NO: 20013 - DNA, 244 bp, Zea mays
acatccttgtcggagcaatggtggctggccccgacaggcgtgatggctacaaagatgtccgcacgaactacaactacacggagcctactctcgcagcgaatgctggtctggttgcagcgctgatctctatatccgatatcaaaaccggacggttcggcatcgataagaacaccatcttctctgcgattcctccgatgttcccaacacccccgccgccgccatcagcatggaaaccatagaggca

SEQ ID NO: 20014 - DNA, 247 bp, Zea mays
ccacgcgtccgattccaagcaatgcatcagacaatgtctactgtacacttctaactcacagtgctatccatggtgcaatggcggggtacagcttcactagttgggatggtcaccggtagacatacctatatacctttctacagggtgacatccacaaggtacaaggttaaagtcactgacaggatgtgggcaaggttctgtcgtccaccaaccagccaagtttcctgagtcagaaggatatcgacga

SEQ ID NO: 20015 - DNA, 229 bp, Zea mays
ctggctcacttctccaggtaaggaaagtgttcgtcctcatggcgccgccgcagccgaagtcgggcctcttcgtgggcatcaacaagggccatgtcgtcaccaagcgcgactgcctctgcgcccgtcccaccgcaaggggaaagcaacgaagagggtgtccatggtcaggggcctgatcagagaggttgctggctttgctccttatgagaagcgtatcaccgagcttctg

SEQ ID NO: 20016 - DNA, 240 bp, Zea mays
agcatcgatccgccattgctcaccgcacaagtgcacgctcacctcacacacgcagctaagtagctaacgccgtagcagaacaagaaaaggctcgacatggccgaggagaagaagcagggcctgcagctgctggacttctgggtgagcccattcgggcagcgctgccgcatcgcgctggacgagaagggcctggcctacgagtacctggagcaggacctggggaaaaagagcgagctgctc

SEQ ID NO: 20017 - DNA, 243 bp, Zea mays
gctagcccttctaaccttgctcgacccttgcccgccgcctgaactcgcctcccccgcggccggtcccctgcatctgttcgccgcgccgcaacccggaggagactacgactacgagcaccaccaggtagcagcaactgttttgctgcaatctgacaaagtggagggtttaagagtcgctgcttcttttatgtctgaacaatctttgctttatttgggattgctgggagagtattcttgcgcgac

SEQ ID NO: 20018 - DNA, 239 bp, Zea mays
gctacctactactcaagtatccatccttattgagtacagtgttgatccatggactcggaaggagttgtagcagcaaaggtggcagatgagactactaaaccggcaatccaagaagacggcgccgagagcaaggccgggatgactgatctgctgatgctgaccgacaagtcgcagctgcaggcgctggcgatgctgctgcggaacaacgaggagctcatgatgagccaggcgatcaagtc

SEQ ID NO: 20019 - DNA, 242 bp, Zea mays
ctcttatccgaatgtgatcatcctttctgtattgaatgcattagaaattggcgtacaattctcctgcatctggtatggatgtgaactcagcattgagggcttgtccaatatgtcggaaactttcatactatgtcattccaagtgttctttggtacttctcaaaggaagagaaagaggagatcactgaaagctacaaatccaagctcaagtctattgattgcaagtacttcgactttgggact

SEQ ID NO: 20020 - DNA, 242 bp, Zea mays
catcaacagtggaccccgtgaggatgccacccgtattggttccgctggtgttgtgaggaggcaggccgtggatatctcacccctgaggagggtgaaccaggccatctacctcctcaccactggtgccagggagagtgctttccggaacatcaaaaccattgccgagtgccttgcagatgagctgatcaacgctgccaagggctcatccaacagttacgccatcaagaagaaggacgagattg

SEQ ID NO: 20021 - DNA, 233 bp, Zea mays
tgtgtatcagaccaggggaacatggaagtacattcggtgggaatccgttagctagcgctgtggcagttgcatcactgaaagtggtcagagacgaaggtcttgttgaaagggctgcaaagttaggacaggagtttagggaccagttacagaaggtccagcagaaattccctcaaatcctaagagaagtgcgcgggaggggtttgctgaacgcagtgcatctaaacaacgacgcg

SEQ ID NO: 20022 - DNA, 230 bp, Zea mays
caaaaaaaaactgctcggttgctgctcctgctccgccgcgccggcatcatgtgtggcatcttagccgtgctcggttgctccgactggtctcaggcaaagagggctcgcatcctcgcctgctccagaaggttgaagcacaggggccccgactggtcgggcctctaccagcacgagggcaacttcctggcgcacagcggctcgccgtcgtctccccgctgtccggcgaccag

SEQ ID NO: 20023 - DNA, 234 bp, Zea mays
gacgcctccctcctcctctccgtcggcctcgcgctggtgctgatcccgctctccctctcgctcctcaaccggctgcgcgtcggccgcctgccgcccggcccgcggccgtggcccgtcctgggcaacctgcgccagatcaagcccgtccggtgccggtgcttccaggagtgggcggacggtacgggcccatcatctccgtctggttcgggtccggcctcaccgtcgtcgtctcca

SEQ ID NO: 20024 - DNA, 211 bp, Zea mays
aagaggtacagcgccgccaagatcttcagcagccttgaggtcgctgccgaggagccctggtatggtatcgagcaggagtacaccctccttcagaaggacaccaactggcccctcgggtggcctattggcggcttccctggccctcagggtccttactactgtggaatcggcgcggagaaatcgttcgggcgtgacatagtcgacgcccact

SEQ ID NO: 20025 - DNA, 253 bp, Zea mays
gcgatggggagcgaccaggagacggagaagaagaagaccccggtggcactaatgcccatcgcgaacccctcgcaggaaagaagctctgcaagcggaccctcaagctcgtgcgacgagcctctgaggccaagtgcctcaagcgcggagtcaaagaggtagtcaagagcattcgccgcgggaacaaagggttgtgtgtgattgctggaaatattcttctaatgatgtgattacacacgttccaatactatgtgag

SEQ ID NO: 20026 - DNA, 251 bp, Zea mays
ggcgctgccaggtaagtcggcggcggcgatgacaacgcgcttcaagacgaaccgcaagaagcgcggccacgtgtccgccgggcacgccgcatcggcaagcacaggaagcacccgggaggtcgcggtaacgccggtggcatgcaccaccaccgtatcctcttcgacaagtaccatccgggctacttcggcaaggttggcatgcgttacttccataagctccgcaacaagttctactgccccgcggtcaacat

SEQ ID NO: 20027 - DNA, 250 bp, Zea mays
gtttcaaagatgattccagcatctgacaagggcaggttctttgcctttggtcgtgtcttctcagggaaggttgctactggtatgaaagttcggatcatgggtcccaactatgtccctggccagaagaaggacctgtatgtcaagagtgttcagcgtactgttatctggatgggaaagaaacaagagtcagttgaggatgttccttgtggtaacactgttgctatggttggtctggatcagttcatcacga

SEQ ID NO: 20028 - DNA, 244 bp, Zea mays
catctggaaataagctgcttcttgatgttggtctctggttgactcacaagattaaggattattgcaagagcaagaagatggagatgactattaaatacatagatccaacttacatgatccgtgctattccaagcaatgcatcagacaatgtctattgcaccctgctcgcacatagtgccattcatggtgcaatggcgggatacagcttacaatcggaatgggtaatggcaagcatgcatatata

SEQ ID NO: 20029 - DNA, 250 bp, Zea mays
cgcggtctgctcgttcgatctgtgcagcagatctgaggtcccgggcgaccgtgaagcagcttcaatcgtcggcatggcgctcgtattgcatagtggggctggaaacaagaatgccttcaaagcacttattgctgcagaatacagtgggatcaaggttgagttgaccaaggattttgagatgggtgtctccaacaagacccctgagtttcttaagatgaacccccttgggaaggttcctgttctggagact

SEQ ID NO: 20030 - DNA, 259 bp, Zea mays
gcggcggcgcgggcggacaaggagcaggcggaggaggagttgtgccaagccacaatgggtatctcgcgtgactcgatgcacaagcgccgagccaccggtggaaagcagaaggcctggaggaagaagcgaaagtatgagcttggtcgccagccagccaacaccaagttgtcaagcaataagacggtgaggagggtccgtgttcggggaggtaatgtgaaatggagggctcttcgccttgatactggtaactactcatggg

SEQ ID NO: 20031 - DNA, 84 bp, Zea mays
caaagtatgctctcaaatatgaaaatgatgctggcaagaaggaaattcagctgcagcttgagacgatgaagaaatatgcttctg

SEQ ID NO: 20032 - DNA, 178 bp, Zea mays
tgcttcgtgttggtgaccttgagcgttctatcaagttttatgagaaggccctagggatgaagctcctaaggaagaaggatgtacctgattacaagtataccattgccatgttgggctatgctgatgaggacaagacaactgttctggagctgacgtacaactatggggtcacagaata

SEQ ID NO: 20033 - DNA, 246 bp, Zea mays
gggtcgggaagctgcgccaccgccgcctggccaacctgatcggctactgctgcgacggcgaggagcgcctgctcgtcgccgagttcatgcccaacgacacgctcgccaagcacctcttccactgggaaaaccagacaattgaatgggctatgcgcctgagagttgcatactacatcgctgaagcactggaatattgtagcaccgaaggaaggcctttgtatcatgacctaaatgcatatagggtcc

SEQ ID NO: 20034 - DNA, 249 bp, Zea mays
atcaagacctgtggcactaccaagctcctgctcaccattccaagaatccttgagcttgctgaagagctgtctatgccacttgctgctgtgaagtactcccgtgggacgttcatctttcctggcgcacagccagccccccacaggagcttctctgaggaagttgctgcacttaaccgctactttggcggcctgaaatctggtggtaatgcttatgtgattggagatccagcaagacctggacagaagtgg

SEQ ID NO: 20035 - DNA, 252 bp, Zea mays
agagaagcacgcccaaaaattccaaggtttttcacctcttggagcgcaccaacaccacccggagaccggagcgactcgccaccggcgcggaaaaggagggcggaggctcgatggcggatgagaatcaggctggaaagaaagaggaggaggaatttagcacaggccctctgtcagtcctaatgatgagtgttaagaacaacacccaggtcctcatcaattgccgcaacaacaagaagctacttggccgtgttc

SEQ ID NO: 20036 - DNA, 253 bp, Zea mays
cccacgcgtccgcagagccaaaaggaaaagcagctctcatatggatgttgggagaatattcacaggacatgcatgatgctccatacatccttgaaagtcttgttgaaaactgggatgaagagcactctcctgaggttcgcttgcatctcctgacagcagtgatgaaatgtttctttaaaagacccccagagacacagaaggccctaggggatacattaacagctggtctatctgaaacccatcaggatgttca

SEQ ID NO: 20037 - DNA, 249 bp, Zea mays
accagctttgaccgccgcctcccttcccctccgctactgcgacctccccaccccactcccccgcaggagcggcggcggcggcggcggcgaggtcgtaccccacatcggcgagcggcggcggcaccgcggaggcaaaggcaagatgttcgggcgcgcgccgaagaagagcgacaacaccaagtactacgagatcctcggggtgcccaagtcggcgtcccaggacgacctcaagaaggcctaccgcaaggc

SEQ ID NO: 20038 - DNA, 250 bp, Zea mays
cacatcccgtcgcatcccatcccactaccacccatctcgtcgtccgccgattcgatccggttcttccaacccaggggcagtgatggcgacgaagaggagcgtgggcaccctcggcgaggcggatctgaaggggaagaaggtgttcgtgcgcgccgacctcaacgtcccgctcgacgatgcccagaagatcaccgacgacacccgcatccgcgcctccgtccccaccatcaagttcctcctcgagaagggg

SEQ ID NO: 20039 - DNA, 246 bp, Zea mays
  unsure (1)..(246): unsure at all n locations
ggtgttgatccgtgccccgctcggatctcgggactggtgccggctcggctcggctctgccccaggctccaggccagctccctcgacggttcacggcgagttcgcctgccatggagggcgacgcggacggcgtgaagtcggggaggcgcggtggcggacaggtgtgccagatctgcggcgacggcgtgggcaccacngcggagggggacgtcttcgccgcctgcgacgtctgcgggtttccggtgtg

SEQ ID NO: 20040 - DNA, 238 bp, Zea mays
gaagagcaaaggaagcgggatgccgctgcccaggctgctgccaacgcataaatcctctgaatgtgctgtgttgagagttttttctagttgctctgcaaggatatagaacaatgttctaagactaccatgtttttaagtctgcctgatgcttataattcatgaacgatttttgcagctagctgtaatgtgactatttatcttatctgcttgttcaacaaaaaaaaaaaaaaagggcggc

SEQ ID NO: 20041 - DNA, 243 bp, Zea mays
gcaatgcccggcatggatgccttcgctgctgtgtcactactcgccacactctttctggttcgtgcggcagctgcccatcctccggcggcggctgcggacgccatgacgccgacggactattggcgagcggtgcttcctgagaccccgatgccccgagccatactcgacctattgaccacatctacaggtgaggaaggctcaaggaaggtcaccacgtcaaatgggtaccaaggccatgactta

SEQ ID NO: 20042 - DNA, 154 bp, Zea mays
ccgcgtgcgaaccaagcagaccacagcaagaagcgtagtcgtcgccggaaggaaaggcgcggacaagatgtcgtggcaggcgtacgtcgatgagcacctgatgtgcgagatcgaaggacaacatctcagcgccgccgccatcgtcggtcacgac

SEQ ID NO: 20043 - DNA, 245 bp, Zea mays
cccacgcgtccgcccacgcgtccgacacaccacaccacacctcctcgcttccactccgctcgtctgacatctcgtcccgtcctttcgtttcgaagcctcgcgagccccgacgatggccaccgccgcggtgtcggtcgacgagaagctcgacaagcttcgcgccgaggtcgccaagctcgaccagatcagcgagaacgagaagtccgggttcatcagcctcgtgtcacgctacctcagtggggaag

SEQ ID NO: 20044 - DNA, 249 bp, Zea mays
agcccaccaagagcgaccccaacagcgagagcaggctcacgctggtcgacggcgacgtctacgtgccgcgcgacgagcgcttcggccacatcaagaagtcggacttctacggctacgccatcaaggcgctggtgaacgccgtcatcccggcaatccgcacctacgtcgacctgtcgcccggcgagttcgactccttcaaggacatcatgaagctgtacgagggcgggatccagctgcccaaaataccag

SEQ ID NO: 20045 - DNA, 254 bp, Zea mays
cccacgcgtccgcccacgcgtccggaagcagcagccaattcgctcgagttcagatcgagcgcgcgccaagcaagtcttccggccggccgcgaagagcgcaatcaagcaagacaagatggtgaagctcgccttcggaagcgtcggcgactccttcagcgccacctccatcaaggcctacgtggccgagttcatcgccaccctcctcttcgtcttcgccggcgtcggttccgccatcgcctacgggcaactgacga

SEQ ID NO: 20046 - DNA, 254 bp, Zea mays
cgcaacgacgaggagctcgggaagctgctggccggcgtcaccatcgcgcacggcggcgtcctccccaacatccactccgtgctcctgcccaagaaggcggcggagaaggcggccagcggcggcagcaaggagcccaagtcccccaagaagggcgccaagtcccccaagaaggcttagaaagtagggtcttcatttgcgctgtgtgctgtagcatgttcgtgtctagatctgtggatgggatgtgtcctgctcta

SEQ ID NO: 20047 - DNA, 248 bp, Zea mays
cccacgcgtccggagggagatggccctaccgctgtcaccggaagtgtctctggcctcaagcctggcctccatgggttccatgtacatgcacttggtgacaccaccaatggatgcatgtcaactggaccacactacaatcctgcgagcaaggagcatggggcaccagaagatgagaaccgccatgctggtgatcttggaaacgtgacagctggagcagatggtgttgctaatatcaatgtcactgacag

SEQ ID NO: 20048 - DNA, 247 bp, Zea mays
gatcaagggacgatctcctccgtgcagacatgggcgacgacgggtcgtccggcgagatgatccgcgccatcgcggcgtcgcagctgagcttcaagtaccaggagctgcgcgcggcgacggacgagttcagccagacgaacaagctcgggcagggaggctacggctccgtgtacaggggcgtgctggcggacgggcgggaggtggcggtgaagcggctcttcttcaacacgcggcagtgggcggacag

SEQ ID NO: 20049 - DNA, 239 bp, Zea mays
cggaccgtggatttcaaggaggagaacaacgatggctcaacaaatttcaggcgcacctaaagccctgtacaagtcctttgtttctgagtaccctatcgagtcgatcgaagacccatttgatcaggatgactggagcacttatgccaaactcactgatgagattggacagaaagtgcagattgtaggagatgatcttctcgttaccaaccccaccagggtcgccaaggcatcaatgagag

SEQ ID NO: 20050 - DNA, 218 bp, Zea mays
cccacgcgtccgcgaatcgttctatacgctgcggaagccggttgcctccaccataaacacgttggccggtgctctgtacaaggtcttcagcgcctcgcctgatcaagctaggaacgagatgcgccaggcctgttttgattacttgagcctcggaggcgtcttctcgaatgggcctattgctttactctcgggtcttaatcctcggccactgagttaag

SEQ ID NO: 20051 - DNA, 243 bp, Zea mays
cccacgcgtccgcccacgcgtccggggcagctaataaggtaataaggggcgacgaaaatggctccaacgaccgccaccaaggacgacagtggctacggcgacgagcgccggcgcgagctgcaggcgttcgacgacacgaagctgggggtgaaaggcctggtggactccggcgtcaagtccatcccgtccatcttccaccacccgccggaagccctgagcgacataatttctccggcgcctctg

SEQ ID NO: 20052 - DNA, 242 bp, Zea mays
ggatagcctcttctcggaggctggtattcctcttcagtacaccaataatgctgagcccaacctcctcagcggaggtgacctgcaatgtttgttatgatgatgtgccaccctcgtgtgccttggagatggactgcggccacagctactgcagtgattgttggactgaatatttcattgtgaaaattaatgagggtcagagccggcgtgtcagatgcatggctccaaagtgcaatgctatttgt

SEQ ID NO: 20053 - DNA, 233 bp, Zea mays
ggccaatgctctgctgcaacccatttttcaaggcacacagtggtcggaaatctggcagctgatcagcgcgagattctcctttctgctcataggttgctccaggcaatggttgatgttatatccagcaatggttggcttagtcttgctcttagtacaatggagctgagtcaaatggtgacacaaggcatgtgggatcgggattctgtgctgcttcaagttccacacttcacaaa

SEQ ID NO: 20054 - DNA, 142 bp, Zea mays
cgcgatgtcaccaccacccccgccgagctcgtcaccttcttccgcgacatgtccctcatgcgccgcatggagatcgctgccgactccctctataaggccaagctcatccgcgggttctgccacctctacgacggccaggagg

SEQ ID NO: 20055 - DNA, 190 bp, Zea mays
ggttgttctatcatcggttcaagacgatttttttagagctaacatgtttgagaactttggggaccttggtatgaacctcaaaagaatggtagatgattttcaacatctttccaagagcagccttaatctccagagcataggtgacatggcaaagtttgtgagcaactatcctgaatatcgaaagacacat

SEQ ID NO: 20056 - DNA, 157 bp, Zea mays
caagagcacgcactgaagcaccactacttcctgcgctgctgctcatcacacaccgtagtagcaacagtccatcgccacaatggctcccaaggttgcgctcttccttgccctcagcctcctcttcgctgccgccgcgcatggctgcgaaccctactgt

SEQ ID NO: 20057 - DNA, 232 bp, Zea mays
cccacgcgtccggaccttgcctctgacgtcaatgacgccacgctgctggaggccttctccagcaggtactcctctgtcaaaggtgccaaggttgttatcgatgctaacactggtagatccaagggctatggctttcttaagttttgaaatgacaacgagaagacacaggccatgactgagatgaacggcgtgtattgctcgtctaggcccatgagaattggcccggcaactc

SEQ ID NO: 20058 - DNA, 135 bp, Zea mays
aaatccccaaagcctccgacccccttcctctctccctccgccgccgctgcgcacgcagggaacaagcgacatgggcgtctacacctttgtgtgccgcaacaacggcggcgagtggaccgcaaagcagcactcggg

SEQ ID NO: 20059 - DNA, 118 bp, Zea mays
ggctcctgtactgggtggcgcactggctggggtccaccgtggcgtgcgggctgctccgcttctcgacgggcgggcaggccacgggcaccttcgggctgacgggcgtgtcggtgtggga

SEQ ID NO: 20060 - DNA, 226 bp, Zea mays
caaaaagtacaactggggcaatcttgcatttgacaccaaggtctgcaaaacaaatgtctcatcaaaatcagcaatgaggggtcctggagatgttcagggctctttcatcgctgaagccatcattgagcatgttgcctcagcactttcagtcgacactaacaccataaggaggaagaaccttcatgactttgagagccttgtggtgttcttcgaagatgctgcaggt

SEQ ID NO: 20061 - DNA, 226 bp, Zea mays
ccacgcgtccgccttgacttctctgagatattgtcagatgaagagctagaaacacagctaaaggaggcagcagtaatatccatgggaacagaagttagtgaccttgacttatcgaatatcagagagctatgtgatcaagtgctggccctttctgagtacagagcccagctgtatgactatttaagaagcaggatgaacactattgcaccaaatttgacagcactgg

SEQ ID NO: 20062 - DNA, 226 bp, Zea mays
ccgtcatcgatctcgtttcaaatccatccatcctcgtttcctccgtcccgcagcatctcaaccccatggccaagatcaagatcgggatcaatgggttcggcaggatcggaaggctggtggccagggtggccctgcagagtgacgatgtcgagctcgtcgccgtgaacgaccccttcatcagcacggactacagaacctacatgttcagtacgacactgtgcacgga

SEQ ID NO: 20063 - DNA, 228 bp, Zea mays
cccacgcgtccgcgaggcaaaagcgcaaacgcgaccacagacagagcgcgcttcaaggccttttttttttgagataacaaggaggagaggaggagatggcggtcacgatcacctgggtgaaggcgaggcagatcttcgacagccgcggcaaccccaccgtcgaggtggacgtgggcctcagcgacggcagctacgcgaggggggccgtacccagcggcgcatccactg

SEQ ID NO: 20064 - DNA, 207 bp, Zea mays
caaccttccactccctccctccgtcgccatggcgcgcaagaagatccgggagtacgactccaagcgcctcctcagggagcacctcaagcgcctcgcgggcatcgacctcaccatcctctccgcccagatcacgcaatcaacggacttcgcagagcttgtgagccagcagccatggctgtcaaccatgaagctagtggtggagcccga

SEQ ID NO: 20065 - DNA, 206 bp, Zea mays
ggtgaagatctcttctatgagcacaccttgtctctgaccgaagcactatgtgggttccaatttgttcttacacatctggacaacaggcagcttctcatcaaatcagaccctggtgaagttgttaaacctgaccaattcaaggcgattaatgatgaggggatgccaatttaccagaggcctttcatgagaggggaactgtacatcca

SEQ ID NO: 20066 - DNA, 218 bp, Zea mays
cggacgcgtggcggacgcgtgggcggacgcgtgggcggggggtgggctacaatcctaaaaccatcagcttcagccttcagctagccccaagtgtagtcggccgatcgatcactgaagtagtaatggcctccgccaacagctggaccctcgagatcgcgtcgccggtggccccgcagcgcctgttccgcgccgccgtgatggactggcacaccctggcg

SEQ ID NO: 20067 - DNA, 207 bp, Zea mays
cggacgcgtgggttcgacgagaacgacgagcgggagaagaagagcgagagctccgtcttcagctggttctacttctccatcaacatcggcgcgctggtggcgtccacggtgctggtgtacgtgcagacgcacgtgggctggggctggggcttcggcatccccgccgtggtcatggccatcgccgtcggcagctgcttcgtgggcacg

SEQ ID NO: 20068 - DNA, 253 bp, Zea mays
catgaacccctcgggcgagctctccagcgcccgcttcagcgagaaggagctgatcagcgccatcgaccgcgaggccgtgttcacgtacgcggaggacgcggccagcggcagcctgccgctgatgcagaagctgcgcgccgtgctggtggaccacgccctcagcagcggcgacgcgaagcggaagccttccgtgttctccaagatcaccaggttcgaggaggagctccgcgcggtgctgccccaggaggtggag

SEQ ID NO: 20069 - DNA, 251 bp, Zea mays
ctgacacaagagagcacgctactactcatcactcgccaacgtgcagagatcagggaggcggcacactccatccactgaccgctcatggcgaaggtccacctctacgtcgccgcggcctgcgccgtcgtcctcgcgctcgccgccccggccctcgccggcgaccccgacatgctgcaggacgtctgcccggctgactacgcctccccggtgaagctgaacgggttcgcgtgcaaggcgaacttttcggcgga

SEQ ID NO: 20070 - DNA, 250 bp, Zea mays
ggatgacgacgtgcgcaagtacgtgaacacgtaccgcaggacattcactaccaagaatggcaagaaggtgagcaaggcacctaagatccagcggcttgtgacccccttgaccctccagaggaagcgtgctagaattgctgacaagaagaagaggatcgctaagaagaagtctgaggctgctgagtaccagaagcttcttgcccagaggctgaaagaacagagggaccgccgcagtgagagcttggccaag

SEQ ID NO: 20071 - DNA, 247 bp, Zea mays
cagcgccattagaggccacaagcccgcaccacgcctccctcgttctcgcgcgcgcgcacgcatgcacgaggagctgctgcagagaagaggaggcctgtcgatttgattgaactttccaaattcagattcagaagctggccaagatgactgccggtttccagctcggcgtgatcgggtctctcacgctctccgtcgcgtcgtcggttgccattgtcatctgcaacaaagccctcatcagcaccctagg

SEQ ID NO: 20072 - DNA, 244 bp, Zea mays
agacaagaaaaagtcacagaagcatgtggacagttctgtgccagtattcaatcttgaagatatagaggagggagttgaaggcgctggatttgatgatgagaaatcacttcttatgtctcaaatgagcttggagaagagatttggccaatctgcagcttttgttgcgtccactctgatggaatatggtggtgttcctcagtctgcgactccagaatctcttctgaaagaagctatccatgtcata

SEQ ID NO: 20073 - DNA, 245 bp, Zea mays
ctccaccacaccacaggcaccggcaccggcaccgcctcctccctccctcctgccaccgcgcggcaccccagccacagcacagcaatggcgggcaacggcgccatcgttgagagcgacccgctgaactggggcgcggcggcggcggagctggcggggagccacctggacgaggtgacacgcatggtggcgcaggcccggccaccggtggtgaagatcgagggctccacgctccgcgtcggccaggt

SEQ ID NO: 20074 - DNA, 245 bp, Zea mays
cgaacccaaccgaagcgagagctgagcaaggcagaggcggcgtgaccggcgatggagcggctgcagcggatctttggcgcctccggcatggggcagccgccgacggactcgccgctgctcgattcctccgagcaggtctacatctcctccctagcgcttctcaagatgctcaagcacgggagggctggggtgcccatggaggtcatgggcctcatgctcggcgagttcgtcgacgactacaccgt

SEQ ID NO: 20075 - DNA, 245 bp, Zea mays
cgacgttttgcatctccaagcagcatcgtctcctccccagatccatcaattcgttcggaccgcccttctcgtgtccccgttccaaagcgcggcaggctgagcggttccgtcagatttgagtcgtcatgaatcccgagtatgattaccttttcaaacttctgcttatcggtgattctggtgttggaaaatcatgcttgcttctcagatttgcagatgattcatatctggacagctacatcagcaca

SEQ ID NO: 20076 - DNA, 242 bp, Zea mays
atgtggaggagggctttagcgatggtcctgttcatggctggcgccgcgctgctcgccggggctgccggcgccggcgcgcagcagggcgtgtggagcatcatcacccggcccatgttccagagcatgctgagccaccgcggcgacagcgggtgccagggcgccttctacacctacgacgccttcatcgaggccgccagcaagttccccggcttcggcaccaccggcgacgagcagacgcgcag

SEQ ID NO: 20077 - DNA, 242 bp, Zea mays
ggaactcccgggctcgaggagatcgggacgatgatgggagggcgcgctctgctgctgctcctggtctcggcgctgctcgttcagatccgcgcctctgacccgctgctgtacgagccgtttgatgaggacttcgagggtagatggatcgtctccaagaaggatgaataccaaggtgtatggaagcatgccaagagtgatgggcatgaggactatggcctccttgttagtgacaaggcaaggaa

SEQ ID NO: 20078 - DNA, 242 bp, Zea mays
agcgctcaccgtctctgtctcctcctcccacaaaaagcagctgaattgctccgtcggcgtcatgtgtggcatcttagccgtgctcggatgctccgactgctcccaggccaggagggctcgcatcctcgcctgctccagaaggctgaagcacaggggccccgactggtcgggcctctaccagcacgagggcaacttcctggcgcacagcggctcgccatcgtctccccgctgtccggcgacca

SEQ ID NO: 20079 - DNA, 234 bp, Zea mays
gagaatttgcgatacccgataccgatctaggagaagagaaaggcgtcatgtcgtcgttcggacgcaattcatggtgtatcctcgtgctggcctccgtgctcctcctgtcctgcctcgccgagacggccgtggccaaccgaacaggcgagctcaccgtcttctggggccggaacaaggaggagggcaccctgcgtgaggcctgcgacacaggactctacaacaccgtcatcatct

SEQ ID NO: 20080 - DNA, 237 bp, Zea mays
gtcagaccaatcaacaaagtgacgcgagcacgagcatccatcgtttccccttcttccccatcgcgtgccctcgccgcagccatcttccatggcggaccagctcacggacgagcagatcgcggagttcaaggaggccttcagcctcttcgataaggatggcgacggctgcatcactaccaaggagcttggaactgtgatgcgctcccttggccagaaccccactgaagcagagctgca

SEQ ID NO: 20081 - DNA, 236 bp, Zea mays
cggacgcgtggaccacacaccccacctaccccggccggaccggcaggcagcacagcatggacctcgccctcagagagaaggccctgctgggcctgttcgccgcggctgtggtggccatcgccgtggccaagctgaccggcaagcggtaccgcctcccaccggggcccccgggcgcccccgtggtgggaaactggctgcaggtgggcgacgacctgaaccaccgcaacctgatggcc

SEQ ID NO: 20082 - DNA, 242 bp, Zea mays
cgacgagcgccggcgcgagctgcaggcgttcgacgacacgaagctgggggtgaaaggcctggtggactccggcgtcaagtccatcccgtccatcttccaccacccgccggaagccctgagcgacataatttctccggcgcctctgccgccgtcgtcgtcgccctccgccgccgccatcccggtggtggacctctcggtgacgcgccgcgaggacctagtcgagcaggtgaggcacgcggccg

SEQ ID NO: 20083 - DNA, 236 bp, Zea mays
cggcggcgtaggtagcggcggtgtgcttgtgatctcaatctcaaccccaggcgagctcggctccggtcacccgtcgatccacgcaaccatgtcgaggaggaagaccagggagcccaaggaggagaacgttacccttggacccactgtccgtgaaggagagtttgtctttggtgttgctcacatctttgcatccttcaatgacaccttcattcatgtcactgatttgtctgggaggg

SEQ ID NO: 20084 - DNA, 241 bp, Zea mays
cctagacaaagttaatatgtcactctggcctcgcttcaagatggtgttcgacttgcatttgaacagcttgcgaaatgcaaatattaaaacactttgggaggatgatgtccatccacactatgttacaaggagatatgctgaatttacagcttctctagttcatctcaatgttgagcatggggacggtcagcttgatctaaatttggagcgattgcggatggccattgaggatttgcttgtt

SEQ ID NO: 20085 - DNA, 234 bp, Zea mays
gcagtaaagccggctttatgtgcctagaaactagtagctagtgtttgctgctgtcgaatgacactatgcaatgtgatctggaacctggtttcttgggtgcgacgcttgtagccgtgttatgactgtcgtccgtaaaatttgggggctccccgtaaggcatgctgcctggcaaggcctcggtgtcccacttcgtctgtggcgtggggcgctggagcccggtctggttgggttggg

SEQ ID NO: 20086 - DNA, 237 bp, Zea mays
gggcacgattgacccctactttgtcaagctcggtgacgccatggtcacctggatcgaggcctgggatgagctgaacccgtcgacccctgccgccgcaaatggcaaggccaagtagatgtgccatcacttcggcactggagtgaaaaagaaagtatgattgggtcctgcctaggccccatagatatagctcttttttgagaaggaagagagattaattcagcagcagcttttataaat

SEQ ID NO: 20087 - DNA, 238 bp, Zea mays
ccacgcgtccggatgacatggcaggaggaacattcaccatctccaacggtggtgtctatggaagcctcctcagcacacctatcatcaaccctccacagtcgtctattctggggatgcattccattgtgcaacgccctgtggttgtgaatggtgacatccttgcgaggccaatgatgtaccttgcgctgacttacgaccacaggttgatcgatggcagagaggctgtcttcttcctgcg

SEQ ID NO: 20088 - DNA, 233 bp, Zea mays
catcactactacactccaaaatgtgctttaaccagggcttctgtctactgtaccccaatcggggatttgccagtagaccaggaagtcattgaggaactcagtgctactggaaagtttgaatttatggaccttaatgtggatgaagctgaacatagcatggaaatgcatttgccctaccttgctaaagtatttcaaggacataatgtgaaagtcgtccctatccttgttggtgc

SEQ ID NO: 20089 - DNA, 233 bp, Zea mays
tctgactgaagaggaccagaagatattcaagtacttagactccattgatgtggatgattctgatgttaaggcaggatactccattcatcttaacttctctgagaacccgtactttgaggacacaaagcttgcaaagacctatatctttgctgatgatggaacaaccacaataaaagcttccgaaattaagtggaaggaaggaatgggacctgcaaatggaaatggtattaaca

SEQ ID NO: 20090 - DNA, 232 bp, Zea mays
cccacgcgtccgcccacgcgtccggggaaagggagctatagagtatgaagagtttctgaaaaccggtgacccggagttcagttggaagccaccgacagacgaatggcagagcatcgccctaggctacacttctgggactacttccagcccaaagggcgtcgtgttgcatcaccgcggtgcttatctcatggcactcagcgttgccatcgtgtgggggatgcctgaaggggct

SEQ ID NO: 20091 - DNA, 233 bp, Zea mays
attgctgaagggtgcagatggtgtactcgttcctggaggattcggagataggggagtccagggcaaaattcttgccgcaaaatatgcacgcgagaacaatgttccttatcttggcatttgcttgggaatgcaaattgcagtgattgagtttgcccgttcggtgatgaaactacgaggtgccaatagcacggaattcgatccagctacaacatcaccctgtgtcatcttcatgc

SEQ ID NO: 20092 - DNA, 234 bp, Zea mays
gcccgggatggcgaccatggagagcctgatcgggctggtgaaccggatccagcgcgcgtgcaccgtcctcggcgaccacggcggcggcggcggtgagggctccctctgggaggcgctcccctccgtcgctgtcgttggcgggcagagttccgggaagtcgtcggtgcttgagagcatagtagggagggacttcctgccccgtggatctggtatcgtcacgaggcggcctttagt

SEQ ID NO: 20093 - DNA, 231 bp, Zea mays
gttgccaatgaagaccaaggatgggcgtggcacaactgatgcatattgtgttgcaaagtacggacaaaaatgggtgcgtaccaggactataatcgacagtttcactcccaaatggaatgaacagtacacctgggaggtgtatgatccatgcactgtggtcacaattggtgtattcgacaattgccacctgaatggcggggaaaaggccaatggtgcgagggacaccagaat

SEQ ID NO: 20094 - DNA, 224 bp, Zea mays
gagcccaacaagggtgtcacctgatgaggctgttgcctttggtgccgctgtgcagggaagcatcttgagcggcgagggtggtgacgagaccaaagatatcctcctccttgatgtggttcccctcaccctgggtatcgagaccgtcggtggagtcatgaccaagttgatcccgaggaacactgtcatcccgaccaagaagtcgcaggtgttcaccacctaccagg

SEQ ID NO: 20095 - DNA, 229 bp, Zea mays
atgggaggcgccaaagattgacaaccccaagtgtgaagaggcacctggatgtggcgagtggaagaggccaatgaagcagaatcctgcttacaagggcaagtggcatgcacctatgattgacaaccccaactacaagggaatctggaagcctcaggagatccccaaccctgagtactttgagcttgacaagcctgactttgatccaattgctgctattgggattgagatc

SEQ ID NO: 20096 - DNA, 219 bp, Zea mays
agttcttgaagaacggcgatgctggtatggtgaagatgattcccaccaagcccatggtggtggagacattctcgcagtatcctccccttggtaggtttgctgtccgcgacatgaggcagacagttgctgttggagtcatcaagagtgtggagaagaaggacccgaccggcgccaaggttaccaaggcagctgccaaaaagcagatacaggattaacgac

SEQ ID NO: 20097 - DNA, 229 bp, Zea mays
cccacgagtccgcccacgcgtccgcgacagcatattccaggtcggttggttttggcacttcggaccggcggccatggcttccgacggcatcggccccagagatgtatgtgttgttggggttgcacgcaccccaatgggcggtttccttggtgccttgtctcccttgcctgctacgaaacttggctctatagtaattcaagctgctctggaaagagcaaacgtggatcca

SEQ ID NO: 20098 - DNA, 231 bp, Zea mays
ctctgcttgtgcttgtgcaatgcagggattgcggcaagcaggtctatttgggcgggtttgacaccgctcatgcggcggctcgggcgtacgatcgggcggcgatcaagttccgcggcgtggaggccgacatcaatttcagtctggaggattaccaggacgacatgaagcaggtgatttatactcctatacggagcatgtagcgagaaagatacatgtaattttttctttcct

SEQ ID NO: 20099 - DNA, 226 bp, Zea mays
cttgactatacacctcatgcttggaacattgttcctgttaaaaagaggaatggctgggtaaggatgattgttgatgcttgttaccccaccaacataaaggaagagacagatccagagtacttttgcaggtatataccactcagtcgacttcaaattgtgctcgatgatgagggctatactcctcggtgctctttcccatctgtgtcatcatgcaaagaaattgaag

SEQ ID NO: 20100 - DNA, 215 bp, Zea mays
ggacctggtcgcgactcgcggtgcgtgagcttccggcagcggctgtacggacagaacaacaacgggcaggtggaccgcacgctgaacccggcgtacgcggcggactgcggggccggtgcccgcggtcgggcggcgaccagaacctgttcgcgctggacctggtgacccagttccggttcgacaaccagtactaccacaacatcctggccatgaac

SEQ ID NO: 20101 - DNA, 223 bp, Zea mays
gaagaggggcactctcggcgggacctgcctcaacgtcggatgcttcccatccaaggctcttttgcattcatcacatatgtatcatgaagcaaagagttcttttgcacaccatggagttaagttttcaaatctggaagtggacctcccagccatgatggctcagaaagacaaagctgtggcaggactaacaaagggaattgaagggctctttaaaaagaacaag

SEQ ID NO: 20102 - DNA, 224 bp, Zea mays
cccacgcgtccgcgcacgccccgccgctggctgcgtcgggctacaccccgcgccgcgagtacggcctggtgcccatggtgatcgagcatacctcccgcggggagcgcgcctacgacatcttctcgcgcttgctcaaggagcgcatcgtatgcatccatggccccatcactgacgatacggcgtccctcgtcgtcgcccagctgctcttcctcgaatccgagaac

SEQ ID NO: 20103 - DNA, 225 bp, Zea mays
atcaacgaagcttgcttctacgagaggatatagagagtaagaacagctcgtccgagaccatgaagaacagcccacaccaggtgctgatcctgtgcctccaggccgctctggtcatgggcgtcttcgccgctttggctaaagaaaatgccctggttgagagcaaggccatcgacatcaacccggggcagctcaagtgctgcaccaactgcaacttctccttctcgg

SEQ ID NO: 20104 - DNA, 226 bp, Zea mays
gaagaagcaatccaagcaactgaagatcagctgcaacctaaacaatgctgcctgcaaactgaagttgaaggattacaaggaagctgcgaactttgcaccaaggttctggaactagacagccaaaatgtcaaggctctctacaggagggtgcaagcttacattcaacttgctgacctagagctagcagaggccgatatcaaaaaggcactggaaatcgatcctgaca

SEQ ID NO: 20105 - DNA, 230 bp, Zea mays
cagcaaggacagcaaccacagcgtcctgctggtagacgtgctggtggaatgcagcagcccatgccaatgggtggtcagcaacaggtgttccctagaggtggtcgtggctatcgctatcctactggacgtggaatgcctgatcctggcatgcacagtgttggtgctgtgatgccaccttcatatgagatgggagggatgccaatgagagaagctgccccccaacctgttcc

SEQ ID NO: 20106 - DNA, 216 bp, Zea mays
cgagaccgtggcttccgcgccgcctcccggccgtcgccgccatggtgaagtactcgcaggagccacgcaaccctaccaagtcggctaaggccatgggcagggatctgagggtccacttcaagaacacaagggagacagcctttgcgcttcgcaagttgtctttgaccaaggctaagcgataccttgaggatgttattgctcacaagcaggcaattc

SEQ ID NO: 20107 - DNA, 219 bp, Zea mays
gggagtagtcgacgcgccgtcactgaatcctcagatcacggctagccgtaatcacgccactctgctgactcccggcgagcagtgtaacattttccttcagccatgggcaaggagaagactcacatcaacattgtggtcattggacatgtcgactctggcaagtcgaccaccactggccacctgatctacaagctcggcggtattgacaagcgtgtgatt

SEQ ID NO: 20108 - DNA, 219 bp, Zea mays
gtttgccttgtttaccattcctccccaaaacacatcctgcgatcctcgaagcctccgccgagcatcgatcatgtcggcctactgcggcaagtacgcggatgagctcatcaagaatgctgcctacatcggcacccctggcaagggtatccttgctgctgatgagtcaactggcaccattggcaagcgcctttccagcatcaatgtcgagaacgtggagga

SEQ ID NO: 20109 - DNA, 214 bp, Zea mays
cccacgcgtccgcccacgcgtccgcccacgcgtccgggagcagggagcacgccgcacgagccctttccgccgccgccaaaatggtgaacgttcctaagaccaagaagacctactgcaagaacaaggagtgcaagaagcacactctccacaaggttactcagtacaagaagggtaaggatagcctgtctgctcagggaaagcgccgttatgaccg

SEQ ID NO: 20110 - DNA, 241 bp, Zea mays
caaaagttaagcaaaggattattgagtatttggctgttcgtaagcttaaacctgatgccaggggtccagtgctgtgttttgttggaccacctggtgttgggaagacatctttggcctcctccatagcaaaggccctgaacagaaaattcataagaatctctcttggtggtgtaaaggatgaagctgatattaggggccaccgaaggacatacattggaagcatgccagggagacttattga

SEQ ID NO: 20111 - DNA, 241 bp, Zea mays
ccccttcctgctttccctctccagctctcatacacaaacacacggagctagcagcacggatcgagagaacaatggaggaaacaagcaggatccctgggtacttcaagaacaagggcatcctgatcacgggcgcaacaggcttccttggaaagatcctcgtggagaagatactgagggtccagccggacgtaaagaggatctacctccccgtgcgtgcgccggatgctgcatcagccaagaa

SEQ ID NO: 20112 - DNA, 237 bp, Zea mays
cctctgtactgattccagctctgcgcacggtgggtaacatcgtaactggggacgacatgcagactcagtgtgtcattgacaatcaagcacttccatgccttttgaacctactgaccaccaaccacaagaaaagcatcaagaaagaagcatgctggacaatctcaaacatcacagctggtaacagggaacagattcaggccgtgattaatgcaaacataattgcacctctggtgaact

SEQ ID NO: 20113 - DNA, 167 bp, Zea mays
accgcctcctagaactcgaccgccatggcgagccaaggcgagcgtcttcctccgatccgaagggaagaaggattactcgacggcgatcctggagaggaagaagtcgccgaaccggctggtggtcgacgaggccaccaatgatgacaactccgtcgtcgctctgcacc

SEQ ID NO: 20114 - DNA, 164 bp, Zea mays
ggacgggtccgcacataccctccctacctcgccgtcgccgtcgcatctgccatgggggcgtacaagtacgtctcggagttatggagaaggaagcaatccgacgtgatgcggttcgttcaacgcgtgcgctgttgggagtacaggcagcagccggccatcgtccg

SEQ ID NO: 20115 - DNA, 237 bp, Zea mays
gaagaactggatcttcttcatacgattacagaagttcttctggaggaggaacagtcattcttgatgattgcaatttccatgagtcagtacatctggacagttttgatattgacagaactttgactttaataccgcccgatggagaatttcctgtaatgaactaccgtatgacccaagaatttaagccaccattccgtgtaaccgcactaattgaagaagctggaccagcgagggctg

SEQ ID NO: 20116 - DNA, 236 bp, Zea mays
aaaatatagtttgcagtcctgatgaatttacaattgcacatccatggaaagatgagaagtcgaagcaacatatatatgatcgtgtttttgatgcaaacacaagtcaagaagaaatatttgaggatactaagtacctggtacaatcagctgttgatggatataacgtttgcatatttgcatatggtcaaactggttctggaaagactttcactatttatggttcagataacaatcct

SEQ ID NO: 20117 - DNA, 236 bp, Zea mays
ccgcagtccgcagaccggtcactcggcagtcggcacgcaggctagcagcacagcagcagccagagccatcccctctcctcgctacgcttcgcttcctcggcgccgattcctcctcctcctcctccaccctcgtccgtcccgttccggcgcgcgagctcgcccgagatggcgaacgcgagatcgggtgtcgctgtgaacgatgagtgcatgctgaagtttggcgagctgcagtcgaa

SEQ ID NO: 20118 - DNA, 230 bp, Zea mays
gagagaactcgctcgcgaaggctgaactcatggctcgcgtcttcgttgggaacctggatccgcgtgtcacggcgcgggagattgaggacgagttccgcacgtttggggttctgaagagtgtatgggttgctaggaaaccaccagggtttgccttcattgacttcgatgaccgcaggatgcacaagatgccattcgcgatttggatggtaagaatggttggagggttgagc

SEQ ID NO: 20119 - DNA, 153 bp, Zea mays
caaagcctcagatctcagtcgcctgcgccgccgcttcgttcgtgtggaggggagaagacaggaaatggcggcgactgagggcgtgctcttggggatgggcaatcccctcctcgacatctccgccgtcgtcgatgacgccttcctgacaaagta

SEQ ID NO: 20120 - DNA, 226 bp, Zea mays
cccacgcgtccgctctctggcatctctgaaatcatccccgagatggagatctgcgattttgactttgaaccctgtggctactccatgaatgcgatccatggctctgcattctccacaatccatgtgacgcccgaggacggtttcagctatgccagttatgaggttatgggcttggatgccactgctctgtcttatggtgaccttgtcaagagggtccttcggtgct

SEQ ID NO: 20121 - DNA, 221 bp, Zea mays
ggacctgggcgagatgtacaggaagatctccagagctgaatacagatgccctcgctccttctccggtgagctgaaggacctgcttttcagaatgctcgatccagatcccagtaccaggatatccatttcaaggatcaagagaagcacatggtacagaaaacctatcgaggcaaacgcggcaaagatcaagcacggcacagcaagagacaccaccgtgcgtg

SEQ ID NO: 20122 - DNA, 221 bp, Zea mays
gcctcctgtttatgtaaaccacagtaatgatggtgggccagctgttagggatatacatatggagaacttcagtgtcactgttggtggtcgtgatctaattcaagaagccactataacacttgcttttgggaggcactatggacttgttggaagaaacgggactgggaagacatcttttctcagagcgatggcattgcatgcaattgatggtattcctaaga

SEQ ID NO: 20123 - DNA, 157 bp, Zea mays
catgaggagagctgagaaggaacgcctgaaggaaggtgaggctgctgatgaggagcagaagaaactgaagaaggatgcaaagaagaagggtgcatcttccaaggagtctactgccaagggttcaaagaagaaggctactgctggtggctctgatgag

SEQ ID NO: 20124 - DNA, 158 bp, Zea mays
gcaggcggaggaggagctgtgccaagccacaatgggtatctcgcgtgactcgatgcacaagcgccgggccacggtggaaagcagaaggcctggaggaagaagcgaaagtatgagcttggtcgccagccagccaacaccaagttgtcaagcaataagac

SEQ ID NO: 20125 - DNA, 159 bp, Zea mays
cccacgcgtccgccgacaaggagatcctaaagatcgtcaaggagaacttcgacttcaggccagggatgatcaccatcaacctcgacctcaagaagggcggcaacaggttcatcaagaccgccgcatacggccactttggccgtgacgacgccgacttca

SEQ ID NO: 20126 - DNA, 247 bp, Zea mays
ggatgacaagataatagcagtatgtgctgacgatcctgaataccgtcactacaacgacatcagcgagctgtctcctcaccgcctgcaagagatcaagcgcttctttgaagattacaagaaaaacgagaacaaagaagtcgcagttgatgcattcttgcccgcgacaacagctcaagaagccattcagtactccatggacctgtatgcccagtatattttgcaaagcttgaggcagtagattgcaagc

SEQ ID NO: 20127 - DNA, 86 bp, Zea mays
cccgctatgaaacgagacgagagaagaatgagcaaggtttttgttcgcatctattgttgtccaatgatattgatatattgttccaa

SEQ ID NO: 20128 - DNA, 116 bp, Zea mays
atcctgtaatggaggatgaggacttgggtagcaggagggaaaggattttttctttatctactggtactgtacgtgcacgtgtttttgaccgttttcttttcgatacaccattcaca

SEQ ID NO: 20129 - DNA, 183 bp, Zea mays
caagaaggtgacccctgaggtgattgctgagtacaccgtccgtaccctccagaggaccgtacctgctgctgtgcctgctgttgttttcctctctggtggacagagcgaggaggaggccacccgcaacctcaatgccatgaacaagctcagcaccaagaagccgtggtccctgtctttctcctt

SEQ ID NO: 20130 - DNA, 255 bp, Zea mays
cccacgcgtccggttgtggtggaggatgaggaggaggaagatgaggacgatgacgatgatgacaaggatgatgatgaactcgatgaaggggatgccagtggcaagtcaaagcaaagcaggagtgagaagaagagccgcaagccgatgctgaagcttggcatgaagcccatcactggtgtcagccgcgtcactgtaaagaaaagcaagaatatactctttgtcatctccaaaccagatgtgttcaagagtccgaat

SEQ ID NO: 20131 - DNA, 248 bp, Zea mays
gtgaagacgctggtggggaagacgatcacgctggaggtggagtgcagcacaccgtcgagaacgtgaaggccatgatccagggcaaggaaggcatcccgccggaggagcagcgcctcgtcttcgcgggcaagcagctggacgacgacggccgcaccctggccgactacggcgtccagaaggagtcgacgctgcacctggagctgcgcctccggggcagcgagaggggcggctagcccatgggggtcccg

SEQ ID NO: 20132 - DNA, 236 bp, Zea mays
atgggaatatcacaaaggaagctggcccagtgaacatgaatttcactataccgatgtacaatgcatcaaagttgcaggtcaggtatcttcagatcgcaaagaaatcgaaggcatacaacccttatagatgggtgcgatacgttacacaagccaactcctacgtagctcgtctatgaggaatcagcatctgtactcttgtttccagtccattttttttgggtgtaatatttgagcgt

SEQ ID NO: 20133 - DNA, 238 bp, Zea mays
ctgggggtgcattcacttccctgctgaagtgaaaagaaagtatgattgggtccagcctaggctcccccatagatatagctctttttgagagggaagagggattaattcagcagcaggttctttttataaattctttgttgttatgaagcaggcggtacttttgtagttgatgaaggggatttgtcgccactgtcatttacataattcggacaataatttatattgtgtaatcttgaga

SEQ ID NO: 20134 - DNA, 242 bp, Zea mays
gccgaagtaaagtggacaaggagaagttgacatctggtactcgtgttgtacttgacatgacgaccttgacaataatgcgcactcttccacgggaggtggatcctgtggtatataacatgcttcatgaagatccaggaaatgtcagttactctgctgtaggtggtctgtctgatcagattagagagctcagggagtccattgagttaccacttatgaatcctgaactctttcttcgggtggga

SEQ ID NO: 20135 - DNA, 186 bp, Zea mays
tgtccgtgctcagggcgatgcagacagctccttggacaggctgtggcagaagaagaaggctgatatcaagcagtagattttacatctagtttaccaagaattggacactgccttagctatgttttgaattcatgtcactatatgcaatgttgtgatttcagctggtaccttaaatctgaagattta

SEQ ID NO: 20136 - DNA, 239 bp, Zea mays
caaggccccaactacccccagtctcggaagagaactatccagaagcgcaagactccaaagccgtcgccttcctatccatcccttcctcgccgcgggggtcgcctgagatcacataaacaatggtgaaggctgttgctgtgcttggtagcagcgatggtgtcaagggcaccatcttcttcacccaagagggagatggccctaccactgtcaccggaagtgtctctggcctcaagcctggc

SEQ ID NO: 20137 - DNA, 226 bp, Zea mays
gtccgcggcgcgactccgtctgcgttgttacgcagaagaaagtcccggataagttgctggatcagacgagcgtgacacacctgttcccgatcaccaagtacgtcggattgcttgccactggccttacagctgatgctaggtcattggtttcccaagcaaggaacgaagcagctgagtttcgtttcaaatggggctacgagatgccagttgatgtgttagcaaaatg

SEQ ID NO: 20138 - DNA, 271 bp, Zea mays
gagactgctgtgattactcaaggcgctgatccagtggttgttgctgaggatgggaaggtgaaaacgttccctgtgatcctattgcccaaggagaagcttgttgacaccaacggcgcaggtgacgctttcgtcggaggctttctctctcggctggtccagggcaagagcatcgaggactgcgtgacggctggttgctacgccgccaatgttatcatccagcgcccaggttgtacctacccagagaagcctgacttcaactagtgcaatactc

SEQ ID NO: 20139 - DNA, 269 bp, Zea mays
gggaaatagaggatactgtactcttagctttacagagtcctgaagtgtatgatgatattgctcgcggcacggctgcaaatttgagacaaatagacctcgcgctgttctttttgagggcccacctgggacaggcaagacatcttcagctcgagttattgccaaacaagcaggaattccactactatatgtgccacttgaagttgttatgtcaaaatattatggcgaaagtgagcgtctattgggatctgttttttcacttgcaaatgatc

SEQ ID NO: 20140 - DNA, 265 bp, Zea mays
agttgtcggtcgcccgcgccgtcgtctccgctccgccggccttcctgcgaaaccctagcgaggcgagcgagagagaaactagcggccatgttcggctacaggaaggctgacccggacctcgaggccggcgggtcctcgctgctgtacccgggaatgacggagagccccgagctgcggtgggcgttcgtccgcaagatctacgtcatcctagccgtccagctcgccatgacggccgcggtctccgccttcgtcgtcaaggtgcccg

SEQ ID NO: 20141 - DNA, 269 bp, Zea mays
gatgagcactaaggaggttgatgagcaaatgattaatgtccagaacaagaactcgtcctactttgtggagtggatccccaacaacgtcaagtccagtgtttgtgatatccctccgcgtggcctctccatggcctccaccttcattggcaactccacgtccatccaggagatgttccgccgtgtgagcgagcagttcactgctatgttcaggaggaaggctttcttgcattggtacactggtgagggcatggatgagatggagttcaccg

SEQ ID NO: 20142 - DNA, 270 bp, Zea mays
cagccagtgagtactgactgagtagcccgaagctcagagcaagcgggtgccagctgccaaggggggtgatggcgctgtctcgacgcatggcggctcccgtcctcgtcctcctgctcctcctcgtcgccacagagctggggacgaccaaggtggcggaggcgaggcactgcctgtcgcagagccaccggttcaagggcctgtgcatgagcagcaacaactgcgccaacgtgtgccagaccgagaacttccccggcggcgagtgcaaggcgg

SEQ ID NO: 20143 - DNA, 271 bp, Zea mays
aacaaagccaacgtgatcagagagggatatatagctagctagctagcatagcatggcgcttgtagccgacgacgacgccgagctcaaggccaaggccaaggccaaggccgaggtctactacggcgacgaggcctgtcagctgtgcgcgcactcctgctgagggaagcaggcctccccaacggcctgctgccgctggaggacctgacggagtgcggctacgtccaggagaccgggtacgtgtggctgaagcagggcaggagggtcgaccacg

SEQ ID NO: 20144 - DNA, 170 bp, Zea mays
gcatcagctagctaactaagcaagtaagctaagctagccccaggcaacgagccgaccgtcaagctcatcgcagaccacgagccatggcctccaccaacagctggactgttgagatcgcctcgcctgtcgccgcgccgcgcctcttccgcgccgccgtgatggacaggcac

SEQ ID NO: 20145 - DNA, 135 bp, Zea mays
aaaaatgtttcaatctacaaaacccaagcatctgctcttgaagcccatgcggcccccaactgcaaggttctggtggttgccaacccagcgaacaccaatgctcttatcttgaaagaatttgctccatcaattcct

SEQ ID NO: 20146 - DNA, 251 bp, Zea mays
gggcgggcgctgccgccgcagccgaccgtgaaggtgtactgccgcgccaaccccaactacgccatgagcgtccgcgacgggaaggtggtgctggcgccggcgaaccccaaggacgagtaccagcactggatcaaggacatgcggtggagcacgagcatcaaggacgaggaaggttacccggcgttcgcgctggtgaacaaggcgaccggggaggccatcaagcactcgctggggcagtcccacccggtgcg

SEQ ID NO: 20147 - DNA, 262 bp, Zea mays
gcaagagagagcaagagaagaggttttgagccactttggaagaaccacaccagattatgatagcttgagccgcctcaagactgtaaccatgattctacatgaggtccttaggttgtacccaccggcaacctttctaaccagaagaacttataaggaaatggagctcggtggaatcaaatatcctgcaggagtggagctccttctgcccgtcatcttcattcaccatgatcccgacatttggggaaaagacgcaagcgagttc

SEQ ID NO: 20148 - DNA, 262 bp, Zea mays
agaagattgaagttcgccctggcattgttatgaaagatgagaatggaaacattaagtgcacgccaatctactcaaggattgtctcactctatgctgagcagaatgagctccaatttgctgtcccaggagggcttattggtgtgggaacaaccatggacccaactctaacgcgtgctgataggctggttggccaggttcttggtgaagttggttcactacctgatgtttatgtagagcttgagatcaatttcttcctactccg

SEQ ID NO: 20149 - DNA, 261 bp, Zea mays
caccgctttacgttggatagtgacaactacatcaaggcaatgcgtctatttgtgggcgagcctgtctggacaccatacaatcgtccgcatgaccatctcccggctaggaaggagtacgtcgagaaaatcatcaaccgaggtggaaaccaagccgtcgaagctcgttgagcgtgtccactctacatgtcctcctgccgtctcagcctcttgtgttttacactctacaactcctagtaccgccgaataagatttgctatctgc

SEQ ID NO: 20150 - DNA, 189 bp, Zea mays
aagaattggacactgccttagctatgttttgaattcatgtcactatatgcaatgttgtgatttcagctggtaccttaaatctgaagatttagtatctttgttgggttccttctaaaaaaaaaaaaaaaaaaaaaaaaaaaaaaaaaaaaaaaaaaaaaaaaaaaaaaaaaaaaaaagggcggccgctct

SEQ ID NO: 20151 - DNA, 264 bp, Zea mays
gcagtgcctcggcgccatctgcggcgtcggcctcgtcaaggcgttccagagcgcctacttcgacaggtacggcggcggcgccaactcgctcgcctccggctactcccgcggcaccggcctcggcgccgagatcatcggcaccttcgtgctcgtctacaccgtcttctccgccaccgaccccaagcgcaacgcccgcgactcccacgtcccggttctggctcccctccccatcggcttcgccgtgttcatggtgcacctggccac

SEQ ID NO: 20152 - DNA, 254 bp, Zea mays
gcttctcaaccggataggtagcaccggagcaggtagaacgctgcacaatccccttcgccgccgccaagatggtgaacgttcctaagaccaagaagacgtactgcaagaacaaagagtgcaagaagcacacactccacaaggtgactcagtataagaagggcaaggatagcctgtctgcccagggaaagcgccgttatgaccgcaagcagtcaggatatggtggtcagaccaagcctgtcttccacaagaaggcc

SEQ ID NO: 20153 - DNA, 256 bp, Zea mays
ctcaacccaggaacagagcgaggcgacgccgcggcacctcttctccggcgaagggaaatggcaaccgttccaggggatctgatctggcaggttgtgaggaagaacaactccttccttgtgaagcagttcggcaacggcaatgccaaggtgcagttcaccaaggagccgaacaacctctacaacatccactccttcaaacactcgggtttggcgaacaagaagactgtgacgatccagccagctgcaaaggactcgg

SEQ ID NO: 20154 - DNA, 254 bp, Zea mays
gtctcaaatggagggcaacttataagccagaggatattcgctggcctgatgtttctgttgaagcggaaacgggaaaaatgtacaaggcaaattttcgagatagagaggggagaactgtaatcattatgaggcctacaaaggagaattcaacgtcccatgacggtcagattcggtttcttgtgtatgttttggagaatgcgatcctggaccaacgtgaaggtcaagagaaaatggtatggctgatagacttcaca

SEQ ID NO: 20155 - DNA, 254 bp, Zea mays
cgccgcactacgctcccaccgtgtgatagctgctgctcctggcctgctacgacctcacggccacctctgtcctgtcccactagactagctgcagctagcgcctctttccctcgccgccgccccctatccgagagcgacgagcatggcgcactccctcgccgcctccttctcgccggccgccgcgcgcgccaggtgacaaatgtgatttcaagccggagctcggtttccttccagagccacaggatgacttctgt

SEQ ID NO: 20156 - DNA, 255 bp, Zea mays
cttggcatgagaggaagcgacacatgtgaacttgtttttgagaactgctttgtgccacgcgagaatgtcctcggtgaagaaggcaaaggtgtttatgtcatgatgtcagggcttgatctggaaaggcttgtattagctgcgggccctattggccttatgcaggcatgccttgatgttgtacttccatatgttagacagagggagcaattcgggcgtccaattggtgaatttcagttcatacaggggaaaatggct

SEQ ID NO: 20157 - DNA, 256 bp, Zea mays
gttatgggcttggatgccactgctctgtcttatggtgaccttgtcaagagggtcctccggtgctttggcccctcagagttttccgttgccgtgaccatcttcggcgggcgtggccatgccgggacatggggaaaggcacttggtgcagaggtctatgactgcaacaacatggtggagcaggagctgcctggaggcgggctcctcgtgtaccagagcttctgtgctgctgaagacgctgttgctacctcgcccaaat

SEQ ID NO: 20158 - DNA, 248 bp, Zea mays
cttgaagatattttcaacagatataaagaacctgatgctgatatgataatggtggaaggaatatctcaattttgcaatgatctgcaggttgatcctcaggatattgtcatgcttgtcatatcatggcacatgaaagccgccacaatgtgtgaatttactcgtcaggaattcattggtggactgcagtcaattggggtagattcaatcgagaagtttcgtggaaaattaccatcattacgagctgagct

SEQ ID NO: 20159 - DNA, 296 bp, Zea mays
ggtacctgcagtacggtccgaattccgggtcaccacgcgtcgggacgtggtctcattctcagtgtagagaggggaagaggaacaggagcaggaacagaacgagagagagagcaatggggaacaggcacctctgctgcctgtgcttgctccttctcctgggactggcgtccggccaggtcctgttccaggcgttcaactgggagtcgtggaagcagagcgtcggatggtataacctcctgatggggaatgtcgacgacatcgcctccgccggcgtcacgcacgtctggctcccgccg

SEQ ID NO: 20160 - DNA, 241 bp, Zea mays
aaggctaagaccaagagcagcgagacccgctacaggtgcatctggggcaaggtcacccgcccgcacggcaactcgggcgtcgtccgcgccaagttcaagtccaacctcccgcctgagtccatggggcgcaaggtcagagtgttcatgtacccgagcagcatctaaggttaggtttttgttggagtaaaggtggactctaaatggccatgcttagttcttctctctgagcttaaaatgccat

SEQ ID NO: 20161 - DNA, 237 bp, Zea mays
caaacctccttggacacgactcgccgcacccatccccatccgccgccgctgccatggccgacgagattgacacgaggccggcctccgcgggctcccgggccgtcctgcgcacgctaccgaggacgacgacagagaggagggcgagatcgccgccgacgccccctcgcccgccctccccgccgcgcacccgctcgagcactcgtggaccttctggttcgacaacccgcacggcaaaaa

SEQ ID NO: 20162 - DNA, 243 bp, Zea mays
gcttcggtcctttctgttccatacgacatgcctagctggcttccttctaatgtctcgctacttgctcgcttcatccgggagcctccccccataagatcaacagtcacgaaagctgttgcagaatttaagcgcacccatgctgacacatggagcatccagaaggacgcattcactgaagacgaactggaggttctccgtgatacatcttcctcctcgtcgtacttcgcttagattaaaatttca

SEQ ID NO: 20163 - DNA, 251 bp, Zea mays
acgggaggcaaccccctggccaacccgaacggctccaacgtgacggagctggacgtgtccgagtggcccggcgtgaacacgctgggcgtgtccatgaaccgcgtcgacttcgcgcccggcggcaccaacccgccccacgtccacccgcgcgccaccgaggtcgggctcgtcacccgcggcgagctcctcgtgggcatcgtcggcagcctcgactccgggaacaggtactactccaaggtggtccgcgccgg

SEQ ID NO: 20164 - DNA, 254 bp, Zea mays
atcaagggccagatctacgacgtcacccagagcagaatgttctatggacctggcggaccttacgccctgttcgccggcaaagatgccagcagagctctagcgaagatgtcgtttgagccacaggacctcaccggcgacgtctccggcctaagcccgtttgagctcgacggcctgcaggactgggagtacaagttcatgagcaagtacgtgaaggtcggcacggtcaagaagagcgtccctgtggaaggcggcac

SEQ ID NO: 20165 - DNA, 250 bp, Zea mays
gggaggcgacccctggccaacccgaacggctccaacgtgacggagctggacgtttccgagtggcccggcgtgaacacgctgggcgtgtccatgaaccgcgtcgacttcgcgcccggcggcaccaacccgccccacgtccacccgcgcgccaccgaggtcgggctcgtcacccgcggcgagctcctcgtgggcatcgtcggcagcctcgactccgggaacaggtactactccaaggtagtccgcgccgggg

SEQ ID NO: 20166 - DNA, 238 bp, Zea mays
accaaatgcctgagcctagatgggttatttcaatgggcagctgtgccaacggtggtggatactaccattactcctactctgttgtacgtggatgtgaccgtatagtccccgtggacatctacgtccctgggtgcccaccaactgctgaggcactgctgtacggtgttcttcagctccaaaagaagatcaacaggcgtaaggatttccttcactggtggaccaagtgaagcatgcttct

SEQ ID NO: 20167 - DNA, 239 bp, Zea mays
  unsure (1)..(239): unsure at all n locations
gnagaatgtctgatgtcttttggagaaccctacatcatgagggtgtttctggattctacaagggaattctaccaaatctccttaaagtggtgcctgctgcaagtattacctatctagtttacgaggcgatgaagaaaaatttgtctcttgattaaattgtggagttgttggtgggaaaaacagccatcattattggcatggctgactgtagagataatgacgacacatgaattttactg

SEQ ID NO: 20168 - DNA, 241 bp, Zea mays
ggcttcgcgctatgacatttgcttgcatgttgatttatgccttggtggctttgtgctgccttttgctcataagcttgggtaccctattcctccctttgatttttctgtcaagggtgttacatccatctcatctgatgttcataagtacggattagcaccaaaaggcacaagcattgtcctgtacagaaatcatgaaattagaaagcatcagtttgttgctgttactgagtggaccggtggc

SEQ ID NO: 20169 - DNA, 220 bp, Zea mays
tgcttcgtcaggggatgcgacgcgtcggtgatgctgatggcgccgaacggggacgacgagagccacagcggcgcggacgccacgctgtcgccggacgccgtggacgccatcaacaaggcgaaggcggccgtggaggcgctccccgggtgcgccggcaaggtctcgtgcgcggacatcctcgccatggccgcacgtgacgtcgtccccctggtgggcggtc

SEQ ID NO: 20170 - DNA, 241 bp, Zea mays
gtgaaccctgccgtgaccttcggcgccttcgtgggcggcaacatcaccctgttccgggggctcctgtactgggtggcgcactgctggggtccaccgtggcgtgcttcctgctccgcttctcgacgggcgggcaggccacgggcaccttcgggctgacgggcgtgtcggtgtgggaggcgctggtgctggagatcgtgatgaccttcgggctggtgtacacggtgtacgccacggcggtgga

SEQ ID NO: 20171 - DNA, 250 bp, Zea mays
caacttgctcgagatgttcctttctctgctatatgctggtcaactcttgagcctatgcgaagaaaactacttggttttgttggagaagaaggcaatgcaggtagtgtattgggagtgaattttgctgctggttttgtagcaggcagtcttgctgctggtgctacatgccctctggatgttgcaaaaacaaggagacaaatagagaaggatactgagaaggcaatgaggatgactacaaggcacacattag

SEQ ID NO: 20172 - DNA, 265 bp, Zea mays
tgattttcttcccagttgtgaatgaggcatgcagggttatggatgaaaatgttgtaattcgagcttccgatcttgatattgcttctgttcttggaatgggctttcccaaaaacaggggtggtcttgtcttctgggctgacactgttggagcgccttacatacattcgaagctaagcaagtgggccgaaatgtatggtcccttcttcaaaccttcatcgtatttggaacaacgagctaaaagtggtgtaccattgagcgcaccagg

SEQ ID NO: 20173 - DNA, 176 bp, Zea mays
ggtgcgtgttgcaagctagacaaggggcccgacttccctattcccgacgagatcttcgccgaccatcccgatgacctccagctgtacaggagtatgatcggctctgatggatggtgcattaactacgaccaaggcaacccgaacttgaaacatctaccaggaccgaccttccttct

SEQ ID NO: 20174 - DNA, 266 bp, Zea mays
cgcttctgtaattctcaggcatccggaagaaatggccaagtcgaagaaccacacggcgcacaaccagtcgttcaaggcgcacaagaacggcattaagaaacccaagcgccaccgccagacctccaccaaggggatggaccccaagttcctgaggaacctgaggtattctaggaagggcaacaaaaagagtggtgaggctgaagctgaggagtaggaaggaaagcatggctttgtttcctctgtttttagctcagttccacctttag

SEQ ID NO: 20175 - DNA, 255 bp, Zea mays
cacacgcgtccgatatatgctagacttttgagttgccttgttttgggaagaaacttggaattttcagtttgatgcacttgtattattattaggccttggtagcaacaagatacggatgtcgtctctacgtttgctgttgtacttcagtgtaacttgcctcccgaatgtatgagtattatttatcaagtcccaaataacagtgacggattgctaaaaaaaaaaaaaaaaaaaaaaaaagaataaatgaaagaaaga

SEQ ID NO: 20176 - DNA, 251 bp, Zea mays
tggacgcgtcgattctgtggtggatcccctccgcgacttcgccaaggacagcgtccgcctcgtcaagcgctgccacaagcctgaccgcaaggagttcaccaaggtggcagcgcggacggcgatagggttcgtcgtcatgggcttcgtcggcttcttcgtcaagctcatcttcattcccatcaacaacattatcgtcggttccggctaggctcagggcgcgactagcatgggagtagtgcgatacttttgag

SEQ ID NO: 20177 - DNA, 226 bp, Zea mays
cgccaaggccgatgccaagctggcggtgaagagcaagggggcggagaagcccgccaagggcaggaaagggaaggccggcaaggaccccaacaagcctaagagggctcccagcgctttcttcgtgttcatgtgagatgcgacttttttcgtcgtctctttttgtttgctatatacttaattctggatgcgactgttgattcgatctatttttggatgccttttatac

SEQ ID NO: 20178 - DNA, 122 bp, Zea mays
gtcttctgacaccatcgacaacgtcaaggccaagatccaggacaaggagggcatccctccagaccagcagcggctcatttttgccggcaagcagctcgaggacgggcgcacgctggccgact

SEQ ID NO: 20179 - DNA, 88 bp, Zea mays
gacgtgtcgtcgaggaccggcggtcccttcggtactatgaagtgcccggcggaactggctcacggcgccaacgcggggctggacatcg

SEQ ID NO: 20180 - DNA, 256 bp, Zea mays
ggaagccctcaagaagatgaacaaaaacaagaagctagtgaagaagctggcaaagacgtaccatgctttccttgcatctgaggctatcattaagcaaattcctcgtcttcttggtcctggtcttaacaaggcaggaaaattccctaccttggtgacacaccaggaatcccttgagtccaaggttaacgagacaaaggctacagttaagttccagctgaagaaggtgctttgcatgggtgttgctgttggcaactgc

SEQ ID NO: 20181 - DNA, 254 bp, Zea mays
gaagctacaatcctaaaaccatctgcttcagccttcagctagccccaagtttagtcggccgatcgatcactgaagtagtaatggcctccgccaacagctggaccctcgagatcgcgtcgccggtggccccgcagcgcctgttccgcgccgccgtgatggactggcacaccctggcgcccaaggtcgcctcccacgtcgtcgccagcgcgcaccctgtggagggcgacggcggcgttggcagcgtcaggcagttc

SEQ ID NO: 20182 - DNA, 259 bp, Zea mays
cccaaatgtgactttctgaactttgcaaagaatatcaaatgtttgcgctgcgatggagaattccaagagaggtatcagttgttgcatgaagaccgagagcatctgcctctcaaaaagggtgactggatatgcaaaaggtgcaactttttgaattttgctaagaatacaagatgcttgcaatgtcatgagaaaccaacaaaccgtttactcaacccaggagagtgggagtgtgtctcgtgtaactatgtgaacttcaaga

SEQ ID NO: 20183 - DNA, 269 bp, Zea mays
  unsure (1)..(269): unsure at all n locations
ctccattaatattggcagcaagctaggatcatcagcatctgagcttattattactaaatcgatcggttgccatggcggggatgagagtcggcaagctggcgctggctgcggtgctgctgtgcgcggcggcggccatggccacggcgcacaggcctccggcgtgcgcgcacctacaacttctacaacccgcagcagaacaactgggacctcaacgccgtgagcgcgtactgcgcgacgtnggacgccagtaagccgctgtcgtggcgcat

SEQ ID NO: 20184 - DNA, 254 bp, Zea mays
tgctcagttgcagattttagagttgcttgacaatgctattttcactgccggctacaaagctgtgttgcatattcactctgttgtcgaagagtgtgagattgttgagctcatagaggaaattggcatgaagaaaaagaaagaagaagatccaaagaagaaaaagccaaagaggaagcctctttttgtgaagaacggtgcaattgttgtttgccgcattcaggtgaataacttgatatgcatagagaagttctctg

SEQ ID NO: 20185 - DNA, 250 bp, Zea mays
gaaagtgaaggctgcactaaatagacaatctaaaactcgattgattgggccaaattgccctggtatcattaagcctggtgagtgtaaaattggaatcatgccaggttacatccacaagcctgggcgtattgggaatgtatctcgttctggtaccttgacatatgaagcggtgtttcaaacaacagctgtaggcttggggcagtcaacttgtgtaagcattggtggtgacccattccatggcaccaatttt

SEQ ID NO: 20186 - DNA, 253 bp, Zea mays
  unsure (1)..(253): unsure at all n locations
cgtgttcgaggcagccatcgagacctcatatctggtgctggagtccgccatggccgagctcatgaaccacaggcgcgtcatgaagaagctgcaagcggnaggtacgggcgtacggagcggagaagaagctggacatgatcagggaggacgacctgagcagcctgccgtacctaaaggcgtccatgaaggaagcgctgcggctgcacccaccggggcccctgctgctgccgcactactccaccgccgactgcca

SEQ ID NO: 20187 - DNA, 259 bp, Zea mays
cattctcatcaccgacccccgcaccgcagcgtaaaccctagtccccggcggcgaccttgcggcctccgctgcgctctgactggtgcgcgtttagacgaggagctgcggcggccaagaccaatcgaccatggctacccgtatccagtttgagaacaactgtgaaattggtgttttctccaagctgacaaatgcttactgtctggtagcgattggagggtcagagaacttctacagtgcctttgaggctgagcttgcagat

SEQ ID NO: 20188 - DNA, 190 bp, Zea mays
actccaagccccaagcctcccacacacccgacgcccaagccgaccccaccgacgtacaccccttccccaaagcctccgacgcccaagccgaccccaccgacgtacaccccttccccaaagcctccgacacccaagccgaccccaccgacgtacactcccacaccgaagccgccggccaccaagccgccca

SEQ ID NO: 20189 - DNA, 250 bp, Zea mays
ggtaatagctgcctatctgcttgctgttctgggtggaaacacttccccgactgctgatgatgttaagagcattctggaatcagttggtgctgaagctgatgaagaaaaactagagttcctgctcacagaactcaaagacaaggacataacagaagtgattgcagctggaagggaaaggttatcctctgtgccttcaggtggtggtgcaattgacatgggagctccagcagctgtagctggcggtggcgca

SEQ ID NO: 20190 - DNA, 253 bp, Zea mays
tgaaggctgttgctgtgcttggtagcagcgatggtgtcaagggcaccatcttcttcacccaagagggagatggccctaccactgtcaccggaagtgtctctggcctcaagcctggcctccatgggttccatgtgcatgcacttggtgacaccaccaatggctgcatgtcaactggaccacactacaatcctgcgagcaaggaacatggagcaccagaagatgagaaccgccatgccggtgatcttggaaatgt

SEQ ID NO: 20191 - DNA, 253 bp, Zea mays
cccgcggggagctctagttccgccaagcgtgcgtaccggcgtccggatccgggaccgaagatgacggatccctggtgcggaacaagccggggatggccagcatcaaggagatgccggtggtgcaggacgggccgccgccgggcggtttcgcgcccgtgcgcttcgcccgccggatccccacctcggggcccagcgccaccgccatcttcctcaccaccttcggtgctttcgcatatggcatgtaccaggtcgg

SEQ ID NO: 20192 - DNA, 98 bp, Zea mays
tacactccaagccccaagcctcccacacacccgacgctcaagccgaccccaccgacgtacaccccttccccagagccttcgacggtcgagtcgactcc

SEQ ID NO: 20193 - DNA, 256 bp, Zea mays
gcagaactggagcagctactaatgtcatttttgggcttgctttgggttacaaatcagtcattatcccaatttttgctattgcgtttagtatcttcctcagcttcagccttgctgccatgtatggtgttgctgtggctgctcttggaatgctgagcaccattgccacaggtcttgctattgatgcatatggccctatcagtgataatgctggaggaatagctgaaatggctgggatgagcataggattcgtgagaga

SEQ ID NO: 20194 - DNA, 261 bp, Zea mays
ggcggaacagactgagaaggctttcctcaagcagccaaaggttttcctcagctcaaagaaatctggcaagggtaagaagcctggcaagggcggcaaccgattctggaagagcattggccttggcttcaagactcccagggaagcaatcgaagggacctacattgacaagaaatgcccattcactggaactgtttctatcagaggcagaattattgctgggacatgccacagtgctaagatgaacagaactatcattgttcg

SEQ ID NO: 20195 - DNA, 249 bp, Zea mays
atcaaatgtcccattacaggcaaaacgttcatccaagaaacccgcagcacgggcaaaggttccttttgagaaaggctatagtcaaatggattggctaaaactgacacaaacacatcctgatctagctgggcttaaggggcagtcaaaccgaagttaatttctttggaagaggttaagcagcacaaagcaggagattgtatttggacagttctcaaaggccgcgtgtacaacattgctccatacatgaaa

SEQ ID NO: 20196 - DNA, 246 bp, Zea mays
gtggtctactaccaagctgagtcgaaaacgagcacctctgcacaaaaatccgattgacagggagtatagagcgtgtagagtgttcttcatttttctcggggaggggctgtgcctgaagacctgaccagcctccacctctgattagcgtgagtacatgggtacgtcgactcaagaacgtaagctggcgaagtagtgccatgtatgtatggagagggttaaatgtaattctttccaatggtccaaggc

SEQ ID NO: 20197 - DNA, 246 bp, Zea mays
gtggactgcgcacgggaggcgatgaggctgatccacgcggaagacaagaacctcaaggccgaggactcagcgtgggagctgaagaagaagttcggcaacggcgtgagcaccatggtcctcgtctacaacgccaccggggccagcctgagcctggtggacgacgggaaagactggatgggctccgtctacagctcgccgatcccggacaccttccacaacgggcagtggatcgccttcctccacgtc

SEQ ID NO: 20198 - DNA, 249 bp, Zea mays
gcgggatcaaggagccagagagcgggacgcagcgagcgttccgccggagatcgagaccgtagctagggtttgaggcgccgggctgcggtggacgagatgtcgacgccggcgaggaagcggctgatgcgggacttcaggcgcctgcagcaggacccgcccgccgggatcagcggcgcgccgtacgacaacaacatcatgctctggaacgccgtcatattcgggccggatgatacgccgtgggacggtggc

SEQ ID NO: 20199 - DNA, 249 bp, Zea mays
gccttcctggagatgatcaaggaggaattcaacaggagatattcaggtggcgaacaggaacggctacagccaacagtctcacccgagatttcgggcccaggcttagagaccagatgcagtactgcacggatcacccagaggaggtgagcaagctgtccagagtgaaggcccaggtggatcaggtgaaaagcatcatgatggaaaacatcgacaaggcctttgatcgcggacagcagatcgacgggcttt

SEQ ID NO: 20200 - DNA, 246 bp, Zea mays
ggcattgttgaagttgcaaagataatttatggagtgcatgacgaagcgaaggacaaagcttttgagttggagttgagctggatctgtgatgaatcgaaccgtcagcatcagaaggttccaaatgaactgttggagcaggccaaagctgctgctcaggcagctcttgaggagatggatgctgactaagaaacaggacgatttgcccagacttggtgtttttggtgctgttgaaatctccgatccctt

SEQ ID NO: 20201 - DNA, 241 bp, Zea mays
gaaatactgattggacatttccaactgtaaaggatcaaagtcaggtgctgatttcacatgcaaagtcgagtaagagcaatccaattgcaaggtggcacatctgtcaaggtgcaatcaatgacatttccttttcaccggatggtgcttacttggcaactgttgggcgtgatggccatttaagagtatttgactttgctaaagaacaactaatatttggtgggaaaagttactacggtgcact

SEQ ID NO: 20202 - DNA, 239 bp, Zea mays
gcctggaggaagaagcgaaagtatgagcttggtcgccagccggccaacaccaagttgtcaagcaataagacagtgaggagggtccgtgttcgtggaggtaacgtgaagtggagggctcttcgccttgatactggtaactactcatggggaagtgaagctgttacccgcaagacccgtatcctcgacgtggtctacaatgcatcaaacaatgagcttgtgaggacacaaacccttgtgaa

SEQ ID NO: 20203 - DNA, 242 bp, Zea mays
agcgagatcaacaagagcaacgcctactgcgacgcaagcaacaggcagtggccgtgcgcggcggggcagaagtactacgggcgcggcccgctgcagatctcgtggaactacaactacgggcccgccgggagggacatcggcttcaacgggctcgccgaccccaacagggtggcgcaggacgccgtgatcgcgttcaagacggcgctctggttctggatgaacaacgtgcaccgcctgatgcc

SEQ ID NO: 20204 - DNA, 240 bp, Zea mays
ggtttttgattttagccgccgccgctgctcatctcacatccctcgagaagacgcctgctcctcgccgatcgatacgatggccgtcttctccgacctccacaccgccgacggcctcaagtccctcgaggctcacctcgccggcaaaacctatgtgtctggtgactccattactaaggatgacattaaggtcttcgccgcggtgccgtcgaagcctggcgctgagtttcctaatgccgccgc

SEQ ID NO: 20205 - DNA, 182 bp, Zea mays
cttgtactcagcctccatagctcttcatggtggagctcttgtcccctattaccttaatgaaaaaactgggtggggtttggagatctctgatcttaagatgcaactggaaaatgctcggtcaaaaggcattgatgttagggctttggtggttatcaatccaggaaatccgactgggcaggttc

SEQ ID NO: 20206 - DNA, 191 bp, Zea mays
gggaagaccatcaccctcgaggtcgagagcagcgacaccatcgacaatgtcaaggccaagatccaggacaaggaagggatcccgccggaccagcagcggctgatctttgccgggaagcagctggaggatggccgcacccttgcggactataacatccaaaaggagtctacgctccacctcgtgctcaggct

SEQ ID NO: 20207 - DNA, 271 bp, Zea mays
ccgcgaatcggatccgccgacaaggcagagggaagagatggggctcacgttcaccaagctgttcagccggctgttcgccaagaaggagatgcggatcctgatggtgggactcgacgccgccggaaagaccaccatcctctacaagctgaagctcggcgagatcgtcaccaccatccccaccatcggattcaatgttaaaactggggaactaaagaacgtcgtcttcagtgtcgaggatggcggaggctgggacaagttgaggcaactgtgg

SEQ ID NO: 20208 - DNA, 251 bp, Zea mays
ggcagcagcacaagcaagaaccacacctcatcccttcgcctgtgatcatgtcgtcttgctgcggcggcaagtgcgggtgcggctccagctgctcctgcggcagcggatgcaacggctgcggtatgtaccctgacgtggagaccgcagtcaccagtagcgtcaagaccacggtcctcgacgacgcgaccaccaaggccagcggcggagagttcgaggcggtcaacgatgacggcggctgcgactgcaacacc

SEQ ID NO: 20209 - DNA, 281 bp, Zea mays
agcgcaggaagaagcagcagacgcaggagctggagcacccgcactgctacgttgacacgttgctcgatctcaggctcgacgagggacgacaagacggtggccgccgtcctctcacagaccacgagatagctagtctgtgcatcgagatcctcatcgttggctcagatctacctgggacggcgctggagtggaccatggcggagctagtaaagaacccaggcgtgcaggacaagctctacgaggagatgatgaaagccaaaggcactggtggtgttgttgct

SEQ ID NO: 20210 - DNA, 269 bp, Zea mays
cgatcaacacgggccgcgtcgtcgggacctacgggtacatggcgcccgagttcgcgttggacggcgtcttctcggtgaagtcggacgtgttcagcttcggggtcctcctgctggagatcttgagcgggcaacggaacggcgctttgtacctcgaggaacaccagcagtccctcatccaagacgcatggaagctgtggagtgaagaccgcgcggccgagttcatggaccagtcgctggggcggtcctactccaaggacgaagcgtggcgg

SEQ ID NO: 20211 - DNA, 222 bp, Zea mays
atcctgctgcctaagccatcatcccaagtgcttggtaaagatatgatgtcccttgtatcgctgctagtcagcactgagtcgtttgaggtgctcgtggtgatgttaggtactagatgggtgtcattacttatgaatgcgatgttgctgtgacagaactgcatttcctattgtactatggttgtccaagttgtcattaccaggatgggagtagcctaagtggtt

SEQ ID NO: 20212 - DNA, 209 bp, Zea mays
cacaccttgcttcaaacacataccttgttgggcatgctgttactctagctgacattgtaatgacatgcaacctctaccatggaattgcacggatcttgaccaagaccttcacgtctgatttccctcatgtcgagaggtatttctggaccatggtagaccagcctaacttcaagaaggtcattggtgagttcaagcaggcatagtctgca

SEQ ID NO: 20213 - DNA, 268 bp, Zea mays
gcgtcgcgtcgcatcctacgatccaaagctctctctgctcgcagccatggcgaagaactacccgaccgtgagcgccgagtacagcgaggctgtggagaaggccaggcgcaagctccgagccctcatcgccgagaagagctgcgccccgctcatgctccgcctcgcgtggcactccgcggggacgttcgacgtgtcgtcgaggaccggcggtccattcggcacgatgaagcatcagtcggaattggctcacggcgctaacgcggggctg

SEQ ID NO: 20214 - DNA, 152 bp, Zea mays
acgaggggcacccgacaagctgtgcgaccaggtgtcggacgccgtgcttgacgcatgcctcgcgcaggaccccgacagcaaggtggcctgcgagacctgcaccaagaccaacatggtgatggtgttcggcgagatcacgaccaaggcgaccg

SEQ ID NO: 20215 - DNA, 186 bp, Zea mays
cgctcccttttattcagcgattcaaaggcaagacggtggtggtcaagtacggcggtgcggcgatgaagtccccggagctgcaggcgtccgtgatccgcgatctcgtgctgctctcctgcgtcggcctccgccccgtgcttgttcacggcggcggtccggagattaattcctggctgctgcgcgtcg

SEQ ID NO: 20216 - DNA, 95 bp, Zea mays
gtgtctacctgcatgttggttgatccgattgcatctgctgtaaccatatattaattggtccacgatgatatgatttgatactatatatatactag

SEQ ID NO: 20217 - DNA, 262 bp, Zea mays
attttccctcatctcccgccgcctgcacccaacaagcctctcgacgctagtcatggccgcttccaacggcgccgtgcggtcgacgagaccgtcgccgccaccgactccgtgcaggagcctccccagaagatctccaagatctctcccctgctcaaggtgaagaagctctccgagaaggccgtgctgccgtcccgcggctccgctctcgctgctggctacgacctctcgagtgctgaggagatggtggtgccggcgcgtggca

SEQ ID NO: 20218 - DNA, 171 bp, Zea mays
atttatggaactgatggaccgcaaacccttgtttcctggaagagaccatgtccatcagctacgtcttctaatggagctcattggcacgccaaatgaggggtggatcttgattttgtaaatgaaaatgcaagaagatatatccgccaacttcctcgtcaccctagacagtcc

SEQ ID NO: 20219 - DNA, 86 bp, Zea mays
cagcactggcgccgcaccaagctcggcttctgagcgcgcggatcggccggctcctgcgtcggaattctagggtctctacctttcct

SEQ ID NO: 20220 - DNA, 246 bp, Zea mays
cccggttctccctcgctccagatctcccttcgcagccggccagggaccccttcacagcgcgggagatggctgatcaggaggccccagttgcagttgagggcaccaaccccagttcttggagagccaatggacttgatgactgcgctgcagctggtgatgaagaagtcaagtgctcatgatggacttgtgaagggtcttcgcgaggctgccaaggccattgagaagcatgctgctcagctttgcgtt

SEQ ID NO: 20221 - DNA, 247 bp, Zea mays
caggtgatcagaggaagaacgtctcgaatttcctcgtccaggtacgcaccattcggtgaacaccttgtgcgcttagagacatgtagcaacgtatgctgattagagagactgctgatgtctgttcctgatgttgtcctggcaggccggcattgtgaagaaggagcacatcaagattcatggtttctgagcaaccgccgggtccatagcaaaccaaccctgcatgcagggccagcttattatatataat

SEQ ID NO: 20222 - DNA, 244 bp, Zea mays
ggtggcacctcgcgtgggacgagtggacggcggcgtacccggccaccaggttctacgtcggcctcacggcgacggagatgacgcacggctgggtgcactcccaagaacgtctactacgacgtcgcgccgtccgcgcagaaggcggacaactacggcggcttcatgatctgggaccgctactacgacaaactctccaactacaccagcatggtcaaggactacgcttgattggatttctcgactc

SEQ ID NO: 20223 - DNA, 246 bp, Zea mays
gagctcgagccctcgcccgctcagtcacaaagcctcagatctcagtcgcctgcgccgccgcttcgttcgtgtggaggggagaagacaggaaatggtcggtcgtactgagggcgtgctcttggggatgggcaaccccctcctcgacatctccgccgtcgtcgatgacgccttcctgacaaagtatgacatcaagctgaacaatgctattctcgctgaggagaagcacttgcctatgtatgacgagtt

SEQ ID NO: 20224 - DNA, 243 bp, Zea mays
gccaatagcattggtggagaacagtggaaggtgcaagactaatgagcatggggagaagatacttccggacggaactctgtgggttccaaacctgatggaaagaaattactgttgtcatctcaaacgggagcagtcccactcatgttgatcagaagttaattgatggtccaaaccctaacaatcgccgaaagttgttcataccacttatccttgctgtggagtacttcttggtggtaaaaggaa

SEQ ID NO: 20225 - DNA, 242 bp, Zea mays
cattcccagcagcactggagctgctaaggctgttggcaaagtgcttcctgtccttaacggaaagttgactggaatgtctttccgtgtccaaccgttcgatgtttctgttgttgatttgactgttaggcttgaaaagtcagcaacctatgatgagatcaaggctgcggtcaaggccgaggcagaaggtagcctcaagggcatcctgggttacgttgaggaggaccttgtttccaccgatttcc

SEQ ID NO: 20226 - DNA, 261 bp, Zea mays
ccgccgccgtcgccgcctcctctccccagcacccggagctcgaccgaacgccgctcaccatgatcatccccaagaagaaccgcaatgagatctgcaagtacctcttcaagggcaggcggcgtgtctgtatgccaagaaggactacaacctggcgaagacccgcagatcgatgtgccaacctccaggtgatcaagctcatgcagagctttaagtccaaggagtatgctaaggagaccttctcctggcagtactactactggt

SEQ ID NO: 20227 - DNA, 244 bp, Zea mays
ctctagggtttttgattttagccgccgccgctgctcatctcacatccctcgagaagacgcctgctcctcgccgatcgatacgatggccgtctttctgccgacctccacaccgccgacggcctcaagtccctcgaggctcacctcgccggcaaaacctatgtgtctggtgactccattactaaggatgacattaaggtcttcgccgcggtgccgtcgaagcctggcgctgagtttcctaatgccg

SEQ ID NO: 20228 - DNA, 231 bp, Zea mays
ctccattttttcatctcattcggcgccgcggcaccccctgctcgtcactcgcgatggcccggatcaaggtgcacgagctgcgcggaaagagcaatgaaccggtatctgcaagcgcactcaaggagcttaaatcggagctctccctcctacgcgtcgccaaggtcaccggcggggctcccaacaagctctccaaaatcaagattgtgcgcacctccatcgctcttgtgctca

SEQ ID NO: 20229 - DNA, 235 bp, Zea mays
gcggcgcatcatgaccgtccccttcttcaccaacaaggtggtggcccagaaccgcgccgggtgggaggaggaggcccggctggtggtggaggtacagttgaggaaggaccccgaggccgcggccggcgagagtcgtgctccgccgccgcctccagctgatgatgtacaacgacatgttccgcatcatgatcgaccgccggttcgacagcgagcacgacccgctcttcaacaagct

SEQ ID NO: 20230 - DNA, 241 bp, Zea mays
cttcgtcgtactcgtctcctcccacccgcaaccgcaggatgagaaaggggaagcccgccgccgccccggcccccagcaaccagcagatcggttaccttctgttctgcgcaatccatccatggcggaggaatcaggccgtcccttgccaaagtttggtgaatgggatgtcaacgatccggcttccgcagacggatttactgtcatattcaacaaagccagagatgagaagaagggtgggaat

SEQ ID NO: 20231 - DNA, 232 bp, Zea mays
gggtcatagtaggttttttgtagaattttatgcaggaatggcttgatactcgttccaccttcctgaaattaaatttgatgcgcacaataatataaaggctcacttgaaattttaactggcaaagcatgcacggatgcgaaacatttgaaaactggttcttgtatgcgcctgcctgactcttgatatggttatctatctctctgcagcgttggtcagttcactctgcagaggt

SEQ ID NO: 20232 - DNA, 243 bp, Zea mays
catcataccactgctgcttttatcagggtcgtcggttcagagtttgttcaaaagtacttgggtgagggccctagaatggtgcgtgacgtgtttccggttttggccaaggagaatgccccagcaatcattttcattgatgaggttgatgctatagccactgctcgttttgatgctcagactggtgctgaccgagaagttcagcgtattcttatggagctactcaatcagatggatgggtttgat

SEQ ID NO: 20233 - DNA, 242 bp, Zea mays
ccaagcagtgtggaaaaaatcatggaaattgatgagcacataggctgtgccatgagtgggcttattgctgatgctagaacactagtcgtaggcgatgctcgtgttgaaactcagaatcataggttctcatacggggagccaatgaccgtagaatcttcaacacaagctatttgtgacttagctctgcgctttggcgaaagtgacgaagagtcaatgtcacggccatttggagtctctctcct

SEQ ID NO: 20234 - DNA, 237 bp, Zea mays
cctcctcaacctccagcccaacctccagcccggaatcgagagcaatggcgctcgccaaggccaaggagatcgttgcctccgctccccgcgggcgtcttcagcaaaacttcctgtcctttctgcgtccgtgtgaagcagttgttcgagaagctcggagcaagctacaaggccattgagttggataaggaaagtgatggagctgagctccagaatgccctgaaggagtggactggacag

SEQ ID NO: 20235 - DNA, 238 bp, Zea mays
cctcacccgccgcagccaaaccctctccagcagccgtcgtcgccaccgctgcagcgcggaggcgacccccatcgccgccaagatgcagtattctttcgtgaagaccctgacgtggaaaaccatcacgttggaggtggagtcctcggacaccatcgacaacgtgaaggccaagatacaggacaaggagggcatcccgccggaccagcagcggctcatcttcgccggcaagcagctcgag

SEQ ID NO: 20236 - DNA, 237 bp, Zea mays
ctctgcacgtgcactagagcatcttcatgaaatttgttctccatctataattcacaagaactttaagtcgtccaatattttactggatcatctcggagctcaatcctcacatttctgatgctggacattcaagttttgttccagatgctgaattccaggcttcagatcaggggtctgggtatagtgcccctgaggtcgagatgtccggtcagtataccctcaagagtgatgtctaca

SEQ ID NO: 20237 - DNA, 232 bp, Zea mays
ccgactgctaccgcacgccggaccccgtccacggcaaacggaaccgcacctacatggacgtcgtccgctcatgcctcgggcctaggatggtggtggtgtgtggactcgcacagtacgcgatcctctgggggacaatggtgggctacaccatcaccactgccacgagcatcatggccgtcgcgcgcacggactgccgccaccacaggggccacgacgcggcctgcgcctcgtc

SEQ ID NO: 20238 - DNA, 226 bp, Zea mays
gcgtgtgcttggtgtgtgcagaggctggtgatcaagacgaagagcgtggagttcatgccgttcctgctctccctggccgtgttcctgttcgggcacctcctggttcatctacggcctcctcggccgcgaccccttcattattatcccgaacgggtgcgggagcttcctgggcctgatgcagctcatcctgtacgccatctaccggaaaaacaagggccccgccgcg

SEQ ID NO: 20239 - DNA, 212 bp, Zea mays
tgctttgacggcgagaacgtggagagtgctcctcctcctatgaagaaggactacaaactggctaatcttctctgctgggaggaggaagcggatgccatggaggagaaggcgggagtgcttgatgagtaagacgggcttctggtgtcgatttgcttctgagttgtttattttatatcgtcgcaatttcgtggttgtcgtttggttatctgtga

SEQ ID NO: 20240 - DNA, 180 bp, Zea mays
agaaaattgctttcattcttgagcaggtccggctatgcctggatcggcaagattttgtcagagcacaaattttatccaggaaaatcagtactagagtatttcacgcagatccatcaaaggaaaaaaagaaaccaaaggaaggtgacagtattgttcaggatgctcctgcagatattcctt

SEQ ID NO: 20241 - DNA, 165 bp, Zea mays
cacacattggacttgcactggtgcttgctcataattactagttcatcagcaaacaacaaacaatggcaccgaggctagcgtgcctcctagctctggccatggcagccatcgtcgtggcgccgtgcacggcccagaactcgccgcaggactacgtggacccgcaca

SEQ ID NO: 20242 - DNA, 262 bp, Zea mays
aaccactactccatcccttcctccgcgtccgcggaggccgtcgcggacaacctgtggaacgcgttcctcggcggcggcaacagcgacgtgccccgccccttcggtgacgcggcggtcaacgagcatcgacttctacatcgacgaccacagcgcaccgggcgaccactacgacgagctcgcgcgccgtctcgactacttcaacagcatgtactcccgccacggcgcgtatacgtacggctgacggcgacgcgcggtgcgcgtt

SEQ ID NO: 20243 - DNA, 266 bp, Zea mays
  unsure (1)..(266): unsure at all n locations
gcaggaggcggacaaggtaagcagcaatcgcaggaaccctagcgccgccgcacccgcagaatgggtatcgacctcgtcgccggtgggaggaataagaagaccaagcgcactgcgcccaagtctgacgatgtctacctcaagctcctcgtcaagctctaccgtttcttggtcaggaggaccaagagcaatttcaacgctgtcattctcaagaggcttttcatgagtanaaccaaccgaccaccaatctccatgcgccgccttgtcaa

SEQ ID NO: 20244 - DNA, 266 bp, Zea mays
gcgggcagcagcacacagccccatcccaatcctagtcgatcttcttcccctcctcaaggaagaaaagaagctgaaccatggggaagagaaagtcagctgctaagccacctcctaagaagcggatggacaagcttgacactgtcttttcctgcccattctgcaaccacgggagtagtgttgagtgccgaattgacatgaagaatctgattggcgaacatcttgtagaatctgtcaggaaaacttcagcacaactgttaatgcactca

SEQ ID NO: 20245 - DNA, 267 bp, Zea mays
ggcggggatggcgtactcgttggagaggctctgctccggcgtccacaccctgaggtagagctgctgcccgaggtactgccggtcccacatcgccgaccgcagttccacatcccctggttgtccagcgacaccaggatcgccgaccacccgttggggtacacctgaacggtgtgtcttgcctgcgcgtccaccaaattgtacgtctgccgctgcgtctcattccactggccatcgccgcccacgcgtccgcccacgcgtccgcccacg

SEQ ID NO: 20246 - DNA, 267 bp, Zea mays
  unsure (1)..(267): unsure at all n locations
gcttaacagcacatgaagttctatgccatccatggattcgtgatcatggagtagctcctgaccgtccactggatccagctgtcttatctcgcattaagcaattctctgcaatgaataagttgaagaaaatggctttacgagtaatagctgagagcctatcagaagaggaaattgcggggttgaaggaaatgttccagatcatggacactgacaacagtggcgcaatcacttatgatgagctanaagaaggattgagaaaatatggct

SEQ ID NO: 20247 - DNA, 194 bp, Zea mays
gttgctgaggaggacgacgacgatgatgttgacctttttggtgaggagaccgaagatgagaagaaggctgctgaagagcgtgctgcagctgccaaggcttctggcaagaagaaagaatctgggaagtcatcagttttacttgatgtgaagccatgggacgatgagactgacatggccaagctcgaggattctgt

SEQ ID NO: 20248 - DNA, 255 bp, Zea mays
cctcacaattatggtttcgttccaaggactctttgtgaagacaatgacccaatggatgtgttagtcctgatgcaggagcctgttgttcctggttcgttcctgcgagcaagagcaatcggccttatgcccatgattgaccagggtgaaaaggatgacaagataatagcagtctgtgctgatgatcctgaatatcgtcactacaacgacatcagtgagctgtctcctcatcgcctgcaagagatcaagcggttcttt

SEQ ID NO: 20249 - DNA, 254 bp, Zea mays
ctatgatactgctatctatctatgatactactatgatactgctcctaattcttggagcttgagctggagctgtactaaacaggccctatgttaggtgcattgacaacaatggtgacagtttgctgttgggctttaggttctggagtctttacttggagacaactttgttccaaatgacacagagcttcacgccgatggtgagtactgccagattgtcacaggacctaacatgggaggaaagagttgctacattc

SEQ ID NO: 20250 - DNA, 261 bp, Zea mays
ataagctatagccatcttcttctctgaattccagtccaagggccggaataccgtcagagggagtgggagagggggggaaaaaagatggtgaagctcgcatttggaagctttcgcgactctttgagcgccgcgtcgctcaaggcctatgtggccgagttcattgccacgctgctcttcgtgttcgccggcgtcgggtccgccattgcctactcgcaattgacgaagggcggcgctctggaccccgccggcctggtggccatc

SEQ ID NO: 20251 - DNA, 135 bp, Zea mays
accacgcgtccggacgcatggtgccaagctccctatcaacttccgcaatcagctcactgtgcagctgaagatgctcgctgccgccggtaagctgacgaaggcgaagaactccttcaagctgccggccaccgacgc

SEQ ID NO: 20252 - DNA, 254 bp, Zea mays
cacctacctctctacgaactacctgccgccggaaaaccctagagcgctcgaccatggatccgcagcagccggagcctgtcagttacctctgcggagattgcggactgagaacaccctgaagcccggagatgtcatccagtgccgtgaatgtggctaccgcatcctctacaagaagcggacccgccggattgtccaatatgaagcgcgctgaagagtgaagacaagggaaaacactgaagatggttgatctatta

SEQ ID NO: 20253 - DNA, 186 bp, Zea mays
caggaggatgagtgtggcatttgcctggagacctgcaccaagatggtccttccgaattgcaaccatgccatgtgcatcaactgttaccgagactggtacacaaggtcccagtcatgcccgttctgccgcgggagcctgaagagggtccggtccagagacctgtgggtgctcaccggcgacgacgac

SEQ ID NO: 20254 - DNA, 255 bp, Zea mays
gcacagtgttggtgctgtgatgccaccttcatatgagatgggagggatgccaatgagagaagctgccccccaacctgttccaattggggcgctaccactgcacttgctaacgccccaccagatcagcagagacttatgcttggtgagaacctgtatcctcttgttgaacagctggaacgtgagcaggctgccaaggtcactggcatgcttttggagatggatcagacggaggttcttcacctgctggagtcgcca

SEQ ID NO: 20255 - DNA, 257 bp, Zea mays
atctacctcaccttctacggcacctccagcagcgccgactacgacagcctcggctgcctcaggaagttcaacgacctgtccaccaaccacaacaaccagctgcaggcccagatctccggcctccaggccaagtacaagtcggcgcgcatcatgtacgccgacttctactccgccgtctacgacatggtcaagaatccaggcagctacgggttcagcacggcgttccagacgtgctgcgggtccggaggcggcaagta

SEQ ID NO: 20256 - DNA, 267 bp, Zea mays
agcaaattaaggacgctctgcacacgtactattcatcttccattgttggtttgctttgcttaccggcaaccatggccagcactcgtgcagcagcaactctccttttgctcctcgcgctcgccggcacctcgtcggcgcactgtccacgggcttctactcctactcgtgccccggcgtgtacggcgccgtcaagtcggtgatgcagtccgccatcgccagggagaagcgcatgggggcctccatcctccgcctcttcttccacgactg

SEQ ID NO: 20257 - DNA, 263 bp, Zea mays
aacacttccccgactgctgatgatgttaagagcattctggaatcagttggtgctgaagctgatgaagaaaaactagagttcctgctcacagaactcaaagacaaggacataacagaagtgattgcagctggaagggaaaggttatcctctgtgccttcaggtggtggtgcaattgacatgggagctccagcagctgtagctggcggtggcgcacacctgctgaagaggcaaagaaggaagaaaaggttgaagagaaggaagag

SEQ ID NO: 20258 - DNA, 238 bp, Zea mays
gcagcgcgatcttgcatcagctagctaactaagcaagtaagctaagctagccctaggcaacgagccgaccgtcaagctcatcgcagaccacgagccatggcctccaccaacagctggactgttgagatcgcctcgcctgtagccgcggcggcctcttccgcgccgccgtgatggactggcacaccctggccgccaaggtcgcctcgcacgtcgtcgccagcggccaccccgtcgatgg

SEQ ID NO: 20259 - DNA, 261 bp, Zea mays
gcctgttactaaactgacaccaatggcgatgagttccgtggccaccgcattccttgtttccagtaatctccgaaacgacgagtgttccatcattccgatttggcgtgtttttaactggcaatgttgatggccatccacaggtcatggactacgagtcacttccgcacttctgcaagagagaagggtcaggttcatccagcgactcgctggatggagtagattgctactcctacgaccaccctttccaccagcagctgtaca

SEQ ID NO: 20260 - DNA, 263 bp, Zea mays
ctcggcctcctgcgacctccatggctggcaaagctgctgcagacactgggagcaacgaccgagtcgttgaggttgaggggtcctcctcctcctccatggcggacgtgtacaaaggcgagctcacgccgctgcagaggcacgtctccttcttcgaccgcaacaaggacggcgtcatctacccctccgagacataccaagggttccgagctatcgggtgtggcgtcgccctgtctgctgctgctgccgtcttcgtcaacggtgga

SEQ ID NO: 20261 - DNA, 263 bp, Zea mays
ctgaaggtggagtggacgaatgaaggaagtcaccgcggcctacgaggtcgaggcgatgccgaccttccacttagtcaagaacggcaagacggtcgcgaccatcgtgggtgccaggaaggacgagctcctggcccagatcgagaagcatgccgcgcctgcgcctgcgtctgcgtctgcctaaaggagatcagtcgtcgccgtcaataagggccagcacgtatggctgtaaatgttgtcgttatcagttctggctttgtcgtttg

SEQ ID NO: 20262 - DNA, 261 bp, Zea mays
catcggccccggtgtctacgacatccactcccccaggatcccgtcggccgaggagatcgccgaccgcatcgacaagatgctggccgtgctggacaccaacatcctctgggtgaaccccgactgcggcctcaagacccgcaagtacacggaggtcaagcccgccctgaccaacatggtctccgctgctaagctcattcgcacccagctcgccagcgccaagtgagcacctttttttgcctttttcgtttccgaggagggcgt

SEQ ID NO: 20263 - DNA, 257 bp, Zea mays
gctgctcttgatctgagccacactcaaaacattggtagaatgatcaaggctcattttccgcactctcagttcatagttgtctctttaaaagagggtatgttcaacaacgccaatgtgatatttcgaacaaaatttgttgatggtgtgtccaccgtgacacgaacagtgccttcgaaacagagatgaccagtttacacatcatgcatcttctgaaccaaaactaggcatacaattccaaaactgtcattttaaggagc

SEQ ID NO: 20264 - DNA, 255 bp, Zea mays
ggaagtgtcagagttgttgatcatcagcgtctaagcagctctgggtatgttttctctgcatctctgccaccttatcttgccagtgctgctgtttctgccgttaactatcttgaggaaaatccctcagttcttgcaaacctaaggagcaatattgccctttgcataaagaactatcagatactccagggcttgaaatttccagccatgttctgtcacctatcgtcttccttaagctgaagaagtcgactggttctc

SEQ ID NO: 20265 - DNA, 259 bp, Zea mays
ccgatttccaatttcaaatccttcgatcgcgcagccgcccgccctctcgcagctctctccgatggcccgcacgaagcagacggcgaggaagtcaactggcggcaaggcgccgcggaagcagctggccaccaaggcggcgcgcaagtcggctccggccaccggcggcgtgaagaagccgcacaggttccgcctcggcaccgtcgctctccgcgagatccgcaagtaccagaagagcacggagctgctcatccggaagctg

SEQ ID NO: 20266 - DNA, 259 bp, Zea mays
atgatgcctatggttcagcaaggacagcaaccacagcgtcctgctggtagacgtgctggtggaatgcagcagcccatgccaatgggtggtcagcaacaggtgttccctagaggtggtcgtggctatcgctatcctactggacgtggaatgcctgatcctggcatgcacagtgttggtgctgtgatgccaccttcatatgagatgggagggatgccaatgagagaagctgccccccaacctgttccaattggggcgctac

SEQ ID NO: 20267 - DNA, 263 bp, Zea mays
ttcttattgaccagggatatagcttcaaggttatcactagtttgccgccggctgaagaaggacctaatctgagctattacacacttgatgaacaacttgagctcttgagcatggcgctgaatgcaggggatgacatgattggtgttgagcgcttagaagaagattctgatggcaaggctcttattagagcacgacgctctgccggatcaatgagtgccttctctggagctggtggaatggtctacatggagtacagcactggg

SEQ ID NO: 20268 - DNA, 255 bp, Zea mays
gccgacgcaggcggacgggaggcggtcatggccaccgtcaagaagggaaagcccgacctcaggaagaaagtgatgcctgccgtcatcgtccgccagcgcaaccgtggcgtcgcaaggacggtgtctacatgtacttcgaagataatgctggagtgattgtgaatcccaagggtgagatgaaaggttctgcaatcactggacctatcggcaaggagtgtgctgacctttggcctaggatcgctagtgcagcaaatg

SEQ ID NO: 20269 - DNA, 254 bp, Zea mays
catcgatccgccattgctcaccgcacaagtgcacgctcacctcacacacgcagctaagtagctaacgccgtagcagaacaagaaaaggctcgacatggccgaggagaagaagcagggcctgcagctgctggacttctgggtgagcccattcgggcagcgctgccgcatcgcgctggacgagaagggcctggcctacgagtacctggagcaggacctgaggaacaagagcgagctgctcctccgcgccaacccgg

SEQ ID NO: 20270 - DNA, 248 bp, Zea mays
gtacgagccgcacttcgactacttccacgacagggtcaaccaggcccggggcggccaccgctacgccaccgtgctcatgtacctgtccaccgtccgcgagggaggcgagaccgtgttccccaacgccaagggttgggagtcccagcccaaggacgcaatttctcgagtgtgcacaaaaggattggcagtgaaaccggtgaaaggcgacgccgtgctcttcttcagcctgcacgccgacggcacgccgg

SEQ ID NO: 20271 - DNA, 235 bp, Zea mays
caaaagaagaaggctgatatcaagcagtagattttacatctagtttaccaagaattggacaccgccttagctatgttttgaattcatgtcactatatgcaatgttgtgatttcagctggtaccttaaatctgaagatttagtatctttgttgggttccttctgagtttgatgtgtggtgttcgtttaattcccttgtacaaccccatttagtatcattgtgatgattttggattc

SEQ ID NO: 20272 - DNA, 256 bp, Zea mays
cgtctccgtccggggcaaggtctacgacgtcacctccggccgcggcttctacggccccggcggcgcctacgccgtcttcgcgggccgcgaggccagccgcgccctcggcaagatgtccaaggacgaggccgacgtctccggggacctctccgggctcaccgacaaggagctcggcgtcctcgccgactgggagaccaagttccaggccaagtaccccgtcgtcgcccgactcgccgccgacgcctgaactcggcag

SEQ ID NO: 20273 - DNA, 272 bp, Zea mays
ccagtatgcactgagcaggatccgtaatgctgcaaggcacttgctcacccttgacgagaagaacccccgtcgtatctttgagggtgaggcgcttcttcgccgcatgaaccgctatgggctgcttgctgagggtcagaacaagcttgattatgttcttgccctcaccgctgagaacttcctcgcaaggcggcttcaaacacttgtcttcaaggctggcatggccaagtccattcaccatgctcgtgtcttgatcaagcagcgtcacatcaggg

SEQ ID NO: 20274 - DNA, 260 bp, Zea mays
gtttcagatacataaggcctacggcagcacgaaccatctgccttcagctcatacttgctttaaccaactagacttgcctgagtacacatccaaagagcagctccaggagcggttactattggcaatccacgaagcaaatgaaggtttcggatttggctaatcagttatactcgtttgtccgtgccctgagaactgcaataggcgagcagcacgtgtgtggctgatcacattatgaactccacgtgtgtgatgagagatgg

SEQ ID NO: 20275 - DNA, 254 bp, Zea mays
tcctcctccattaatattggcagcaagctagctaggatcatcagcatctgagcttattattactaaatcgatcggttgccatggcgatgagagtcggcaagctggcgctggctgcggtgctgctgtgcgcggcggcggccatggccacggcgcacaggcctccggcgtgcgcgccacctacaacttctacaacccgcagcagaacaactgggacctcaacgccgtgagcgcgtactgcgcgacgtgggacgcca

SEQ ID NO: 20276 - DNA, 168 bp, Zea mays
ctcattaattacttattatcatcgcagtgactaccaactgcttcagatcctactgttggaacgcgcgtggaaataagaagagagggcacaataaataataattgtaataaaattaataattattacaatgataataattatctatctatctctatttaataatagagc

SEQ ID NO: 20277 - DNA, 255 bp, Zea mays
agggcggcaaccgattctggaagagcattggccttggcttcaagactcccagggaagcaatcgaagggacctacattgacaagaaatgcccattcactggaactgtttctatcagaggcagaattattgctgggacatgccacagtgctaagatgaacagaactatcattgttcgcaggaactacctccactttgtaaagaaataccagaggtatgagaagaggcactccaacattcctgctcacatctctccat

SEQ ID NO: 20278 - DNA, 255 bp, Zea mays
gcgagagagccgcgcacctatctggcaagcgacgccgcggcctcgatcggagtcggaggcgaacacccccatggcggcggctggcggcggcgcgcgtccttgtagccttttgcgccgccgccctctcgtcggccacggtgaccgtgaacgagcccatcgtcaacggcctctcctggagcttctacgacgcgtcctgcccgtccgtcgagggcatcgtgcgctggcacgtcgccgacgccctccgccgcgacatcg

SEQ ID NO: 20279 - DNA, 257 bp, Zea mays
gagcaatgccatcctctatgagcccggcgagcatcccgatcatgtcgttgtcatcaagtatgtgccgtacgtgggagacagcaagagggctatggacgagtacacctcagagatcttcatgggcggcaagaacaccatcgtgctgcacaacacctgtgaggactcgctcctcgccgcacctatcatccttgatctggtgctcttggctgagctcagcaccaggatccagctgaaactgcagggagaggacaaattcc

SEQ ID NO: 20280 - DNA, 256 bp, Zea mays
gacattgactggcaagaccatcaccttggaggtggagtcgtctgacacaatcgataatgtcaaagccaagatccaggacaaggagggcattccaccggaccagcagcgcctgatctttgctggcaagcagctggaggatggccgtaccctcgccgactacaacatccagaaggagagcaccctccacctggtgctccgcttgcgaggtggtatgcagatctttgtgaagaccttgactggcaagaccataaccctg

SEQ ID NO: 20281 - DNA, 256 bp, Zea mays
cacaccccccgagctcagcttagctccactccagctccaatcacagtcgtgaccagagcgcgagagctagctagagggccgtgaaaatgccgatcaataggatcgccctggggagccaccaggaggtgtaccacccgggcgccctcaaggcggcgttcgctgagttcatctccaccctcatcttcgtcttcgccggccagggctccggcatggccttcagcaagctgaccggcggcggcccgacgaccccggcggg

SEQ ID NO: 20282 - DNA, 254 bp, Zea mays
tgcttccacgtgctgcggctctccttgatgtgtcccctgttactgatgtcaccgctgtaaaggagccacacgtctttgtgaggccaatttatgctggaaatgcactttgtactgtgaaatatactggagaggggccttgcatgatgagtattagatcaacttcattttccccagctactgaggctatgtctgaaacaaaggttgcacctatcacccaggttgatctctctttcctcagtgaagggaaatctaca

SEQ ID NO: 20283 - DNA, 253 bp, Zea mays
gaaaccgtaagaagcgcagagtgtgagagagaggggcatcaaggacgacgtgggcaagatgatgcaggtgttcgtgaagacgctggcggggaagacgatcacgctggaggtggagggcagcgacgccgtcgagaacgtgaaggccatgatccagggcaaggaaggcatcccgccggaggagcagcgcctcgtcttcgcgggcaagcagctggacgacgacggccgcaccctggccgactacggcgtccagaag

SEQ ID NO: 20284 - DNA, 253 bp, Zea mays
caaagagcttgattataatactaggataagctacgcttctctttggaaggcacttgtttttgctgatgcaaaagcaattaaggagaacagtgccaaactgggtgctggggaggatcttcatgcactctttgctggtgttctcactatgagaccatggaaaagggtgattgacccatctcctgatcatcttgttctaggaaaaaatactgattattcagaattacagaattacgcctccttatattttactgag

SEQ ID NO: 20285 - DNA, 164 bp, Zea mays
ctgccaacaaagttgtggcagttaagtcgctcttggtcccaacaaggagcttgtgaacattgtcacttgcatagcgatcaatttcatttaaccattgcttcacattattgaagcttacttggtctgtcacgtcagatacaataatgattccaagctccttgttg

SEQ ID NO: 20286 - DNA, 250 bp, Zea mays
gacgagttcatggaggcgtactgccgggtgctggagcggtataaggaggagctgtcgcggccattcgacgaggcagcgtccttcctcagcagcgtccggacgcagctcagctccctctgcggcgccgccgcctcgctctcagatgaaatggtagggtcgtcggaggaggacgaagcatgctcgggaggagacacggaggcgacggagccggggcagcaggagcacagctcccgcctggcggaccatgagc

SEQ ID NO: 20287 - DNA, 229 bp, Zea mays
cacactccggcagccgagcgatcgagctccccggtcgctagcacagccggccactgcacacgacggtgctggtaggttgcaagcacttgcaggatggcgcaggtcgctaagacgcttctccttgtggccctggtggtcgtgtcggcggtggagctgtgccgcgccatcgagttcgacgagcgggacctggcatcggacgaggcgctgtgggacctgtacgagcggtggc

SEQ ID NO: 20288 - DNA, 245 bp, Zea mays
gttgcacttggactacttgatgagggcaaagttgttctgggtgtgttgggatgtccaaatcttccattaaaatcaacaaacaagaacaatagcagctcttttggggatcgaataggttccctcttttttgctacaattggttgtggagcgcaagttgaggccttagaaggatctgagccacaaaagattagtgtttgctccaccaataatccagttgacgcctcattctttgaatcctttgaagc

SEQ ID NO: 20289 - DNA, 246 bp, Zea mays
atcttgatagacaagaactaccgtgcaaaggtcgcagattttggtttaacaaaacttacagaagttggtaatacatcactacccacacgtggaatcgtgggcacatttggttacatgcctcctgaatatgctcggtacggtgatgtttctccaaaggtcgatgtttatgcctttggcgttgtcctctacgaacttatttcggccaaagacgccattgtcagatcaaccgagtcttccagtgattca

SEQ ID NO: 20290 - DNA, 248 bp, Zea mays
ctctgtcggacccgagtactatgtcagcatcctctcctttgtcgacaaggaccagctcgagccgggatgctccatcctcatgcacaataaggttctttctgtagttggtatattgcaagatgaagttgatcctatggtatctgtgatgaaagttgagaaagcacctttggaatcttatgctgacattggtggactagattcccagattcaagaaattaaagaggctgttgagcttcccttgactcatc

SEQ ID NO: 20291 - DNA, 252 bp, Zea mays
cgactccgccgccgctcccgctccgccccagcgcatcgcccgccgccacagcgtaccgcgacctcatcgatcaccttcagctttcaatcatggccgacgtcgatgtcgaaccggagttgccgccggcgctcccaagaagaggacgttccgcaagtacagctaccgcggcgtcgacctagatgcgcttctcgacatgtccacggacgacctcgtccagctcttccccgcgcgcgccaggagaaggttccagag

SEQ ID NO: 20292 - DNA, 260 bp, Zea mays
gaaagtgcagattgtaggagatgatcttctcgttaccaaccccaccagggtcgccaaggccatcaatgagaagacctgcaatgctctcctcttgaaggtgaaccaaatcgggtctgtgaccgagagtatcgaagctgtcaggatgtccaagcgcgccggatggggagtgatggcaagccacaggagtggcgagacagaggacaccttcattgctgacctctcagttggcctgtctacgggccaaatcaagacgggagccc

SEQ ID NO: 20293 - DNA, 255 bp, Zea mays
gttcttggtattgatctttcggtgaacatggtttcatttgcaattgaacgtgccattggacgcaagtgctctgttgaattcgaagttgctgattgcaccacaaaggattacccagaaaatagttttgacgtcatctacagccgtgacaccatccttcacatacaagacaagcctgctctgttcagaagcttcttcaaatggctaaagcccggcggcaaagtcctaatcagcgactactgtaagaatcctggaaaa

SEQ ID NO: 20294 - DNA, 253 bp, Zea mays
ccttctgctcgaaatgtaccgctgcaacatcaatgactgtgacagatgagcctggttattatgaagatggggcctttggtataagattggagaatgtacttatttgcaaagacgccaatgctaagtttaattttggagataaaggttatttggcatttgaacatataacatgggctccataccagaccaagctgatagacaccgggcttctgacccctgttgagatcgactgggtgaacacgtaccactcaga

SEQ ID NO: 20295 - DNA, 256 bp, Zea mays
gcagaagaaagtcccggataagttgctggatcagacgagcgtgacacacctgttcccgatcaccaagtacgtcggattgcttgccactggccttacagctgatgctaggtcattggtttcccaagcaaggaatgaagcagctgagtttcgtttcaaatggggctacgagatgccagttgatgtgttagcaaaatggattgctgacaaagctcaagtttacacgcagcatgcatacatgagaccccttggagtagtt

SEQ ID NO: 20296 - DNA, 257 bp, Zea mays
tgtggattacgagtacaagtcggtaaaccctaggacagatccaggtaactgcaacaacttgaaacaattcgtgtattgcgattatgaaaaaatcaatccaatcaaatatattccagcattagtagatggggacatagtcgtttctgattctcttgccatctcattgtatttggaagataagtatcctgagcatccactcctgcctaaagatctcaagaggaaagctcttaatcttcagattgcaaacattgtttgtt

SEQ ID NO: 20297 - DNA, 258 bp, Zea mays
ggagcgactcgccaccgggcggaaaaggagggcggaggctcgatggcggatgagaatcaggctggaaagaaagaggaggaggaatttagcacaggccctctgtcagtcctaatgatgagtgttaagaacaacacccaggtcctcatcaattgccgcaacaacaagaagctacttggccgtgttcgtgcttttgatcgccactgtaacatggtgctcgagaacgtgcgtgagatgtggacagagatccccaagactggc

SEQ ID NO: 20298 - DNA, 255 bp, Zea mays
attcggtattgagaatttgcgataccgatctgggagaagagaagggcgtcatgtcgtcgttcggacgcaattcatggtgtatcctcgtgctggcctccgtgctcctcctgtcctgcctcgccgacacggccgtggccaagcgaacaggcgagctcaccgtcttctggggccggaacaaggaggagggcacactgcgtgaggcctgcgacaccgggctctacaacaccgtcatcatctccttctacagcgtcttcg

SEQ ID NO: 20299 - DNA, 254 bp, Zea mays
accaatctttcaggatggtccacaacttacaggcattgctgacaacctgaattacaggcacagaaatgcccagatggcaagcagagcatcagttgaactccacacccacatatatttcaagacaaggccaactgacactgaagctaggatagtaaagatcaaggcaaatggtttcatagtatttgtcccaaagtttggcatagaagggcccatctaccttactccgaaggcgacaaaggcggtgattgggttgt

SEQ ID NO: 20300 - DNA, 253 bp, Zea mays
gctcaacaccctcgaggtacctccattcgcagtcggccgtgtcctcggagccgcgggagatggcggatcaggagacagtagctgtggttgaggcacctaccccggttctaggggaaccgatggacctgatgactgccctgcagctcgtcatgaagaagtcaggtgctcacgatggccttgtgaagggtcttcgtgaggctgccaaagccatcgagaagcatgccgctcagctctgcgtgcttgccgaggactg

SEQ ID NO: 20301 - DNA, 255 bp, Zea mays
ggccgatcgatcactgaagtagtaatggcctccgcgaacagctggacgctcgagatcgcgtcgccggtggccccgcagcgcctgttccgcgccgccgtgatggactggcacaccctggcgcgcaaggtcgcctcccacgtcgtcgccagcgcgcactccgtggagggcgacggcggcgttggcagcgtcaggcagttcaacttcacctcagtcatgccgttcagcttcatgaaggagcgtctcgagttcctcgac

SEQ ID NO: 20302 - DNA, 257 bp, Zea mays
aatctatccaagcaacaaacttggcattcttgcctgttcttaattattgccaggacaggagaaacaaagatgaggcctcagctgatactcgtcggcactctggctgttctcgccatcctcgcagctctcggcgaaggctcgtcgtcctggccctgctgcaacaactgcggtgcttgcaacaagaagcagccgccggagtgccagtgcaatgacgtgtcggtcaacgggtgccatccggagtgcatgaactgcgtcaa

SEQ ID NO: 20303 - DNA, 248 bp, Zea mays
gcaccattgaggttgttggcactgataaggagaccaccacccaaggccatgacgaccttggcaagcgttgcgccaagtactacgaggcaggtgcccgctttgccaagtggcgcgctgttctcaagattggccctaatgagccatcacagcttgccatcgacctgaacgctcagggtctggctcgctatgccatcatctgccaggagaatggtctggtgccaattgttgagcctgagatccttgttgat

SEQ ID NO: 20304 - DNA, 252 bp, Zea mays
gaagatgataaccctcaaaagctccgatggcgaggagttcgaggtggaagaggcggtggcgatggagtcgcagaccatccgccacatgatcgaggatgactgcgccgacaacggcatccctcttcctaacgtcaactccaagatcctatccaaggtaatcgagtactgcaacaagcacgtacatgccgccgcagccgcagccgccgcctcgaaggccggttccgacgacgtgggtgccgcctccgccaacag

SEQ ID NO: 20305 - DNA, 170 bp, Zea mays
acgggttcttgctgcctcttcgcatacatgtgaatactgtaaataccgttgcctgaataaaagcttcagcctgcaagctacaagcaatataccaatgttctgactctgaagcactggttttacatgtctctacgtgtatatgtgtatgtgatacatgacagattactttc

SEQ ID NO: 20306 - DNA, 245 bp, Zea mays
ggaaagctgctgacattgagatcttgaatacattccagctactttcagcataagccagttgtctatttggtgaatatgagcgagaaggacttccagagaaaaaagaacaagtttctacccaagatacatgcttgggtgcaggaacatggtggtgaaaccatacttcctttcagctgtgcttttgaacagaaactagtggacatgccagaagatgaagccgccaaatattgtgccgaaaaccagat

SEQ ID NO: 20307 - DNA, 249 bp, Zea mays
gtgcagcctgctcgatgagtacaccaaggtgctcatcgccctggccgacaacgtcgttccaagcagctccaggacatccgccggggcctcaggggcgactcggtggtgctcatggggaagaacacgctcatcaggcgttgcatcaaggtgtacgccgagaagaccggtaaccacacctttgacccgctcatggacctcctggtcggcaacgtaggcctcatcttcaccaagggagacctcaaggaggtg

SEQ ID NO: 20308 - DNA, 249 bp, Zea mays
aagtctctggactttagcaactatccttacatatatatgagatggaaagaacagtattttgtcaatgttggagttgactgtgggttaaccatcgctggtttctactacgtctgcttttcttgtagtgatggctccattagtggattttattatgatccaaatagcagtccgtttcagaagctcgaattgaagtgtaccaatgagaaaaattctggattcaccttttcatcctatgagctgcagtgacag

SEQ ID NO: 20309 - DNA, 245 bp, Zea mays
ctgttctcaagattggccctaatgagccatcacagcttgccatcgacctgaacgctcagggtctggctcgctatgccatcatctgccaggagaatggtctggtgccaattgttgagcctgagatccttgttgatggccctcatgacattgatcgctgcgcttacgtcactgagaccgtccttgctgcctgctacaaggcgctcaacgagcaccatgtcctcctggagggtaccctcctgaagccc

SEQ ID NO: 20310 - DNA, 246 bp, Zea mays
catcctcttccaggtcctcatcagtccgatgcttgggggaaccaccgaccagaaagttgtggatgagaaccttgagaagctgaagaaggtgctagaggtgtacgaggcacgcctgaccaagtgcaagtaccttgctggagacttcctcagcctcgccgacctgaaccatgtgtctgtcactctctgcctgtttgctacgccctacgcatctgtgctcgacgcctacccgcatgtgaaggcctggtg

SEQ ID NO: 20311 - DNA, 246 bp, Zea mays
ctccctcttgccggtcccgaataaagagcagcagcgcaagaggtcggtagagcgagaagaaggcaatggcggccgagagcttccttttcacctcggagtccgtgaacgaggggcacccgacaagctgtgcgaccaggtgtcggacgccgtgcttgacgcatgcctcgcgcaggaccccgacagcaaggtggcctgcgagacctgcaccaagaccaacatggtgatggtgttcggcgagatcacgac

SEQ ID NO: 20312 - DNA, 246 bp, Zea mays
gtcttcatctatgtgtcctgatataagattctgatacgcaaatcatgtgtgtttccctttgtcaggtggatcctcaggatattgttatgcttgtcatatcgtggcatatgaaagcttccactatgtgtgaattcactcgccaggagttcattggtggactgcagtcaataggagtggattcaatagagaagcttcaggcgaagttaccttcattgcgagctgagcttaaagatgatcagaagttcc

SEQ ID NO: 20313 - DNA, 243 bp, Zea mays
gtggaaagctcagggcccaaagagccaagtccatgaagttcaaggatggctacatgatctcatctggtcagccagtgaacgagtacattgactcggctgtgagacacgttcttctcagacagggtgttctcggtatcaaggtgaagatcatgcttgactgggacccgaaggcaaggttggcccgatcactcctcttccggacctggtgaccatccacaccccgaaggacgaggacgagccgcg

SEQ ID NO: 20314 - DNA, 175 bp, Zea mays
gagagagagagaaacagagttcttcagtttgctatctctctctgcatgtttggcgtcagtctttgtgctcatgtacgtacgtgtgtctacctgcatgttggttgatccgattgcatctgctgtaaccatatattaattggtccacgatgatatgatttgatactatatatatact

SEQ ID NO: 20315 - DNA, 136 bp, Zea mays
gccaggagaatggtctggtgccaattgttgagcctgagatccttgttgatggccctcatgacattgatcgctgtgcttacgtcactgagaccgtccttgctgcctgctacaaggcgctcaacgagcaccatgtcct

SEQ ID NO: 20316 - DNA, 185 bp, Zea mays
ggcaaaatacatctacattgctggatttttcctcacggtgtcacctgattctatccagttagttgctgagcatgctgcggcaaataacaaggtgttcctgatgaacctctctgctcccttcatctgtgagtttttctatgatgcccaagagaaggtcctcccgtatgctgacttcatcttcggca

SEQ ID NO: 20317 - DNA, 268 bp, Zea mays
gggcgactacagggcgctgtacaagtacttctccacggtggcgaacaggcgctggacaccgccgagggcctgggcctgtcgcgcgaggaggcctgccacaacctcctcttcgccaccaccttcaacagctacggcggcctcaaggtgctgttcccgggcctgctggccaacgtggccagcggcggcgagaagctccacgagcggctggtggccgagatacgcggcgccgtggccgacgccggcggcaaggtcaccctcgcggcggtgg

SEQ ID NO: 20318 - DNA, 272 bp, Zea mays
attacagtcatgtcattcttcctgttggccccagtaaccttacttacagaaggtgttaaagttagtccagcagtgttgcagtctgctggtttgaacttgaaacaggtatacacaaggtcattgattgctgcattctgcttccatgcataccaacaggtatcatacatgatcctcgccagggtatccccagtcacacattcagtgggcaattgcgtcaagcgtgtggtggtcattgtgacctctgttctgttcttcaaggaccctgtttctcc

SEQ ID NO: 20319 - DNA, 270 bp, Zea mays
caaggccaacaccatgagcgcgctggaggaggtgtaccgcatctcccgcgcgcagaccctcatcgcgctctgcggcacagtcccgggctactggttcaccgtcgcgctcatcgacgtcgtcggccgcttcgccatacagatgctgggcttcttcatgatgaccgtcttcatgctcggcctcgccatcccctaccaccactggaccacgccgggcaaccacatcggcttcgtcgtcatgtacgccttcaccttcttcttcgccaacttcgg

SEQ ID NO: 20320 - DNA, 269 bp, Zea mays
agcgccgccgccgccgcagactcctccttttcgatcccttcgcaaagcgccgccgtcgccccatccggcatggctccgaagaaggataaggccccgcccccgtcgtcgaagcccgccaagtccggcggtggcaagcagaagaagaagaagtggagcaagggaaagctaaaggagaaggtgaacaacgcggtgctgttcgaccaggctacctacgacaagctgctctctgaggtgcccaagtacaagcagatcaccccctccatcctatc

SEQ ID NO: 20321 - DNA, 269 bp, Zea mays
ccacagctcaccgcggtttggctttctcccctcttccgcaccgcttctcgctccggattccggattccctctgctctttccctaacgaaggtagccatggcggggagaggtaaggcgatcggctcaggcgccgccaagaaggccacgtccaggagctccaaggctggcctccagttccccgtgggaaggatcgccaggttcctcaaggccggcaagtatgccgagagagtcggcgccggcgcccctgtctacctcgctgccgtgctcga

SEQ ID NO: 20322 - DNA, 265 bp, Zea mays
ctttgaagaaatgcggcaagtttcggaagcaacaaaaccagacctggtgatttttgtgatggacagtagtattggtcaggctgcatttgatcaagcacaggcatttaaacaaagtgtttctgttggtgctgtgattattacaaaaatggatggtcacgcaaaaggcggtggtgcccttagcgcggtcgcagcaacaaaaagtcctgttatattcattggaactggcgagcacattgacgagtttgaagtttttgatgtgaagcca

SEQ ID NO: 20323 - DNA, 265 bp, Zea mays
aacaaatctggctcaaagccctcgcgccatgcggaacccaactcaagggtcccaaagatgccacctccaaaggacgaggagagtgaagaggaggaaggggaaccacaggaagaccaggagagtgcgctgtgtggcgcatgtggcctaggttatgacgacttctggatctgctgcgacctatgcgagacatggttccacggcaagtgtgttaagatcaccccagctaaagcggaccacatcaagcagtataagtgcccctcctgca

SEQ ID NO: 20324 - DNA, 266 bp, Zea mays
aacagggtactcagcaaaacttctcaagaagcctgatcaatgccgagcagtatatgcgtgttcacatcttttttggactgatgaccaagatggtataatggatggtgaaagggttctcctttgtttgaagcgtgccttgagaatcgcaaatgctgctcaacagatggctagtgctacaagggggagcagtggatctgtaaccctatttattgaaattttgaacaagtacttgtacttctttgagaaaggaattccacaaatcacaa

SEQ ID NO: 20325 - DNA, 266 bp, Zea mays
aaacgctcaagctgcaggagttactgctcattactacgaggatgagactgctcctactggcacatgtgctgtatgtgttgttggtggtgaaaggtcattgattgcaaatctgtcagcggcaaactgttacaaatctgagcatctaaagagaccagagaactgggcactagttgaaaaggcaaaatacatctacattgctggatttttccttacagtgtcgcctgattctatccagctagtcgctgagcatgctgcagcaaataaca

SEQ ID NO: 20326 - DNA, 174 bp, Zea mays
ctttgaagaaatgcggcaagtttcggaagcaacaaaaccagacctggtgatttttgtgatggacagtagtattggtcaggctgcatttgatcaagcacaggcatttaaacaaagtgtttctgttggtgctgtgattattacaaaaatggatggtcacgcaaaaggcggtggtgc

SEQ ID NO: 20327 - DNA, 257 bp, Zea mays
aggagcagctactcggcggcgtggacttgaactccgtgggagagacgctggagccggacgtgaagataatgagcctgtccatcctgtcgcccgggcggcccgacatcgtgctgccgctgccggtggagcccaacggcaagggcgtgtggttcaccctcaaggaaggctccccgtaccggctcaagttcaccttctccgtcagcaacaacatcgtctccggcctccgctacaccaacaccgtctggaagacgggctca

SEQ ID NO: 20328 - DNA, 257 bp, Zea mays
cggatcggccggctcctgcgtcggaattctagggtctctacctttcctttggttttatcgatgtctcttgtgtttctgtaagctagcaaacagttccagaaagcttttgttaagattttgatgacgctaagaggattgatgctactatgctgtactcaggattccatgctgcattgcgatgctaaattaaagaacctctgttaccttactttatgtgtagtgttgcagtgattgagtcctagatttgatcactgggt

SEQ ID NO: 20329 - DNA, 256 bp, Zea mays
cccacgcgtccggaaggactggtacggcaatggagcgtcgaagctgtgcgtgatctacaaccagacgggcggaaccctgcggtacgtcgacgacaaggactggctgggctacccggggccgacgccctacccgacggagatcggcaacgggcagtgggcgtccttcctccacgtccacaagaccggcgcctcgtcggggtccatggccgctgtcgtctaccgcggcaaggacggcggcggcagcgagcgcgacttc

SEQ ID NO: 20330 - DNA, 264 bp, Zea mays
agggaaactcacaagcagcccatggtcagaattggacggtcttcaaccagagacaaagattatcgatgaccagttggtgaatattaaccagaagggtttccttacaattaacagccaacctgctgtaaatggagagaaatccgactcgcctactgttggttggggtggtcctggaggctacgtttatcagaaggcctacctcgaattcttctgcgcaaaggagaagttggaccaactaattgagaagatcaaagcattcccttc

SEQ ID NO: 20331 - DNA, 260 bp, Zea mays
ggagaggcttgtcggcgtctctgaggagaccaccacgggtgtcaagaggctctaccagatgcaggagaccggcgccctcctcttccctgccattaacgtcaacgattccgtcaccaagagcaagtttgacaacctgtatggttgccgccactcgctccctgatggtctgatgagggccactgacgttatgatcgccggaaaggttgccgtggtctgcggatacggtgatgtcggcaagggttgtgctgctgccctcaagc

SEQ ID NO: 20332 - DNA, 263 bp, Zea mays
acctcgagcgcctcccctaccttcaggccatcgtcaaggagacgctccgcctgcgcatggccatcccgctgctggtcccccacatggacctcaacgacggcaagctcgccggcttcgacatccccgccgagtccaagatcctcgtcaatgcctggttcctcgccaacgaccccaagaggtgggtgcgccccgacgagttccggcccgagcgcttcctggaggaggagaagtccgtggaggcccacggcaacgacttccgattc

SEQ ID NO: 20333 - DNA, 248 bp, Zea mays
gctagatcagcggggaacaggattatccacaccgttgactccatcatctctttcgcaaattaaatctcctgcaaatcaggtggagtacctgaagcatttcagggcagataatatagttaaggatgcagaatttattcgtgtacgtcttgtaccagatgctaagccttggacagtcctaggacagagttatggtggattttgtgccgttacatatttgagttttgctccagaaggcctgaaatctgttc

SEQ ID NO: 20334 - DNA, 254 bp, Zea mays
gtatactcgcagtgcagacaccgtaagtgttcatgttgcaacacagtgaaccttgttagaccagtgaataatatagctcatgtgaactgcggccagtgccggacaactttgatgtatccatacggcgcaccttcagtaaaatgtgccgtatgcaattatgtcacagctactggagtaaatactgtggcacccaccccatctgcgaggccaacatcagatgggtcttcatatagtggctcatctacttctgctcc

SEQ ID NO: 20335 - DNA, 252 bp, Zea mays
ccctcctgaagcccaacatggtgactccaggctccgactccaagaaggtgacccctgaggtgattgctgagtacaccgtccgtaccctccagaggaccgtccctgctgctgtgcctgctgttgtcttcctctctggtggacagagcgatgaggaggccacccgcaacctcaatgccatgaacaagctcagcaccaagaagccgtggtccctgtctttctccttcggccgtgccctccaggcgagcaccctca

SEQ ID NO: 20336 - DNA, 258 bp, Zea mays
gcagttcctttccggcctggagaagctgggcaagggcgactggcgaggcatctccaggagctacgtgccgacgaggaccccgacgcaggtcgccagccatgcacagaagttcttcctcaggcagagcagcttggggaagaagaagcgccgctccagcctctttgacatggtgccgatttgcgagaacagtgcgagcatctccgatccgctgggcagcgaaggggcctcaacctctctgtcgctgaacgtgccacgcca

SEQ ID NO: 20337 - DNA, 256 bp, Zea mays
aaccaagaagcctgtaccggattttagcttctatgatcgttctgctccaatttatacgcaacctagatatttgcctccttcaaaggttcttgatgctgatgtgacagacagtgttattggagaagggtgtgttattaaacattgcacaatcaatcattccgtagttggactccgttcctgcatttctgaaggtgcagttatagaggactctttgctaatgggtgcagactattacgagactgagaatgataagaat

SEQ ID NO: 20338 - DNA, 257 bp, Zea mays
atcacgttccacatcgggaagcaggaggcggactcacactgcgggtcaacagcgccgccttctatggcgacctgcaccagctgaaaagcctgatccgggcaggtgctgatcccaagaacaccgactacgacgaccgctcccctctgcatctcgcggcttccagagggtacgaggacgtcgtgcagttcctcatcaacgaatgcgtcgacatcgaccttaccgaccagttcgggaacacgccgttgctggaggcggtg

SEQ ID NO: 20339 - DNA, 247 bp, Zea mays
gatgaaaacccgttcggtgttgtcctgggtggaatcatagcgcaacactctgcactactgctgccgttcttggtggaaagagcctagcgtcccagatatctgagaagatggttgaactgtcaagcggagtgctcttcctgctcttcggtatcatgtccttactctctggaccagaaggagaattgtaatccctgcttgagcctttttcagctagctgattaacatggctttctcttcttagacctat

SEQ ID NO: 20340 - DNA, 248 bp, Zea mays
aaattctgccgtctccaccgccgccgcagccagcgtcaccggaggatctgccgtctcccttgctccacgcgatgaacaccgacatcaccgcctcgactaagccggagtacccggtggtggatcggaacccggccttcaccaaggtggtcggcaacttctctgcgctcgactacatgcgcctctccaccatctccgccgtctccgtcaccgttggctacctctccgggatcaagccggggatccggggc

SEQ ID NO: 20341 - DNA, 251 bp, Zea mays
cctattctaacaatgcctaacgatgatatcacacacccaactcctgaccttactggatacattactgagggacagatatacattgataggcagctccataacagacagatttatccacctattaatgtcctgccatctctttcacgattgatgaagagtgctattggtgagggcatgacacgtcgagaccattcggatgtatctaatcagctttatgccaactatgctattggaaaggatgttcaggccat

SEQ ID NO: 20342 - DNA, 252 bp, Zea mays
cgtgttcctgaccggcgagaggctcaagtcccccggcgaggagtgcaacaaggtgttcgtcggcatcagccagggcaagctcgtggaccccatgctcgagtgcctcaaggagtgggacggcaagccgctgcccatcaacgtcaagtaaagaacgccaaggagaagaggagggaggggaggaaatacgtgaaaaaaaataaaacctgtacacgtgtatgtccagatcgtgtgtcgtcgatcgttcttcgttgt

SEQ ID NO: 20343 - DNA, 256 bp, Zea mays
ggccgagaagatgggacttgactacatggatgttgaggctctcaagaaaatgaacaagaacaagaagcttgttaagaggcttgccaagaagtaccatgctttcttggcatcagaggccatcatcaagcagattccccgtctccttggtcctggtctcaacaaggcaggcaagttcccgaccctggttactcaccaggaatccctcgagtccaaggtgaacgagactaaggcaaccgtcaagttccagctcaagaag

SEQ ID NO: 20344 - DNA, 270 bp, Zea mays
cgctgcctcgtgcaggtgtcgtacgccatcgggtgccggagcccctgtccgtgttcgtcaactcgtacggcaccggcacgatccccgacaaggagatcctcaagatcgtgaaggagaacttcgacttcaggcccgggatgatcagcatcaacctcgacctgaagaagggcggcaacaggttcatcaagaccgccgcctacggccacttcggccgtgacgacgccgacttcacctgggaggtggtgaacccctcaagttcgacaaggcatc

SEQ ID NO: 20345 - DNA, 272 bp, Zea mays
gcggttctttgaagattataagaagaatgagaataaagaggttgctgtcgatgcattcttgcctgcgaccacagctcgagaggccattcagtactccatggatctgtatgcgcagtatattttgcaaagcttgaggcagtagattggaagcaactatttatctgggcgtcttggaatgagtgtgattttaataagtcaaaacacttgatattgtgtgcaaatcttggggttgagaacaatgtcactagctgtgatttacttctgtgacttgc

SEQ ID NO: 20346 - DNA, 277 bp, Zea mays
catgaggcaaacggtggctgtcggagtcatcaagagtgtggagaagaaggatccaactggagccaaggtgaccaaggctgccgcaaagaagaaatgatgtgtctggctggttctgtgtttccactaggtatccctcaagcaaacacagaaccagccagacacatcatttcacggataaaccctagctgcgcgagccccccggcgatgtcggtggccatccgctccggcgagctccttgcgtgccccgtcgcactccggcgggcgcccttggctgtgt

SEQ ID NO: 20347 - DNA, 276 bp, Zea mays
gtcgtgtcagtgttggtttaataatggaccggttgtgagctcggacaccatcgacaatgtgaaggcgaagatccaggacaaggagggcatccccccggaccagcagcgtctgatcttcgccggcaaacagctggaggatggccgcaccctagcagactacaacatccaaaaggagagcaccctccaccttgtgctccgtctccgtggtggtcagtaagtcatgggtcgtttaagctgccgatgtgcctgcgtcgtctggtgccctctctccatatg

SEQ ID NO: 20348 - DNA, 266 bp, Zea mays
gcaagagcgacagagagagagagaccgacgcgccggcagatcccaagctcaccggagagggggaagagggcgaccgaagcggcgatgggtttcatcatggacttcgcggagaatctgatcctccgtctgatggaggacccggacaagcgcgaccaggttcggcgggagcatgtctacaagatgaaggagcggtgcgagcgcactaaggcggcgtggagcctccctctgcgcccctacggcttctggaccttcgaccgcttcaactc

SEQ ID NO: 20349 - DNA, 264 bp, Zea mays
gaagcatttgcctgaggatccacttttccaattggtgtccaagttgtatgaagttgtacctcctatcctcactgagctgggcaaggtcaagaacccatggccaaatgttgatgctcacagtggagtttttgctgaaccactttggactatctgaagcacggtattacactgtcttgttcggtgtttcaagaagcatggggataggatctcagctcatctgggaccgtgcccttggcctgccacttgagaggccgaagagtgtta

SEQ ID NO: 20350 - DNA, 257 bp, Zea mays
catgttcgagcacatcccgtcggctgacgcactcatgctcaagtggatcctgcacgactgggatgaggaccagtgcatcaagataatggagcgctgcaaggaagcgatcggtggcaaggaagcaggggggaaggtgattataatagacacggtgctcggatctcgggcagacgacgacgacgacgacaagacgtgcagggagacgtatgtgttggatctccacatactgagcttcgtgaacggggcggacgggagga

SEQ ID NO: 20351 - DNA, 257 bp, Zea mays
gccatccgcttcttctcttcggttcagctctcgagtttccaggatgaaggtaatagctgcctacctgcttgctgttctgggtggaaacacttccccgactgctgatgatgttaagagcattctggaatcagttggtgctgaagctgatgaagaaaaactagagttcctgctcacagaactcaaagacaaggacataacagaagtgattgcagctggaagggaaaggttatcctctgtgccttcaggtggtggtgcaa

SEQ ID NO: 20352 - DNA, 258 bp, Zea mays
aagaacagcattcaaggaacaatcccttctgagcttggtaatttgaagaatctaataagcttggacttgtacaagaacaacatttcggggacaatacctccttcccttggaaagttgaaatcccttgtattcctgcggctcaatggcaatcatttgactgggccgatcccaagggaactttctggaatatctagtctcaaagttgtcgatgtttcaagcaatgatttatgtgggacgattcccacatctggaccattt

SEQ ID NO: 20353 - DNA, 261 bp, Zea mays
gctgaatttacagcttctctagttcatctcaatgttgagcatggggacggtcagcttgatctaaatttggagcgattgcggatggccattgaggatttgcttgttaagttggccaagatgttttccaaaccgaagctacaaactgtctttctgataaacaactatgatttaacaatttccattttgaaggaagctggaactgagggtgggaaagcacaacaacacttcgaggaggttcttaagagcaacatcgcaatatat

SEQ ID NO: 20354 - DNA, 259 bp, Zea mays
gtcaggacagacaagacctaccctgctgggttcatggatgtcatttccatccccaagaccaatgagaactacaggctgctgtacgataccaagggccgcttccgccttcacccaatcagggatgaggatgctaagttcaagctttgcaaggttaggtctgttcagtttgggcagaagggcatcccttatctgaacacgtatgacggccgcaccatccgctaccctgaccccctcatcaaggccaacgacaccatcaaga

SEQ ID NO: 20355 - DNA, 128 bp, Zea mays
ggtggaggctaaccagtacaccgctgcactgaatcccatcctcttccaggtcctcatcagtcctatgcttgggggaaccaccgaccagaaagttgtggatgagttttgatgtttaaattggtcttctg

SEQ ID NO: 20356 - DNA, 225 bp, Zea mays
gactttcgggctgttcttagccaggaagctgtccctgactagggccctcttctacatcatcatgcaatgcctgggtgccatctgtggagctggagtggtgaagggcttccagcagggactttacatgggcaacggtggtggcgccaatgttgtcgcacctggctacaccaagggtgatggccttggcgctgagattgttggcaccttcatcctagtctacaccgt

SEQ ID NO: 20357 - DNA, 259 bp, Zea mays
gctggaccctcgagatcgcgtcgccggtagccccgcagcgcctgtaccgcgccgccgtgatggactggcacaccctggcgcccaaggtcgcctcccacgtcgtcgccagcgcgcacccgtggagggcgacggcggcgttggcagcgtcaggcagttcaacttcacctcagtcatgccgttcagcttcatgaaggagcgtctcgagttcctcgacgcggacaagtgcgagtgcaagaacacgctcatcgagggaggcggc

SEQ ID NO: 20358 - DNA, 258 bp, Zea mays
ctcaagtatccatccttattgagtacagtgttgatccatggactcggaaggagttgtagcagcaaaggtggcagatgagactactaaaccggcaatccaagaagacggcgccgagagcaatgccgggatgactgaactgctgatgctgaccgacaagtcgcagctgcaggcgctggcgatgctgctgcggaacaacgaggagctcatgatgagccaggcgatcaagtcggagacggagcgcattgagtacctcaagac

SEQ ID NO: 20359 - DNA, 258 bp, Zea mays
gttcctgattgcattctcatatgaactttccaagaaggaaggtaaagttgggacaccggagcgccctctttctgatcttggcctgctcagctatagaggttattggactagagtgcttctggaaattctaaagaaacataagggtaacatatctataaaggaactcagcgacatgacggcaataaaagccgatgacatcttgagcacgctgcagagcctggacctaatccagtatcgcaaagggcaacacgtcatctg

SEQ ID NO: 20360 - DNA, 260 bp, Zea mays
cagggtgtcgtcggcggtgtccaagaccgtggcggcgccgatcgagcgcgtcaagatgctgctgcagaaccaggacgagctgatccggaccggcaggctgtccgaaccgtacaggggcatcggcgactgcttcggccgcaccgtcagtgacgagggcttcctgtcgctgtggcgcgggaacaacaccaacgtcatccgctacttccccacgcaggccctcaacttcgcgttcaaggactacttcaagggcctcttcaact

SEQ ID NO: 20361 - DNA, 254 bp, Zea mays
ctgatgttgctactacattcaatggcatcatccgagccttaagggagaaggaatccaagttgaaggcttcaaggatgcacatttatgtccgccgaggtggtccaaactaccaatctggactggctaaaatgcgtaacttggtgcagaactcggcgttccaattgaggtgtatgggccagaagcgactatgactggaatctgcaaacaagcaattgaatgcatcatggctgcagcgtaatcagagcgtactccgg

SEQ ID NO: 20362 - DNA, 255 bp, Zea mays
aattgatatcttatttaatggacagacacataggataaagaagtttgttttgcatacaaacttccctggccactcagatttcaattcatataagaaatgcaactttgttatatacgacgctgaagctgaaggtacatgtcagcctaataatgcctcaaaaaattgcataacacctagtacaaaatgggaacaagtcaaggagatcctcggtgactgtggccgagctgcaatccagacacaaggctccatgaacaa

SEQ ID NO: 20363 - DNA, 251 bp, Zea mays
gcagaactggagcagctactaatgtcatttttgggcttgctttgggttacaaatcagtcattatcccaatttttgctattgcgtttagtatcttcctcagcttcagccttgctgccatgtatggtgttgctgtggctgctcttggaatgctgagcaccattgccacaggtcttgctattgatgcatatggccctatcagtgataatgctggaggaatagctgaaatggctgggatgagccataggattcgt

SEQ ID NO: 20364 - DNA, 252 bp, Zea mays
cccaagacctcctcagacccgagaagcgcactgcggccatggacgccaccggcactggagctggagggaaggcgaagaagggagcagccggtcgcaaggccggcgggccgaggaagaagtcggtgacgaggtccgtgaaggccgggctccagttccccgtcggccgcatcgggcgctacctcaagaagggccgctacgcgcacgcgatcggcagcggtgcccccgtctacctcgcggccgtcctggagtacc

SEQ ID NO: 20365 - DNA, 251 bp, Zea mays
aagatctacctatatcctgaaggcctaaaggatctgcttatgatcatgaagaacaaatacggaaacccacccatctacatcactgagaacgggatgggtgacgttgaccatggcgatctacccatggaagttgccttggatgaccacaaaagagtacattacctccagcgccacatcgcaactcttaaggagtcaagagacttgggagcgaatgtgcagggctacttcgcttggtctctattggacaactt

SEQ ID NO: 20366 - DNA, 254 bp, Zea mays
catcgccggagcaggaggaagagcgaggagcaacatgtcgtggcaggcgtacgacaaatgaacaactgctgtgcgacatcgaaggccagcacctcaacaccgccgccatcgtcggccacgacgcagcgtctgggcacagtccgagaacttccccgagttaaagcctgaggaggttgctgggatgataaaggacttcgatgaacctggaactcttgcaccaactggtctttttgttggaggtacgaatacatggt

SEQ ID NO: 20367 - DNA, 186 bp, Zea mays
ctttcttcctgacgcacggcacgcccacgctctccatcgacgacaacatcccggcgcggcacttcttcaagtcatgggtgccggcgaaggtcgcgggcgaccagcccccgcgcgccatcctcgtcgtgtcgggacactgggacacggctacgccggaggtcaacgtcatccgcggcagcaacgaca

SEQ ID NO: 20368 - DNA, 212 bp, Zea mays
gccgaggaaggtcgacatgtcgtctccgccgccgccggtgaagctgatcggcttcttcggcagcccgtacgcgttccgccggaggcggcgctgtgcctgaaagcgtgccgtacgagctgatcctggaggacctgttcggcaccaagagcgagctcctgctccaccacaaccccgtgcacaagaaggtgcccgtgctcctccacggcgacggc

SEQ ID NO: 20369 - DNA, 252 bp, Zea mays
aaggaggctaggctccccaccaagatcctttggatgcgcaggatgcgtgtcctcaggcgtctgctgcgcaagtatcgtgaagcaaagaaaatcgacaaacacatgtaccacgatatgtatatgaaagtaaaaggaaacatgtttaaaaataagagggtactcatggagagcatccacaagtcaaaggccgagaaggccagagagaagactctctcggatcagtttgaggccaagcgagccaagagcaaggct

SEQ ID NO: 20370 - DNA, 249 bp, Zea mays
gcggcgcatcatgaccgtccccttcttcaccaacaaggtggtggcccagaaccgcgccgggtgggaggaggaggcccggctggtggtggaggacgtgaggaaggaccccgaggccgcggccggcagcgtcgtgctccgccgccgcctccagctgatgatgtacaacgacatgttccgcatcatgttcgaccgccggttcgacagcgagcacgacccgctcttcaacaagctcaaggcgctcaacgcgga

SEQ ID NO: 20371 - DNA, 248 bp, Zea mays
cactcccacacagaactagagctccaaggccatggagaaatggagaagacgcaggcacttgctgcttgctgttgcagccgtggccctggtggcagcaataacgctgccgtccgcggaggcgaactgtccccggactactaccggtcgacgtgcccggacgtggaggcaatcgtgcaggcagtggtggccaagaaggtgaatgagaccttcgtcacagtcccggccacgctcaggctcttcttccacga

SEQ ID NO: 20372 - DNA, 251 bp, Zea mays
gttcccctctcctgatcgtcctgttcctcacagcagcagccatggcggccgagccggagaagcaggcggcccccgcggcacaggagacggccgtgcacatcgtgtacgttgaccgccccgaggacgccgaccctgaggagttccacatccgcaccctcacccccgtcctcggcagcgaacagaaggccagggacgcagtgctctaccactacaagaacgccgccagcggcttctccgcgaactcacccccc

SEQ ID NO: 20373 - DNA, 259 bp, Zea mays
gtcattgatgaagatggttggttgcacactggagacataggtctgtggctacctggaggacgtttaaagatcatcgataggaaaaagaacattttcaagttagctcaaggagaatacatagctccagagaagattgaaaatgtctatgccaaatgcaagttcattgcccaatgttttatatatggcgacagtttcaactcttccttagttggtattgttgcagttgaaccagaggttatgaaggcttgggctgcatctg

SEQ ID NO: 20374 - DNA, 269 bp, Zea mays
cgcgtgttcaacgagggcatgaagaaccactcggtgatcatcaccaagaagctgctggacttctacacgggcttcgagggcgtgtcgacgctggtggacgtgggcggcggcgtgggcgccacgctgcacgccatcacgtcccgccacccgcacatctccggggtcaacttcgacctgccgcacgtcatctccgaggcgccgccgttccccggcgtgcgccacgtgggcggggacatgttcgcgtccgtgcccgccggcgacgccatcct

SEQ ID NO: 20375 - DNA, 181 bp, Zea mays
ctactccaccgccgactccgagatcgaagtagccgtcgatctcggagtcgcgctacttcgtcccagccgggacgcgcgtcctcgtcaacgcctgggcgctcgggagggaccgcacgacgtgggacaagccggaggagttcatgccggagcggttcgtgcaggaaccgggcgccgtggacgt

SEQ ID NO: 20376 - DNA, 268 bp, Zea mays
cgcagaagaggatcagcagcagtgaccaatttatcatcctcgctaccgacggggtatgggacgtgctctccaacgacgaggcggtacatatcgtggcggggacgccggaccgggcgaaggcggccaagcggctggtggagtgcgccgttcgcgcgtggaggcgcaacgtgcgcgacatcgccgtcgatgactgctcggcgatctgcctcttcttccacccgccgccgccgtcgtagacacgaaaacctgtaacgtgccgaagtccacg

SEQ ID NO: 20377 - DNA, 163 bp, Zea mays
gtccaccgccggcgactccaggctctcggtgaggaagaccaaggctgagaaggacccaaacaagcccaagaggcctccgagcgcgttcttcgtcttcatggaggagttcaggaaggactacaaggagaagcaccccaatgtgaagcaagtctccctgattggc

SEQ ID NO: 20378 - DNA, 169 bp, Zea mays
aggacgtggaggttctgctggtaacaagttccggatgtcactgggtctaccagtggcagccactgtgaactgtgctgataacactggagccaagaacctttacatcatttctgtgaagggaatcaaggggcgccttaacaggcttccttctgcatgtgttggtgacatg

SEQ ID NO: 20379 - DNA, 265 bp, Zea mays
gtaaaaaaaaaagattgatttcatactgttttataacatgtgtaactaactgcacccttaaatattattggtcagcaaaaatattggatatttaacgagtaccgttgaatagcccttggcggtcaggacctcgttagatgggaaaaatatattacaggtcgcaatacattatggattgagaggaattgaaggggtttcaatcactagcaagtcaaaatctcctccaatctgtatcaatcccctccaatccatatgtattgaaaat

SEQ ID NO: 20380 - DNA, 260 bp, Zea mays
agtttgtgaatcctaaagtgcaagcttcaattggtgctaatacatgggtggtcagtggaactccacagacaaagaagctgcaagatctgcttccgtccattatcaaccagctcggccctgacaacctagacaacctgcggaggcttgcggacaattccagaagcaggcccctggtgcttcaggtgcagaggctggcgccagcgctggtgctgctcaggacgatgacgatgacgttcctgagctcgtcgctggagagacat

SEQ ID NO: 20381 - DNA, 263 bp, Zea mays
ctcgtccaagtatatcaacgtagcaaggtggtttaatcacattgatgcgctcgtgaggctgagcggaattactgcagagggccaaggtgtgaaggttgaatcgtcagcagttccttcagccccaactccagatgttgctgaagcacaggccccagttgctgaggaggacgacgacgatgatgttgacctttttggtgaggagaccgaagatgagaagaaggctgctgaagagcgtgctgcagctggccaagcttctggcaaga

SEQ ID NO: 20382 - DNA, 191 bp, Zea mays
gatctccgaagagtattctttggaatatggaactgacaagatagaaatgcatgttggagctgtacaggccaacgaccgggctcttgtagtcgatgatcttattgctaccggtggaacactctgtgcagctgtcaaacttattgaacgtgttggagcaaaggttgttgagtgtgcttgtgtcattgaattgc

SEQ ID NO: 20383 - DNA, 160 bp, Zea mays
cgctggacgccttcgacgtcatcgacgacatcaaggaggcgctggagaagcgctgcccggggaccgtctcctgcgccgacatcctcgccatcgccgccagggacgccgtctcgctgaccaccaaggtggtgaccaagggcggctggagcagggacggcaa

SEQ ID NO: 20384 - DNA, 258 bp, Zea mays
acagcgttgagaggcgccgcgacgctgaaggcgagggctctcaaggaggtgtggaacatcgcggcggtgatcccggtggagaagggcccgggcccggtcggcggaggaggaggaggccaccaccaccaacaccaccagaagcacggcgcgcccaagcagcagctgcaccgcaagatggatagcgacggcagcagcgtcacgatcctctcgctggaggaggagaacagcttccttggcatctgcagccaggagctgctt

SEQ ID NO: 20385 - DNA, 159 bp, Zea mays
agttgctggtgcgctcaatcatgggatgaaggaggtggaagtgtggcttcagacaataagtccaggtcaaaggacgccaatccacaggcattcctgtgaagaagttttcactgtcctcaaagggaagggtacgctcttgatgggatcaagctcactaaa

SEQ ID NO: 20386 - DNA, 255 bp, Zea mays
tgtagagttaccctcccagttcatggagaactggtgctatcacaagaatactcttttgagcattgcaaaacattatgaaaccggtgaaacccttccagaggaaatttatgcgaacttgtagctgcaaagaatttccgtgctggcaccttgagcctgcgtcagatacgatttgccagtgtagatatggagcttcatacaagttatgaccccaatggctcagtgtccatatatgatgtggaccaaagagttgcagaa

SEQ ID NO: 20387 - DNA, 255 bp, Zea mays
gttttgctgctctccgaccccgagctccgaacgccgcagcattaggcgcggcccccctcgcgtgtgaccgagatggcgctgccgaatcaggggaccgttgattaccccagcttcaagctcgtcatcgtcggcgatggtggaactggtaaaactacatttgtgaagaggcatctcactggagagtttgagaagaaatatgaaccaaccattggtgtggaagttcatccgttggatttcaccactaactgtggtaag

SEQ ID NO: 20388 - DNA, 275 bp, Zea mays
gggcggtggaggatcccatgttgatccatttgacatcttctcatcactttttggaccctcttttggaggaggtggtggaagcagcaggggaagaaggcaaaggaggggagaagatgtagttcacccacttaaagtttctctggaagatctttacaatggcacctcaaagaagctctctctttcgcgcaatgtcatctgctccaagtgcaagggcaagggctcgaagtctggtgcctcaatgaggtgccctggttgccagggctcaggcatgaaag

SEQ ID NO: 20389 - DNA, 307 bp, Zea mays
ctaccatagagacggtccgaatccgggcaccaccgaccgcggacgctgggacaagtccaacagctacagcggccaggacttcaggtacctgccgttcgggtctgggcgccggatctgccccggggccaacttcgcgctcggaccatggagatcatgctcgccaacctcatgtaccatttcgactgggaggtccccaatgagaaggaagacggtggcgggaaggtgagcatggacgagacgttcgggctgatgcttcgcaggaacgagccgctctaacttgttcctagggccgtctagctagctagtt

SEQ ID NO: 20390 - DNA, 141 bp, Zea mays
gggtcgagagctatcaagaaggctcgtggcctagatcagtggccctcatagcactttggagggtgcgctggtttaccatctcccacggggagagtggacgtcataatttgtggtagagggggtacgcgttcgcgcggcccc

SEQ ID NO: 20391 - DNA, 270 bp, Zea mays
cattgagatactgaaagagtaccttggcaaggttaggaccatggtgaagccagggtgctcccaggagatcctgaaggcggcgatcagttccatggtgtcggtgacggatgtgctgactgtgatgtcccaccccctcaacgccgagctgcccctctaccatttcaagtgagcgagggcatcagtctggttgttattcctagagtgtttttgaaacagcagaagattctgcttcatggctgccggtcttcttttttttaatttgggtgagaa

SEQ ID NO: 20392 - DNA, 266 bp, Zea mays
gattatgaggcgtgtgaatcacacagtgcaaaccagatgatggatcaccttagagatgttatggcaaatagcaagcctggagagaaatacggaaattacaccctccaatttgctgatgatttcagctatactgatcctgtagacggtagtacggtatcaaaacaaggacttcgatttgttttcactgatggatctaggattatcttccggctttcgggaaccggatctgctggagctactatccgcctctacatagaacaatttga

SEQ ID NO: 20393 - DNA, 270 bp, Zea mays
ctgatttcatcatcaccagcacattccaagaaatcgcgggaagcaaggacaccgtggggcagtacgagtcccacatcgcgttcactcttcctgggctctaccgtgtcgtccatggcatcgatgttttcgatcccaagttcaacattgtctcccctggagcagacatgagtgtttactacccgtatacggaaaccgacaagagactcactgccttccatcctgaaatcgaggagctcatcaacagcgacgtcgagaactccgagcacaagt

SEQ ID NO: 20394 - DNA, 302 bp, Zea mays
tctgcagacgtcgattccgggtcaccacgcgtccgctcgtcgcttcaccactccactcgccgcagcgccgggcgccgccgaggggatcggagcaagatgttcttccacatcgtgctggagcggaacatgcagctgcacccacgacacttcgggccgcacctccgcgacaagctcgtttccaagctcatcaaggacgtcgagggcacctgcagcgggcggcacgggttcgttgtggcgatcacgggtgtggaggacatcggcaaggggctcatccgggaaggcacgggatacgtcaccttccc

SEQ ID NO: 20395 - DNA, 262 bp, Zea mays
tgccgttcagcttcatgaaggagcgtctcgagttcctggacgcggacaagtgcgagtgcaagaacacgctcatcgagggcggcggcatcggcgtcgccatcgaaacggcgacgtcgcacatcaaggtggagcccgcggccggcggcgggagcgtggtgaaggtcgagtccacttacaagctgctgccgggcgtggaggtgaaggacgagatcgccaaggctaaggagtccgtcaccgccatcttcaagggtgccgaggccta

SEQ ID NO: 20396 - DNA, 264 bp, Zea mays
cttgtttttgcttctgttatggcaacccttggccttcagataattctagaatcagtacgctcattggtgtctgatggagatgaattcagcttaacaagtgatcaagaaaagtggcttgtggacatcatgctctccgtgacattggtaaaacttgccctggttatatattgccgctccttcaccaacgaaattgtcaaagcatatgcacaagatcactttttcgatgtcatcacaaatgtaattggcctggttgctgcactactt

SEQ ID NO: 20397 - DNA, 262 bp, Zea mays
ctgaagaggatcagaagatattcaagtacttggactccattgatgtcgatgattctgatgttaaggcaggatattccatttaccttaacttctctgagaacccgtactttgaagacacaaagcttacaaagacctattcctttgttgatgatggaacaaccacaataaaagcttctcaaattaagtggaaggatggaatgggacctgcaaatggaaatggtattaacaagaagggaaacaagcggccattagtagtggaaag

SEQ ID NO: 20398 - DNA, 263 bp, Zea mays
  unsure (1)..(263): unsure at all n locations
caatatactacagagcaggatcaaccccaatgaagaactcactagtgacgaggaagcaaaatggcgaaggtgggttgatgagcaccttgtgcatgtcttatctcctaacatatatcggacaacttcagaagctctagaatcttttgactacattgcaaaacatggtaatttcagttttacagagaggtttgccgtgaagtatgctggtgctgcggccatgtacatggtatctaagaaactanagaagaaatacaacataactg

SEQ ID NO: 20399 - DNA, 264 bp, Zea mays
gctgtgccgcctccgacatcctactttcgtcctcacgagtgaccgataatccgccggcgctaagatgttggtttatcaagatctcctatctggcgacgagctcctgtcggattcattcacctacaaggagctcgagaacggcgtcctgtgggaggtcgagggaaagtgggtcacccaaggtcctgttgatgtagacattggtgccaatccatccgccgagggtggtgaggacgaaagcgttgatgacacagccgtgaaggtggt

SEQ ID NO: 20400 - DNA, 263 bp, Zea mays
gactaggtccttctatgacatgcttgacaagggccagatcagcgttgtcgtcgaggagtaaagagttcttcccagttattttcaaagaactctctcgagagcatgacaaagtgattgcttgctgtggagatttgtcctggaaataagcacaaccatttgggaacaccagattttgtcgaattttcctttccttttgatgaatatttgagcacgtccatgtcaataccaaacatctggccttttctctctctgttttttttaca

SEQ ID NO: 20401 - DNA, 261 bp, Zea mays
atggagtgcaggcatctgctgtctcggatctttgtggcgaaacctgagcaacggataaccatcccagagatcaagaaccacccatggttcttgaagaacctgcccatcgagatgaccgacgagtaccagatgaacctacagctagtcgacatgaatgtcccctcgcaaagcctggaggagatcatgtccatcatactggaggcccggaagcccggcgacgggctagaagcatgcgggacagctccccggccttgggagcat

SEQ ID NO: 20402 - DNA, 259 bp, Zea mays
cctccaacatgaccccttcgaggtcctggaccagaagggagtgggcgagctggtgaagtttgctacagagaggggccgcaaagctaggcctaacttgaaggtgggcatttgtggagaacacggtggagagccttcctctgtggccttcttcgcgaaggctgggctggattacgtttcttgctcccctttcagggttccgattgctaggctagctgcagctcaggtgcttgtctgaggctgcctcctcattggcaaccgg

SEQ ID NO: 20403 - DNA, 215 bp, Zea mays
ggacaatcaccgcacggcttccagacggagggctcgtacctcttgcgggcgcttcagcatgcagatgaagcgcgtcggcagcgactccgcgggcaccgtcagggccttctacctgtcgtcgcggaactccgagcacgacgagatcgagttcgagttcctgggcaaccggacggggcagccgtacagcgtgcagacgaacgtgttcaccggcggga

SEQ ID NO: 20404 - DNA, 261 bp, Zea mays
aaatgtctttgcttttaattatacatctcaagttgtgtttttcatcgtcatgtcatgcttgatatctgtttcagtgaacttcagcactttccttgtgatcggaaagacatctcctgttacttaccaagtcctgggccatcttaaaacatgccttgttcttgcttttggttatgttttgcttcacgatccgtttagctggagaaacatacttggaatcctaattgctgtagttggaatggtcttatattcatacttctgcac

SEQ ID NO: 20405 - DNA, 264 bp, Zea mays
gtgaagtgctaaaaaggcaaggtcatggtgaatacagggagataactgaaggggacttcctcggggaggttactggcagtgaaaaagtcatatgccatttttaccaccgtgaattttaccgttgcaagatcatggataagcatttgaaggcccttgccccagtctatgtgggaacaaaattcgtcaagcttgatgctgaaaatgctccattctttgtggccaaactggcaatcaagacactgccatgtgtaatattgttcaaga

SEQ ID NO: 20406 - DNA, 274 bp, Zea mays
caaccaggaggatgccctcgcgcgaattgaaaagctttcagaagtaaacccgatgcttggcttccgtgggtgcaggcttggtatatcgtaccctgaattgacagagatgcaagcccgggccatttttgaagctgctatagcaatgaccaaccagggtgttcaagtgttcccagagataatggttcctcttgttggaacaccacaggaactggggcatcaagtgactcttatccgccaagttgctgagaaagtgttcgccaatgtgggcaagact

SEQ ID NO: 20407 - DNA, 261 bp, Zea mays
accgtcgccaggctgagctcgctccccggcgagatctccttcccctgcggcctcccctcgctccgcttcttcatcgacgacgttgaggatcctgttgctaatgaccctctccagttgcttccgaaaagaacttaccagcccagtaccatcaagcggaaaagaacccatggattccttacacgtaaatcgaccaagggtgggcgcaaggtgattgcacggagaatcgcaaaaggcaggcacagaatttcagtttagcaagat

SEQ ID NO: 20408 - DNA, 266 bp, Zea mays
cgcacttcgggaggtcaggcccgccggacatccgcgacaccttctcgctcctcgtcctcagcatcagcttccgcaccacggccgacgacctcttcccgctcttcgagcgctacggcaaggtcgtcgacgtcttcatcccgagggacaggaggaccggggactcgaggggtttcgcgttcgtgcggtacaagtacgccgacgaggcgcagaaggctatagatcggctcgatggccgtgatgtggatggggagaacatcatggtgcag

SEQ ID NO: 20409 - DNA, 261 bp, Zea mays
agataactctgcgcactgtcccaaattgacacggagcaactgctggcccatctagtagaaacagaaatgataaagagaacgaaagaaggaaggtacaagggaaggaagttcagttcagtatgtcatttctttggatatcaggctcgaggatctacaccatcaaatttcgactgtgactatgcttatgctcttggacgtatctccctgcatatgattacagttggattgactggctacatggcaactgtggctaatctgaaa

SEQ ID NO: 20410 - DNA, 265 bp, Zea mays
acccggtgcacaagaagatccccgtcctgctccaccacggcaagcccatctccgagtctctgatcatcgtccagtacatcgacgaggtctggtcctccggcgcgccggccttcctccccgtcgacgctcacgcccgcgccgtccagcggttctgggcgcagtacgtcgacgacaagctgccttgggcgatccgcatactgaagggaacggacgacgggggcatggagcaggctggcgggcagctgtccgcggccctgcagctcct

SEQ ID NO: 20411 - DNA, 266 bp, Zea mays
aatccgttagctagcgctgtggcagttgcatcactgaaagtggtcagagacgaaggtcttgttgaaagggctgcaaagttaggacaggagtttagggaccagttacagaaggtccagcagaaattccctcaaatcctaagagaagtgcgcgggaggggtttgctgaacgcagtgcatctaaacaacgacgcgctatctcctgcttctgcatatgacatctgcatcaagttgaaggagagaggcattttagcgaaacccacacatga

SEQ ID NO: 20412 - DNA, 264 bp, Zea mays
ctggagtgctaatggcctccgccaagcagctgggaccctctgggtcgcttcgccggtggcccctcagcgcctgttccgcgccgccgtgatggactgggcacaccctggcgcccaaggtcgcctcccacgtcgtcgccagcacgcagcccgtggagggcgacgggcggcgttggcagcgtcaggcagttcaacttcgcctcagtcatgccgttcagcttcatcgaggagcgtctcgagttcctcgacgcggacaagtgcgagtgc

SEQ ID NO: 20413 - DNA, 262 bp, Zea mays
caagtacccaaacggctcgcgccctaaccgcaccgccgggaaggggtactggaatgcgactggggccgacaagtcgatcgtgcccatgggcagcaccagggcggcagggatcaagaaggcgctggtgttctactctggcaaggcgtccaggggcgtcaagacggactggattatgcatgagtaccgcgtcgctcaagcggaccacaccctggggaagaagggctcacataagctggacgagtgggtgttgtgccggctgtat

SEQ ID NO: 20414 - DNA, 260 bp, Zea mays
gcaactcccacccgatccccagattctccggcggtgatggccatcctgtggcgcgccgtgatggatagcgtcacggtctcctccccctcggcgctggacgcggccccaggtagcggcgtcgagttctggcacggcgcagagcgcgctgggtggctaaataagcagggcgagtacatcaagacgtggaggcggcggtggttcgtgctgaagcaggggaggcttttctggttcaaggaccctgcggtgacacgggcctcggt

SEQ ID NO: 20415 - DNA, 258 bp, Zea mays
cgcgtaccaggtcgaaggtgcagttgcagaggacggaaggaagcctagcatctgggacacattcacacatgaaggctattcccttgacaacgccacaggcgatgtaactgcggatcagtatcataagtacaaggacgacgtaaagcttctgcatgagatgggtgtcgatgcctaccggatgtcgattgcctggcctcgacttatcccagatggtcggggagccgtgaatccgaagggctggagtactacaacaatctc

SEQ ID NO: 20416 - DNA, 256 bp, Zea mays
gaaagccctcattgacatcaggaacactgcggacaccactatctacagcatcgagaagagtctaggggagtacagggacaagatcccggcagaggttgcatccgagatcgaggcagccatcgctgacctccgtcagagatggcctcggatgacatcgagaagatcaaggccaagcttgaggctgccaacaaggctgtctcgaagattggtcagcacatgtcaggtggtggctctggcgactcacagtcgggatctg

SEQ ID NO: 20417 - DNA, 260 bp, Zea mays
agcaatcagctcatctgtcagcgccacaggtgaccggaaaaccacggccggcgttcctgcttctctacccggtccgaattgctgaccggatcaacccgagaccttgcaggattatcgatctgattgcggcatgatccgcttcatcctgctgcagaaccggcaggggaagactcgactggccaagtattacgtcccgctcgaggactcggaaaagcacaaggttgaatacgaggtacaccggctcgtggtcaatcgggacc

SEQ ID NO: 20418 - DNA, 256 bp, Zea mays
aaggtcccaatattgacttcaagaaggagcttaggaccctcaacagagagcttcaattgcatattttggagctggcagatatattagttgagagaccatctcaatatgctcgtagggtagaagatattacgctcatattcaagaacttacatcatcttctcaattccttacgacctcatcaggcaagggccacattgattcacatgcttgagagccaaattcggcaccgcaaggaagcaattgaagatataaagca

SEQ ID NO: 20419 - DNA, 250 bp, Zea mays
cagtttacgaggatttcgcacactacaaatctggagtgtacaagcacatcaccggtggcattatgggtggccatgccgtcaagttgattggatggggaaccagtgatgctggagaagattactggcttctggcaaatcagtggaatagaggctggggcgatgatggatacttcaagatcataaggggcaaaaatgaatgtggcatcgaggagggcgttgttgctggaatgccatccacaaagaatatggt

SEQ ID NO: 20420 - DNA, 250 bp, Zea mays
gcttgataatgtcgggcctgaggactacttctcccgatttgagtacaaggcggccaccggttcgttcacccctgaccgcgtggcagtgtattgcaaatgtgagaagccatacaacccggatgacctcatggtgcagtgcgaacttgcaaggactggttccatccatcttgcatggctatgaccattgaacaggccaaaaaactagatcactttgtttgctcagactgtttgaaagaaaatggttcaaaga

SEQ ID NO: 20421 - DNA, 252 bp, Zea mays
ggcgcggtcaccggtatcaagaaccagggccagtgtggttgttgctgggccttcgctgcggtggcggccgtggagggcatccaccagatcacgacgggcaacttggtgtcgctatcggagcagcaggtgctggactgcgacaccgacgggaacaacggctgcaacggcggctacatcgacaacgccttccaatacatcgtcggcaacggcggcctcggcaccgaggatgcctacccgtacaccgccgcgcag

SEQ ID NO: 20422 - DNA, 264 bp, Zea mays
ctcgaaggttccagcgagcgactgtgtcgagcaggagagagcgcgatggggaagatgcggcactgatctgcctcgtggccgccgtcaccgccgcggccatcctcctgacagcgtcggccaagaagtccggcgacgtcaccgagcttcagatcggcgtcaagtacaagcctgagtcatgtacgctgcaagcacacaaaggagacaaaattaaggttcactatcgtgggacactcactgatggatcagttgtcgattctagctatg

SEQ ID NO: 20423 - DNA, 268 bp, Zea mays
tgtccttccagtgccgcggcaggggccccagctgcaaggccgacatcaacgcccagtgccccgccgcgctcaatgtgcccggcggctgcgccagcgcctgcgagaagctcggcggcgacacctactgctgccggggccagtacaaggacaagtgcccgcccacggactactccaggttcttcaagaggctgtgcccggacgcctacagctacgccaaggacgaccagaccagcaccttcacctgcccacagggctccaactacgatat

SEQ ID NO: 20424 - DNA, 267 bp, Zea mays
gccaaggccttcttcaacatcctcgacttctccgtgttcagctgggacaacaagctcccgggcgcccagctgctgctgtcgcggctgcgcatgttcctcaaccccggctacccgtacgaggagtcgctcgccggctaccacaacgccaccagcctcaacatgtgcatgtacttcccgcgcttcgccgccttcaacttcaccaagggcgggatggcgctcttcaaccacggcagggggcagccgctgcagtacgtcgtcgccaactcc

SEQ ID NO: 20425 - DNA, 268 bp, Zea mays
atcaagggcatacttgtgaacatgttcgaagcagccatcgagacatcattcctggtgctggagtactccatgagcgagctgatgaacaaccgccacgtcctggccaagctccagaaggaggtgaggacggcgacgcccgacggccgcatggtgatggaggaggacctgagccggatgccatacctgaaggccaccatcaaggagtccatgcgcatccacccgccggcgccgttcctcctgccgcacttctccacccacgactgcgaga

SEQ ID NO: 20426 - DNA, 267 bp, Zea mays
gcaactcccacccgatccccaaattctccggcggtgatggccagcctgtggcgcgccgtgatggatagcgtcacggctcctccccctcggcgctggacgcggccccaggtagcggcgtcgagttctggcacggcgcagagcgcgctgggtggctaaataagcagggcgagtacatcaagacgtggaggcggcggtggttcgtgctgaagcaggggaggcttttctggttcaaggaccctgcggtgacacgggcctcggtgccccgcg

SEQ ID NO: 20427 - DNA, 267 bp, Zea mays
  unsure (1)..(267): unsure at all n locations
cggacgctggncgagacgcgtgggcggacgcgtgggtccgtaaaccctagccgcctgtcttgctgaagctgaactgctagatccgtcttcaaagctgtggtgtcatcccctgagttctgatccaagatgtatctccagtattacatcaatgagaagggggacaaggtctacaccaccaagaaggagtcacctcttggggtgccgacgcagtctgctcacccagctcgcttctcaccagatgacaagtactctcgccagcggtacctg

SEQ ID NO: 20428 - DNA, 265 bp, Zea mays
gaggagttgttgatcgaggtgagtgaggttgaaaagcacaccatcgtcatggacggcggatactacggcggtcgcgatcagcgctacagcggcgggtactacggcggcggtggcatcgcaacgccgaggtacgctccggcggtcccgtacgggatgtcgcaggtgaacatcgagggcaacgggtgcgggcgggcgctgccgccgcagccgaccgtgaaagtgtactgccgcgacaaccccaactacgccatgagcgaccgcgaca

SEQ ID NO: 20429 - DNA, 258 bp, Zea mays
cagtggtcattaccattagaaccagcctcagtgtctcctggtttggaagcagagttctctcacctgaatattagacaaccttctcccccacctgtcctagctcaagtgcaccctgagcatggtcaaattcctccatcaagagttgctgatccaagaccaggacttgctacatctgcaaccggacgctatcagaatttgcatgtgccagtggcattaatggagtgtttcctgaggctcgctgagttaaataccgcaaag

SEQ ID NO: 20430 - DNA, 259 bp, Zea mays
ggcctgctgggggcctccctggtgctgagcctgagctggtggctcctcgtcgccgcgcagttcgcgtacatcgtgatgagccccaggtgccgtcacacctggaccggcttcacctggcaggccttctcgggcctctgggacttcctcaagctctccgccgcgtccgccgtcatgctctgcctcgagacctggtactatcaggtcctggtgctcatcgccggcttgctccccaaccctgaacttgcattggacgcgctgt

SEQ ID NO: 20431 - DNA, 260 bp, Zea mays
gaccggcgttgcctatctggtggcgatggttctactggtgcaacacggtgtcctggaccatctacggcgtcacggcgtcgcagttcggcgacgtaggccgcaacgtgacggctactggcaacgccggcacagtcgtggtgaaggaatttctggaacaaaacctgggcatgaagcacgacttcctcggctacgtcgtgctggcgcatttcggctacatccttctgttcgtcttcctcttcgcgtacggcaccaaggctttg

SEQ ID NO: 20432 - DNA, 260 bp, Zea mays
agcaaggctcgataagaagctgacacaggcacaacttgctcagatgataaatgagaagccacaggtgattcaggagtatgaatcaggcaaggcaatccccaaccagcagatcattagcaagctcgagagggccctgggaaccaagttgcgtggcaagaaatagctttcctacgagtttgtgtcccggagcatcataatagggggaagacaaggcaagctgtctgcttatttgtctatgtttggtatctcaagtcctgcgg

SEQ ID NO: 20433 - DNA, 256 bp, Zea mays
aggcacgttcaagcttaccttgcagtttacagaagattacccaaacaagccaccaactgttcggtttgtctctaggatgtttcatccaaacatatatgctgatggaagcatctgcttggatatcctacagaaccagtggagtcctatatatgatgttgctgcaatcttgacttctattcagtccctgctgtgtgatccaaacccgaactcccctgcaaactcagaagccgcaagactgttcagtgagaacaagcgg

SEQ ID NO: 20434 - DNA, 260 bp, Zea mays
gcatgcgcacggacaacaccatcaggtacaacgccaagcgcaggcactggcgccgcaccaagctcggcttctgagcgtggggatcggccggctcccgcgtcggaattctagggtctctacctttcctttggttttatcgatgtctcttgtgtttctgtaagctagcaaacagttccagaaagcttttgttaagattttgatgacgctaagaggattgatgctactatgctgtactcaggattccatgctgcattgcgatg

SEQ ID NO: 20435 - DNA, 251 bp, Zea mays
cgagggccatggacttccttgttgagttgtttcgtaacctgcttgagcatccagactggaccatgggtcaatcttgcactgattcatacaccaagactttgaagaaatttcatggatggcttgccagttctagttttacggtggcaatgaagcttgctcctaatagagagaaatttatggaggtcattagtggaaccggtgacatcaatgcagatattgagaaattttgcacgaccttctctcctttcctc

SEQ ID NO: 20436 - DNA, 252 bp, Zea mays
gacatttctcacagagaacacaagggacagtatgcactccgcaaactgtaccatgagagtccacgactcatttgtgttctatacacttctcccacatgtggtccttgcagaaccttaaaaccaattttgagcaaggtcatagacgagtacggcgagtttgttcatcttgttgaaattgacatcgaggaggatcctgaaatagcagaagctgcaggcatcatgggaacaccttgtgttcaattttttaagaac

SEQ ID NO: 20437 - DNA, 252 bp, Zea mays
agacatttcatgggaaaaggtgggagaaattcaacagtgagaaagtggcctcacttgcttatgctagaatccaaggaaaatcagctctagttgctcatttccagaactcaagtttgatgaatgaggataaacgctgccgccctatactcttccactctgatggtccgaatgcaggagatcaagaaccattccctgtgggatcaaatgtccgttccaggcctggaaggtccaggattttgagctgggaacaaa

SEQ ID NO: 20438 - DNA, 250 bp, Zea mays
agcaggagctcaccggctggctcaactggctcaagacggacgtcggcttcgacgcgtggcgcctcgacttcgccaagggctactccgccgacgtcgccaaggtctacatcgacggcacccagccctgcttcgccgtcgccgagatatggacctcgctggcctacggcggcgacggcaagcccttctacgaccagaacgcgcaccggcaggagctggtgagctggctggaccgcgtcggcggcaaggccag

SEQ ID NO: 20439 - DNA, 253 bp, Zea mays
aagattctcggacatgtacactctcacaatagcaagtgcggatccacagtctatctctgcaaacaagccagttcatttcactaagagcgtaacaaagtggtttacaaaggaaggagttcttgtggagggcctgttctggaaggatgtcgagaagctgattgatgactacaacagtgagcgcaagagtaaatgaattggtagctcgtgtctctggccatctggggagacatcgctgtctagagaaatccgtcaa

SEQ ID NO: 20440 - DNA, 254 bp, Zea mays
gtaaaagtgccgatgtagctgttagggttgaaagtcaactcaaacttgtcatcaggcctatgtattcaaaccctcctcttcatggtgcctctatcgttgctaccatactcagggacagcgagatgttcaacgaatggactctggaactgaaggccatggctgataggatcattaacatgaggcaacaactatttaatgcgctgaaatccagaggaacccctggtgattggagccatatcattaagcaaattggg

SEQ ID NO: 20441 - DNA, 271 bp, Zea mays
cttgttgatggccctcatgacattgatcgctgtgcttacgtcactgagaccgtccttgctgcctgctacaaggcgctcaacgagcaccatgtcctcctggagggtaccctcctgaagcccaacatggtgactccaggctccgactccaagaaggtgacccctgaggtgattgctgagtacaccgtccgtaccctccagaggaccgtacctgctgctgtgcctgctgttgttttcctctctggtggacagagcgaggaggaggccacccgca

SEQ ID NO: 20442 - DNA, 275 bp, Zea mays
gtcgtcggagtcggacccgtcgtcgcaggtgtcgcaggtgttcgagaagtcgctgcagtacgtgaagcgcttcagccgctacaagaaccccgacgccgtgcgccaggtccgcgagacgctgagccgctacggcctcgccgagttcgagctctgcacgctcggcaacctctgccccgacaccagcggcgaggccaccgcgctcgtcccctccctcaagtccggcggcaggttcgtcggcgaccccggggacgagaagatcgagaagatgctcaacg

SEQ ID NO: 20443 - DNA, 270 bp, Zea mays
ggagaagccgccgtcgcagcaatcacagcagcccggagaacggccaggtccgacaagatgcagatcttcgtgaagacgctgacagggaagaccatcaccctcgaggtcgagagcagcgacaccatcgacaatgtcaaggccaagatccaggacaaggaagggatcccgccggaccagcagcggctgatctttgccgggaagcagctggaggatggccgcacccttgcggactataacatccaaaaggagtctacgctccacctcgtgctc

SEQ ID NO: 20444 - DNA, 273 bp, Zea mays
caagctgctgccgggcgtggaggtgaaggacgagatcgccaaggccaaggagtccgtcaccgccatcttcaagggtgccgaggcctacctcgtcgccaaccccgacgcctacaactaaaccagtggactgggatgagcttcatttcccttgcggcttgtttggatatagaagggtattgtgtacggagattgggttttctttccccttctttttttttcatacaaaataaaataaagctgctctaaagcagcgtgcggtttttggactcgaga

SEQ ID NO: 20445 - DNA, 272 bp, Zea mays
gacaagaagaaagcttctgtctttttcaagactaatgctgatgggaacacagcatgtgccaaggaaatgacaaagctctctggcatctctgaaatcatccccgagatggagatctgcgattttgactttgaaccctgtggctactccatgaatgcgatccatggctctgcattctccacaatccatgtgacgcccgaggacggtttcagctatgccagttatgaggttatgggcttggatgccactgctctgtcttatggtgaccttgtcaa

SEQ ID NO: 20446 - DNA, 274 bp, Zea mays
agtcaaatgactggctttggcggtgttgttagttttgaggttgctggagactttgatgctacgaggaaattcattgattctgttaaaataccctatcatgcgccttcttttggaggctgtgagagcataattgatcagcctgccatcatgtcctactgggattcaaaggagcagcgggacatctacgggatcaaggacaacctgatcaggttcagcattggtgtggaggatttcgaggatcttaagaacgatctcgtgcaggccctcgagaaga

SEQ ID NO: 20447 - DNA, 276 bp, Zea mays
cgtcagacgtcgtcacacacaatctagcgcgtacgtacgtcccaaaccaaaccatgtccgcgagagctcttctcctgacgaccgcgacgctgctcctgctcgtcgccgctgcgcgtgcggggcagccgctcgccggcgggtggagcccgatcaggaacgtcagcgacccgcacatccaggagctcggcggctgggcggtgacggagcacgtcaggcgggccaacgacgggctgcggttcggcgaggtgacgggcggcgatgagcaggtggtgtccg

SEQ ID NO: 20448 - DNA, 275 bp, Zea mays
aatactttcccccgaggttgcagaaaaagaatcagaagctggtgggaagatgggtgacctagattcttatgagattgaaggcggcgagacaaaatcagagattttgcagaatctagctgagttccagttttcttgtgtcctgtacaatggtgccctagagaatgcatgcagtgagcttggagcccgtatgtctgccatggacagctctagcagaaatgctggcgatatgcttgatcgtctcactctcacttacaacaggacacgccaagcatcca

SEQ ID NO: 20449 - DNA, 276 bp, Zea mays
accaggctggacctgctccagcggaacgtggcgctgttccgcaagatcgtgccgccgctggggagcagtcccccgacgcgctgctgctcgtcgtgtccaaccccgtggacgtgctcacccacgtcgcctggaagctgtcgggcttccccgccacccgcgtcatcggctccggcaccaacctcgactcgtccaggttcaggttcctcctcgccgagcacctcggcgccaacgcacaggacgtgcaggcgtacatggtgggcgagcacggggacagct

SEQ ID NO: 20450 - DNA, 265 bp, Zea mays
caatgattgtggacttagagactttgacatggaaaaatttcgaatatgcaaccacttccattttgcttggcctgtgaatcatacatcgttgagcccagatggtaaacttgctgctattgtgggggacagtcctgatggacttctgattgacgctaattcaggaaagacggttcacaaactccatggccatttggattactcctttgcgtcggcatggaatccagacggacgaacattcgccacggggaaccaagacaagacgtgc

SEQ ID NO: 20451 - DNA, 265 bp, Zea mays
cgtctccctcttgccggtcccgaataaagagcagcagcgcaagaggtcggtagagcgagaagaaggcaatggcggccgagagcgtccttttcacctcggagtccgtgaacgaggggcaccccgacaagctgtgcgaccaggtgtcggacgccgtgcttgacgcatgcctcgcgcaggaccccgacagcaaggtggcctgcgagacctgcaccaagaccaacatggtgatggtgttcggcgagatcacgaccaaggcgaccgtgga

SEQ ID NO: 20452 - DNA, 264 bp, Zea mays
ccgctctccacgctcgacgacaacccgctcatcgacctcgccatcgacggtgccgacgaggttgaccctgacctcaaccttgtgaaagggcggggtggtgctcttcttcgtgagaagatggttgaggcagcatcggacaagtttattgttattgttgacgagacaaaactagttgatgggttaggaggtagtggtctagccatgccagtggaagttgtgcagttctgctggaagtacaaccttgtaagattgcaggaactgttt

SEQ ID NO: 20453 - DNA, 267 bp, Zea mays
aagattcggtgcaggaaggacccgtcctgctccgggcggacggagacggtgatcatcaccgacatgaactactacccggtgtccaagtaccacttcgacctcagcggcacagcgttcggcaggctggccaagtccggcctcaacgacaagctccgccactcgggcatcatcgacatcgagttcaccagggtgccgtgcgagttccctggcctcaagatcgggttccacgtggaggagtactcgaagcccgtctacttcgcggtgctg

SEQ ID NO: 20454 - DNA, 267 bp, Zea mays
ggactattgatctggggaagctgcaccttgggatgccctttgcacaaggtgcctttgggaagctctacaggggaacatataatgggatggatgttgctattaagcttttggagcgacctgaggctgaccctgagaaagctcaactgttagagcagcagtttgtccaagaagttatgatgcttgcaacactgaggcacccgaatattgtcaagttcattggtgcatgcaggaagccattggtttggtgtattgtgacagagtatgcaa

SEQ ID NO: 20455 - DNA, 267 bp, Zea mays
ccctacttgaggctttggacttgatcaatgagccgaagaggccttcagacaagcccctgcgtctccccctacaggatgtgtacaagattggtggtattggaactgttcctgttgggcgtgttgagactggtatcatcaagcctggtatggttgttacctttggtcctagtggccttactactgaggtgaagtctgttgaaatgcaccatgaggctctccaggaggcccttcctggtgacaatgttggcttcaatgttaagaatgttg

SEQ ID NO: 20456 - DNA, 269 bp, Zea mays
ggcagaatctgacaagattacactggagacagcaaagctactgagagaagattatttggcacaaaatgcatttaccccatatgataagttctgcccattctacaaatccgtttggatgatgcgcaatattattcacttcaacacattggcaaatcaggctgtggagcgggcagctggtactgatggccaaaagataacatacggtgtcataaaacaccgtttgggcgatctattttatcgcctagtatctcaaaagttcgaggatcctg

SEQ ID NO: 20457 - DNA, 263 bp, Zea mays
ggccagtctgttcgagctctccctcagcgtgctcatggagaccatcgcgcagaccaagacgtcgcgcgccgacgacgcggacgacgccgtgtcgcccgaggcgcacgagttccggcggatcgtcgacgagatcctgccctacctcggcgccaccaacctgtgggactacctgccgctcctgcggcggttcgacgtgctcggggtgaggaacaagatcagggacgttgtcggcaggagggacgccttcctgcagcggctcatcg

SEQ ID NO: 20458 - DNA, 263 bp, Zea mays
agctgatcttcagggcgacgaggatcaagcttacaggaaaatcaggctccgtgctgaagatgtgcagggcaggaatgtgctcacaaacttttggggaatgaatttaaccactgataaattgaggtccctagtgaagaagtggcagacattaatcgaagcccatgttgatgtcaagacaaccgacaactacatgttgcgtttgttctgcatcggcttcaccaagaggcgcccaaaccaggtcaagagaacctgctatgctcagg

SEQ ID NO: 20459 - DNA, 261 bp, Zea mays
gtgaatgagtacatcgactcagctgtgagacacgtcctcctcagacagggtgttctgggtatcaaggtgaagatcatgcttgactgggacccgaaggcaaggttggcccgatcacccctcttccggacctggtgaccatccataccccgaaggaggaggacgagctgcgccctcctgtcttggcagctgaggtctaaggtcccaacagcgtcctcgaaatggcagtttgatcgggtcctagctaggtttgatcttatgata

SEQ ID NO: 20460 - DNA, 262 bp, Zea mays
aagattcggtgcaggaaggacccgtcctgctccgggcggacggagacggtgatcatcaccgacatgaactactacccggtgtccaagtaccacttcgacctcagcggcacgagcgttcggcaggctggccaagtccggcctcaacgacaagctccgccactcgggcatcatcgacatcgagttcaccagggtgccgtgcgagttccctggcctcaagatcgggttccacgtggaggagtactcgagccccgtctacttcgcg

SEQ ID NO: 20461 - DNA, 267 bp, Zea mays
aagaaacataagaaacacaaagagaaagatagagacaaggagaaggagcagaagaaacacaaacatcggcataaagatcggagtaaagataaagataaagataaggacaaagacaaagataagaaaaaggacaagagtgggaatcatgattcaggtggtgatcattccaagaaacatgagaagaagagaaagcaagaagtaactggaagttcagcaaatgtccaaaattacaagaaaacacaaaagcacaaaattcagtgaaatgta

SEQ ID NO: 20462 - DNA, 262 bp, Zea mays
ctgggagaagccatgggagaacttcaaggagctgcaggaattcaagcctgttgaagagggtgctagcgcctaaggatctctccttctccatgtgcgagcctgaagctcaaagcaaagttgcagaataaggagccacctcccaacatgctagaccatgctcccttgtgtaatttcataagactacaacccttttagggcttgttcgtttgtgtctgtgtctaagggaattgaaggtgattaaatttccttctatacaaataga

SEQ ID NO: 20463 - DNA, 264 bp, Zea mays
atacataagtacatataaccaactaggcttgatcgatctctcgacagcaaatagctagcaataatggagaagtacaccaaagccctagcgtcattgctcaccatgctggtgctggcacctctcctcgccatggccaccgacccagaccccctgcaggacttctgcgtcgccgacctcaacggcaagccatcagtgaacgggtacccatgccagccgccgtcgtcggccggcgaccagttcctcttctcgaccaagatcgccacg

SEQ ID NO: 20464 - DNA, 265 bp, Zea mays
accttggtgtccctgtgtttgtgtttgagacactggaggttcagaatgcagtgttgatattttaccccctccggccacatgatttagtcgttttggacggagggagtagacgttattgagtcataataaaatgcaatgtgcacggtgggagactgggaggataggaattatagttgtttattacgactgcttactgcatccagattgtgttgtcccttgtctggtgttgcttctgttgcttgctgccatgcagtgccggaggtga

SEQ ID NO: 20465 - DNA, 267 bp, Zea mays
gcctcccacgtcgtcgccagcgcgcacccgtggagggcgacggcggcgttggcagcgtcaggcagttcaacttcacctcagtcatgccgttcagcttcatgaaggagcgtctcgagttcctgaacgcggacaagtgcgagtgcaagaacacgctcatcgagggcggcggcatcggcgtcgccatcgaaacggcgacgtcgcacatcaaggtggagcccgcggccggcggcgggagcgtggtgaaggtcgagtccacttacaagctgc

SEQ ID NO: 20466 - DNA, 254 bp, Zea mays
atcggcgataccacatccaagaatcatgggtataattcgtgagtgtggtgggaagatgcatatggctgagaggcagtgggatgaggctgccactgatttctttgaagctttcaagaactatgatgaagcaggcaatccgcggagaattcaatgcctaaaatatcttgtccttgccaatatgttgatggagtctgaagtgaatccttttgatggacaagaggccaagccgtacaagaacgatagtgaaatccttg

SEQ ID NO: 20467 - DNA, 126 bp, Zea mays
gagaagcaccctacaaattcaaaagtgcacttgaggctgtgaaaacactgagagcacagcccaaagccaatgatcagtacttgcccccatttgtgatagttgatgacagtggcaatgctgttgggc

SEQ ID NO: 20468 - DNA, 91 bp, Zea mays
gtgctgtgttcatcctcggctccagcagacccatgcatcaaccagcatggactgtggatcgatggatgctgttactcctgtcaggaatttg

SEQ ID NO: 20469 - DNA, 258 bp, Zea mays
cctaattgagcttgagcctaacaacagtgggaactacatactcctgtcgaatatttttgcagaacaggaaaggtggggtgatgtgagcaaacttcgaaaggctatgagagaaaggggactgagaaatgtgccaggggcgagttccattgaagttgatggcatggttcatgagttcacttccagggattggtctcatcctttcatacatacaatatgtgaagtgttatgtgagatcgacactaacatgaaatctgttgg

SEQ ID NO: 20470 - DNA, 259 bp, Zea mays
gccaatgtttttggtactatggttgcatcttctctaatggacaaacaaggaaggaaaagccttctgataacaagcttttctggaatgggtgcttcaatgctactcctagcattgtccttcacctggaaagctctggcaccttattctggtactcttgctgttgttggcactgttctgtacgtgctgtcatttgctctaggagcgggccctgttccagcgctacttcttcctgaaatatttgcctcgagaataagggcca

SEQ ID NO: 20471 - DNA, 251 bp, Zea mays
gactgactgcctcgagcagcagagatcagggaggccgagggcggcatgacgatccggttcgtgctgttcgtcaacaagcagggccagacgcggctggcgcagtactacgagcacctctccctcgacgagcgacgggccctcgagggcgagatcgtccgcaagtgcctcgcccgcactgaccagcagtgttcgtttgtggagcaccggaactacaaggtcgtttacaggcgctacgcctcccttttcttcct

SEQ ID NO: 20472 - DNA, 217 bp, Zea mays
cgtttgccatggcaaacggtgtcatctccaagaagttacatgggaagaccagcgaaggggacatcatacaactcaccatccatgctttctgtccggtgctcggaccgacaaagcgctcggccacaaaagttggaccgtcgggtgggagcggcgggtctccgatggacatcacggcagagccccagcgtctgaagagcatcaccgttgctactggcat

SEQ ID NO: 20473 - DNA, 248 bp, Zea mays
attgggcgacgctttgatgatccacagacacagaaagagatgaagatggtgccatacacaatcgtgaaggctccaaatggtgatgcttgggttcaaacaacagatggcaagcagtactcaccaagtcaggtcggtgcatttgtgctgaccaagatgaaggagacagctgaatcttaccttggcaagtctatctcaaaggcagtgattactgttccagcttatttcaatgacgctcagcgtcaggccac

SEQ ID NO: 20474 - DNA, 244 bp, Zea mays
acaaatatcctgcttggagaagggcgtggttttgagattgctcaaggaagacttggtcctggaaggttacatcattgcatgaggctagtaggagcagcagaacgtggcatgaatctgatggtagagagggccttaaacaggaccgcatttggaaagaggattgcacagcatggttcctttttatcagatcttgcaaagtgtcggattgaactggagcaggcaaggcttttagtccttgaagctg

SEQ ID NO: 20475 - DNA, 254 bp, Zea mays
accatggccaagggtatcgggaatggcatacccataggagctgtagtaacgacgccagagatcgctcaggtgttgacccgcagaagctacttcaatacctttggtggtaaccctgtcagcactgcaggcgggcatgcggtgctcaaagtgctggagaaggagaagctccaggagaatgcgtttgttgtgggctcctacctaaaggaacagcttaacaatctgacagacaagcatgagatcatcggtgacgttag

SEQ ID NO: 20476 - DNA, 254 bp, Zea mays
ccgtaatgctgcaaggcacttgctcacccttgacgagaagaacccccgtcgtatctttgagggtgaggcgcttcttcgccgcatgaaccgctatgggctgcttgctgagggtcagaacaagcttgattatgttcttgccctcaccgctgagaacttcctcgcaaggcggcttcaaacacttgtcttcaaggctggcatggccaagtccattcaccatgctcgtgtcttgatcaagcagcgtcacatcagggttg

SEQ ID NO: 20477 - DNA, 255 bp, Zea mays
gtcgaaggtgttttacctcaagatgaagggagattatcacaggtaccttgctgagtttaagactggtgctgagaggaaggaagctgcagagagtacaatgatagcttataaggcagctcaggatattgcgttggcggaactggcatctactcatcccataagacttggacttgcacttaacttctcagttttctattacgagattctgaactctccagacaaagcttgcaaccttgccaggcaggcgtttgatga

SEQ ID NO: 20478 - DNA, 162 bp, Zea mays
cgcctcggtggctggtcttgaagggccgcctcgcggacgccagggctgtgctagagaagacctctgccacgccagacgaggccgccgagcggctggccgacatcaaggccgcggcggggattccgaaggcctcgacggggacgtggtcaccgtacccaacaa

SEQ ID NO: 20479 - DNA, 232 bp, Zea mays
ccaaggccaagccctactacctttttgatggctacgctcacctttcgtccgggcttgcctgtcgccttgctgggcttgcagctggcatggccatcggcattgttggtgatgctggagtcagggcgaatgcacaacagccgaagctttttgtgggcatgatcctcatcctcattttcgcagaagcgcttgctctgtacggtctcattgttggaattatcctttcatcccgggc

SEQ ID NO: 20480 - DNA, 246 bp, Zea mays
ccaccgccgaccgccgcgccgcctgcaactgcctcaagaacgccgccgccggcgtcaccgcctcaacgccggcaacgccgccagcatcccctccaagtgcggcgtcacatcccctacaccatcagcacctccaccgactgctccagggtgaactgaaccctaaacgacgacgacgggcgacggcggccacctgaagacgatccatatctatcccgccgtacgtcggcgcccgcggatcggaccgtc

SEQ ID NO: 20481 - DNA, 249 bp, Zea mays
cactagatggcagtcatgttagagagcgtcttcaacatataataaaatctgaggggctcagtgtagatgacggtggcttgacagccctagtgcggttaagcaatggtgatatgaggaaggctttgaatatattgcagtcaacgcacatggcatcccaacaaatcacagaagaagctgtctatctttgcacaggaaaccccatgccaaaagatattgagcagatagctttttggctattaaatgaaccat

SEQ ID NO: 20482 - DNA, 269 bp, Zea mays
cttaagaatccagtgaacaagtggcgatgcggcgcgactcctacttcgtctatgatgactgtgaagcgatggtcgcgtggcccttcagccacccaaattggaaagcccgctgttcacatggctagcgttgacttgaaaggaaaagcatacgatgtgttgagacagaattcttccagctttttgttggaagatgtctacagaaacccaggcccgctccagtttgaaggaccaggtgccgattcaaagcctatttcattgtgcgttgagga

SEQ ID NO: 20483 - DNA, 269 bp, Zea mays
ctccacacgctccattaattcatgttatgaaggtcaaacctaacaaggtgaatttaataattggttctggtggaaagacaataaaaagcataattgaggagactggggtagatgctattgatactggagatgatggcacggtaaaaattactgcaagagacctaacaagcttagagaagtcaaaaattataatagctaatcttaccatggttccaaaagtaggagaaatatacagggactgtgagatcaagtcaatagctccatatggt

SEQ ID NO: 20484 - DNA, 265 bp, Zea mays
agtggttgttgctgaggatgggaaggtgaaaacgttccctgtgctcctattgcccaaggagaagcttgttgacaccaacggcgcaggtgatgctttcgttggaggcttcctctcacagttggttctaggcaagggcattgaagactgcgtgagggcaggttgctatgccgcaaacgttatcatccagcgcccgggctgtacttacccggagaagcctgacttcaactagtgcaaaaactgaggcacgtcatgagagggactgtta

SEQ ID NO: 20485 - DNA, 264 bp, Zea mays
ggaagatggggctcgcgttcgggaagctcttcagccggctcttccgcaagaaggagatgcggatcctcatggtcggcctcgacgccgccggtaaaaccaccatcctctacaagctcaagctcggcgagatcgtcaccaccatccccaccatcggtttcaatgttgaaactgttgagtacaagaacattagcttcactgtctgggatgtcgggggtcaggacaagatcagacctctttggaggcattacttccagaacacccagg

SEQ ID NO: 20486 - DNA, 265 bp, Zea mays
cacaggcacaacttgctcagatgataaatgagaagccacaggtcattcaggagtatgaatcaggcaaggcaatccccaaccagcagatcattagcaagctcgagagggccctgggaaccaagttgcgtggcaagaaatagctttcctacgagtttgtgtcccggagcatcataatagggggaagacaaggcaagctgtctgcttatttgtctatgtttggtatctcaagtcctgcggactgtttctgttggcacaagagggaata

SEQ ID NO: 20487 - DNA, 268 bp, Zea mays
ctccacacgctccattaattcatgttatgaaggtcaaacgtaacaaggtgaatttaataattggttctggtggaaagacaataaaaagcataattgaggagactggggtagatgctattgatactggagatgatggcacggtaaaaattactgcaagagacctaacaagcttagagaagtcaaaaattataatagctaatcttaccatggttccaaaagtaggagaaatatacagggactgtgagatcaagtcaatagctccatatgg

SEQ ID NO: 20488 - DNA, 263 bp, Zea mays
catcctacgatccaaagttctctctgctcgcagccatcgcgaagaactacccgaccgtgagcgccgagtacagcgaggctgtggagaaggccaggcgcaagctccgagccctcatcgccgagaagagctgcgccccgctcatgctccgcctcgcgtggcactccgcggggacgttcgacgtgtcgtcgaggaccggcggtccattcggcacgatgaagcatcagtcggaattggctcacggcgctaacgcggggctggacatc

SEQ ID NO: 20489 - DNA, 260 bp, Zea mays
ctttgatgtatctgtattggaagttggtgatggtgtgcttgaggtgctttccacatctggtgacacacaccttggtggtgatgacttcgataagagaatagtagattggcttgctagcaacttcaagaaagatgaacgtattgatcttctgaaggataaacaagcccttcagaggcttactgaggcagcagagaaagctaagatggaactgtcaacgctgacacaggcaaatattagcctaccattcattactgctactg

SEQ ID NO: 20490 - DNA, 184 bp, Zea mays
gcaaggtgttaacccgattgcatcacaaggtggggaagcaatagctgtcatgatctgggagagagcagtccatctaaatgtatcaaaggctttagcaaagtctagtttgatcaccaaagctggttgtttgcatttggtacaggtctggatcagctcaagggcttaggcgaagttttccgaaatg

SEQ ID NO: 20491 - DNA, 262 bp, Zea mays
aaagactctccagtgaaggtgaatggatttgcctgcaaggaccctatggctgtgaacgctgacgacttcttcaaggctgcaaaacttgatcagccaagggacaccaccaaaagcaaggtgggatccaacgttactttgatcaatgtcatgcagctgcctggactcaacacgttggggatctcgttggctcgcattgactacgcaccactaggtcagaatcctccacacacacacccacgtgccactgagattctcaccgtgc

SEQ ID NO: 20492 - DNA, 271 bp, Zea mays
gtgttcttaaggctgtcagcaacgtaaacaacattattggaccagcgattgttggaaaggaccccactgagcaggttgagattgacaacttcatggtccaacagcttgatggaacctccaatgagtggggctggtgcaaacagaagcttggagcaaatgccatccttgcggtttcacttgctgtgtgcaaagctggagctatggtgaagaagattcctctttaccagcacatcgcaaatcttgctgggaacaaaactctggtgctccctgt

SEQ ID NO: 20493 - DNA, 279 bp, Zea mays
gttgcagttcatccgtgaatacactagcaaggtggacgatttagtgaaggacaaaatcgagtcacagaatgaagaaagagccaaagagaaggaggagaaagatcttgtggctcagcagaacatgtatgcgcaactgcttcctcttgctctgcctgctccgccaatgcccggcatgggtggccctccacctccgatgggcggaatgggcatgcctccgatgggcgggatgggcatgccgccgatgggccctggtccgatgccagcattcgggatgccaca

SEQ ID NO: 20494 - DNA, 273 bp, Zea mays
gcccttacttatgggaagtggggctgttcttggtcttgcacctgctcctgagtatacattcattatatttgtctctcctgttggaaactactttaaggaaggtttagcaccaataaatttgatagttgaagacaagttccatcgtgctactcctggtggtactgggggtgtgaagaccataggaaattatgcttcggtgttgatggcacagaaaattgcaaaggaaaagggttattctgatgtcctctacttggacgctgttcacaagaagta

SEQ ID NO: 20495 - DNA, 282 bp, Zea mays
cagccaggcgctgagacattccagatgaaaattgctaataataaggtgggattgattattgggaagggtggtgagaccataaagtctatgcaggccaaatctggagcccgcattcaggttattcctttgcatctgcctgctggtgatacttcaactgaaagaactgtgcatattgatggcactcaagaacaaattgaacatgcaaagcagctggtggctgaggttaccagtgagaatcgggccaggaatccaatgtctggtggctattctcagcagggctat

SEQ ID NO: 20496 - DNA, 270 bp, Zea mays
gatggatgcaaaattaccaattgatacatttgaaaatgtaatgggacttgcaatagaagggtgcaaagcaattgcaacttacatccgagaggtgctattggagaatacaaagaagcttgagtgtcagcgtggttaaccttaggagtgcaggcaggttgatgacctgaacctacccaacaccggacatcacacagccattaagggcttgttcggttagctcttaatccatgtggattgagtgggattggatgagtttgaatcccaaacaat

SEQ ID NO: 20497 - DNA, 269 bp, Zea mays
ctcgagcgctcgcgccggtgtccatttcaaagaggaagccgcggtagcactggtagcggcacagtaaggggaagatgtcgtcggcgttcagcggcgatgagaccgcccctttcttcggcttccttggcgcctccgctgcgctcgtcttctcatgcatgggggcggcgtacgggacagccaagagtggcgttggcgtggcgtccatgggtgtcatgcgcccagagctcgtcatgaagtccatcgtgcccgtggtcatggctggtgtgctc

SEQ ID NO: 20498 - DNA, 272 bp, Zea mays
cggaaaaattggtgacttcattaaaggagtgtttgccgtcttcctagacttggatttctcatttcttgagatgaatccgttcaccatggtcaatggggagccatatcctctggacatgagaggagaactagatgacacagcagctttcaagaacttcaagaagtggggaggtatagaatttcctctaccttttggaagagtactcagccctacagaaagtttcatccatgaactagatgagaagacaagtgcctctctgaagttcacggttt

SEQ ID NO: 20499 - DNA, 259 bp, Zea mays
aactgcaggcaattccagtcaagtgagtgatggtgctggagctgttcttctcatgaaaagatctgtggctctgaagaaagggctgcccattcttggtgttttcaggagctttgcggctgttggagtggatccagctgttatgggcgttggtcctgccgtggccattcctgctgctgtgaagtctgcaggccttgagattggagacattgatttgtttgaactgaatgaggccttcgcctctcagtttgtctattgctgc

SEQ ID NO: 20500 - DNA, 264 bp, Zea mays
gctttgtggtacttctggaactgtatcttgccttgctgcgtactttgtctgcaatacaatattcagtgccatcaggacaatcataggcaataaaaattattacgacatcaggaaaccatgcatcggaagcctatgctatgatttctctaatttggagaaatttctcaacctcaaatctgtcagagagagcctaggggttggagatatagagtttgtttcatgcagcccaactgtctatgaggccatgctattagattggatgag

SEQ ID NO: 20501 - DNA, 269 bp, Zea mays
gtttccacctggtgtccctggatttggtcagcagctgttctatggtcagccaccaccagccttcatcaaccctcaggctggatttgctttccagcaacctctgatgcctggtatgaggcctggtggtccaatgccgaactttatgatgcctatggttcagcaaggacagcaaccacagcgtcctgctggtagacgtgctggtggaatgcagcagcccatgccaatgggtggtcagcaacaggtgttccctagaggtggtcgtggctatc

SEQ ID NO: 20502 - DNA, 261 bp, Zea mays
aggcattagatttatccgtgctgattctcaggtcttcctttttgccaactcgaaatgcaagcgctacttccacaaccgcctgaagcctgcaaagcttacctggacagcaatgtacaggaagcagcacaagacggatatccatgctgaagcggtaaagaagaggcgccgcgcaccaagaagccatatccagtccattgtggtgcttcttggaagtaatccagagaagagagctgagcagcagaggtcgcgatgctgctagag

SEQ ID NO: 20503 - DNA, 74 bp, Zea mays
ggcctccaccaacagctggactgttgagatcgcctcgcctgtcgccgcgccacgcctcttccgcggcgccgtga

SEQ ID NO: 20504 - DNA, 267 bp, Zea mays
gatgctcgtcgtcggcagccatggttacggagccattaaaagggctgttcttggaagtgtgagcgactactgtgcccatcacgcgcactgcaccgtgatgatagtaaagaagcccaagcagcacaagcactgatcaatgccgactgatcactacgtgtactgcaaataatttgtactactgcaaagttatgtgtgcgtccgtccgtttgtgaataattgggtcatcaaccatcacatcttcggttgcttctacaagtatccgatgca

SEQ ID NO: 20505 - DNA, 112 bp, Zea mays
tgagcggcaggtagctccaggccatctatgacgagtggctggccgcgtcgcgctcaagaccttctccgagtgcgtcatgtacgccatcgcgggcctcggcttctcgagccag

SEQ ID NO: 20506 - DNA, 124 bp, Zea mays
aggcactgacaggttccctggatgattttggatttgaagattatcttaacatgcctcatgattctgacagtttccgtcaacctgacatgcaccatggaatggaggttcgccttggtttgtccaa

SEQ ID NO: 20507 - DNA, 126 bp, Zea mays
agctgggctccgatatttgtgaggcaatcaaacttcaaactacccgctgatccttcagtaccgattatcatgattggccctgggaccggtcttgcacccttccgtggcttcttgcaggaaagactt

SEQ ID NO: 20508 - DNA, 127 bp, Zea mays
cgttccgaaaaccaagaagacctactgtcagaacaaggaatgcaggaagcacaccctgcacaaggttacccagtacaagaaaggtaaggatagcctttcagctcaagggaagcgacgttatgaccgc

SEQ ID NO: 20509 - DNA, 261 bp, Zea mays
accgtcttcccacgcgagccgaactgcctgctggagctccgcgtcgccagcgccacgcagcccatggcgggcatggctgcgtcaccggacgaggtgcagctgctgcagctcctgatcgagattcttggcgccaagaacgccatcgaggttggcgtcttcaccgggtactcgctgctcgccaccgccctcgccctccccgacgacggcaagattgtggcgatcgacgttacccgcgagagctacgaccagatagggtcgccg

SEQ ID NO: 20510 - DNA, 260 bp, Zea mays
ggaaggagtctgaatactctggccattctattcctgttggtggtcttgcttactatgtaactgccccatcaagtttggctgatgtccttgcaaatccattccatgcactgttttatgtggtcttcatgctgtcagcctgtgctctgttctcaaagacatggattgaagtttctggttcatcagcaaaggatgttgctaagcagctcaaggaacaacaaatggtgatgccaggccatcgtgagtcgaacttgcagaaggaa

SEQ ID NO: 20511 - DNA, 124 bp, Zea mays
acgcggacgatgaagctcctcgacgattccatggcggccaggaccacgtacgagcgttcgggcggaatgaggagcctcgtcgcccgggacatggacgactacgtcgtctacggcctcaacgcgt

SEQ ID NO: 20512 - DNA, 263 bp, Zea mays
cgacggcatcagtcggctcaaaacggttacgatgatactgtacgaggtgctcaggctgtacccgccggcggtgacgctgaaccgaagaacgttcaaagacatgcagatcggaggcatcacgtaccctgcgggggtgatcctggagctccccgtgatcgtcgtccaccacgaccccgacgtctggggcaaggacgcgcacgagttcaggccggagaggttcgccgaggggatctccaaggcgaccaaggaccagcagccggcgt

SEQ ID NO: 20513 - DNA, 126 bp, Zea mays
cggatccgtggcggcgtgatctcgctgggcgtgtccatgaaccgcgtcgacttctcgcccggcggcaccaatccgccccacgtccatccgcgcgctattgatgtcgggctcgtcatccgcggcgag

SEQ ID NO: 20514 - DNA, 266 bp, Zea mays
  unsure (1)..(266): unsure at all n locations
cggcctcgtcaaggcgttccagaccgcctacttcgaccggtacggcggcggcgccaactcgctcgcctccggctactcccgccgcgcgcggctcggcgccgacatcgtcggcaccttcgtgctcgtgtacaccgtcttccccgccaccgacccgacgcgcaacgcccgagactcngacgtccaggttctcgctgccctccccaccggcttcgccgtcttcatcgtccacctggccaccatccacgtcaccggcagtggcatcaacc

SEQ ID NO: 20515 - DNA, 251 bp, Zea mays
gcgagatcgtgcgcgcctccgagatctccacgaagttgtggtaacatggggctcaccttcacgaagctcttcagccggctcttctccaagaaagagatgaggatccttatggttggtctcgatgcagctggtaagaccaccatcctctacaagctcaagctcggagaaatcgtgaccaccatccctacaatcgggtttaatgtggagactgttgaatacaagaacattagcttcactgtctgggatgttgg

SEQ ID NO: 20516 - DNA, 254 bp, Zea mays
ccaccggcgactcgccaaactccgtttcgaattctagggttttgctgctctccgaccccgagctccgaacgccgcagcatcaggcgcggcccccctcgcgtgtgaccgagatggcgctgccgaatcaggggaccgttgattaccccagcttcaagctcgtcatcgtcggcgatggtggaactggtaaaactacatttgtgaagaggcatctcactggagagtttgagaagaaatatgaaccaaccattggtgtg

SEQ ID NO: 20517 - DNA, 253 bp, Zea mays
ggaagcttcgagttttttttttcttccttttggcttactgcgcaagaagaagggtaacaagaggacggcggcgatggcgaagaggctgctcccatctctgaaccgggtgctggttgagaagctggtgcagcccaagaagaccgccggcggcatcctcctcccggaaacatccaagcagctgaatgctgctaaagtggtggctgttggccctggtgagcgcgacaaggcaggcattctgatcccagttgctctg

SEQ ID NO: 20518 - DNA, 258 bp, Zea mays
gaacgatcagcctaggtttgagacatgctaccaaatagctcttgcaataaaaaaggaggttgaggatcttgaggctgctggtattcaggtgatccagattgatgaggcagctctaagggagggtctgccactgcgcaagtcagagcatgcattctacctggactgggctgtccactctttcagaatcaccaactgcggagtccaggacaccacccagatccacacccatatgtgctactccaacttcaacgacatcat

SEQ ID NO: 20519 - DNA, 258 bp, Zea mays
aaagaagggcactggaggcattactatcaagaaaactggcatgtccttgattatcggtatctatgatgagccaatgactccagggcaatgcaatatggtggtggagaggctcggcgattacctgatcgaacagggcttctaagtttgtcataatgctattttggtcattgggcacttaagtttgcacctcatttggttctgtaatatgtgggcttgtgcatgtgcttggcgtattgcatgcagtgaataatttatctt

SEQ ID NO: 20520 - DNA, 259 bp, Zea mays
agggcaaggagtatgtctttgttgcaaactcagacaacttgggtgctatagtcgacatcaagatcctaaaccatctgatcaataaccagaacgagtactgcatggaggttactccaaagacgctggctgacgttaagggtggcactctcatctcttacgaaggaagagttcagcttttggagattgcccaagtacccgatgagcatgtgaatgaatttaaatcaatcgagaagtttaagatattcaacactaacaactt

SEQ ID NO: 20521 - DNA, 272 bp, Zea mays
tgcaatgctatggagacattgcttgttcataaagaccttataaaggctccaggtcttgatgatatactcctatcactcaaaacagaaggagttgctatttatggagggcctgttgcacatgaagtactgtgtattccgaaagcagattcattccatcatgaatatagctctatggcctgcacaattgagttcgttgatgatgtacagtcagcaattaaccatatacatcgttatggaagtgcacatacagattgcattatcaccacagatga

SEQ ID NO: 20522 - DNA, 273 bp, Zea mays
agaatctgcagtactatgaaatttctgccaagagcaactacaactttgagaaacctttcctgtaccttgcaaggaagctggctggtgatccgaaccttcactttgttgaagctgttgctcttaagcctccggaagttaccatcgacatggctatgcagcagcagcatgaagctgagcttgctgcagcagctgcacaacctcttcctgatgacgatgatgatctgattgagtagaaaggatcatgagtcttgaacttgagcaggagttgtgcct

SEQ ID NO: 20523 - DNA, 276 bp, Zea mays
ggagcagcatggcttgagtacgacaaatcttcagattcctgaggctatggtcaaactggtcatcgagaggtacacgagagaagctggtgtgcgcaatcttgaacggaacctagctgcattggctcgtgcagctgctgttaaggttgcagagcaagttaaaactcttagacttggcaaggaaatacaaccaattactacaacccttcttgattcaaggcttgctgatggtggtgaagttgaaatggaagttattcctatggagcatgatatatcaaa

SEQ ID NO: 20524 - DNA, 277 bp, Zea mays
gccccgccgcagaaatggcgctgccgaatcagcaggttgtggattaccccagcttcaagctcgtcatcgttggcgacggtggaactggcaaaaccacatttgtgaagaggcatcttactggcgagtttgagaagaaatatgagcccaccattggtgttgaagttcaccctctggattttagcactaactgtggcaaaattcgcttctattgctgggacactgctgggcaagaaaagttcggtggcctcagggatggctactacattcatggtcagtg

SEQ ID NO: 20525 - DNA, 281 bp, Zea mays
ttgcaaggttgaattcgatatggaggggaaagtgtgtggtgtcacatctgaaggtgaaactgcaaagtgcaagaaggtggtgtgtgatccttcgtatttacaaaacaaggtcaggaagattggtagagttgttcgtgcaattgctatcatgagccacccaatccctaatacaaacgagtcacactcggttcaaattattttgcctcagaagcaacttggacgcagatcagacatgtatgttttctgttgctcatacacgcacaatgttgcaccaagaggga

SEQ ID NO: 20526 - DNA, 279 bp, Zea mays
ccgtaatgctgcaaggcacttgctcacccttgacgagaagaacccccgtcgtatctttgagggtgaggcgcttcttcgccgcatgaaccgctatgggctgcttgctgagggtcagaacaagcttgattatgttcttgccctcaccgctgagaacttcctcgcaaggcggcttcaaacacttgtcttcaaggctggcatggccaagtccattcaccatgctcgtgtcttgatcaagcagcgtcacatcagggttggcaggcaaattgtcaacgtccatca

SEQ ID NO: 20527 - DNA, 271 bp, Zea mays
agaaaatttagagaagtacttaatcacctactaacctgtttaaaaatgataaacccctctgtataccccattaagatagagtttgccatttaattcaccttgtgcttaaagttaaagaaaatagaaaaggtaatttaaataaaggaccagggagcacccacatttttgttagtttacttattcagtatagttcactagaaaatttattatacccttgtttagtacaaaataaatgggataccttttattttaagaaaacaagaaaaactta

SEQ ID NO: 20528 - DNA, 264 bp, Zea mays
caatatgtgtggacataactgataatgaattggcatacttggaatgcattcacttgtttgtcgagatattggaccatttctttagcaatgtttgtgagctcgatttagtgtttaattttcacaaggtttacctgatactagatgaatttattcttgctggggagctgcaagaaacaagcaaaaaggcaataattgagcgaatgggtgaactggagaagctggaatgacgaagaccaggaagatgctgccgcgtgtgttgtattc

SEQ ID NO: 20529 - DNA, 277 bp, Zea mays
acggaacactattgatagagcctaaaccacaggaaccaacaaaacaccagtatgactgggatgttgcgactacgtttgcttttctacagaagtacggtcttacaggagagttcaagattaatgttgagtgcaaccatgctactctatctggacacagctgccatcatgaattggagactgcacggattaatgggctgcttggaaatatcgatgcaaacactggtgatcctcaagttggttgggacacagatcagttcatgacagacattgcagaggc

SEQ ID NO: 20530 - DNA, 262 bp, Zea mays
tctggagttaaaaagggaagaaatcgttcaactcgcacacgagttatgtgatgagttccaggcgcttggcaagccaggagatgctgctagagtagcactggagtactgttcagatgctgaaagaggtgtaagctactatatcatggcaagggaatgggaagaggctcttagagtcgcttacatgcttagcacgcatgatctggttgaagctgtcagagacgcagcttcagaatgtgccgcgtcactgatatccgagtaccag

SEQ ID NO: 20531 - DNA, 267 bp, Zea mays
ctctccgcgcgaccgatctaccgccgccgccaccatgtcgctgatcgccggcgaggacttccaacatattctgcgtctgctgaacaccaacgtggatgggaagcagaagatcatgttcgccatgacctccataaagggtgttgggcgccgcttctccaacatcgtctgcaagaaggccgacatcgacatgaacaagagggccggtgagctgacgcctgaagagctggagcgcctgatgacggtcgtggccaaccctaggcagttcaa

SEQ ID NO: 20532 - DNA, 250 bp, Zea mays
tgatggccgaggcccgagacctgtcgtccacctccaccggtggctatggcgatgtagccatgagagtgtggcatcatgcagtggatggcggacattgccgcaccgatatggacgtggctgagaaggcgcaccggttccaggtattcaatgctaactccattttggtgacgcgtccaataatgccgcatgtgacaagaaaagctatcggctggagctcaacgagttcgccgacatgaccatcgacgagttc

SEQ ID NO: 20533 - DNA, 87 bp, Zea mays
gataaaattggaacgatacagagaagattagcaaggatgacacgcacaaatcgagaaatggtccaaattttttaaaaaacgaagaac

SEQ ID NO: 20534 - DNA, 275 bp, Zea mays
ggcaaatcagtggaatagaggctggggcgatgatggatacttcaagatcataaggggcaaaaatgaatgtggcatcgaggagggcgttgttgctggaatgccatcgacaaagaatatggttccaaacttcggcggtgccgttggaagagctatagtttaattggttacgtttgcatggcctcaaatgctgttggaattaactaaagtaattttaaaatgcaattgttaaatggccacgatggtgtatgtattttgtacactagctcattccaaag

SEQ ID NO: 20535 - DNA, 124 bp, Zea mays
ggaccggggtatatgtgttcttatttacatccccaataagtgttattgtgttgtatcacatgtacctactatatatcaaatggaacatttctcaaaagattcatcatcggaacgtagctttctt

SEQ ID NO: 20536 - DNA, 256 bp, Zea mays
ggatggtgtgtgaaggtcatctgcgaccacctgagcctgggagtcaagactggcctgccatacatctggcacagcaaggctagcaaccccttcgttaacttgaagaaggaatacaagggcatcttctggcaggaggacatcatccccttcttccagaacgtgaccatccccaaggactgcgacaccgtccaaaagtgctacatctacctctctggacaagtgaaggagaagctgggcacgattgacccctactttg

SEQ ID NO: 20537 - DNA, 249 bp, Zea mays
gactggagttcatgggcatcattgcagtcctcagttgatatccaaattgtgggtgatgatttactcgtcacaaacccaaaacgtatagcagatgctattgacaagaaggcttgcaatgctctgttgctaaaggtcaaccagattggtactgtcactgaatcaattgaagctgctctcgattcaaaagctgctggttggggtgtgatggtcagccacagaagtggtgaaaccgaagacaacttcatcgca

SEQ ID NO: 20538 - DNA, 246 bp, Zea mays
atcggcaaaaagaagactcgagaagaccgggcacgagaggcctcctatctcagtaatgagaatgagaagtacaagaaagctaaagactatgtgaacatgctgaaggactggtacggcaatggagcgtcgaagctgtgcgtgatctacaaccagacgggcggaaccctgcggtacgtcgacgacaaggactggctgggctacccggggccgacgccctacccgacggagatcggcaacgggcagtgg

SEQ ID NO: 20539 - DNA, 248 bp, Zea mays
gaattcacagcaatctgtggctcttggcaatacggcaaatccaagggctaggtactgtaggaaatgcaaccagttgaagccacctcggtgccaccattgctctgtttgtggaagatgtgttcttaagatggatcatcattgtgtgtgggtggttaattgtgttggggcactgaactacaaatactttcttctgttcctgttttacaccttcctcgagacaactcttgtcacactctctttattgcctc

SEQ ID NO: 20540 - DNA, 244 bp, Zea mays
ggtattggaactgtccctgttggacgtgttgagactggtgtcattaagcctggtatggttgttacttttgggcctactggtcttactactgaggttaagtccgttgagatgcaccatgaggctctccaggaggcccttcccggtgacaatgttggcttcaacgtgaagaatgttgctgtgaaggatctgaagcgtgggtatgtggcctccaactccaaggatgaccctgccaaggaggctgcta

SEQ ID NO: 20541 - DNA, 247 bp, Zea mays
ggctcccgcacggggtggcagcccatgtcccggaactggggccagaactggcagagcaactcgtacctggacaggcaggcgctctcgttccaggtcaccgccagcgacggccgcaccgtcaccagcaacggcgccgtccccgctggctggcagttcagccagaccttcgagggcggccagttctgaggatgaacagctagcgcgcgcgcggctagctattggataattaattacggtactgtcgatt

SEQ ID NO: 20542 - DNA, 239 bp, Zea mays
ctgggatactgccgggcaggagaggtatcatagcttggctcccatgtactataggggtgcagctgctgccattgttgtctatgacatcacaaatccggcctccttcacccgtgccaagaaatgggttcaagaacttcaagctcaaggaaatcagaataccatagtggctcttgctggaaacaaggctgatatgctagatgcgaggcaggtgccagcagaggaagctaatgcgtatgctc

SEQ ID NO: 20543 - DNA, 241 bp, Zea mays
gttgaagctaaacatggcaggtccctgaaaccctccctgaggaagtgcttggaaagatgggcgcaccccctaagcctgacgtgccagtcatcacgccgcaagaactcgcagaggccgacggaatcctcttcgggttcccaacgaggttcggaatgatggcagcgcagatgaaggcgttcttcgatgccactggtgggctctggagggagcagagccttgccggcaagcctgccggcgtctt

SEQ ID NO: 20544 - DNA, 239 bp, Zea mays
gccatttgccgctattgttggtggatccaaggtctcaagtaagattggtgtcattgagtcgttgctggcgaaggtcgatatcctcatccttggtggtggtatgatctacacattttacaaggcacaaggatattctgttggaaaatctctcgtggaagaggataaacttgagctcgcaacttctcttattgagaaggcgaaggcaaagggggtttctcttttgcttcccactgatattg

SEQ ID NO: 20545 - DNA, 238 bp, Zea mays
gccaagaagattgacaagcacatgtatcatgacatgtacatgaaggtcaaaggtaacgccttcaagaacaagagggtgcttatggagagtatccacaagtccaaggctgagaaggccagagagaagacactttctgaccagtttgaggccaagcgcgccaagagcaaggcgagccgtgagaggaagatcgctaggagggaggagaggttggcccagggtccacgagaaataacaccac

SEQ ID NO: 20546 - DNA, 238 bp, Zea mays
ctcgcgcacccggccgtgggcggcttcttcacccactgcggctggaactccaccgtggaggccgtgtcgaagggcgtgcccatgatctgccacccgcgccacggggaccagtacggcaacgcgaggtacgtgtgccacgtctggacggtgggcacggaggtcgccggggaccagctggagagaggggagatcaaggccgccatcgacaggctcatgggcggcacgaggatggggaggg

SEQ ID NO: 20547 - DNA, 240 bp, Zea mays
actaaactccactgtctccaactctccatcgcggctgctacgcctctcctgcatgacgaccaatggcttccaggaagttcttcgtgggtggcaactggaaatgcaacggtactggcgaggacgtgaagaagatcgtcaccgtgctcaaccaagccgaggtgccctctgaagacgtcgtcgatgtggtggtgagtccgcctttcgtttttctgcagcaggtcaaggtgctgctgctgctgg

SEQ ID NO: 20548 - DNA, 236 bp, Zea mays
acctctcctttctcacacctcgacgcctctctctctttccccgagctctcgaaaccctaggtgcgtgccgaccggcggcggcggcgaggtgatggcgatggacccggacgcggtggcgaaagcttcgtggagcactactaccggacgttcgacaccaaccgcgcggcgctggtggggctgtatcaggagacctccatgctcaccttcgagggccagaagttccagggcccatccgc

SEQ ID NO: 20549 - DNA, 263 bp, Zea mays
atgatgtagaaattgatgcaattcttgaggaagaggaggccctcattgcagttcacaggaaggagatcgagaatactatggagattgtgcgggaagagatgaaccttttggcagaggttgatcaaccaggcagcctgattgacaactacgtgacacaactgagctttctgctgtcacgcaaggctgcaggtttggtcagcctccaatcacacttggcacggtttcagcaccgcctcaaagagcaagagatccttagccgcaag

SEQ ID NO: 20550 - DNA, 247 bp, Zea mays
ggaacctccacgtcgcctgacctagggcacaggcccgccacgtcaacaggaagcgccatcatcaccctaccccgagccgactcgggccgcagagaacaagaccgatgtcccatctggctagctccgccagataggcaatgatggcgccccgctagccctgtgacgacggcggctctcagctcccttacggaagcagggggacgtcagcaaggactcgaccgctctgatagctgtctctccgcaagct

SEQ ID NO: 20551 - DNA, 135 bp, Zea mays
gttttcatgtctgatctcgacattcagatcccaactgccttcgattccttcgctgaggccaatgctggggactctggtgcggcacagggtcaaaggactacgttcacgtgcgcatccagcagcgtaatggtcgca

SEQ ID NO: 20552 - DNA, 263 bp, Zea mays
tgatcactgggatgcagcttagccctgatgggtcttacctcctgaccaatgcaatggacaatgagctcaagatctgggatctgcgcccttacgcaccagagaaccggaacatcaagactcttacaggtcaccagcataactttgagaagaacctactgaagtgtagctggtcgccagataaccgcaagtcactgctgggagcgcagaccgcatggtctacatctgggacacaacatcaaggcgcatcctgtacaagcttcccg

SEQ ID NO: 20553 - DNA, 264 bp, Zea mays
gagaagctgaaatggctcctaaagctgctcctgccaagaagggtgatgccaagacccaggccttgaaggttgccaaggctgtgaagtctggggcagccaagaagaagaccaagaagatccgcacgtctgtgacatttcaccgccccacgaccctgaagaaggctagggaccccaagtacccacgaatcagcactaccggaaggaacaagcttgatcagtaccaaattctcaagtacccccttaccacagaatcagcgatgaaga

SEQ ID NO: 20554 - DNA, 258 bp, Zea mays
  unsure (1)..(258): unsure at all n locations
catgcctggccgtctgtacgacctggacgcgtccaagtacgggacggcagcggactcaagtccctgatcgccgcgttccacggcaagggcgtgcaggtggtggcggacatcgtcatcaaccaccggtgcgccgactacaaggacgcccgcggcatctactgcatcttcgagggcggcacccgntcggccgcctggactggggcccccacatgatctgccgcgacgacaccatatactcggacggcaggccaacctcga

SEQ ID NO: 20555 - DNA, 263 bp, Zea mays
acaatcctaaaaccatctgcttcagccttcagctagccccaagtttagtcggccgatcgatcactgaagtagtaatggcctccgccaacagctggaccctcgagatcgcgtcgccggtggccccgcagcgcctgttccgcgccgccgtgatggactggcacaccctggcgcccaaggtcgcctcccacgtcgtcgccagcgcgcaccctgtggagggcgacggcggcgttggcagcgtcaggcagttcaacttcacctcagtc

SEQ ID NO: 20556 - DNA, 243 bp, Zea mays
cctaaatctgatctaccttcattggtggataaatatgcagcaaaggaaatccaagttgatggcctagtcacgcatgatataccattcaatgaaatcaacaaagcgcttgagttgatgctagaaaacaagtgcttgagatgtgtgattcacatgccacggtaacagggtcgaacagctgcacataataatatgatatctaccatatgtggcaaatctgctctttctaccttgatcatctttgtg

SEQ ID NO: 20557 - DNA, 252 bp, Zea mays
ccagaagaagagagctgagaagccagaggtccgcgatgctgctagagaagctgctcttcgtgagatcaaggagcgcatcaagaagaccaaggatgagaagaaagcgaagaaggcggaggtgagcaagtcccagaagacgcagacaaagggtgcggtccagaagggttccaagggccccaagttgggcggcggtggtgggaagcgctgaaataacttaaggcctgtttggaggctgacgtcgagcgccacacc

SEQ ID NO: 20558 - DNA, 237 bp, Zea mays
gatcaaccggtacatcgccagcaagtacgcgtcggagggcacggacctgctccccgcgacggcgtcgcggcgaactggaggtgtggctagaggtggagtcgcaccacttctacccgaacgcgtcgccgctggtgttccagctgctcgtgaggccgctcctgggcggcgcccccgacgcggcggtggtggacaagcacgcggacagctcgccaaggtgctcgacgtgtacgaggcgca

SEQ ID NO: 20559 - DNA, 256 bp, Zea mays
aatacatttataagctggataagattacttacaacaagttgcatccatatacatcctggatccccataactgtctacatatgcctacgcaacttcactcaagaattcaggggcttctccctcacactatttgcctggcttggaaagattacactagaaacatacatatctcagttccatatctggctcagatcaagtgtgcccaatggccaaccaaaatggctattgtcaataatcccaaattatccactgctcaa

SEQ ID NO: 20560 - DNA, 256 bp, Zea mays
acgggcgactgcggcacggacctggaccacggcgtgcggcggtcggctacggcgtcacgacgacggcacgccctactggatcgtcaagaactcgtggggcccttcctggggagagggcggctacatccggatgcagcgcggcaccggcaacggcggcctctgcggcatcgccatggaggcgtcctttcccatcaagacctcgcccaacccgtcgcgcaaccccgccgcgcgctcatcaccagggacgcctcttccc

SEQ ID NO: 20561 - DNA, 258 bp, Zea mays
catttcttctctctctgctcctccgcctccgcctccgcctgatccatccaagacagggatcgccatgtcggactcggaggagcaccacttcgaatcgaaggccgacgctggggcgtccaagacctacccgcgacaggctggaacggtccgtaagaacggcttcatcgtaatcaagaaccgtccctgcaaggttgtggaggtttctacctccaagactggtaaccatggcaacgccaaatgcaactttgtcgcaataga

SEQ ID NO: 20562 - DNA, 136 bp, Zea mays
gagaaatatgaatgcaagggatgcgtgcaagaatcaaaaggttgtctgcctaccacgtgtttcaagggttgttgatatcatttctgttttgcgaactaacaagcataatggtttccctgttgttgaccgtgggcaa

SEQ ID NO: 20563 - DNA, 229 bp, Zea mays
cagacactctacatatatcctcttctcgtgtatctcgtcttacagagccgtaagctggatcttccaattgcgggagataacgacctgaaggtgctcggcgtgtggacgatctcgttcgtgatccgggtcctcatcgtgctcaacctgaagggctttgcgtacgattacgtggaggaggacctcagcatcaatagcgcgttcctcctggggtccaacccggtttacaata

SEQ ID NO: 20564 - DNA, 131 bp, Zea mays
ctggaaggtttagcactctatgctgaccctgattttaaggtgcttgctgcatcatatccttactttgcgaaaaggctactgactgatcccaacccatatctcagagatgctttaattgagcttgtattcaa

SEQ ID NO: 20565 - DNA, 250 bp, Zea mays
ccttggactcacaggttgtgacagttggaaagtttcaaggaggtggagccttcaatgtgatccctgattcggtaactataggtggcaccttccgagcctttctgaaagagagttttaatcaattgaagcagcggattgaagaggtgattgtgtctcaagctagcgtgcagcgctgcagcgctgcgtggacttcctcagcaaggaccgtcctttcttcccgccgaccatcaacagccccgagctccacgac

SEQ ID NO: 20566 - DNA, 255 bp, Zea mays
cccacgcgtccggttgtggtggaggatgaagaggaggaagatgaggacgatgacgatgatgacaaggatgatgatgaactcgatgaaggggatgccagtggcaagtcaaagcaaagcaggagtgagaagaagagccgcaaggccatgctgaagcttggcatgaagcccatcactggtgtcagccgcgtcactgtaaagaaaagcaagaatatactctttgtcatctccaaaccagatgtgttcaagagtccgaat

SEQ ID NO: 20567 - DNA, 249 bp, Zea mays
ccttattccattatgaagcacctgaagtgcatgaatctggatcagtaagcgatcgaagtgatgtttacagcttcggtgtagttatgttggagcttctaacaggacgtaaaccttatgacagttcgtatccacgagctgaacaacatctagtacgatgggccacttctcaactctatgatattgatgccataacgaagatggttgatccttccattcgaggacaatgttctgataaggcattatcccgtt

SEQ ID NO: 20568 - DNA, 122 bp, Zea mays
ctgatggagaacgccttctagttcatcaagtccttcggcggcatcaccaccgaggcctcgtacccgtaccgcgcgtccaacggcacctgcgactgcgatcgtgccctgcgcgggggaggcgt

SEQ ID NO: 20569 - DNA, 253 bp, Zea mays
ccaagaccgcggagaacttccgcgcgctgtgcacgggcgagaagggcgtgggcaagtccgggaagccgctccactacaagggctccaccttccaccgcgtcatccccgagttcatgtgccagggcggcgacttcacccgcggcaacggcaccggcggcgagtccatctacggcgagaagttccccgacgagaagttcgtgcgcaacacaccgcccccggtggctctccatggccaacgccgggcccaacacca

SEQ ID NO: 20570 - DNA, 254 bp, Zea mays
gtacgctctccaatgatattgtatcaaccaagcgtgaacaaagagagaagcattgtgtctccactgttcagtgttacatgaagcagcatgaaataacaatggatgaagcatgtgagcagataaaagaacttacagaagattcatggaagttcatgattgaacaaggccttgcactaaaagaatacccgataattgtgccacgaacggtactagagtttgcacgaactgtagactacatgtacaaggaagctgat

SEQ ID NO: 20571 - DNA, 257 bp, Zea mays
gtacgaacggtcggtcgaggcactgtctgttctctcccagtccgtcgacgcgaaagggcggcagctccaagtggtgaagatccacgtccccgggcctctgtacatgacagaggaagaggcacaggcgttgtttcatcgggacattctgtgccgaggccagcgggcacgagattggccgcctcgtacgtcaacttctacatcgccaatggcgggatcatagcgccttccttcggcgacaggtgggacgaggaggcgta

SEQ ID NO: 20572 - DNA, 275 bp, Zea mays
aagagctgaaggacctgcagaaggacccccccacatcatgcagtgcaggtcctgctggtgaggacatgtttcattggcaagcaacaattatgggaccacctgacagtccctatgctggtggtgtttttttagtgaacattcatttcccgccagattaccccttcaaacctccaaaggtttctttcaagacaaaggtcttccatcctaatatcaacagcaatggaagtatatgccttgacattctcaaagagcagtggagccctgctttgacaatt

SEQ ID NO: 20573 - DNA, 218 bp, Zea mays
aaagcattaaggttactatggatgactttgtgaatgcacttcatgaaattactcctgcatttggtgcttccaccgatgatctcgaaagatgcagattgcgagggattgttgactgtggtaaggcacataagcacatttaccagagagctatgctccttgtagagcaagttaaagttagcaaaggtagtccacttgtgacttgcctgttggaaggtcct

SEQ ID NO: 20574 - DNA, 258 bp, Zea mays
gattaaatacagcactcctgtttttcttttccattccacaggaacttcagaagcatggtagtcctggtattgtaatggttttggttggtaataaggctgatctacatgataatcgaagtgtatcctcgcaggatgcgcaggactacgcagagaagaacaatatgtttttcattgagacgtcggccaagacagctgataatataaaccaactgtttgaggaaattgcaaagaggttgcctaagcacacggcatcgtgac

SEQ ID NO: 20575 - DNA, 261 bp, Zea mays
caaaggcatggccgcggacagccgcttcctcatgccaattgtgctgatggagtgcggcgagacgtttcgtgggatcgactcgttggttgacgtcggtggtggccatggtggcgccgccgccaccatcgccgccgccttcccccacctcaagtgcagcgtgcttgacctcccgcacgttgtcgccggtgctccgtctgatggcaacgtgcagttcgtcgcaggcaatatgtttgagagtattccacctgcaaccgctgtttt

SEQ ID NO: 20576 - DNA, 260 bp, Zea mays
agctggtgccctacaaccccggcttgaccgggtggccctcgccctgggagtgcttgatggcctcgccggtgatcctgttgacgagggccacccggtcaagctggtgccctacaaccccggctaccagtacgagtcggtgctgtggacggagagccgcgacgtcggccacggcttccgctgcgtccgcatggtcaacaacatctacctcaacttcgacgccttccacggcgacaatgaccacggcggcgtgcgcgacggca

SEQ ID NO: 20577 - DNA, 263 bp, Zea mays
aaggattgaagattacaggaagaactgtttggagaaatccacagggttaccttcctggtaaaatggctccaatgatgacattttatggtttcatgtcacttgcatatcttgtacttggacttctatggttcattcagtttgtgcgatgctggaaggacattttgcagctgcattaccatataacagctgttattgctcttggcatgtgtgaaatggcttgttgggaatttgagtatgctaactttaattcaactggaacaaga

SEQ ID NO: 20578 - DNA, 268 bp, Zea mays
aattgatgaagtggacagtacagttcatgtttcgtgggtccagcccagagtgcttggaatcccacaggctaaggctttgcgcgaccgcctggatgcctgggttggaaaggtgcatactacattgctttcagttgaggcagaaacacctgatcttgttgctgcctaatttagcacctgttacacttccgcgagaggcttggtcatcaaggtgatgagatgcactgtgacacttgtagtcattttctggataatgaacctgctgccctga

SEQ ID NO: 20579 - DNA, 261 bp, Zea mays
gatttatccacctattaatgtcctgccatctctttcacgattgatgaagagtgctattggtgagggcatgacacgtcgagaccattcggatgtatctaatcagctttatgccaactatgctattggaaaggatgttcaggccatgaaggctgtcgttggagaggaggcactctcgtgtgaggatctgcttgactgagagttccttgacaagtttgagaggaagtttgtgacacaaggagcatatgacacacggaacatctt

SEQ ID NO: 20580 - DNA, 238 bp, Zea mays
aattggagcagccttcttttcccagaccttagcggtcaatgatgagactgttaagttcgaaatctgggatactgccgggcaggagaggtatcatagcttggctcccatgtactataggggtgcagctgctgccattgttgtctatgacatcacaaatccggcctccttcacccgtgccaagaaatgggttcaagaacttcaagctcaaggaaatcagattaccatagtggctcttgct

SEQ ID NO: 20581 - DNA, 234 bp, Zea mays
atccagaggaacccctggtgattggagccatatcattaagcaaattgggatgtttactttcactgggctgaatagcgaacaagtcgcattcatgaggcaggaataccacatttatatgacatctgatgggaggatcagcatggccggtttgagcatgaggactgtgccccatcttgcagatgccatacacgctgcagttactcaactgacatgaggctagtatcgcagctttcg

SEQ ID NO: 20582 - DNA, 123 bp, Zea mays
tccagatcgaccccgccaagtacaagaacacctcgtcggcgttcagcgtggtgatgagggagcagggcctccggggcttctacagggggtgggcgccgacgttcgtgggctacagcgctcagg

SEQ ID NO: 20583 - DNA, 256 bp, Zea mays
ccattagcagcagcagtagccacagccagtaccagcagacagcagggaggaacacgatgagcggcgccggtccggatctgcagctgccaccggggttccggttccacccgacggtcgaggagctggtgatgcactacctctgccgccgctgcgccggcctgcccatcgccgtccccatcatcgccgagatcgacctctacaagttcgacccatggcagctcccaaggatggcgctgtacggcgagaaggattggta

SEQ ID NO: 20584 - DNA, 255 bp, Zea mays
gtggtctaccagactgagaagcaactgaaggagcttggcgataaagtccccgctcccgtgaaagagcaggtggatgtgaagctccaggagctcaaagaggcaatatctggtggatcaacacagagtatgaaggatgccatgtctgctttgaaccaggaggtgatgcagattggccaggcaatgtataaccagtctggtgctagtgctgctgggcctactcctggtgctgaagctgggcctacccctggtaccgga

SEQ ID NO: 20585 - DNA, 123 bp, Zea mays
gccgcctcaccgcctctctcaatctgataccgcagatccgtcgtccggtgagtggaagccgcacgaacccatggcctccggcgagcttgcctgcacctacgccgctctcatcctcagcgacga

SEQ ID NO: 20586 - DNA, 116 bp, Zea mays
cgcattcctcccatctcccaagacctcctcagacccgagaagcgcactgcggccatggacgccaccggcactggagctggagggaaggcgaagaatggagcggccggtcgcaaggc

SEQ ID NO: 20587 - DNA, 253 bp, Zea mays
gtccgaagtgccacaggcgtaggtgtcatgatgaatgatatgaagagcaggttctctgtaaatggaaaacccatttaccatttcatggggacatcaacattcagccagtacactgtggtgcatgatgtcagtgttgcaaagatcaacccacaggcacccttagataaagtctgcctgctcggttgtggtgttcctactggtcttggagcggtgtggaatactgcaaaggttgaatctggctcagttgttgctg

SEQ ID NO: 20588 - DNA, 239 bp, Zea mays
attcgactggctcgccttctccgacctctccggcttcgcgcgcctgtcgcttggctccgccgtcatgctctgcctggagttctggttctacatgttcctgatcgtcatcgtcggcaacctggagaacgctcaggtcgccgttgctgcagtctccatttgcacgaacctgttccggtggcagatcatggtgttcttcggattcaacgcggccatcagcgtgcgggtgtcgaacgatctgg

SEQ ID NO: 20589 - DNA, 256 bp, Zea mays
gggacggaggtggagggcaagcgcgagatcgccgccttcttcgcgcacgtcacgcacgagaccggacatttctgctacatcagcgagatcaacaagagcaacgcctactgcgacgcgagcaacaggcagtggccgtgcgcggcggggcagaagtactacgggcgcggcccgctgcagatctcgtggaactacaactacgggcccgccgggagggacatcggcttcaacgggctcgccgaccccaacagggtggcgc

SEQ ID NO: 20590 - DNA, 238 bp, Zea mays
catatcgccgatgctggaccttctgatgcgccccactacgtcggtcgccacctacttcagcctggaagagtggttcaaggacgcgggcgccaccgccacgctcttcgaggtggcgcacggcatgtccccgtggagcttgacgaagaacgacgccctgtacaacaagaccttgaacgacgggtgcgcggcggacagcaacttcgccatggacacgctcctgagagagcacgggccgcgg

SEQ ID NO: 20591 - DNA, 252 bp, Zea mays
aggtgtcgaaaaaggttcaaaagagccacaacggcagaaggtgggaaaggtaacagtggatcaagtgcgtgcaatagctcaagagaagttgccggacttgaactgcaagagcatcgactctgctatgaggatcatcgctggcaccgccgctaacatgggcatcgatgttgatcctccaatccttgtcaagaagaaaaaggtcctcttgtagtttgtttttgctggcaccaccagtgcccattttgagattat

SEQ ID NO: 20592 - DNA, 261 bp, Zea mays
gaaggcagcgccgtttctgaagcctctgattgaagagcatactattaaatcattcatccaaggtttccttccgggaattgctctgaagatcttccttatattgctcccaagcatattaatgtttatgtctaaggttgaaggattgacctcaatatcttcactggagagaagatctgcatcaaagtattatattttcatattcttcaatgtgtttctggcaagcattattgcaggatctgctttagagcagctaaaaagcta

SEQ ID NO: 20593 - DNA, 254 bp, Zea mays
gacgaatttcctgatgttcgacttaacataatcagcaaacttgatcaagttaatcaggttattggaattgacttgctatctcaatcactgctaccagcaattgtagaacttgcagaggataggcactggagagtccggcttgcaataattgagtacatcccattgttggcgagtcaattaggtgttgggtttttcgatgacaagctgggggcgctctgcatgcaatggttggaagacaaggtcttttcaatcag

SEQ ID NO: 20594 - DNA, 254 bp, Zea mays
atcctcttcctcgagttctcctcaaccaaattcaaggtcacagcggcgaacctctcggctatcatgtctggccgcggcaagggcgggaagggtctgggcaagggcggcgccaagcgccaccgcaagtgctgcgcgacaacatccagggcatcaccaagccggcgattcgcaggttggcgaggaggggcggcgtcaagcgcatctccgggctcatctacgaggagacccgcggcgtgctcaagatcttcctcgag

SEQ ID NO: 20595 - DNA, 250 bp, Zea mays
gcgtcgtcacaactggccgcaagatcattggcgccactaaccccctggcttctgagcccggcaccatccgtggcgactttgctgtcgacattggcaggaatgtcattcatggaagtgacagcattgagagtgctaataaggagattgccctgtggttccccgagggccctgctgattggcagagcagccagcacccctggatctacgagaagtaaacatggaaagtttcacatcaaaccttgagagccag

SEQ ID NO: 20596 - DNA, 252 bp, Zea mays
cggacgcgtgggtttgctgtggcgaggtggttcgatcagatctgtcactggaagaacccgctgaccaccgtactgatccatgtactctttatgatactggttctatacccagagctgatactgcccacaatcttcctctacctgttcctgatcggggtgtggtactacaggtggcggccgaggcagccaccgcacatggacacccgcctctcccacgcagagaccgcccacccggacgagcttgacgaggag

SEQ ID NO: 20597 - DNA, 253 bp, Zea mays
cgggccaccgtgctcaacgagaagggcctcgacttcgagatcgtccccgtcgacctcaccaccggcgcccacaagcagcccgacttcctcgccctcaaccctttcggccagatcccggctctcgtcgacggagacgaagcctcttcgagtcccgtgcgatcaaccggtacatcgccagcaagtacgcgtcggagggcacggacctgctccccgcgacggcgtcggcggcgaacgtggaggtgtggctagaggt

SEQ ID NO: 20598 - DNA, 248 bp, Zea mays
aaaaaggctgcagaagatacatctaataccgaaaatatcaatgcctcaagctcaaacagcgattctgttatggctgaagcagaacttgcctcaaatgctgctgctggtgacaagcaagaacagccaaaggatgatgacgatctactacagcaggcacttgcaatgtcaatggagggcggtgcttcaggatctgcagctgtgactgactccgctatggcagaagctggtgcagttgaccctgacttagc

SEQ ID NO: 20599 - DNA, 250 bp, Zea mays
caagaatgtgattggggctcgccgcgcttcatggcgcattgtttcttcgattgaacaaaaggaggagtcccgtaagaacgaggagcatgtgaatcttatcaaggaatatcgtggcaagatcgaggctgaactgagcaatatctgtgatggcatcttgaagctgcttgactcccacctagtgccttcttcttgaagctgctgaatcaaaggtcttctacctcaagatgaagggtgactatcacaggtatct

SEQ ID NO: 20600 - DNA, 240 bp, Zea mays
ctgaaacctcagatactctacatatatcctctgcgcgtgtatctcgtcgtacatagccgaaagctggagcttccaatggcgggatacaacgacctgaatgtgctcttcgtgtggacgagcccgttcgtgatccgggtccgcatcgtgctcaacctgatgggcctggcgttcgagtacttggatgaggatctcagcaacaagtgcgcgctcctcctggggtctaatccggtgcacaagagc

SEQ ID NO: 20601 - DNA, 251 bp, Zea mays
ctaaaaccatctgcttcagctagccccaagtttagtcggccgatcattcactgaagtagtaatggcctccgtcaacagctggaccctcgagatcgcgtcgccggtggctccgcagcgcctgttccgcgccgccgtgatggactggcacaccctggcgcccaaggtcgcctcccacgtcgtcgccagcgcgcacccgatggagggcgacggcggcgttggcagcgtcaggcagttcaacttcacctcagtca

SEQ ID NO: 20602 - DNA, 263 bp, Zea mays
cgtgatctacattaaggccggcgcgtacatggagaacgtggaggtcgggaagaagcacgtcaacctcatgttcgtcggcgacggcatcggcaagaccgtcatcaaggccagccgcaacgtcgtcgacggctacaccaccttccgctcggccacagtcgctgtggtgggcaacaacttcttggcccgcgacctgacgatcgagaactcggccgggccgtcgaagcaccaggcggtggcgctccgcgtgggggcggacctgtcgg

SEQ ID NO: 20603 - DNA, 254 bp, Zea mays
ggcaagtgcaactgcggctccagctgctcctgcggcactcatgcaactgcatgtcccctgacgtggagaccgccgccgccagcagcatcaagaccatggtcctcgctgcgccgaccaccaaggccagcgccggcggcttcgaggcggccaccgagggcggcggctgcgactgcaacacctgcaactgcggcaccagctgcggctgctcctgctgcagctgcaactgagccggcccgcccggcccggcgatggcg

SEQ ID NO: 20604 - DNA, 243 bp, Zea mays
ctcaccggcaggcacgagaccgccgacatcaacaccttcagctggggagtcgccaaccgtggcgcgtcggtgcgcgtgggccgcgagacggagcagaacggcaagggctacttcgaggaccgccggccggcgtccaacatggacccctacgtggtcacctccatgatcgccgagaccaccatcgtctggaagccctgaggcaccccgtggccgtgtcgtgtcggtttgctccgcgtacggcgc

SEQ ID NO: 20605 - DNA, 255 bp, Zea mays
ggcgcgcgccggtcatcgcgcgccacgacatgtacgacaccaacacgggcgccggcggggacggcgagtacctgccgctgtccatcttctggcaggtgccgcagtacgtggtggtgggtgcgtcggaggtgttcacgttcataggccagatggagttcttctacgaccaggcgcccgacgcgatgcggagcctctgctcggggctctccatgacgtccttcgcgctcgggaactacgtcagctccgcgctcgtca

SEQ ID NO: 20606 - DNA, 259 bp, Zea mays
acgtacctgtagatgttagtgactaaaaaataattaaaacaattaaacattgatcgctaaattgtagtaaagaaaaaaagaattgtagaaaagaaaaaaagaattatggtaaagaaaacgaattgtaaaaaaaggatttttaaggttttgaaccttgaatctgtttgactcaatttttaaggttaatcattttgtatataattatttgcaaaaatctcacttttattgttttattgtgacacacgtttgatttaagtgg

SEQ ID NO: 20607 - DNA, 253 bp, Zea mays
gtttccacctggtgtccctggatttggtcagcagctgttctatggtcagccaccaccagccttcatcaaccctcaggctggatttgctttccagcaacctctgatgcctggtatgaggcctggtggtccaatgccgaactttatgatgcctatggttcagcaaggacagcaaccacagcgtcctgctggtaaacgtgctggtggaatgcagcagcccatgccaatgggtggtcagcaacaggtgttccctaga

SEQ ID NO: 20608 - DNA, 253 bp, Zea mays
gcgaaggcgaccctccctccttcgctccttccgcgccgcctcccggccgtcgccgccatggtgaagtactcgcaggagccgggcaaccctaccaagtcggctaaggccatgggcagggatctgagggtccacttcaagaacacaagggagacagcctttgcgcttcgcaagttgtctttgaccaaggctaagcgataccttgaggatgttattgctcacaagcaggcaattcccttccggagatactgtgggg

SEQ ID NO: 20609 - DNA, 254 bp, Zea mays
ccactatgccggcggacggggaggcgctggcgccggccgtccacttctggggcgagcacccggccacggaggcggagttctactcggcgcacggcacagagggcgagccctcctacttcaccacgcccgacgcgggcgcccggcggctcttcacgcgcgcgtggaggccccgcgcgcccgagcggcccagggcgctcgtgttcatggtccatggctacggcaacgacatcagctggacgttccagtccacggcg

SEQ ID NO: 20610 - DNA, 255 bp, Zea mays
gagatgggtctctcctttgggaagctgttcagccgcctcttcgccaagaaggagatgaggattctcatggtcgggctcgatgccgccggtaagaccaccatcctctacaagctcaagctcggcgagatcgtcaccaccatccccactatcggattcaatgttgaaactgttgagtataagaacattagcttcactgtttgggatgttggtggccaggacaagatcaggcccctgtggaggcactactttcagaac

SEQ ID NO: 20611 - DNA, 252 bp, Zea mays
gttccagtcgacgccgtacgtggtgaccctcttcagctgcatgctgtggatcttgtacgccctgctcaagcccggcgccgagctgctggtcaccatcaacggcgtgggctgcgtcgtcgagaccgtgtacctggccatgtacctggtgtacgcgcccaaggccgcccgggtgctggcggccaagatgctgctggggctcaacgtcgccgtcttcggcctcgttgcgctcgtcaccatgcttctctccgacgc

SEQ ID NO: 20612 - DNA, 250 bp, Zea mays
ctcctccacgcgcactactacaagatccccggcgtcttcaccaccgacttcccggcatacccgccggtgcagttcgactacacggggcagaacgtcagccaggccctgtggcagccggtccccgccaccaagctgtacccgctcaggttcggctccgtggtgcagctcgtcctgcaggacaccagcatcgtcacgcccgagaacaaccccatccacttcaagggtacgatttcttcatcctcgccgaagg

SEQ ID NO: 20613 - DNA, 247 bp, Zea mays
aatcctaaaaccatctgcttcagccttcagctagccccaagtttagtcggccgatcgatcactgaagtagtaatggcctccgccaacagctggaccctcgagatcgcgtcgccggtggccccgcagcgcctgttccgcgccgccgtgatggactggcacaccctggcgcccaaggtcgcctcccacgtcgtcgccagcgcgcagccgctggagggcgacggcggcgttggcagcgtcaggcagttca

SEQ ID NO: 20614 - DNA, 249 bp, Zea mays
agggctgccagctttaacatcattcccagcagcaccggtgctgccaaggctgtcggtaaggttcttcctgaattgaatggcaagctcactggcatgtccttccgggttcccaccgtggatgtgtcagttgttgacctcactgtcagaatcgagaagggggcctcttacgaggaaatcaagaaagctattaaggctgcttctgagggcccactcaagggtattatgggctacgtggaggaggatctggtt

SEQ ID NO: 20615 - DNA, 248 bp, Zea mays
ggacctggggattcacggagacagcaagggccaggattgtcaatgctggtggcgagtgccacacatttgaccagcttgctcttcgtgctccacttggcgagaacacggtcttgaggggccccaagaatgcccgtgaggcagtgaggcactttggcaaggctcctggagtgccgcacagccacaccaagccgtatgtgcgctccaagggaaggaagttcgagaaggctcgtggcaggaggaacagccgt

SEQ ID NO: 20616 - DNA, 130 bp, Zea mays
cccgctatgaaacgagacgagagaagaatgagcaaggtttttgttcgcatctattgttgtccaatgatattgatatattgttccaaaaaaaaaaaaaaaaaaaaaaaagaaaaagaaaaagaaaaaagag

SEQ ID NO: 20617 - DNA, 266 bp, Zea mays
gtggattttatatctatagcatcggtgctcttgttgcttgggaaacccgcagaaaagattttgctgtaatgatgtctcatcatgtaataacatctactctaattggagtttcatatctgactggatttttccgaattgggaccatcattctcgctcttcatgatgcaagtgatgtgtttcttgagactgccaaattgtgcaaatacacagaaaaagagctgggtgctagcttgttttttggtctcttcgctatctcctggcttcta

SEQ ID NO: 20618 - DNA, 264 bp, Zea mays
ggtccaaacattgtgaagttgcttgatattgtcagagatcagcattcaaagactcccagtttgatatttgaattcgtcaacaacacagacttcaaagtcttgtaccccacattgacggattatgacatccgctactacatatatgagctactcaaggctctagattactgccattctcaaggcatcatgcatcgagatgtcaagccccataatgtcatgatagatcacgagcttcgcaaacttcggttgatagactggggctta

SEQ ID NO: 20619 - DNA, 265 bp, Zea mays
ccgctccacaggatcctctgcgccaccgcaaccgtgtgaccgcccgtgccgccggcgatcccgatccgccgacccgtcccagccccgctcgcagccatgtcgccgtcggagccgacgcgggaggagagcgtgtacatggccaagcttgcggacaggcggagcggtacgaggagatggtcgagttcatggagcgcgtcgccgctacgccgagtccaaggtcttctacctcaagatgaagggtgactaccacaggtaccttgctgag

SEQ ID NO: 20620 - DNA, 263 bp, Zea mays
catcccctccggtgatgccattttcatgaagtgggttctgacgacgtggaccgacgacgagtgcacggccatcctgaggaactgccacgccgctctgccggacggcggcaagctcgtggcctgcgagccggtggtgccggaggagacggacagcagcaccaggacgagggcgctgctggagaacgacatcttcgtcatgaccacctaccggacgcatgggagggagcgctccgaggaggagttccgccacctcggcgtcgacg

SEQ ID NO: 20621 - DNA, 268 bp, Zea mays
aggactggaggtggtggtggaaagctttctttgcttctggaacagtggccctttatgtgttcctttactctatcaactacttggtgtttgatctcagaagcttgagtgggccagtttctgctattctctacattggatactctttcgttgtctcccttgccattatgctagcgactggtaccgttggcttcctgacgtcgttctcttgtccactaccttttctcatcagtcaagattgattgaagatccagggttgtctttacacaaa

SEQ ID NO: 20622 - DNA, 269 bp, Zea mays
cgatccattccacacaaccaccactgctcttgccccagcccgccgcagagttgccagatctgctccggtcacaggagctccgactccgagccctctccaatggcggttaaggtctacgtcgtgtactattccatgtatggacatgttggcaaactagctgaagagatccagaaaggtgcctcgtctgttgaaggtgttgaagctaaaacatggcaggtccctgaaaccctccctgaggaagtgcttggagagatgggcgcaccccctaa

SEQ ID NO: 20623 - DNA, 269 bp, Zea mays
gtgatcaggacattgttgccctctctggtggccacaccttgggaaggtgccacaaagagcggtctggttttgagggggcctggactacgaaccctttggtctttgacaactcttacttcaaggaacttctgagtggcgacaaggagggtcttcttcagctcccaagtgacaaagccctgctgagcgaccctgtcttccgccctcttgtggagaaatatgctgcagatgagaacgcattctttgatgactacaaagaggcccacctcaag

SEQ ID NO: 20624 - DNA, 262 bp, Zea mays
atggattgaagagagatgtggctgcacatgtggctatgtgcgatgtgtgtcaaagagttaaggctgaacactagaggtcagctggactactgcacccactgaagatacccgagtggaagtgggaagagattggcatggattttattactggattgcctcgcacccagaaaggatatgatgctatatgggtgattgtgaatagattgactaaagtagctcattttattcctgtcaagactacttataaaggttctcagctagc

SEQ ID NO: 20625 - DNA, 260 bp, Zea mays
ggagctgagactacaaaagaatttgtggagaaactgaatcttaagcctgggcaaaaggtgcttgatgttggatgtggaattcggggaggtgacttttatatggctgagaagtatggtacacatgttgttggtattgacctttccattaacatgataatgtttgcccttgagcgttccattgggtgtaagtgcttagttgagtttgaagttgctgattgcaccacaaagacatacccagaccacatgtttgatgtcatcta

SEQ ID NO: 20626 - DNA, 255 bp, Zea mays
caagatatatcggcaaaaagaagactcgagaagaccgggcacgagaggcctcctatctcagtaatgagaatgagaagtacaagaaagctaaagactatgtgaacatgctgaaggactggtacggcaatggagcgtcgaagctgtgcgtgatctacaaccagacgggcggaaccctgcggtacgtcgacgacaaggactggctgggctacccggggccgacgccctacccgacggagatggcaacgggcagtgggc

SEQ ID NO: 20627 - DNA, 263 bp, Zea mays
ggcaccacggcgagaagggccgccggttcgggaccttcaaggagaacgcgcgcttcatccacgcgcacatcaagcgcggcgaccgaccctaccgcctccgccttattcgcttcggcgacattggccgtgatgaattccgttccgggttcgccgactcccgcatctacgacctccgccgggagcacaccgtggcgccggccgtgccggtggttcatgtacgacgacgccaccgatctgccgtggtccttggacttgcggcagaa

SEQ ID NO: 20628 - DNA, 261 bp, Zea mays
cctggctgtactgaagatcatcaagcactgtgaggagtttgcgccactttagttacaggtcaattgcttggtttggatgttggtagtgttctggaagtgaccaactgttttccgttccctatcagggaagaggatgatgaagcagatgcagatggtgccaattatcagcttgagatgatgaggtgtttgagggaagttaatgttgacaacaatactattggatggtatcagtcttgcttgcttggatcttttcaaactgtg

SEQ ID NO: 20629 - DNA, 263 bp, Zea mays
tgcaatcacaacgaacaaaagctctcgatctcaccgacaccgaggaagaagagatcaatggcgtccgagcagggagtcgtgatcgcgtgccacagcaaggctgagttcgacgcccacatgaccaaggcccaggaagccggcaagctggtggtcatcgacttcactgccgcctggtgcggtccatgccgcgccatcgccccactgttcgtcgaacacgccaagaagttcactcaggtcgtcttcctgaaggtggacgtggacga

SEQ ID NO: 20630 - DNA, 259 bp, Zea mays
gcagcggcgcacgtacgaccgcctcaagctgcacctgcccaagcagttctgcggccagctcctgcgtatgccattcccggacggctacccggagtacccgacccgccgccagttcgtcgactacctcgagcgctacgccgccgagttcaagatcaagcccgagctcggcaccgccgtgctgtctgcgcgctacgacgagacgtcgtcgggcatctggcgcgtcgtcaccaacggcggcgacatgaagtacatcttccat

SEQ ID NO: 20631 - DNA, 256 bp, Zea mays
caagaattgctaaattcacaacggaactatctaggccagctgttatattagacaaattgcgtgaactatcttggagtggtgtgcctccatatatgcgacctaatgtatggcggcttcttttgggatatgcaccgcctaataaagatagacgagaaggtgttctaacaaggaaaaggctggagtacgtggaatgtgtttctcaatactatgatattccagatagtgaacgctcagatgaagaaattaccatgcttcg

SEQ ID NO: 20632 - DNA, 223 bp, Zea mays
gagaagtttgcttcagtcccatgtggcggcggcggtgtggctgttgcggcaggtgcacctgctgctggcggactgctcctgcagctgaggcaaagaaagaagagaaggtggaagagaagaaagaaagcaagtgagccattcaccaacctttttttcctttttttttcttttcaagtcttagcagatacatatatgccggctgctcgctgtaaagtgctgattc

SEQ ID NO: 20633 - DNA, 263 bp, Zea mays
cgcacgcgttcgcgctgttcgtggcggtgtcggtgggcgcgaacatctccggcgggcacgtgaacccggccgtgaccttcggcgccttcgtgggcggcaacatcaccctgttccgagggctcctgtactgggtggcgcactgctggggtccaccgtggcgtgcttcctgctccgcttctcgacgggcgggcaggccacgggcaccttcgggctgacgggcgtgtcggtgtgggaggcgctggtgctggagatcgtgatgacct

SEQ ID NO: 20634 - DNA, 261 bp, Zea mays
cgtcctcctccattaatattggcagcaagctaggatcatcagcatctgagcttattattactaaatcgatcggttgccatggcggggatgagagtcggcaagctggcgctggctgcggtgctgctgtgcgcggcggcggccatggccacggcgcacaggcctccggcgtgcgcgccacctacaacttctacaacccgcagcagaacaactgggacctcaacgccgtgagcgcgtactgcgcgacgtgggacgccagcaagc

SEQ ID NO: 20635 - DNA, 263 bp, Zea mays
aacctttcttctcagttctcctttcagcaattttccttggggagttgccgacgccatgggttgtgttgtctcttcttccgattgttggtggtgtagctttggcatcccttactgaggcctcctttaactgggctggattttggagtgcaatggcttcaaatgtaaccttccagtcaaggaatgtgctaagcaagaaacttatggtgaagaaagaggaatctctcgacaacattaacctattctcgatcattacagtcatgtca

SEQ ID NO: 20636 - DNA, 260 bp, Zea mays
accaggatgttgatggaagggcaacagatgtagctctagggtggtcagtagctttaggttctcctttcacatttgctactactctagagcaggagtaccggagtgacatttttggcgagcgaggtattttgcttggtgctgtccatggcatggtggaggctcttttcaggagatacacagaacaaggaatggacgaggactcagcatataagaatactgtagagagcatcactggaattatatcgaaaactatttcaaag

SEQ ID NO: 20637 - DNA, 264 bp, Zea mays
ttcaaatttctcattgttccctcagttcatgtttaatctgcggcgttcacaatttgttcaggttttcaataacagtccagatgagacagcttatttcaggatgttactcaatcgcgagagtatcactaactcggttgccatgatccagccttccttgatatcattttcctttgattcacctccatctccggtgtttctagatgtggcatcattagcggcagatcgtatactgctacttgatgcgtactttagtgttgtcatttt

SEQ ID NO: 20638 - DNA, 261 bp, Zea mays
ctctacctactggagtagggatcacgccgcacgagccctttccgccgccgccaaaatggtgaacgttcctaagaccaagaagacctactgcaagaacaaggagtgcaagaagcacactctccacaaggttactcagtacaagaagggtaaggatagcctgtctgcccagggaaagcgccgttatgaccgcaagcagtcaggatatggtggccagaccaagcctgtcttccacaagaaggccaagaccaccaagaaaatcgt

SEQ ID NO: 20639 - DNA, 260 bp, Zea mays
ctatcattgttcgcaggaactacctccactttgtaaagaaataccagaggtatgagaagaggcactccaacattcctgctcacatctctccatgcttccgtgtgaaggaaggtgaccatgtcatcattggccagtgcaggcccctgtcaaaaactgtgaggttcaatgtcgttaaagtcattccagctggatccgcagctgctggaaagaaggccttcacagcagcctgagtttatagactatgttccatgagtagtcta

SEQ ID NO: 20640 - DNA, 259 bp, Zea mays
catttttgctggacaaaaacggtttccccactttcgttagtggcgttccacctgatgcatttagtgaaacgcgtcaactatggaacagtccattgtacgactggaaagctatggaagcagatggtttttcatggtggataaagaggattaaacgtgcccttgatttgtatgatgaattccgtattgaccatttccgggggcttgcgggtttttgggcagtcccttctgatgcaaaagtagcactggttggaagctggag

SEQ ID NO: 20641 - DNA, 261 bp, Zea mays
ccacctgtgacccacgcgttcctcagatcagatcggcaaggccaatccgaaatctcgagctttcgcgccggcgaccacagcaaagaggaggccacagcacgacagcgccccagggttcctactctcgtcgcagcggcagcagtgaggggaagatgtcgtcggtgttcagcggcgatgagaccgcccccttcttcggcttccttggcgccgccgccgctctcgttttctcatgcatgggggcggcgtacgggacggccaaga

SEQ ID NO: 20642 - DNA, 253 bp, Zea mays
gactctccgtggtttatatccggtggagactatttcaacagtgggcagaatttgtgctgaggcagagaaggtatttaaccaagatttatactacaagcggactgtgaagtatgtgggagaacctatgacccacttggagtctattgcttcttcagcagtgcgagctgcaatcaaagttaaggcatcagtcatcatttgcttcacctcttctggacgagctgcaaggctcattgctaagtacaggcccagcatg

SEQ ID NO: 20643 - DNA, 252 bp, Zea mays
aaatgaccatttcaagactgcgcttggaacaagcaacccatctgctcttcgtgaaactgttgtcgaagtcccaaatgtctcttgggaggatattggtgggctggagaatgtcaagagggagctccaggagactgttcaatatcctgtggagcatccggagaagttcgagaagtttggcatgtctccatccaaaggagttttgttctatggtcctcctggttgcggtaagaccttgttggcaaaggcaattgc

SEQ ID NO: 20644 - DNA, 245 bp, Zea mays
cctaacaccatctgcttcagccttcagctagccccaagtttagtcggccgatcgatcactgaagtagtaatggcctccgccaacagctggaccctcgagatcgcgtcgccggtggccccgcagcgcctgttccgcgccgccgtgatggactggcacaccctggcgcccaaggtcgcctcccacgtcgtcgccagcgcgcagccgtggagggcgacggcggcgttggcaccgtcaggcagttcaac

SEQ ID NO: 20645 - DNA, 249 bp, Zea mays
acaaacttggcattcttgcctgttcttaattattgccaggacaggagaaacaaagatgaggcctcagctgatactcgtcggcactctggctgttctcgccatcctcgcagctctcggcgaaggctcgtcgtcctggccctgctgcaacaactgcggtgcttgcaacaagaagcagccgccggagtgccagtgcaatgacgtgtcggtcaacgggtgccatccggagtgcatgaactgcgtcaaggtcgg

SEQ ID NO: 20646 - DNA, 251 bp, Zea mays
ccaccgcacctaccattctggagaggagaggaacagagccaagaaacaagcccggaagatggcaggcggcggggtggtgaagcacatcctgctggcaagcttcaaggaggaggtgacgcaggagcgcctggacgagctcatccgcggatacgccgcgctcgtcggcgtggtcccctccatgaaggccttccactggggaactgatgtgagcatagaaaacatgcatcaagggttcacgcacgtcttcgagt

SEQ ID NO: 20647 - DNA, 254 bp, Zea mays
gcgacaccatcgacaatgtcaaggccaagatccaggacaaggaagggatcccgccggaccagcagcggctgatctttgccgggaagcagctggaggatggccgcacccttgcggactataacatccaaaaggagtctacgctccacctcgtgcttaggctccgcggtggaatcattgagccctctctgcaggcgctcgctcgcaagtacaaccaggacaagatgatctgccgcaaatgctatgcacgactgcac

SEQ ID NO: 20648 - DNA, 251 bp, Zea mays
tattggtcgaattgctgtccgtgacatgaggcaaacagtggctgtcggagtcatcaagagtgtggagaagaaggacccaactggagccaaggtgacgaaggctgctgccaagaagaaatgatctatctgtctggagctgtgcttgcatgtaggttacctcgtggaagcataaaatatctcgtcttgttgacatccttgcagttgtcgcgtgaacaagtaatctatgatggcaatgtttgcctggtcatgaa

SEQ ID NO: 20649 - DNA, 251 bp, Zea mays
cggagtgcatgtccgctatcgccggctcgtacggctacattgctcctgagtacgcctacacgctgaaggtggacgagaagagcgatgtgtacagcttcggcgtggtgctgctggagctcatcgccgggcgcaagccgtcggggagttcggcgacggcgtggacatcgtgcactgggtgcggacggtgaccgggtcgagcaaggagggcgtgatgaagatcgccgacccacggctctcgacggtgcctctgt

SEQ ID NO: 20650 - DNA, 257 bp, Zea mays
gaagagggttggacttacgggattcaactgccggtgtgggaacttgtactgcgcactccaccgctactccgacaagcacgactgcaagttcgactaccggactgctgccagggacgccattgccaaggctaatccggtggtgaaggcagacaagctcgacaagatctatggggggttccctacggttgggtatcaggaagattgtaaaccgcggtaactcgtcatgcggaactgctgccttgccccccgcgcctttc

SEQ ID NO: 20651 - DNA, 248 bp, Zea mays
ctggatttgttgctttcaaatctgctgaagatgctaaccgagctcttacggagatgaatggcaaaatggttggaagcaagcccctttatgtagctcttgcgcacgtagaagaagacagaaaggcaaagctacaggcacaattttcacaaatgcgtcctgttgcaatggcgccttcagtaggtcctcgcatgcccatgtttccacctggtgtccctggagttggtcagcagctgttctatggtcagcca

SEQ ID NO: 20652 - DNA, 260 bp, Zea mays
ctcactactacatacatcaccaactaggatcgatctctcgacagcaaatagctagcaatggagaagtacaccaaagccctagcgtcattgctcagcatgctggtgctggcacctctcctcgccatggccaccgacccagaccccctgcaggacttctgcgtcgccgacctcaacggcaagctgtcagtgaacgggtacccatgccagccgccgtcgtcggccggcgaccagttgctcttctcgagcaagatcgccacggg

SEQ ID NO: 20653 - DNA, 250 bp, Zea mays
gatgaccctgacggccttgggtcttggactagcactcctcgctgcggccagcccgtgcttggggttggggagcagcggcacgacagcgacggcgcgtccgtgcctagcgtcgtcaccgaggcgttcttcgacggcatcaggtcccacgcacgggacggatgcgagggcaagaatttctacacgcggagccgttcgtgagcagcgccgggctgtcccgggcttcgcgcacggcggcacggaggcggagggc

SEQ ID NO: 20654 - DNA, 263 bp, Zea mays
tgacgaggaagaaaccccaactcctaaaaagccagaggcaggcaagaagagaggtgctgaaaatgctctgaaaacgcctctttctgataagaaagcaaaggttgccacaccgccagcccagaaaacaggtggcaagaagggtgccacccatgtggcaactccacacccagcaaaaggcaagacccctgcaaacaatgacaaatcaacggagaagtctccaaaatctggtgggtcagtcccttgcacatcatgcagcaagacat

SEQ ID NO: 20655 - DNA, 261 bp, Zea mays
caagatcctgtggcgcaccatccgcgggatgattccgcacaagaccaagatgtgggaggcggctctggcgaggctcaagacgtacgatggcgtaccgccgccgtacgacaagactaagcgcctggtcatccctgacgctcttaaggttctgaggctgcaaccaggacacaagtactgcctccttggggagctttctaaggaggtcggatggaactaccatgacaccatcagggagcttgaggagaagaggaaggagaaggc

SEQ ID NO: 20656 - DNA, 262 bp, Zea mays
gcaagcgcctcgccctcgcgctcaagaaggaatttgatacggcatatggtccagcttggcattgcattgttggaacaagctttggttcctatgtcactcactctctgggcggtttcttgtacttctccgtcgacaaggcctatattctcctcttcagaaccgctgtcgagccattagcccatccgcgatgaggggccatgaaacagtctactagctagcgcattctgtattcgacatttaactgtagaagggtaaggagagt

SEQ ID NO: 20657 - DNA, 259 bp, Zea mays
ccatggccaacgccgggcccaacaccaacggctcccagttcttcatctgcaccgtcgcgaccccttggctcgacggcaagcacgtcgtcttcggccaggtcgtcgagggcatggacgtcgtcaaggccatcgagaaggtgggcacccgcaacggctccacctccaaggtggtcaaggtcgctgactgcggacagctctcctagatctctctgatctggtctgttcggccgccctccctccgtcatcgtcgactcccctg

SEQ ID NO: 20658 - DNA, 219 bp, Zea mays
cacctcgcttcgctagaggaatagtctagcagcttctgttgcctccaagttgtccggagaaatgagttgaagcagtgtgagagggccctgagacgatggcgaacctgttcgtcaagcaggcagagcagtacgtggcgacgcggccggtctacccgccggagctcttcgagttcatcgcgctccaggacccctcgccgctgcatggcctggggtgtcggc

SEQ ID NO: 20659 - DNA, 255 bp, Zea mays
ggcacggtgaagttcatcgccggcgacatgttcgagtctatcccggctgcagattgtgtcttgcttaagtatgttctgcattgctgggacgacgaaagcagcgtcaagatcctccggcagtgcaagatagcgatccctgcaagagacgccggagggaaagtggtgatcatgaacatggtggtcgggtacggttcgtcagataggtttgtcaaagagacgcaggtgatgtgcgacatgtggatgatgcggtacgtt

SEQ ID NO: 20660 - DNA, 254 bp, Zea mays
caaggtccaagcaatcgtcaagaagtatgacattcttttcatagcagatgaggtgatcactgcatttggaaggctgggaactatgtttggatgcgattactataacatcaagccagatctagtttcactggccaaggctctttcaaacgcctacgtacccatcggggcaactcttgttagcccagagatatcagatgtgatccattcccagagcaataagcttggttcatttgctcatggattcacgtactccg

SEQ ID NO: 20661 - DNA, 261 bp, Zea mays
cttgcaatcacaacgaacaaaagctctcgatctcaccgacaccgaggaagaagagatcaatggcgtccgagcagggagtcgtgatcgcgtgccacagcaaggctgagttcgacgcccacatgaccaaggcccaggaagccggcaagctggtggtcatcgacttcactgccgcctggtgcggtccatgccgcgccatcgccccactgttcgtcgaacacgccaagaagttcactcaggtcgtcttcctgaaggtggacgtgg

SEQ ID NO: 20662 - DNA, 260 bp, Zea mays
aagaagagttggtaggcttcttcaatgatcatgtcaaggtcaatgcaccacaaaagaagattcttagtatacaagtgtacggtggtctccattctgccgagtacgaaaccatagtgcaaaatgctccgccaccgccgtcgtgtgagataactgatatttatggcttcaggaggtcgaggcctttatatggatcattcaggggaggcgttggtcagatgaagctatagttcaacattttctcatcattctgtaaaattctg

SEQ ID NO: 20663 - DNA, 237 bp, Zea mays
caaaaatacacgacaacaactggatgatatacgatctaaacttctggataatctttcaaaacttcgacatgctcctagtgtccactttcaagagagagttcctgacacagaaatacctgagcaagatgaagaccaagatgatccagatgaacgacatgatcctgactctgatatggaagtggatgatcacaaggctgtggaagagtcatcgaggaggagcattctaggtataaaaat

SEQ ID NO: 20664 - DNA, 247 bp, Zea mays
aatgattccatcgacgtcgcggagtcccctttcggaataacagatgggaagacatagggtaaatacagcaaagcgaacgcgacatgtaggccacagtagtcagtctgttgttccgaaagatgtgtatatatgtattagcagcatgattgttctgattatctttttactgattttcgatggtaggtctattccatcaagtatttaactaatcatttgttgctgttagtataggtcttttgttctttta

SEQ ID NO: 20665 - DNA, 248 bp, Zea mays
ccctgcttccgtggttatggcaggcgtaatggtgagcgcaggaggaagtctgtccgtggttgcatcgtgagccaagacctatctgttatcaacttggtgattgtgaagaagggtgagaatgatctgcctggtctgactgacactgagaagccaaggatgaggggtcccaagagggcctccaagatcagaaagctgttcaaccttaacaaggatgatgatgtacgcaagtacgtgaacacataccgtag

SEQ ID NO: 20666 - DNA, 248 bp, Zea mays
gcccgatcttgcatcagctagctaactaagcaagtaagctaagctagccctaggcaacgagccgaccgtcaagctcatcgcagaccacgagccatggcctccaccaacagctggactgttgagatcgcctcgcctgtcgccgcgccggcctcttccgcgccgccgtgatggactggcacaccctggcccccaaggtcgcctcccacgtcgtcgccagcgcccaccccgtggagggcgagggcggcgtc

SEQ ID NO: 20667 - DNA, 250 bp, Zea mays
gtttgagtgatcaggacattgttgccctctctgagtggccacaccttgggaaggtgccacaaagagcggtctggttttgagggggcctggactacgaaccctttggtctttgacaactcttacttcaaggaacttctgagtggcgacaaggagggccttcttcagctcccaagtgacaaagccctgctgagcgaccctgtcttccgccctcttgtggagaaatatgctgcagatgagaaggcattctttg

SEQ ID NO: 20668 - DNA, 248 bp, Zea mays
ctttgcaagtatagtctctctgctaagcgaagtgagttcaagctagtctcggcggctctagaagacgatgggcaaggacgacgtgatcgagagcggcgctggcggcggcgagttcgctgccaaggactacacggaccctcccccggcgccgctgatcgacgcggcggagctggggtcctggtcgctgtaccgcgccgtgatcgccgagttcatcgccacgctgctgttcctgtacatcacggtggcca

SEQ ID NO: 20669 - DNA, 250 bp, Zea mays
tgatgaggccgtcgtcgccaggattgggccttggggcggggttggaaatgctctccatgacatcgcagagaggccgcatcgcctgcacagagtgacgatcttcagcgggacgatcgtaaactcgctggagtatctgtacagcgatggcgacgggcagcagcacaccaccggtccgtggggcggctgcggaggaactggtcgaaagattcatcttgcccctgaagagttcatagtggaagttactgggaca

SEQ ID NO: 20670 - DNA, 264 bp, Zea mays
gtcgaagcgaggtaggggaggttcggctgggaacaagtttcgcatgtcactgggtctaccggtggcggccacggtgaactgcgcggacaacacgggcgccaagaacctctacatcatctccgtcaagggcatcaagggccgcctcaaccgcctcccgtccgcctgtgtcggcgacatggtcatggccaccgtaaagaagggaaagcccgacctcaggaagaaagtgatgcccgccgtcatcgtccgccagcgcaactcgtggcg

SEQ ID NO: 20671 - DNA, 264 bp, Zea mays
  unsure (1)..(264): unsure at all n locations
atcgcgcactnggagttcttctacgaagaggcgccggaaaccatgaagagcacgtgcacgtcgctcgcgctgctcaccatcgccctgggcagctacctcagctccttcatctacgctatcgtggcagcattcacggccacggcggacagtcccggatggatctccgacaacctcaaccagggccatctcgactacttcttctggaccatggccgccatttcaacgctcaacttcgtcgtgtacagcgtgttcgccaggaactac

SEQ ID NO: 20672 - DNA, 260 bp, Zea mays
ctctacgttgcaattctaattgatatcctgccaagtattcttcgagaggtccattcaaaaaaaagtattcttctaggcttgtgcacttctgtcactgttttgtaccccgtgtttaatttctgggcggtatgatatcaagagtacccagatgtatccgtcgttgctggtctaaacactaatagggtgtttggtctgaggaatgggctagtccattctcttctcgctcttttttttatttggtttattaaatagaatgagtt

SEQ ID NO: 20673 - DNA, 261 bp, Zea mays
gaacttttcagtctccatggccttatatgcattggttctcttctaccacttgtttgctaaagagctggcacctcacaagcctcttgcaaagttcttgtgcatcaaagggattgtcttcttctctttctggcagggttttgcgctcgatgttttaacccaagcaggcgtgatcaaatcccaccatttctggctggacgtggagcacatccaggaggcgatccagaacgtcctggtgatccttgagatggtggtgttctccgt

SEQ ID NO: 20674 - DNA, 260 bp, Zea mays
caacgacctccgccgggagcccaccgcggcgccggccgtgccggagttcatgtacgacgacgccaccgacctgccgcggtccgtggactggcggcagaagggcgcggtgacggccgtcaagaaccagggccgctgcggcagctgctgggccttctccacagtggtggccgtggagggcatcaacgccatacggacagggagcctggtgtcgctgtcggagcaggagctgatcgactgcgacagcgacgagaacgggtgcc

SEQ ID NO: 20675 - DNA, 258 bp, Zea mays
tgatgctgtccctgtcgagggcgatcgggaggcggctcttctcgtccgccgaggccgcgtcgacggctgcggtgaggacggcgcagaacccgctcgaggagttcttcgaggtcgagcggacaccgaggagggcaagcctcctccccactacggtcgcagctggaaggcttctgaactgcgactaaaatcttgggatgaccttcagaaattgtggtatgttcttctaaaggaaaagaacatgctaatgacacagcgtca

SEQ ID NO: 20676 - DNA, 257 bp, Zea mays
ccacctccaaggctcttggtgtagcttgccactctcaccaatcaagttttcatgtctgatctcgacattcagatcccaactgccttcgatcccttcgctgaggccaatgctggggactctggtgcggcacagggtcaaaggactacgttcacgtgcgcatccagcagcgtaatggtcgcaagagcctgactaccgtccagggattgaagaaggagttcagctacagcaagatcctcaaagatctcaagaaagagttc

SEQ ID NO: 20677 - DNA, 253 bp, Zea mays
ggtttcgtgggtgggcggatcgagatggcggcgtcggatgttgagtaccgctgcttcgtcggcggcctcgcctgggccacggacgaccactccctccacaacgccttcagcaccgacggcgagggcctcgagtccaagatcatcctcgatcgggagacgcagaggtcccgcggcttcggcttcgtcaccttctccacggaggaggcgatgcggaacccatcgagggcatgaacggcaaggagctggacggccg

SEQ ID NO: 20678 - DNA, 255 bp, Zea mays
gtaagatcacccgcgaacctggtcctgtcaagggaggatccactgttattgccttcgcacaggatcctgatggctacatgtttgagcttatccagagggctgacacacctgagcctctttgccaggtcatgcttcgtgttggtgaccttgagcgttctatcaagttttatgagaaggccctagggatgaagctcctaaggaagaaggatgtacctgattacaagtataccattgccatgttgggctatgctgatg

SEQ ID NO: 20679 - DNA, 235 bp, Zea mays
cttggttgaaatgagatagcggctcctgagaagaggcagcgggttccgtcggcgtataacagattcatcaagtgagctcgctcgatgatcgacgacctcctcagatcagcagcttacgtttggttcattctaccaaataattaaacgctgtgtacgtgtgtgcagggaagagattcgcaggatcaaggcgaacaaccccgacattagccacagggaagccttcagcacagcagcc

SEQ ID NO: 20680 - DNA, 255 bp, Zea mays
gcattggatgcctgttctggcttttggccaggatggttctgcagatgaggggcactatcctccctgggcacaagtgggaggtcatggtggatttgttcttctacagggacccagaggaagcaaaggagcaggaggaggaagctgctgttgcccctgagtttgccgcaatcactgattaccaaggagctgatcagtggggtggtgaccagtggacctctgatgtgactgcgccgcctgttgctcctactggtgctg

SEQ ID NO: 20681 - DNA, 256 bp, Zea mays
gcaatgacgggtgaagtaacattaactggaagaatcctcccaatttgcggggtgaaagagaagacgattgcggcaaggagaagtgcgataaagacgctcatatttccggcagcgaataaaagggactttgacgagcttgcttctaatgtgaaggaaggactggaagttcattttgttgacacatacagtgaaatatatgatttggctttccagagtgacgccgggactgagatgatttagctttacattacaggat

SEQ ID NO: 20682 - DNA, 257 bp, Zea mays
gcctcaaccccaaaccaatccgtcgcagacactcaaggtcgcaggatgccgccgccgcgtgagcaccaccagccccaggacgaagaggacgacgataccgcagcgttgtcaagctcatcagcgccgagggcttcgacattcgttgttgacaggaaggccgccatggtctccaacaccctccgcaacatgctcacatccccaggcggcttctctgagacgcgccagggcgaggtccgcttcccagagatccccaccaa

SEQ ID NO: 20683 - DNA, 258 bp, Zea mays
ggcggaccaggtaagcagcagcaggaaccctagcaccgccgcatccgcagccatgggtatcgacctcgttgccggtgggaggtacaagaagaccaagcgcacagcgccgaagtccgacgatgtttatctcaagctccttgtcaagctctaccgtttcttggtcaggaggaccaagagcaacttcaatgctgtcattctcaagaggctcttcatgagcaaaaccaatcgcccaccaatctccatgcgccgccttgtcaa

SEQ ID NO: 20684 - DNA, 254 bp, Zea mays
ggacgcgtggcttcaaggagggcgtgctgtatgccaagaaggactacaacctggcgaacacccgcagatcgatgtgcccaacctccaggtgatcaagctcatgcagagctttaagtccaaggagtatgttagggagaccttctcctggcagtactactactggtatctcaccaacgatggcattgagcacctacgcaactacctgaacctcccgtctgagatcgtgcctgccacgctcaagaagtctgccaagc

SEQ ID NO: 20685 - DNA, 253 bp, Zea mays
atcagtatcctgaatatacaggttggccttatccgtaaagcatggaagcatccatctgctgacagccttttagttgaggagatagatttgggagatggtaatgtgcgtcaagttgttagtggtcttgcaaagtattgcagcccagatgatcttactaatcggcatgttgtcttgatcacgaatgtgaagcctggaaagctgcgagatgtaatgtctgctggattggtcctttgtgcttcaactgaagatcatg

SEQ ID NO: 20686 - DNA, 253 bp, Zea mays
ggaacttcgccagttgccagatgataccaacacctacaagactgtcggaaaagtgtttattctggagccaaagtcagttctgttcaatgagcaggagcaaaagcttaatgacagtgagagtgcgatagcttcaatgcagacatccaaagactaccttgagaaacagcagggcgaagtggagaacaatattagggagctgcttcaacaggacccaggacttgcgcgtcagatcctctcaatgaccgttcaatga

SEQ ID NO: 20687 - DNA, 253 bp, Zea mays
gcgaccactcccaagtattccaaggcccgttacgatgagattgtgaaggaagtttcatcctacctcaagaaggttggatacaaccctgacaagattgcctttgtccctatctctggttttgagggtgacaacatgattgagaggtccaccaaccttgactggtacaagggtccaaccctgcttgaggctcttgaccagatcaccgagcccaagaggccttcagacaagcccctgcgtctgcccctccaggatg

SEQ ID NO: 20688 - DNA, 250 bp, Zea mays
gcaaggatccaccgcggacttcgaggacatcggccacagcgcctccgccaaggagctcatgccccagtactgcatcggcaaggtcgacgcggctaccttcccggccaagcccgcctacgtcgtcaccaaggacgacgccaggtcgtccgagcatggccgcgacgagcgccggcgcttgggccacgctcctgcagctcgccgcgcccgtcctgctgctggcgctggccttcgcgctgcagcagaactatgc

SEQ ID NO: 20689 - DNA, 253 bp, Zea mays
cttgcatcaaacacattccttgttgggcattcagtgactctcgcggatatcgtgatgacatgcaatctctgtatgggatttagccgtatcttgactaagagttttacctcagagttccctcatgttgagaggtatttctggaccatggttaaccaaccaaacttcaaaaaggtcattggtgacgttaagcaggcagaagctgtgccacttgttccacagaaggctgctccagccaaagtgcagaagcctaagg

SEQ ID NO: 20690 - DNA, 260 bp, Zea mays
ccaggatccaaactccataagaaggaaacttgtgaggctgttaccatcattgaaacccctcctcttgtcattgttgggctcgtggcatatgtgaagactcctcgtggcctccgcacactcaactctgtttgggcccaacatcttagcgaagaagtgaggagaaggttctacaagaactggtgcaagagcaagaagaaggctttcacaaagtatgctctcaaatatgaaaatgatgctggcaagaaggaaattcagctgca

SEQ ID NO: 20691 - DNA, 258 bp, Zea mays
gcaacgacgcgtgcttggagcggttcctgcggtcgcggggggacagcgtcaagaaggcggcgaacacctgaggaccgtcctctcatggagggagagcgtcggatctgatcacatcatggccgacgagttctccgccgagctcgccgacgggtggccttcgtctccggacacgacgacgacggccgcccagtcgtggtgtttcgaatcaagcaggactaccccaagttccagtctcagaaatcgttcgtgcgcctgctg

SEQ ID NO: 20692 - DNA, 257 bp, Zea mays
ccgcgccgccgtgatggactggcacaccctggcgcccaaggtcgcctcccacgtcgtcgccagcgcgcacccgtggagggcgacggcggcgttggcagcgtcaggcagttcaacttcacctcagtcatgccgttcagcttcatgaaggagcgtctcgagttcctcgacgcggacaagtgcgagtgcaagaacacgctcatcgagggaggcggcatcggcgtcgccatcgaaacggcgacgtcgcacatcaaggtgga

SEQ ID NO: 20693 - DNA, 250 bp, Zea mays
gcgctggagtggagttgactaagaccttgttcgtttctgccggattggtgggtcctaacgattcctgaccggattgtttctctaatttatataaactttgattagctggaacgattccgggtgcaatccgacggaaacgaacaaggcctaatgttgtacgtgtactgtggcatggcagaaccgtccggtttaacccaatttcgggcacacctgccagctatttatcactaagtgcaccagagattatatc

SEQ ID NO: 20694 - DNA, 252 bp, Zea mays
actgactctcccatgcggtatgtcgatatcggcatcccagcgaacaacaaggggaggaacagcattggatgcctgttctggcttttggccaggatggttctgcagatgaggggcactatcctccctgggcacaagtgggaggtcatggtggatttgttcttctacagggacccagaggaagcaaaggagcaggaggaggaagctgctgttgcccctgagtttgccgcaatcactgattaccaaggagctgat

SEQ ID NO: 20695 - DNA, 251 bp, Zea mays
catgatctcatctggtcagccagtgaatgagtacatcgactcagctgtgagacacgtcctcctcagacagggtgttctgggtatcaaggtgaagatcatgcttgactgggacccgaaggcaaggttggcccgatcacccctcttccggacctggtgaccatccataccccgaaggaggaggacgagctgcgccctcctgtcttggcagctgaggtctaaggtcccaacagcgtcctcgaaatggcagtttg

SEQ ID NO: 20696 - DNA, 250 bp, Zea mays
tgattcccctatgcgctatgttgatatcggcattcccgccaataacaaggggaaacagagcattggttgtctgttctggctgctcgcccgaatggtcctccagatgcgcggtacaattcttccaggacacaagtgggacatcatggtagatcttttcttctacagagacccagaggaagcgaacagcttggaggaagaagaggctctggttgcacctgactatggcgcggttgcagaatacactgcacca

SEQ ID NO: 20697 - DNA, 251 bp, Zea mays
acgctcctttctttctcggaggcgacactcgaactcgaatccctcatccagcctggcgctggcgtcgccggtcgccgccgctcgattgcctccgcctgaatatcccttgccccataaggcctgaccttgaaagcctcgcctcttgatcccggcggcggcggaggggagggcgatgccgaagcggacgacacacacctactcgagcgaggacgcactgccggagggccccgagtccgaccttttcgtatact

SEQ ID NO: 20698 - DNA, 251 bp, Zea mays
aagttggaacaatgattgagatccccagggcagctctggtggctgatgagatagcggacaggctgaattcttctccttcggaacgaacgacctgacgcagatgacctttgggtacagcagggatgatgtggggaagttcattcccgtctatcttgctcagggcatcctccaacatgaccccttcgaggtcctggaccagaggggagtgggcgagctggtgaagtttgctacagagaggggccgcaaagcta

SEQ ID NO: 20699 - DNA, 249 bp, Zea mays
ctggaaggtttagcactctatgctgaccctgattttaaggtgcttgctgcatcatatccttactttgcgaaaaggctactgactgatcccaacccatatctcagagatgctttaattgagcttgtattcaaggatggaaaattcagatggaataggcttgaaaatcttcttgttcaagggcgccaagatagggagtttgcagccaaagatgcactgcagcctgttctaaagcttctccttggtcctggt

SEQ ID NO: 20700 - DNA, 252 bp, Zea mays
gcgagatcaacaagagcaacgcctactgcgacgcaagcaacaggcagtggccgtgcgcggcggggcagaagtactacgggcgcggcccgctgcagatctcgtggaactacaactacgggcccgccgggagggacatcggcttcaacgggctcgccgaccccaacagggtggcgcaggacgccgtgatcgcgttcaagacggcgctctggttctggatgaacaacgtgcaccgcctgatgccgcaggcttcgg

SEQ ID NO: 20701 - DNA, 254 bp, Zea mays
gacccagcagctattgtggtcgtccctcagccgcgtcgcaccgcatcgcattctacgattcgaagctctctctgctcgcagccatggcgaagaattacccaaccgtgagcgccgagtacagcgaggccgtcgagaaggccaggcgcaactccgcgccctcatcgccgagaagagctgcgcgcccctcatgctccgcctcgcgtggcactccgcggggacgttcgacgtgtcgtcgaggaccggcggtcccttcg

SEQ ID NO: 20702 - DNA, 246 bp, Zea mays
tgcttggtgatgcccagcatgttgaggaggccgagaagatgggacttgactacatggatgttgaggctctcaagaaaatgaacaagaacaagaagcttgttaagaggcttgccaagaagtaccatgctttcttggcatcagaggccatcatcaagcagattccccgtctccttggtcctggtctcaacaaggcaggcaagttcccgaccctggttactcaccaggaatccctcgagtccaaggtga

SEQ ID NO: 20703 - DNA, 248 bp, Zea mays
agccttcctactgtcccgatggcccgcacgaagtagacggcgaggaagtccactggcggcaaggcgccaaggaagcagctggccaccaaggcggcgcgcaagtctgccccggcgaccggcggagtgaagaagccccaccgtttccgccccggcaccgtcgcgctccgggagatccgcaagtaccagaagagcacggagctgctgatccgcaagctgccgttccagcgcctggtgcgtgagatcgccca

SEQ ID NO: 20704 - DNA, 247 bp, Zea mays
gaccaaggtggcggaggcgaggcactgcctgtcgcagagccaccggttcaagggcctgtgcatgagcagcaacaactgcgccaacgtgtgccagaccgagaacttccccggcggcgagtgcaaggcggagggcgccacgcgcaagtgcttctgcaagaagatatgctagtagtagcctaggctttgcttgctggcacaagcaggtcgtcggcacgcaacgcaattcaagcatatcggtcctcctccc

SEQ ID NO: 20705 - DNA, 246 bp, Zea mays
  unsure (1)..(246): unsure at all n locations
ggtggccgggcctcgcccggagacgggcctcgagaagctccgcaaggccaccaccgcccgcccgctcgtcatcaacaaagacgcggacggcggcagctacaagcgggcgcagtcgacgccgtcgaccccgacgacgccggtgacgccgtcgtcgtcgacgagcncgcgcggctccggcaacgtgtggcgcacgtcttccacccggggagcaacctggccaccaagggcatgggcgccaacctcttc

SEQ ID NO: 20706 - DNA, 244 bp, Zea mays
atttatcaccatgtggttggtggtgttctaaacccgaatgctgcgtaccttatccttcgaggcatgaaaacacttcatctccgtgtgcaatgtcagaataacactgctcttcggatggcccagtttttagaggaacatctaaagattgcccgtgtctactatcctggcttgcctagccaccctgaacatcacattgccaagagtcaaatgactggctttggtggtgtggttagttttgaggttg

SEQ ID NO: 20707 - DNA, 247 bp, Zea mays
attgcataaagcagtatgaaatgaatggcagagttgctgattctatgcttgtgaatactgcacttatgttgatctatatcactaagttcttttggtgggaatctggatattggtgtactatggacattgctcatgatagagctggtttctatatctgctggggatgcttggtatgggttccatccatatatacttcccctggaatgtaccttgtaaaccaccctttgaatttgggcccccagctagc

SEQ ID NO: 20708 - DNA, 278 bp, Zea mays
cccacgcgtccgccctccgagcctcagttcgcatccacgcgcgccgccgccgcctcgccggtcgacgctcaccgcgcaccatggcggaacagactgagaaggctttcctcaagcagccaaaggttttcctcagctcaaagaaatctggcaagggtaagaagcctggcaagggcggcaaccgattctggaagagcattggccttggcttcaagactcccagggaagcaatcgaagggacctacattgacaagaaatgcccattcactggaactgtttct

SEQ ID NO: 20709 - DNA, 272 bp, Zea mays
atctcgtcgtacagagccgaaagctggagcttccaatggcgggagacaacgacctgaaggtgctcggcgtgtggacgagcccgttcgtgatccgggtccgcatcgtgctcaacctgaagggcctggcgtacgagtacgtggaggaggacctcagcaacaagagcgcgctcctcctggggtccaacccggtgcacaagagcgtgccggtgctcctccacgccgggcgcgccataaacgagtcccaggtcatcctgcagtacatcgacgaggtg

SEQ ID NO: 20710 - DNA, 270 bp, Zea mays
ccaaagttcctgaagaacggtgatgctggtatggtgaagatgataccgaccaagcccatggtggtggagacgttctcagcgtatcctccccttggtaggtttgctgtccgtgacatgaggcagacggttgctgttggagttatcaagagtgtggagaagaaggacccgaccggcgccaaggtgaccaaggcggctgccaagaagaaatgatgcgatcctgcgcctgctttagcaatacctagttttcatcatcacaagttttgtttgtga

SEQ ID NO: 20711 - DNA, 272 bp, Zea mays
cctcaacgaccgcgtccagcgggagctcaccgactggctgctctggctcaagtcgtccgacctgggcttcgacgcctggcgcctcgacttcgccaagggctactcccccgaggtcgccaaggtctacgtcgacgccacggccccgaccttcgccgtcgccgaggtatggaacagcatggcgtacgacggggacaacaagcccgagtacgaccaggacccgcaccggcaggcgctggtggactgggtcgacagggtgggcggcgcggcgtcgc

SEQ ID NO: 20712 - DNA, 271 bp, Zea mays
agcattgatgcgtacagaataaattcagatccacatgacataatggcagaggtctacaaaaatggtcctgtagaagttgctttcacagtttacgaggatttcgcacactacaaatctggagtgtacaagcacatcaccggtggcattatgggtggccatgccgtcaagttgattggatggggaaccagtgatgctggagaggattactggcttctggcaaatcagtggaatagaggctggggcgatgatggatacttcaagatcataaggg

SEQ ID NO: 20713 - DNA, 271 bp, Zea mays
ctttgataatatcactcagttgttcagcttcaactacaaaccacttactccatatggtggtggcataaatgatacggcaatgttctggggtgtaaaattctacaatgatctgctgatgcaagccggcaaacttgggaatgtgcaatcagagctgcttctccgcaaggactcccggactttcactttcgaaaagggatgggccttcccacgccgagtttacttcaatggtgataattgtgtcatgccatctcctgaaaattatccatggctg

SEQ ID NO: 20714 - DNA, 273 bp, Zea mays
agatgcagatctttgtgaagactctgacggggaagaccatcactttggaggtggagtcctcggacaccatcgacaatgtgaaggccaagatccaggacaaggagggcatccccccggaccagcagcggctcatcttcgccggcaagcagctcgaggacggtcgcacccttgccgactacaacatccagaaggagtccaccctccacctggtgctccgcctccgcggcggcgccaagaagcgtaagaagaagacgtacaccaagcccaagaaga

SEQ ID NO: 20715 - DNA, 271 bp, Zea mays
caaaaactctcacgatacatctcaatccactccattctctcttattcctagagtacccaaacaaagccttaggtgacaagattaccctcaagcagaagggtggcagttaactgtgacaagtgctgcagttgtatcatcatttttctcttttaggaaatccacgtgccagagataccagtgccgtggcattgaattgagtataaatgtttttttgtacaaaaggatcaaagaaacagataagaggacagttatgaggaagtcacggtgttag

SEQ ID NO: 20716 - DNA, 265 bp, Zea mays
atacaggaattcaaagatggctacaccaaggttcttatatcaactgatgttcttgctcgaggttttgaccaagcacaggttaacctcgtcatcaactacgacatgccaatcaaatttggtacaagagatgaacctgattatgaggtgtacttgcacagaattggcagagctgggcgctttggccggaaaggtgctgtgttcaacttgctgtgtggtcaaaccgataatgttgtgatgaagaagatcgaggactatttccagcaca

SEQ ID NO: 20717 - DNA, 261 bp, Zea mays
gcaacgacgcgtgcttggagcggttcctgcggtcgcggggggacagcgtcaagaaggcggcgaacacctgaggaccgtcctctcatggagggagagcgtcggagctgatcacatcatggccgacgagttctccggcgagctcgccgacgggtggccttcgtctccggacacgacgacgacggccgcccagtcgtggtgtttcgaatcaagcaggactactccgagttccagtctcagagatcgttcgtgcggctgctggtg

SEQ ID NO: 20718 - DNA, 265 bp, Zea mays
gtcgacatgtcgtctccgccgccggtgaagctgatcggcttcttcggcagcccgtacgcgttccggcggaggcggcgctgtgcctgaaagcgtgccgtacgagctgatcctggaggacctgttcggcagcaagagcgagctcctgctccaccacaaccccgtgcacaagaaggtgcccgtgctcctccacggcgacggccgggccatctccgagtccctcgtcatcgccgagtacgtcgacgaggccttcgacgggccgccgctg

SEQ ID NO: 20719 - DNA, 200 bp, Zea mays
gggtacgtccggatggcgcgcaacgtcagggtgagggccggcaagtgcggcatcgccatggagccgctgtacccggtgaacgagggcccgaacgcgctgccgggcccgacgccgacgtcgcccgtgaagccgcccaacgtgtgcaacgcggagtactcgtgcccggaggccatcacctgctgctgcgtctccgagtaccg

SEQ ID NO: 20720 - DNA, 266 bp, Zea mays
gtgccatgtcgtgttgattctccagaagagtgtgccaaaataatatatgcaaacaagaacctacgtcttggttctgggattcttattgcagtaccgatccccaagcagcatgcaacttcagggaaaattatagagtctgcaatacagacagctctaaaagaggcaggggataaaaggataataggaaatgcgatcactcccttcatgcttgaaagagaatgggaagatccgcgttgtagggttacgctcgcggatggagtagcaca

SEQ ID NO: 20721 - DNA, 267 bp, Zea mays
gtcgaagcgaggcaggggaggttcggcggggaacaagttccgcatgtcgctgggtctgccagtggccgcgacggtgaactgcgcggacaacaccggcgccaagaacctctacatcatctccgtcaagggcatcaagggccgcctcaatcgcctcccgtccgcctgcgttggcgacatggtcatggccaccgtcaagaaggggaagcccgacctcaggaagaaggtgatgcccgccgtcatcgtccgccagcgcaagccgtggcgccg

SEQ ID NO: 20722 - DNA, 263 bp, Zea mays
cgctgtcggagcaggagctgatcgactgcgacacggacgagagcgtgtgccagggctggctggtggagaacgccttcgagttcatcaagtccttcggcggcatcaccaccgaggccgcgtacccgtaccgcgcgtccagcggcacctgcgacggctatcgagcccggcgctggggaggcgtcgtcgtggtgatcgacggccaccagatggtgccggccggcagcgaggacgcgctggccaaggcggtggcgcagcagccggtg

SEQ ID NO: 20723 - DNA, 269 bp, Zea mays
ggagatgaagaaaaatgctcaagctgcaggagttactgctcattactatgaggatgagactgctcctactggcacatgtgctgtatgtgttgttggtggtgaaaggtcattgattgcaaatctgtcggcggcaaactgttacaaatctgagcatctcaagagaccagagaactgggcactagttgagaaggcaaaatacatctacattgctggatttttccttacggtgtcacctgattctatccagttagttgctgagcatgctgcaa

SEQ ID NO: 20724 - DNA, 265 bp, Zea mays
ctggaagctctggaagcactgtgaactgaccttggggttgtaggcagaggcgtcaaacgagctagcatcaagccgatctctgccaaacctgttgctaagaaacctgcacttgattcaccatctctccaaggtgacaacagcatcaactctgaggttgtccctgcgacgcagactgatgaatccagctaaagctctacatttgaaacgaacgctttctgacgggggcacggcgataacacgccttctattctagtatgcttagata

SEQ ID NO: 20725 - DNA, 262 bp, Zea mays
cttaacgccgccgcggagctgctccgcgcccccgacgccggtgattaggagcaggagcaagaggggttcggaatggccaagtctaagaaccacacggcgcataaccagtcgttcaaggcgcacaagaacggcatcaagaagcccaagcgccaccgccagacctccaccaaggggatggaccccaagtttctgaggaacttgaggtactcaaggaagggcaataagaagagttgtgaggctgagtcagaggagtgagatgatg

SEQ ID NO: 20726 - DNA, 262 bp, Zea mays
gtgaaagacagggcaccggcagcgacgatgtcggggcgcggcaagggcggcaaaggtctgggcaagggcggagcaaagcgccaccgtaacgtgctccgtgacaacatccagggcatcaccaagcccgcgatccgtaggctggctcggaggggcggcgtgaagcgcatttcggggcttatctacgaggagacccgcggcgtcctcaagatcttcctcgagaacgtcatccgcgacgccgtcacctacaccgagcacgcacgcc

SEQ ID NO: 20727 - DNA, 258 bp, Zea mays
atgtatgctactcttgcaagcagagatgtggactgctgtttgattcctgagtcacccttttatttggaaagggagggtggactatttgagtatatagataggaggttgaaggagaacaatcacatggttattgttgtcgcggagggagcaggacaggatcttattgctcaaagtatacctgctgcagatcagcaagatgcatctggaaataagctgcttcttgatgttggtctctggttgactcacaagattaaggat

SEQ ID NO: 20728 - DNA, 256 bp, Zea mays
acgccggctaccatccccactaagctcaccgtcaacttcgtcctcccctacaagtccgagatcgccaacaaggaggtggacatggtaattgtaccagctacaactggtcagatgggcgttttgccaggccatgttgccacgattgcagagctcaagcctggtgttctctcagtacatgaggggaacgatgtgaccaagtactttgtgagcagtggatttgctttcgtccatgcaaactccattgctgatattgtgg

SEQ ID NO: 20729 - DNA, 259 bp, Zea mays
catcatgcagtgcaggtcctgctggtgaggatatgttccactggcaggcaaccatcatgggtcctcctgatagtccatatgctggaggtgttttcttggtgaacattcatttcccgccagactaccccttcaagcctccaaaggtatcttttaagacgaaggtcttccatccaaacatcaatagtaatggaagcatatgtcttgacattcttaaggagcagtggagccctgctttgacaatctctaaggttttgctttc

SEQ ID NO: 20730 - DNA, 194 bp, Zea mays
acaggagtggaagagaccttgtcaacatggcaaagaagaggaccaatgtgatccccattattgaggatgccaggcatccggcaaggtaccggatgttggttggcatggttgatgttatcttctctgatgttgcacagccagaccaggctaggatcttagcacttaatgcttcatacttcttgaagaacggtggc

SEQ ID NO: 20731 - DNA, 259 bp, Zea mays
ggtggcagcttgctaaaagacagcaggggacacactcaactaaaactatcagtgaagttagtggcactggaagaaagccttacccgcaaaaaggaacaggaaaagcacgacatggaacactgcgcggtgcccagtttcgtggtggtgcaaccatgcatgggcctaaacctcgaagccatgcaatcaagctgcagaagaaagtacggcggctggggcttaagattgccttgtctgctcgaactgctgaggggaagctctt

SEQ ID NO: 20732 - DNA, 145 bp, Zea mays
acggcgccgtcaagtcggtgatgcagtccgccatcgccagggagaagcgcatgggggcctccatcctccgcctcttcttccacgactgcttcgtccagggctgcgacgcgtcgctgctgctggacgacacgcccagcttccaggg

SEQ ID NO: 20733 - DNA, 251 bp, Zea mays
gcggagaagaagctggacatgatcagggaggacgacctgagcagcctgccgtacctaaaggcgtccatgaaggaagcgctgcggctgcacccaccggggcccctgctgctgccgcactactccaccgccgactgccagatcgacgggtaccacatccccgccaacacgcgcgtcctcgtgaacggctgggccatcggcagagacccggcggtctgggagaagcccgaggagttcatgccggagaggttcat

SEQ ID NO: 20734 - DNA, 247 bp, Zea mays
accagaagccacccattggcgtacgcgaggcgatcggagcatcccgtcccaagaggagaaactccggccggcgacgcgggggaaaatggggaagacgccggtgcggatgaaggcggtggtgtacgcgctgtcgcccttccagcagaaggtgatgccggggctgtggaaggacatcaccaccaagatccaccacaaggtcaccgagaactggatctccgccacgctcctcctcacccccgtcgtgggc

SEQ ID NO: 20735 - DNA, 251 bp, Zea mays
ttcatgttcctactggggagaagctttctgtttttgatgcggccatgagatacaaatctgagggccatgctactataatcctcgctggtgctgagtatggaagcggcagttctcgtgattgggctgctaagggtccgatgctcctgggagttaaagctgtaattgccaagagctttgagcgtatccacagaagcaacttggtggggatgggaatcattcctctgtgcttcaaagctggtgaggatgctgat

SEQ ID NO: 20736 - DNA, 257 bp, Zea mays
gcagcagccagctccatccatcctctttcccctcctcgcttcgcttcctcggcggattcctcctccctcgaccgtccccgtccccgtccccttccggcgcgcaactcgcccgagatggcaaacgcgagatcgggtgtcgctgtgaatgacgagtgcatgctcaagttcggcgagctgcagtcgaagaggctgcaccgcttcctaactttcaagatggacgacaagttcaaggagatcgttgtggaccaggtcgggga

SEQ ID NO: 20737 - DNA, 257 bp, Zea mays
ctcctcctcgcctcctctccctagtctccacgacgcaagggagagtgacggaaagcgacgcggcgcagcgaggagggccaaggcgaagaggggaagcaccgcaccaggacccttgttcgccgccgccgcctctgatctccgcgaggttgtcaggattcaatatgtcgaccagcacattcgctacttcctgcacgctgttgggcaatgttagaacaacgcaggcctcccagacagcggtgaagagcccttcgtctcta

SEQ ID NO: 20738 - DNA, 140 bp, Zea mays
ggcccgcaagtctgcccctgcgaccggcggagtgaagaagccccaccgcttccgccccggcaccgtcgcgctccgggagatccgcaagtaccagaagagcacggagctgctgatccgcaagctgccgttccagcgcctgg

SEQ ID NO: 20739 - DNA, 236 bp, Zea mays
acctgcgcctggctgaggcccgacggcaagacccaggtgacggtggagtacgtgaacgagggcggcgccatggtgcccgtccgcgtgcacaccgtgctcatctccacccagcacgacgagaccgtcaccaacgacgagatcgccgccgacctcaaggagcacgtcatcaagcccgtgatccctgagaagtacctcgacgagaagaccatcttccacctcaacccgtccgggcgctt

SEQ ID NO: 20740 - DNA, 248 bp, Zea mays
cgccgacatcgacgcacgcggaagagatcgatcggcccggccggccgcacgagaagatgagcttctttggccgcggcagcagaaaccagaattacttcaggccgaagaagagcgcgccgtccgggaacaaggggatgcagctgaaaaggcacatcgacgctaccctcggcagcggtaacctgcgagaggcggtgcgtctgcccatcggggaggacctcaacgagtggctcgctgtcaacaccgtcgac

SEQ ID NO: 20741 - DNA, 235 bp, Zea mays
atttcttctctctctgctcctccgcctccgcctgatccatccaagacagggatcgccatgtcggactcggaggagcaccacttcgaatcgaaggccgacgctggggcgtccaagacctacccgcagcaggctggcaccgtccgtaagaacggcttcatcgtcatcaagaaccgtccctgcaaggttgtggaggtttctacctccaagactggtaagcatggccacgccaaatgcc

SEQ ID NO: 20742 - DNA, 252 bp, Zea mays
gcgagaagatggccaaccctaacaacggctccgttcagggattcgaggtcatcgacgccgtcaagtccgccgtcgagaagctgtgccccggcgtcgtctcctgcgccgacatcctcgccatcgccgccagggacagcgtcgtcatcctgggtggtccgacctgggacgtgaaggtcgggcggcgggactccacgacggcgagcttcagcggcgccaacaacaacatcccgccgccgacgtcgggcctcgtga

SEQ ID NO: 20743 - DNA, 253 bp, Zea mays
gaaattcttttcagcaggcattgtcccatatggtatggctatggaggccggcttaaattcctggagagatttgcttatatcaacacaacaatttatccactcacatcaatcccgctcctcctgtactgcatattgccagcagtttgtcttctcactgggaagttcatcatcccaaagattagtaacctagagagtgtttggtttatatcgctctttatctcaatctttgccactggtatccttgagatgaggt

SEQ ID NO: 20744 - DNA, 143 bp, Zea mays
cccacgcgtccgctttcaatggcattgatacagatggaactgtcacaaaggggggttactccactcacattgtagtccatgaaaggtattgcttcaaaatacccgatggctaccctttggcgaaggcagcacctcttctgtgt

SEQ ID NO: 20745 - DNA, 143 bp, Zea mays
ctcccaacccctacactcccggcggcggcgcaggagcagcagcacccgaggatggtgaagttcctcaagcccggcaaggccgtgatcctcctgcagggccggttcgccggcaggaaggcggtgatcgtgcgcgtgttcgagga

SEQ ID NO: 20746 - DNA, 243 bp, Zea mays
caacccgtcagcccctctcgtttttcatccgccttcgcctccaaccgcgtgcgctccacgcctcctccaggaaagcgagagcttctgcataagaacaacaaatcaaaagcgtgatcagctcggtgccaacaaaacctcaacaaccaagtttcatgtctgatctcgacgtccagcttccatctgcctttgatccgtttgctgaggcaaatgctgaggactctggtgctggtcctggaacgaagg

SEQ ID NO: 20747 - DNA, 240 bp, Zea mays
gtcaaagagtggaagaagtgtcttgaggaggaggcgaggatcatgaaagacgttccagggtggaaggtcggcgagagcgtgtacaactctgggaaatggatgcccccggctactggtgagctccgccctgaggtttggtaagggcctgttgcaggcactgaatgccatcatgtcacgggggcacggataaagcttcatttttcattaaggatcagctgtttaaagacctgtatttgttgt

SEQ ID NO: 20748 - DNA, 219 bp, Zea mays
gccgcaagaagaagtgtggtcacagcaaccagctgagggccaagaagaagatcaagaactgaggtgctgctcctagtcagtttcatggacaatgttgggctgtattgctgtgtggttgttgaacggtgtttgtttacccaacatttgggccttctgttatgttttaccttgttgtcgatgacactactatatgacaatagcaactctgttattgtagtt

SEQ ID NO: 20749 - DNA, 244 bp, Zea mays
gatactaattttcacatggatttaatagctgggcttgcaaacatgcgcgcaaggaattacagcattcctgaggttgacaagttgaaggctaagttcatcgccggaaggatcatcccagccatcgcaacttcaacagccatggccacaggtctagtgtgcctggagctgtacaaggtcattgctggggagcaccccatggaggactaccgcaacacattcgccaacctagctatacctctgctgt

SEQ ID NO: 20750 - DNA, 229 bp, Zea mays
cccttatcgacaaaatgcttgagaagattggaacacctgaggcacttgccttgagagggaaggctgccgtcgcacaggccaaactagcaaatcggctctaccagaagaaattctctggcccgaggtgggaggcgttggccaagaaaggtgccaagaaacagaggttgttgtgggcgtccaccggtgtcaagaacccagcttatcccgacactctttacatcgacagtct

SEQ ID NO: 20751 - DNA, 227 bp, Zea mays
caattccccctgtcccgctaggattcccccgataccctcccccaataccccagagcggagatgagcgcaagatgttcggcttcgtgcaccacggccaccacggtcagtacccgccggcgcacggctgcgtgcaccagcccaccttctttatcttcttcaaggtctactatgggtactgcctcaccgtccgcgacggctacgtggtgctggcccccgctaacccgcgc

SEQ ID NO: 20752 - DNA, 229 bp, Zea mays
ctcacggcgatgctggcctcactggccgcaagatcatcattgacacctacggtggctggggagcccatggtggtggcgctttctccggcaaggacccaaccaaggttgaccgcagcggagcctatgtcgcaaggcaggctgccaagagcatcgtcgccagcggccttgctcgccgcgccatcgtccaggtgtcttacgccatcggcgtgcccgagcctctctccgtgtt

SEQ ID NO: 20753 - DNA, 151 bp, Zea mays
gtggcccagatcaaggaagggtttgaaagcggcaaggatcttgttgtgactgtccagtctgctatcggggaggagcagatctgcgcgctgaaggatgttggccccaagtaacttacctgccttggaatactgtatctcagaacctaagtcg

SEQ ID NO: 20754 - DNA, 228 bp, Zea mays
gaagaagacaaggacgaaggcagcaaggtgactctttcggggctcctcaacttcatcgacgggctgtggtcggcgtgcggcggcgagcgcatcatcgtgttcaccaccaaccacaaggacaagctggacccggcgctgatccggcgcggcaggatggacatgcacatcgagatgtcctactgctgcttccagggcttcaaggtgctcgccaagaactacctgggcgtg

SEQ ID NO: 20755 - DNA, 230 bp, Zea mays
agcgcgagagctagctagagggccgtgaaaatgccgatcaataggatcgccctggggagccaccaggaggtgtaccacccgggcgccctcaaggcggcgttcgctgagttcatctccaccctcatcttcgtcttcgccggccagggctccggcatggccttcagcaagctgaccggcgccggcccgacgaccccggcgggcctgatcgctgcggcggtggcgcacgcgtt

SEQ ID NO: 20756 - DNA, 232 bp, Zea mays
cgacgacatcgcctccgccggcgtcacgcacgtctggctcccgccgccgtcgcactccgtctccacccaaggttacatgcctggccgtctgtacgacctggacgcgtccaagtacgggacggcagcggactcaagtccctgatcgccgcgttccacggcaagggcgtgcaggtggtggcggacatcgtcatcaaccaccggtgcgccgactacaaggacgcccgcggcatct

SEQ ID NO: 20757 - DNA, 224 bp, Zea mays
gagaacacggtcctcttgaggggccccaagaatgcccgtgaggcagtgaggcactttggcaaggctcctggagtgccgcacagccacaccaagccgtatgtgcgctccaagggaaggaagttcgagaaggctcgtggcaggaggaacagccgtggattcaaggtttaaaacaaattgtggccctccgtgttgccatcagcatagtgcaaccgttgtgtttgatc

SEQ ID NO: 20758 - DNA, 192 bp, Zea mays
gattgagatcatctgtaagaattattcccaccgttgcaccatctcttcgccaccactgttttagtcatctgtgcctgatgggcaccctgtttatttcatgtatcatttattgctgtcattgtaataagcgatgggcatgattgtagttgaataagtacaatgtccatgtattcagacaccagtatcgtgctt

SEQ ID NO: 20759 - DNA, 221 bp, Zea mays
cccatctcccaagacctcctcagacccgagaagcgcactgcggccatggacgccaccggcactggagctggagggaaggcgaagaagggagcggccggtcgcaaggccggcgggccgaggaagaagtcggtgacgaggtccgtgaaggccgggctccagttccccgtcggccgcatcgggcgctacctcaagaagggccgctacgcgcacgcgtcggcagc

SEQ ID NO: 20760 - DNA, 222 bp, Zea mays
ggctggagtgattggtttcacaaaaacagttgccagggagtatgcaagcagaaatatcaatgtgaatgctattgcaccagggttcattgcatctgatatgactgccgaacttggagaagagcttgagaagaaaatcttgtcaaccattccgttagggagatatggccaaccagaggaagttgcagggttggtcgagttcctggcccttaaccccgcagctag

SEQ ID NO: 20761 - DNA, 220 bp, Zea mays
accgtctctgcggctgtagcctcaagattccctggtaaggctgttggtgtaaatctgcctgcaggatcagctcctgcggcagctgctcctgcggatgaggctgaggatgatgatgaccttgatctttttggtgatgaaactgaggaggacaagaaggcagctgatgagcgtgccgccgctgccaaggcctcttctaaaaagaaagaaagtggtaaatcct

SEQ ID NO: 20762 - DNA, 225 bp, Zea mays
acgaaaggtacgttgatgctgtcatgacaatccccaagggaaccttgttccccatgtgcggcatgaaccttgccttcgacagggatctcattggccctgccatgtacttcggtctcatgggtgatggccagcccattggtcgctacgacgacatgtgggccggatggtgtgtgaaggtcatctgcgaccacttgagcctgggagtcaagactggcttgccataca

SEQ ID NO: 20763 - DNA, 225 bp, Zea mays
cgctgtaccgcgccgtgatcgccgagttcatcgccacgctgctgttcctgtacatcacggtggccaccgtgatcgggtacaagcaccagacggacgcgtcggcgtctggcgccgacgcggcgtgcggcggcgtgggcgtgctgggcatcgcctggtccttcggcggcatgatcttcgtcctcgtctactacaccgccggcatctcggggggccacatcaaccccg

SEQ ID NO: 20764 - DNA, 218 bp, Zea mays
agaactgtacattttggtaaaccctcagcacatgagaagtcatgctacacagcagttttgaaaggccacattgcactagacattgctgtgtttcctaatgggacgacaggacatgctcttgatattctttcacgagcaccactctggagagagggtcttgactatcggcatggtacaggccatggaattggatctaattagcttcagaccttctgctc

SEQ ID NO: 20765 - DNA, 161 bp, Zea mays
caatttcccaagctttagaggcccatatatacaccgatgcatcgagaaggcggattctctactcatttggctggccagatttgtccaaaaggctatgttcatgcaatcaaagttcaccacttcatgttctgcccattggatctataaatcatgagaacttg

SEQ ID NO: 20766 - DNA, 82 bp, Zea mays
gcgcggtcaccggtatcaagaaccagggccagtgtggttgttgctgggccttcgctgcggtggcggccgtggagggcatcca

SEQ ID NO: 20767 - DNA, 258 bp, Zea mays
cgtcgtcctccattaatattggcagcaagctaggatcatcagcatctgagcttatatattactacatcgatcggttgccaaatggcggggatgacagtcggcaataagctggcgctggctgcggtgctgctgtgcgcggcggcggccatggccacggcgcacaggcctccggcgtgcgcgccacctacaacttctacaacccgcagcagaacaactgggacctcaacgccgtgagcgcgtactgcgcgacgtgggacg

SEQ ID NO: 20768 - DNA, 261 bp, Zea mays
gcgcacgtacgggaccgcgaagagcggcgtcggcgtggcgtcgatgggtgtgatgcggccggagctcgtcatgaagtccatcgtgcccgtggtcatggctggtgtgctcggtatctacgggctcatcatcgccgtcatcatcagcactgggatcaaccccaaggccaagccctactacctttttgatggctacgctcacctttcgtccgggcttgcctgtggccttgctgggcttgcagctggcatggccatcggcattgt

SEQ ID NO: 20769 - DNA, 260 bp, Zea mays
gacccatttgatcaggatgactggagcacttatgccaaactcactgatgagattggacagaaagtgcagattgtaggagatgatcttctcgttaccaaccccaccagggtcgccaaggccatcaatgagaagacctgcaatgctctcctcttgaaggtgaaccaaatcgggtctgtgaccgagagtatcgaagctgtcaggatgtccaagcgcgccggatggggagtgatggcaagccacaggagtggcgagacagagga

SEQ ID NO: 20770 - DNA, 257 bp, Zea mays
cacaaattaagtagtggagtgtcagaacttgggaggcacaaattaagtacaaagcagtctaattaatgacgggcccgatggagattccggtgatcgacctcgccgccgccgacctctacgaggacgacgaagaggaggcgctcgagaaggtcgccgacttcttccagtccaagtacttcaagccgggctccgtcgtcaccttccacttcccggcaccggcctccgcctccccgggacccgcggcggagatcaccttc

SEQ ID NO: 20771 - DNA, 259 bp, Zea mays
gatccagcgaggcggcgaccctccctcctccccttgcttcgctcgtccagccctgaccacccgcatccccgtcagtcatggcagcggcacaggcggaggcgcggtgcgtgcgctgtcccagaaggagcaggacatacagatgatgctcgccgccgacgtccaccttggcaccaagaactgcgatttccagatggagcgctatgcctttaagcgccgcaccgacggcatctacatcatcaaccttggcaagacatgggag

SEQ ID NO: 20772 - DNA, 234 bp, Zea mays
ggagactttgatgccacaaggaaattcatcgattctgttaagataccctatcatgccccttctttcggaggctgtgagagcataattgatcagcctgctatcatgtcctactgggattcaaaggagcagagggacatctatgggatcaaggacaacctgatcaggttcagcattggagtggaggattttgaggaccttaagaatgatcttgttcaggccctcgagaagatataa

SEQ ID NO: 20773 - DNA, 263 bp, Zea mays
gcctccgacatcctactttcgtcctcacgagtgaccgataatccgccggcgctaagatgttggtttatcaagatctcctatctggcgacgagctcctgtcggattcattcacctacaaggagctcgagaacggcgtcctgtgggaggtcgagggaaagtgggtcacccaaggtcctgttgatgtagacattggtgccaatccatccgccgagggtggtgaggacgaaagcgttgatgacacagccgtgaaggtggttgatatt

SEQ ID NO: 20774 - DNA, 259 bp, Zea mays
gactaacatgacagagcagtttgctgcattagcagcattatcccaaaatccaggccaagttcgtgatgatgccctcttggatttctataacaagtggcagcatgaatacttggttgtaagcaagtggtttgctcttcaagctacttcagagattcctggaaatgttgcaaatgttcagaagctgctgtctcaccctgctttcgacctgaggaatcccaacaaggtgtactcactaatcgggggattctgtggctcacct

SEQ ID NO: 20775 - DNA, 253 bp, Zea mays
agtaactcgcatcttcctccgtgatccaagttctagcagcgcacgctcggtttcggcaatgtcggggcgcggcaagggcggcaagggtctgggcaagggcggcgccaagcgccaccgcatagtcctgcgcgacaacatccatggcatcaccaagccggcgatccggaggctggctaggaggggcggcgtcaagcgcatctccgggctcatctacgaggagacccgcggtgtgctcaagatctttctggagaac

SEQ ID NO: 20776 - DNA, 253 bp, Zea mays
aaaggattgctaccgagacattcacctggcttgagctggcttttgctatagcgtgcaaggggttgctgggtgtcgtacctacctgacttttcattatctgtggttacattctggaccctgtattttctatgctttcatgtctctctactttctagtattaattatcaataagttggtttggaatggttgaattgcatccaatgcatgaagtttctttggttaaaaaaaaaaaaataaaaaaaaaaaagaaaat

SEQ ID NO: 20777 - DNA, 248 bp, Zea mays
taattcccacttgcagagaacttggaattggaattgtagcttacagtccactaggcagagggtttttttgtagtggagcaaaactagttgactcactgtcagagcaggacttccgcaagcatatgcctagacttcaaccagagaatattgtcaagaatgctaagatattcgagcatgtgaatgcaatggcagctaaaaaaggatgcacaccatcacagctagcattggcatgggttcaccatcaggga

SEQ ID NO: 20778 - DNA, 243 bp, Zea mays
accttgcttataacagcttgaagggtcttatccttagcaaggctttgatggctcagaaagatgccgaagatgaaagcactcggatagccttcgaaaacctacgctcggaagttatatcacttcggaatgaggcccttgagaaggacaaaatcttgctttctttagttgagaggttaaagtctagcgacgctagattggctagtctttctgaagtggaacaaaaaataaaatattaatggaaaa

SEQ ID NO: 20779 - DNA, 246 bp, Zea mays
atgccactgctctgtcttatggtgaccttgtcaagagggtccttcggtgctttggcccctcggagttttccgttgccgtgaccatcttcggcgggcgtggccatgccgggacatggggaaaggcacttggtgcagaggtctatgactgcaacaacatggtggagcaggagctgcctggaggcgggctcctcgtgtaccagagcttctgtgctgctgaagacgctgttgctacctcgcccaaatctg

SEQ ID NO: 20780 - DNA, 247 bp, Zea mays
cgacaagtacgcgctcatcttcacctccagccccgtcgtcctcgacgccgtcgaccacctctcggttcttctcgccttcaccatcctcctcaacagcatccagcccatcctctcaggtgtggccgtcggctccggctggcaatccatggtggcctacgtcaacatcggctgctactacctcatcggaatccccatgggcatcctgctcggatggctattcaaccttggcgtgctggggatctgggcg

SEQ ID NO: 20781 - DNA, 239 bp, Zea mays
tctcacacactgctacagccaagtgcgagtgatcgagctcccccctcctcatcagtcgctaggcacagcgcacttgcaggatggcgcaggtctctaagacgcttctccttgtggccctggtgttcgtgtcgtcggcggcggtggagctgtgccgcgcgatctacttcgacgagcgggacctggcgtcggacgaggcgctgtgggacctgtacgagctgtggcagacgcaccaccgggtg

SEQ ID NO: 20782 - DNA, 250 bp, Zea mays
cgctaaagaactggcatgctagtggcataaaggtctacatatactcaagtggaagtagagaagcacaaaggcttctatttggcaatacaacatacggtgacctgcgaaagttcctgtgtgggtattttgataccacaactggaaacaaaagagaaacaaggagttattttgagatctctcagtcactgggcgtggacagtccatctcaaatcttattcatcaccgatgtcttccaagaagccattgctgc

SEQ ID NO: 20783 - DNA, 250 bp, Zea mays
ggaaagatgcaagctcatacggaaagagaagtcgtcctttgggtttgtggactacatatgatcgaaggtctgctgctctagcaatcatgacccttcatggccgtcacatatatggacaagcaatcaaggtgaactgggcatacgcaagtacacagagggaggatacgtcggggcatttccatatttttgttggtgatttaagttctgaagtgaatgatgcaactctttatgcctgtttctcagcatatcc

SEQ ID NO: 20784 - DNA, 267 bp, Zea mays
gtgggcgctgaggctgaagggcgtcgagtacgagtacgtcgacgaggacctcgccaacaagagcgccgacctgctccgccacaacccggtgaccaagaaggtgcccgtgctcgtccacgacggcaagccggtcgcggagtccaccatcatcgtggagtacatcgacgaggtctggaagggcggctaccccatcatgccgggcgacccctacgagcgcgcccatgcgaggttctgggccaggttcgcggaagacaagtgcaacgctgc

SEQ ID NO: 20785 - DNA, 261 bp, Zea mays
gcgcgaccccgaggccctgcgggcaaatacacggacccgctcgtgttcacgggcgccatccgcgtgaggacgggctacgagatcctccgcctgacgtcgtacctgcagcagcacctgcaccggatcgcggtgccgctgctggtgctgcacggcgccgacgacctggtgaccgaccccaggggctcgcgggcgctgtacgagcgggcctcgtccgcggacaagtccctcaagctttacgacgggctgctgcacgacctcctg

SEQ ID NO: 20786 - DNA, 259 bp, Zea mays
tgaacatggaagctgccgaatcaggaataaaaggtgtgatgtctataaatgctgagatatttcaaatcacaccaaattatcatctcgtggagatcaagaaaatcaatggtgacatccttgagtatcataactttatgaaccaaagcatgagaccggcactagaagatattgtgtgggcatggcatggtgaacaacctgacgagaagtagactcatcaactttagataatcatcaacctaccaccttagatattgtggca

SEQ ID NO: 20787 - DNA, 263 bp, Zea mays
cacgcgtaccatcgccgtgggctgtgggccatcaaggccaagaccggcggcgccttccccaaggccgacaaggccgccgccgccgtggaacccaagttctaccctgccgacgacgtcaagccccgcgttcccagcacccgcaagcctaagcctaccaagctcaggtcgagcatcacgcctgggacggtgctgatcctcctcgcagggcgcttcatggggaagagagtggtgtttctcaagcagctcaagtccggcctgctcct

SEQ ID NO: 20788 - DNA, 254 bp, Zea mays
  unsure (1)..(254): unsure at all n locations
atgtccatcatgaactcattcatcaacgacatggccttggcggagatgccgatgtccgggtgcacctgcttcagcaccttgacatcggcatctcctccaaggcatgtccatcatgaactcattcatcaacgacatcttcgagaagctcgccggcgatgcggccaagctcgcccgcgtaataaagaagctcagcatcanctcccgggaaatccagacctccgtccgnctcgttctacccggcgaactcgccaagc

SEQ ID NO: 20789 - DNA, 264 bp, Zea mays
ctggctttgcagttaataggatgttctttccatacactcaatcagcactcttttatgttgatcttggtatggatgtttataagattgatcgtgcttgtaccaaatttggaatgcctatgggtcctttcagactggcagatctggttggttttggtgtggctgtggccactggtatgccataccttgaaaatttcccagagagggtctacaaatcaatgctacttcctctgatgatggaggacaatagggcaggtgaagccaccc

SEQ ID NO: 20790 - DNA, 264 bp, Zea mays
gcctacatcctcacgcaccccggcaacccgtgcattttctacgaccacttcttcgactgggggtttaaggacgaaatcgccgccctggtggcggtgcgcaacgcaatggcatcacgccgacgagcgagctcaccatccttgagcacgacggcgactcctatgtggcggagattgacggcaaggtcatcgtaaagatcgggtccaggtacgacgtcggccatctcatcccggcgggttttgaggttgccgcccacggcaacgact

SEQ ID NO: 20791 - DNA, 265 bp, Zea mays
ctggaccacggcgtggcggcggtcggctacggcgtcggcgacgaggcacgccctactggatcgtcaagaactcctggggcacctcctggggcgagggtggctacatccggatgcagcgcggcgccggcaacggggcctctgcggcatcgccatggaggcgtccttccccatcaagacctcgcccaaccctgcagacccgccgcgcaagccccgccgcgcgctcatcgccagggacacctcttcttcccagtgacacacacgacca

SEQ ID NO: 20792 - DNA, 259 bp, Zea mays
caacccgtcagcccctctcgtttttcatccgccttcgcctccaaccgcgtgcgctccacgcctcctccaggaaagcgagagcttctgcataagaacaacaaatcaaaagcgtgatcagctcggtgccaacaaaacctcaacaaccaagtttcatgtctgatctcgacgtccagcttccatctgcctttgatccgtttgctgaggcaaatgctgaggactctggtgctggtcctggaacgaaggattatgtgcatgtgcg

SEQ ID NO: 20793 - DNA, 254 bp, Zea mays
ccaatgatgagatcgctgctgacctgaaggagcatgtcatcaagcctgtcatccctgagcagtaccttgacgagaagaccatcttccaccttaacccatctggccgctttgtcattggtggacctcacggcgatgctggcctcactggccgcaagatcatcattgacacctacggtggctggggagcccatggtggtggcgctttctccggcaaggacccaaccaaggttgaccgcagcggagcctatgtcgca

SEQ ID NO: 20794 - DNA, 257 bp, Zea mays
ctcagatcactgtttgcttcgatgtcgacattaacggtatcctgaatgtctccgctgaggacaaaaccactggccagaagatgaaaaaagtcatcacaaagaggtttcgtttaaagcgttaattatctgatcaataactacacgaactagacagttttatgtcctttcataggattgatcgtctccaaggtcaaggcatatagtactggtgtttgtttagacagccgatgtcttattttacttgccaagcttggtgg

SEQ ID NO: 20795 - DNA, 255 bp, Zea mays
caacccgcgcgacatcagcctgggctacgccacgttccagccgggcaccaccgtcacggacaacggcaacggcctcaactacaacaacctgttcgacgccatggtggacgccgtcgtcgccgcgctcgagaaggccggcgcgcccaacgtcagggtcgtcgtgtccgagagcggctggccctcggccggcggcttcggggccagcgtcgacaacgcgcggaaatacaaccagggactcatcgaccacgtcggccg

SEQ ID NO: 20796 - DNA, 256 bp, Zea mays
cggacgcgtggcatgcccctgttcctgtcgctggcttccctcgtgaatggcatctgctggactgcttacgcgctcatccgcttcgacctctacattactatccccaacgggctgggcgtgctgttcgcggtggcgcactgagtgctgtacgccatctactacaagtccacccaggagatcatcgaggcgcgcaagcgaaggccgaccagatcgccatgaccggggtggtcgtcgacggcggcaagaccaacaacca

SEQ ID NO: 20797 - DNA, 262 bp, Zea mays
caacttcacagcgtatcatcgttttccatcgctcctactcctatcatccaaaatctgagcggtattgatggcgcccaaggcggagaagaagccggcggcgaagaaggtggcggaggaggagccctcggagaaggcggctccggcggagaaggcccccgcggggaagaagcccaaggcggagaagcggctacctgcgggcaagtccgccggcaaggagggcggcgacaagaagggtaggaagaaggcgaagaagagcgtggag

SEQ ID NO: 20798 - DNA, 262 bp, Zea mays
gtattttgttgagacagaaggttgatgaaagctattgttgcgtccagtatattgaaaatcattttgatcttttggatttccttgttgtttgctataagaacttggaagtcgcgttgaattgtggaaacatgttgcgagaatgcataaaatatcctacacttgcaaaatatatattggagtcaagcagcttcgagttgtttttccagtatgttgaattgtcaaacttcgatattgcatctgatgctctgaacactttcaagga

SEQ ID NO: 20799 - DNA, 264 bp, Zea mays
gttggcatccaagctgtgcaacaactgcaactgaacaaggctaatccgtctgcatcagtacagcagattaaccatatatctccgatggacattttccagattggaacagctaccgatatattcaggagtcttataacaagtttggatacagagggccgctaccttctgttgaatgcaatcgctaaccaactgcgctatccaaatagccatacacactactactccttcatcactctgtatctattttccgaggctacccaggaa

SEQ ID NO: 20800 - DNA, 265 bp, Zea mays
agatcatagagactggcgatcccgtagcgttcaaagaatacctgcaagagtacgagaacaccatatgcggacgccaccccatcagcgtcttccttcacatgttgaaacattgctcgacaaaaattaagataggctttgtccgctacgagcagtccagtcagtgcaagaacatgagggatagcagcgtgagcgatgcatccgcagcagcgaaggttgctggtgcatccggggaagaagataaacaagactgagcgagctacggctc

SEQ ID NO: 20801 - DNA, 251 bp, Zea mays
gggaggttatggtggcggaggctatggggatggtgctgtaactggtggatctgacggagaaagggagagagacactcgtcccccgtaccgtggcggaggcagacgtggtggttacaggaatgttgagtttggtgatgactctgagaggccaccacggagaaactatgagcgccacagcgggactggccatggctatgagatgaagcgtgatggcgcagggcgagggaactggggcactgccactgatgaac

SEQ ID NO: 20802 - DNA, 249 bp, Zea mays
gtcgaagcgaggtaggggaggttcggctgggaacaagttccgcatgtcactgggtctaccggtggcggccacggtgaactgcgcggacaacacgggcgcgaagaacctctacatcatctccgtcaagggaatcaagggccgcctcaaccgcctcccgtccgcctgcgtcggcgacatggtcatggccaccgtcaagaagggaaagcccgacctcaggaagaaagtgatgcctgccgtcatcgtccgcca

SEQ ID NO: 20803 - DNA, 248 bp, Zea mays
ggaacagagagagagagagagcaatggggaacaggcacctctgctgcctgtgcatgctccttctcctgggactggcgtccggccaggtcctgttccaggcgttcaactgggagtcgtggaagcagagcgtcggatggtataacctcctgatggggaaggtcgacgacatcgcctccgccggcgtcacgcacgtctggctcccgccgccgtcgcactccgtctccacccaaggttacatgcctggccgt

SEQ ID NO: 20804 - DNA, 251 bp, Zea mays
ggggtgacgaaaatggctccaacgaccgccaccaaggacgacagtggctacggcgacgagcgccggcgcgagctgcaggcgttcgacgacacgaagctgggggtgaaaggtctggtggactccggcgtcaagtccatcccgtccatcttccaccacccgccggaagccctgagcgacataatttctccggcgcctctgccgtcgtcgccaccctccggcgccgccatcccggtggtggacctctcggtgac

SEQ ID NO: 20805 - DNA, 258 bp, Zea mays
gccaaccaatctgatcaatacaatgtcttcagcggtcaagtaatcactgcggttaaagaagcatgcagagcagctgttcttcagaacaagccaaggcttgttgaggctatgtatttctgtgagttgaccacgccaaccgagcagttaggtgcaacttatgcagttcttggtaagaggcgggcaaggattctgaaagaagagatgcaagaaggaacctcgttatttacagtgcacgcttacctgccagttgcggagagc

SEQ ID NO: 20806 - DNA, 265 bp, Zea mays
cctaaaaccatctgcttcagccttcagctagccccaagtttagtcggccgatcgatcactgaagtagtaatggcctccgccaacagctggaccctcgagatcgcgtcgccggtggccccgcagcgcctgttccgcgccgccgtgatggactggcacaccctggcgcccaaggtcgcctcccacgtcgtcgccagcgcgcagtccgtggagggcgacggcggcgttggcagcgtcaggcagttcaacttcacctcagtcatgccgt

SEQ ID NO: 20807 - DNA, 263 bp, Zea mays
aaaacccgcgatctgaagcgactagtcgaaggcggcggcggcggcgatggggagcgacctggagacggagaagaagaagaccccggtggcgctgatgcccatcgcgaacctctcgcttgaaagaagctctgcaagcggaccctcaagctcgtgcgacgagcctctgaggccaagtgcctcaagcgcggagtcaaagaggtagtcaagagcattcgccgcgggaacaaagggttgtgtgtgattgctggaaatatttctcctat

SEQ ID NO: 20808 - DNA, 274 bp, Zea mays
gggttttgctgctctccgaccccgagctccgaacgccgcagcatcaggcgcggcccccctcgcgtgtgaccgagatggcgctgccgaatcaggggaccgttgattaccccagcttcaagctcgtcatcgtcggcgatggtggaactggtaaaactacatttgtgaagaggcatctcactggagagtttgagaagaaatatgaaccaaccattggtgtggaagttcatccgttggatttcaccactaactgtggtaagatcaggttctactgctg

SEQ ID NO: 20809 - DNA, 245 bp, Zea mays
caactcactagtactcagccgccgcaatcagggacaggtagctcgagcgcgcgctccacctgctccgacgcgatgcgggccaagtggaagaagaagaggatgcggaggctcaagaggaagcgccggaaaatgaggcagagatctaagtaggcgcatcttgtgaccgaggatggcgagcttctcctgcaccatggctgagacgcgttgggatgattgtctccctttgtagacgtgctttgctgtag

SEQ ID NO: 20810 - DNA, 257 bp, Zea mays
ggaacatatctggtgcatatataaatttagtgtacatggtgcatatattaaaacagcattactcattttagatataatgtctctagttgttggtatattttgctaagaacaccctccgacgtggtgaagtatagcggtggaaaatattatttataaattgcaatgatcaactagagacgttaaatctaaaataaatagtgatgatttaatatgtgcaccatatatactaagcttccatgtacaccagatatgtcctc

SEQ ID NO: 20811 - DNA, 258 bp, Zea mays
ctcattattattctcactggtcgatctgctaacacaaacagcagcagctcctcctcactagctagccttctctatttttgctactgcaagtgtccaagtctgcgacgacgtccgagatgtcgacggtgagccgtgcatcccttgaccagaagcttgccctcgccaagcgctgctcccgagaggcgactcttgccggagctaaggcggcagcagtggcgactatcgcctccgcgattcccaccctcgcgagcgtgcgga

SEQ ID NO: 20812 - DNA, 255 bp, Zea mays
cagactaaggttggtaaataccaccttctggtgtgtggaactacaccttgtatgattcgtggttcacgtgaaatcgaagagacgttgttggagcaccttggagttaaacgaaatgaggtgaccagtgatggtttattttctgttggagaaatggagtgcatgggttgctgtgtgaatgctcctatgattgctgtggctgactactcgaaaggctcagagggttacacatataactactatgaggacctcactcca

SEQ ID NO: 20813 - DNA, 258 bp, Zea mays
gtgatggcggcggacacagagcctctcgagatcctgctccacctccccttgttagctgaggataagaacgtgccatatgtgtttgttccatcgaagcaagctcttggccgtgcttgtggtgtgacaagaccggttattgcttgctcagtgaccagtaatgagggtagccagctgaaactacagatacagggtctcaaggactccattgagaagcttctcatctgatctgccgaagacctttcagtgtgatgggcctca

SEQ ID NO: 20814 - DNA, 262 bp, Zea mays
cggacgcgtggcgcctcgggtcaaaccctaagcagggagttgatttatccgctgcagccatgagtaagtagcagtctgagtctgtcaaggatgccatctcccagattgttggggatgccaaggagaagaataggaagttcactgagactgtggaacttcagattggtctgaagaattatgatccacagaaggacaagcgtttcagtggctctgttaagttgccccatatccctcgtcccaagatgaaggtgtgcatgcttgg

SEQ ID NO: 20815 - DNA, 269 bp, Zea mays
caccaactaggatcgatctctcgacagcaaatagctagcaatggagaagtacaccaaagccctagcgtcattgctcaccatgctggtgctggcacctctcctcgccatggccaccgacccagaccccctgcaggacttctgcgtcgccgacctcaacggcaagctgtcagtgaacgggtacccatgccagccgccgtcgtcggccggcgaccagttcctcttctcgaccaagatcgccacgggaggcgaccccctggccaacccgaacg

SEQ ID NO: 20816 - DNA, 247 bp, Zea mays
gtggcggcggtcggctacggcgtcacgacgacggcacgccctactggatcgtcaagaactcgtggggcccttcctggggagagggcggctacatccggatgcagcgcggcaccggcaacggcggcctctgcggcatcgccatggaggcgtcctttcccatcaagacctcgcccaacccgtcgcgcaaccccgccgcgcgctcatcaccagggacgcctcttcccagtgacaggctgatccatctcgg

SEQ ID NO: 20817 - DNA, 254 bp, Zea mays
caactgctggccctcttcgtcccattgttcaatgccagactctcaagtacaacatgaagtcaagggctgggagaggctttacccttgaggagttgaaggctgcgggcattccaaaaaggcttgctccaaccattggcatttctgtggatcaccgccgcaagaacaaatcccttgaggggctgcaggccaatgtccagaggcttaagacatacaaggccaagctggttatcttcccaaggcgtgctcgcaaggtc

SEQ ID NO: 20818 - DNA, 257 bp, Zea mays
gtcgacggtgagccgtgcatcccttgaccagaagcttgccctcgccaagcgctgctcccgagaggcgactcttgccggagctaaggcggcagcagtggcgactatcgcctccgcgattcccaccctcgcgagcgtgcggatgctgccgtgggccaaggccaacatcaaccccaccggccaggcgctcatcgtctccacggtggccgggatggcctacttcatcgccgccgacaagaagatcctgtcgctggcgaggc

SEQ ID NO: 20819 - DNA, 262 bp, Zea mays
caagaaccaggccgggagcgggtgcgagggcaagaacttctacacccggagcgcgttcctgagcgccgtcaacaagtacccgggcttcgcccatggcgggacggaggtggagggcaagcgcgagatcgccgccttcttcgcgcacgtcacgcacgagaccggacatttctgctacatcagcgagatcaacaagagcaacgcctactgcgacgcaagcaacaggcagtggccgtgcgcggcggggcagaagtactacgggcgc

SEQ ID NO: 20820 - DNA, 237 bp, Zea mays
gcccctctcgtttttcatccgccttcgcctccaaccgcgtgcgctccacgcctcctccaggaaagcgagagcatctgcataagaacaacaaatcaaaagcgtgatcagctcggtgccaacaaaacctcaacaaccaaggttcaagtctgaactcgacgtccagcgtccatctgcctttgatccggttgctgaggcaaatgctgaggactctggtgctggtcctggaacgaaggatta

SEQ ID NO: 20821 - DNA, 230 bp, Zea mays
gctacatacgtcctcctccattaatattggcagcaagctaggatcatcagcatctgagcttattattactaaatcgatcggttgccatggcggggatgagagtcggcaagctggcgctggctgcggtgctgctgtgcgcggcggcggccatggccacggcgcacaggcctccggcgtgcgcgccacctacaacttctacaacccgcagcagaacaactgggacctcaacg

SEQ ID NO: 20822 - DNA, 239 bp, Zea mays
ggtatgaggagatggttgagtatatggagaaggtggctaagactgtagatgtggaagagctcactgttgaggagcgtaaccttctgtctgttgcatacaagaatgtgattggggctcgccgcgcctcaaggcgcaatgtttcttccaatgaacaaaaggaggagtcccgtaagaacgaggagcatgtgaatcttatcaaggaatatcgtggcaagatcgaggctgaactgagcaatatc

SEQ ID NO: 20823 - DNA, 100 bp, Zea mays
gtgaacttctatcgcaactatggtaagactttcaagaagccaaggcggccttatgagaaggagcgccttgatgctgagttgaaattagtgggtgaatatg

SEQ ID NO: 20824 - DNA, 226 bp, Zea mays
  unsure (1)..(226): unsure at all n locations
aaatacatctacattgctggatttttccttacagtgtcgcctgattctatccagctagttgctgagcatgctgcagcaaataacaaggtggtcctgatgaacctctctgctcccctcaaccgtgaggacatccgggaagccccagagaaagtccccccggaagccgaccacaacttcggcaacgaaacagatgcaaagaactnttccaaagactagaggagggaga

SEQ ID NO: 20825 - DNA, 190 bp, Zea mays
cgcgagctcagcttagctccactccagctccaatcacagtcgtgaccagagcgcgagagctagctagagggccgtgaaaatgccgatcaataggatcgccctggggagccaccaggaggtgtaccacccgggcgccctcaaggcggcgttcgctgagttcatctccaccctcatcttcgtcttcgccggc

SEQ ID NO: 20826 - DNA, 91 bp, Zea mays
caagatggtgggacagatgtggttgaagcaaaggcgggaaaaggctctgcaacgttgtccatggcatatgctggtgctgtttttgcagatg

SEQ ID NO: 20827 - DNA, 230 bp, Zea mays
ctttgactcgagttgcaaggaataaggtgataaagatgtgcaaagtgcaattgagtcaccatggagaagatgaagcaaagtggtaaagagaagaagagcttcacatagaatttccccatctgtttcctagaccttctataatctcgaggacgagattatttttaatgggggtaggatttgtaacacccactttgtaattgctaggaataataccagtagaggaacaattt

SEQ ID NO: 20828 - DNA, 266 bp, Zea mays
gggcgcagagaatccccaagcaaacaaacagggtacatggagatgagaagagaggagaggagaggttgggtctgggacaccatggctccgatgaagctgtacggggcggtgatgtcgtggaacgtgacgaggtgcgcaacggcgctggaggaggctggctccgactacgagatcgtgcccatcaacttcgccaccgccgagcacaagagccccgagcacctcgtccgcaacccgtttggtcaggttccagctctgcaggatggtga

SEQ ID NO: 20829 - DNA, 260 bp, Zea mays
ccctgctgcagctctgcccgtactcatgatgataatgagagcgcaagatgtgtaatttgcctggaggattacaaattcgaggactctgtcgggaagctaaaatgcaatcacaagtatcacgcagactgcatcaagaaatggctgcaggtgaagaacgcttgcccagtctgcaaagcttctgcggcagatgacggcggaggcaccgaatgaagcgccctgccgcccccattcaccctatctcaggcgaagtgtactggctg

SEQ ID NO: 20830 - DNA, 263 bp, Zea mays
cattctcatccccgacccccgcaccgcagcgtaaaccctagtccccggcggcgaccttgcggcctccgctgcgctctgactggtgcgcgtttagacgaggagctgcggcggccaagaccagtcgaccatggctacccgtatccagtttgagaacaactgtgagattggtgttttctccaagctgacgaatgcttactgtctggtagcgattggagggtcagagaacttctacagtgcctttgaggctgagcttgcagatgcca

SEQ ID NO: 20831 - DNA, 142 bp, Zea mays
cccacgcgtccgggcccttgcgtatgcggtatctcattaattacttattatcatcgcagtgactaccaactgcttcagatcctactgttggaacgcgcgtggaaataagaagagagggcacaataaataataattgtaataa

SEQ ID NO: 20832 - DNA, 263 bp, Zea mays
gggctgtccactccttcagaattaccaactgcgagatccaggacaccacccagatccacacccacatgtgctactccaacttcaacgacatcatccactcgatcatcgacatggacgcggacgtgatcaccattgagaactcgcggtccgacgagaagctgctctccgtgttccgcgagggcgtcaagtacggcgcgggcatcggccccggtgtctacgacatccactcccccaggatcccgtcggctgaggagatcgccgac

SEQ ID NO: 20833 - DNA, 260 bp, Zea mays
ggaagttcatccgttggatttcaccactaactgtggtaagatcaggttctactgctgggataccgcaggcaagagaagtttggtggcctcagggatggatactatatccatggccagtgtgcgatcatcatgtttgatgtaacttcaaggcttacttacaagaatgttcctacgtggcatagggacctgtgcagggtctgtgaaaacatccccattgtcctctgcggtaataaggttgatgtgaagaacatgcaggtcaa

SEQ ID NO: 20834 - DNA, 260 bp, Zea mays
ctgtgtatacgattggggatagaagtgccaaatgttgcagtcctcgtgggtgaaagcggcgattcagattacgaggaactgctggggggtctccataggaccgttatcctaaagggcgagttcaacatcgccgcaaacaggatccacacggtgaggagataccccctgcaggatgtcgtcgccctcgatagctcaaacatcatcggtgtcgacggctacaccacggatgatctgaggtctgccctgcagcagatgggtat

SEQ ID NO: 20835 - DNA, 258 bp, Zea mays
atggatgtcatttccatccctaagacaatggagaactacaggctgctttatgacaccaagggccgcttccgtcttcacccaatcagggatgaggatgccaagttcaagctctgcaaggtgaggtccgttcagtttggccagaagggcatcccctacctgaacacctacgacggccgtaccatccgctaccccgacccgctcatcaaggccaacgacaccatcaagatcgatctggagaccaacaagatcatggacttc

SEQ ID NO: 20836 - DNA, 252 bp, Zea mays
acaaggatgaggccccgcccccgtcgtcgaagcccgccaagtccggcggtggcaagcagaagaagaagaagtggagcaagggaaagctggaggagaaggtgaacaacgcggtgctgttcgagcaggctacctacgacaagctggtgtgtgaggtgcccaagtacaagcaggtcacgccgtccatcctgtccgagcgcgtcagggtcggtgggtccctggctcggagggctatcagggagctggtggcgcgtg

SEQ ID NO: 20837 - DNA, 254 bp, Zea mays
ccatattcggcgacgccaccgaggtcgccaacgtgccaccgctcaccacgcccaacctcttcgtcagtggcctttcaaggttaacgacagatgagaagctccagggtgcatttgctcctttcgggaggctccttgaagcaaaagtggtgacggatagagtttctgggaggtcaaagggtttcggtttcgtgagatatgccgccatagaagaggccgagagagcgcggcaggagatgaacgccaagttcctggat

SEQ ID NO: 20838 - DNA, 249 bp, Zea mays
ggtgttgcaggtcagatcatcccatggaactttcctcttctgatgtatgcctggaaagttgggcctgctttggcatgtggaaatactctcgtgctcaagactgctgaacaaacccctctatcggctttgtatatctccaaattgttgcatgaggctggactacctgagggtgttgtgaatgtcgtttctggttttggccctactgctggtgctgctcttgctagtcacatggatgttgataagatcgca

SEQ ID NO: 20839 - DNA, 105 bp, Zea mays
gacaaattactctagcagactagcacgcaaactgaatcgcgtttagtttagtttttttggccccggataaaggctgctagcttggttgtagtaatggctggctgt

SEQ ID NO: 20840 - DNA, 249 bp, Zea mays
gttccgcgccgccgtgatggactggcacaccctggcgcccaatgtcgcctcccacgtcgtcgccagcgcgcacccgtggagtgcgacggcggcgttggcagcgtcaggcagttcaacttcacctcagtcatgccgttcagcttcatgaaggagcgtctcgagttcctcgacgcggacaagtgcgagtgcaagaacacgctcatcgagggaggcggcatcggcgtcgccatcgaaacggcgacgtcgcac

SEQ ID NO: 20841 - DNA, 241 bp, Zea mays
ggcgtagtggtgactaaagagccttgacaatgagcagcataggcacaggttatgatctgtctgtcgccaccttctctcctgatggccgcgtcttccaggtcgagtatgccacaaaagctgtcgacaacagcggtgctgttgttggggtcaagtgcaaagatggcattgttctgggtgtcgagaagctggtaacctcagagatgatgctggaggggtcagatcggagggtccattcagtgca

SEQ ID NO: 20842 - DNA, 251 bp, Zea mays
caaaaccagaccaccaaacaagtgccagcgccctctcgcagtcgccgcaatggagagcaccttcatcatgatcaagcctgacggcgtccagaggggcctcattggtgagatcatcagccgttttgagaagaagggcttctacctcaaggccttgaagcttgtcaacgtggagaggtcgtttgccgagaagcactacgccgatctcgcctccaagcccttcttccagggcctcgttgactacatcatctctg

SEQ ID NO: 20843 - DNA, 243 bp, Zea mays
gcgacgggctggctccggcatcgaacgccgccgtcctatcggcgctcccaccgccgacgtccaaggtgccggcgctggtgtccttcctggcgaggatcaacctggacgtgacggacctggtggcgctgtcgggcgggcacacggtgggcatcgcgcactgcggctccttgcgcaaccggctgttcccgacgcaggacccgacgcttaacaagttcttcgcggggcagctgtaccggacctgcc

SEQ ID NO: 20844 - DNA, 247 bp, Zea mays
cagacgcgtgggcggacgcgtgggcggacgcgtgggtccaagcgcccccgcgagccagctccggcgaagtcgacagcaccaagcatggcggacacgacggcgtcacccgcggtgacgctccgcacgcgcaagttcatgaccaaccgcctcctctcccgcaagcagttcgtgctcgaggttctccaccccggccgcgccaacgtctctaaggcggactcaaggagaggctggctaagatgtacgaggt

SEQ ID NO: 20845 - DNA, 272 bp, Zea mays
aggtaccgcgcaggtacctgtccgaagtccgggtcgagcgcgcgtccggctccagcaggttttcgtttcccgacaacggatcaaacgaggcactgtttcacgctgtgtgttggataccacaggtgtgtgggtgcaaaacgtggggacgcacctgggtgtggtgagtttgccgagtagtgtcggtccctgtgcccaggtggatgggttggactgtggagcgagcagcgtgagaaatggcagcttgcctggaggtgtgtagtcctacagtgcag

SEQ ID NO: 20846 - DNA, 247 bp, Zea mays
gtccgtgtgaggcgtggtggcaggaagaggcctgtgccgaaggtattgtctatggcaagcccaagcaccagggtatcacccagctcaagttccagaggaacaagagatctgttgctgaggaacgggctggacgaaagcttggtggactcagggttctcaactcctactgggtgaatgaggatagcacctacaagtactttgagatcatcctggttgatgtggcccacactgccatccgcaacgaccc

SEQ ID NO: 20847 - DNA, 249 bp, Zea mays
ggcttgatcgatctctcgacagcaaatagctagcaataatggagaagtacaccaaagccctagcgtcattgctcaccatgctggtgctggcacctctcctcgccatggccaccgacccagaccccctgcaggacttctgcgtcgccgacctcaacggcaagccatcagtgaacgggtacccatgccagccgccgtcgtcggccggcgaccagttcctcttctcgaccaagatcgccacgggaggcgacc

SEQ ID NO: 20848 - DNA, 248 bp, Zea mays
ctacattccactgcctgatgagcagtctaggctccagatcttcaaggcctgcctaaggaagtcccctgtggcaaaggatgtggacctgaatgctcttgctaagtacacacaagggttcagtggagcagatatcacagaaatttgccagcgtgcgtgcaaatatgcaatcagagagaacattgagaaggacattgagagggaaaggcggatgaaggacaaccctgaggcgatggaggaagatgaagtgg

SEQ ID NO: 20849 - DNA, 264 bp, Zea mays
tgtgcttgaagcctgcatagacagcctgaagaagctgcagctagactatctcgagctctacctcatccacttcccagtagccactcggcacaccggagttggcacgacttctagcgctctgggtgacgatggcgtgctggacatcgacaccactatctccctggaaacgacatggcacgcgatggaagagcttgtttccatggggctggtgcgcacattggaatcagcaactacgacatcttcctcgacagagactgcctggcc

SEQ ID NO: 20850 - DNA, 261 bp, Zea mays
caacgaggagctcatgatgagccaggcgatcaagtcggagacgtagcgcattgagtacctcaagacggtgagcgactgctacacgcggacgatgaagctcctcgacgattccatggcggccaggaccacgtacgagcgttcgggcggaatgaggagcctcgtcgcccgggacatggacgactacgtcgtctacggcctcaacgcgtgcttgcagaacgtccgcaactgctgcgtgcgcctggacgccatcgacaagctgcg

SEQ ID NO: 20851 - DNA, 259 bp, Zea mays
ggagtatgtcggcggctgcgactccccatacgtcaccctgtactaccacagcttcgactgatagctaggtttccccgggaacctcgacgcgtacgtgacgtaccgggtgtcgtgcccgtacacgctgggcgtgcacatgagcgcgacggcgcttgacatggcgatccggtgaacctgctgctgcacgcgtactggaacctgggcggtcagggcagcggggacgtcctgtgccacgatctccggctgcacgcgtcgcggt

SEQ ID NO: 20852 - DNA, 260 bp, Zea mays
gggtggtggtgacgaggaccgagattgacatgcaatatatcaaggcagagtacttgaagaagtacaagaagccattagctgaggctatcaactccgagacatcaggaaactatcggacgttccttctttcacttgttggtcatggccattaggctatgtttcgaccatgggacatgatatttctatcgatccaccctaaatgcagagacctacctggaaaacttatgatgttgccatttatctgtcgtgactcttggatc

SEQ ID NO: 20853 - DNA, 258 bp, Zea mays
ggttgaattacccttgactcatcatgagttgtacaagcagattggtattgatcctccaagaggggtgcttctgtatggtcctccgggtactggcaagaccatgcttgccaaagcagttgcacatcataccactgctgcttttatcagggtcgtcggttcagagtttgttcaaaagtacttgggtgagggccctagaatggtgcgtgacgtgttccgtttggccaaggagaatgccccagcaatcattttcattgatga

SEQ ID NO: 20854 - DNA, 258 bp, Zea mays
ggaggaggctggctccgactacgagatcgtgcccatcaacttcgccaccgccgagcacaagagccccgagcacctcgtccgcaacccgtttggtcaggttccagctctgcaggatggtgacttgtacctcttcgaatcacgcgcaatctgcaagtacgctgctcgcaaaaacaagccagagctgttgagggaaggaaacctcgaggaggcagcaatggtggatgtttggatcgaggtggaggctaaccagtacaccgc

SEQ ID NO: 20855 - DNA, 260 bp, Zea mays
cactgagactgtggaacttcagattggtctgaagaattatgatccacagaaggacaagcgtttcagtggctctgttaagttgccccatatccctcgtcccaagatgaaggtgtgcatgcttggtgatgcccagcatgttgaggaggccgagaagatgggacttgactacatggatgttgaggctctcaagaaaatgaacaagaacaagaagcttgttaagaggcttgccaagaagtaccatgctttcttggcatcagagg

SEQ ID NO: 20856 - DNA, 261 bp, Zea mays
gtgctgctgcatcattgggtcatgggttttacaggtataggtcaactaggctcaaaaatacacaggttatgcgagatcaagatctactgtaccatgaattaagatttaagagagagacgttgtgcgcctcttgttacgacacttgatgaacagcatagggaatgataccatcatagttttagtagtccttcgttgccttcagtttgtcttcaaagagttcttgttgcctcttcacatgcatgtaaacactgtaaataccgt

SEQ ID NO: 20857 - DNA, 257 bp, Zea mays
gggttcttcattgattgctgctggtggctctgatcccgtgttgagggtatgggaccctcgcaaaccgggaacattagcgcctgtttttcaattctcctctcattcaagctggatcactgcttgtaaatggcatccgagttcttgtttccatttggtgtcttcttcttttgacgggaaagtgatgttgtgggatctaaggacagcatggccgctggcgtctgtggactcgcatgaagataaggttttatgtgcggact

SEQ ID NO: 20858 - DNA, 257 bp, Zea mays
ataaggacgctgagttcaagacccacccgatgaacttcctgaacgaaaggaccctgaaggggaccttctttggcaactataagccacgcactgatctgccaaatgtggtggagctgtacatgaaaaaggagctggaggtggagaagttcatcacgcacagcgtcccgttcgccgagatcaacaaggcgttcgacctgatggccaagggggagggcatccgctgcatcatccgcatggagaactagatttcgctgtct

SEQ ID NO: 20859 - DNA, 257 bp, Zea mays
gcagcacaggatccgcatcacgctctcctccaagagcgtcaagaacctcgagaaagtctgcggggatctggtgaagggcgccaagggtaaggagctcaaggtcaagggccccgtgcggatgcctaccaaggtgctccacatcaccaccaggaagtctccctgtggagaaggtaccaacacctgggatcgctttgagatgaggattcacaagagggtgatcgatctcgtcagtacaccagacgttgtcaagcagatca

SEQ ID NO: 20860 - DNA, 256 bp, Zea mays
ggatgactggagcacttatgccaaactcactgatgagattggacagaaagtgcagattgtaggagatgatcttctcgttaccaaccccaccagggtcgccaaggccatcaatgagaagacctgcaatgctctcctcttgaaggtgaaccaaatcgggtctgttaccgagagtatcgaagctgtcaggatgtccaagcgcgccggatggggagtgatggcaagccacaggagtggcgagacagaggacaccttcatt

SEQ ID NO: 20861 - DNA, 247 bp, Zea mays
ctctctctctcgtagccgcgtccacctcgcagcagcaagcaagcgcgactaaatggcgtctctaggagacggtggactgctgctgcggcggcgtccaacaatctggtggtgtcgttcggcgagatgctgatcgacttcgtccccgacgtggctgggctgtcgctggccgattcgggcggcttcgtcaaggcaccctgcggcgcgctcgctaatgtcgccttcgccatcgccaagctcggcggatcct

SEQ ID NO: 20862 - DNA, 237 bp, Zea mays
cactgccgcttggaacttgttcatctagccgagaggttagatagatatatagatatatagtgtaatcgatcgaatccgccaaccatacaatggcgtccgatggcagtggcgtggtgacggtttacggctacaacggctctgcgctgctggagccgccgatatagcccaagtcgtcgactttctccgtgaaggtgggcctgtcgcagatgctccttggcggtgtgatcttggacgtgg

SEQ ID NO: 20863 - DNA, 256 bp, Zea mays
gcggctcagggaagagcaccgtcattgctctcatcgagcggttctacgacccgtgcggagggaaagtggccatcgatggcaaggacatccggacgctgaacttgaagtccctgcggcgcaagatcggcctggtgcagcaggagccagtcctcttcgcgtcgagcatcctggaaaacatcgcgtacggcaaggaaggcgcgagcgaggaggaggtggtcgaggcggcgaagacggcgaacgtgcacggcttcgtgag

SEQ ID NO: 20864 - DNA, 251 bp, Zea mays
ggtttctacctcaaagactggtaagcatggccatgccaaatgccactttgttgccatagacatattcaacgggaaaaagcttgaagatattgttccttcatcacacaactgtgatattccgcatgtgaaccgtactgagtaccagctgattgatatatcagaggatggatttgtgagccttcttacttcagatggcaacactaaggatgatcttagactcccaactgatgagactcttgtggcccagatca

SEQ ID NO: 20865 - DNA, 250 bp, Zea mays
tggtgaatgatgttggtgctgttgtgaacaatgatcccgaagttaacaaatatctgaaggttgtctttatcccaaattacaatgtatcagtggctgaagtgcttattcctggtagcgaattgtcacagcatattagtactgctggtatggaagcaagtggaacaagcaacatgaaattctctctgaatggttgtgttatcattggcacccttgatggagctaatgttgaaataagagaggaggttggaga

SEQ ID NO: 20866 - DNA, 238 bp, Zea mays
ctcaccgcgcaccatggcggaacagactgagaaggctttcctcaagcagccaaaggttttcctcagctcaaagaaatctggcaagggtaagaagcctggcaagggcggcaaccgattctggaagagcattggccttggcttcaagactcccagggaagcaatcgaagggacctacattgacaagaaatgcccattcactggaactgtttctatcagaggcagaattattgctgggaca

SEQ ID NO: 20867 - DNA, 252 bp, Zea mays
agcgaggcgacgccgaggcacctcatctccggcgaagggaaatggcgaccgttccaggggatctgatctggcagattgtgaggaagaacaactccttcctggtgaagcagtttggcaacggcaatgccaaggtgcagttcaccaaggagcccaacaacctctacaatttacactcctacaagtactctggcttagcaaacaagaaaactgtaacgatccagccagctgctggaaaggactcggctgtggtcc

SEQ ID NO: 20868 - DNA, 251 bp, Zea mays
gagcacacaagaatgtcgttcgtgcagctctctggtgctggagtcgctgcagtggccttcacgaacaagagcctagtctctcggcacgcagcgctacgggtctgctcgtcgaggcgctcgatccgtagcctggtcgttaaggctgcaactgtcgtcaccccaaagtacacttcactgaagcctctgggagatagggtgcttgtgaagcttggtgccgcagaggagaagacagttggtggcattttgcttcc

SEQ ID NO: 20869 - DNA, 251 bp, Zea mays
gcttctcaaccggataggtagcaccggagcaggtagaacgctgcacaatccccttcgccgccgccaagatggtgaacgttcctaagaccaagaagacgtactgcaagaacaaagagtgcaagaagcacacactccacaaggtgactcagtataagaagggcaaggatagcctgtctgcccagggaaagcgccgttatgaccgcaagcagtcaggatatggtggtcagaccaagcctgtcttccacaagaag

SEQ ID NO: 20870 - DNA, 247 bp, Zea mays
cccagatattgcacagcttgctgggttcacccgtccaatcctgcacgggctctgcaccctaggattcgctgctcgcgccgtcataaaatctttctgcaacggcgaaccgactgcggtgaagagcatcttcggccgtttccttctgcacgtctaccccggggaaacgttgtccactgagatgtggcttgacggccagaaggtgcactaccaagcgaaggccaaggagcggaaccgagctgtcctctct

SEQ ID NO: 20871 - DNA, 251 bp, Zea mays
gcgggggtgaaactgtctgctaccattgcttccatggcaactaatgagaacctcccgccaaatgtcatcaagcaattggctaaagaactgaagaaccttgatgagtcacctccagaagggattaatgtgattgtcaatgatgatgacttcactactatttttgctgacattgaaggccctgctggaactccatatgagaacggagtattcaggatgaagctattattgtcacgcgatttccctcaatctcc

SEQ ID NO: 20872 - DNA, 268 bp, Zea mays
acgacgggttgacgaccttcaaggtgtacttccacgacgtcgtggcggggacgaacccgacggcggtgcgcatcgcgcaggcggcgtcctccaacacgtcgtccaccaacttcggcgcggtggtggccatcgacgacccgctgacgacgggtcccacgcgcgccgcggcacggaggtgggccgcgcccagggcacctacacgttcgcggaccagcagacgttcgggctcctcatggtcatgaacttcgtgttcacggccggcgagcac

SEQ ID NO: 20873 - DNA, 266 bp, Zea mays
ggaaggagtctgaatactctggccattctattcctgttggtggtcttgcttactatgtaactgccccatcaagtttggctgatgtccttgcaaatccattccatgcactgttttatgtggtcttcatgctgtcagcctgtgctctgttctcaaagacatggattgaagtttctggttcatcagcaaaggatgttgctaagcagctcaaggaacaacaaatggtgatgccaggccatcgtgagtcgaacttgcagaaggaacttaac

SEQ ID NO: 20874 - DNA, 271 bp, Zea mays
ctgctcgtagcagcttgtgcgcaacatcacgggcaaccccgaggtgcgggtgaccaaggagaagagggcggccggcgtcctggacaaccacgacgagggcgagaggtacgccatgcacggcctcaggaagttcgtccgcgggaagaagcccgagatcatggcttcgatcaactccttcttcgccgaccctcccaaggacgattaagctagattccgtcatggatggatgagtatgttttaccaatcattagctgccgggggcgcgccttga

SEQ ID NO: 20875 - DNA, 260 bp, Zea mays
gggcctcttacgaggaaatcaagaaagctattaaggctgcttctgagggcccactcaagggtattatgggctacgtggaggaggatctggtttccaccgacttcaccggtgacagcaggtcgagcatcttcgacgccaaggccgggattgccctgaacgaccacttcatcaagctcgtctcttggtacgacaacgagtggggctacagcaaccgcgtcgtcgacctgatccgccacatgttcaagacccagtagagagag

SEQ ID NO: 20876 - DNA, 262 bp, Zea mays
atgctacgaacaatggcatccctgtgctcgtatttcccaagtccaagtctgcgcccgaggggatttcggttgctcaactgctggatactctgaggggaaacaatgtagactttgttcttcttgccggttacctgaagcttatacccactgaattgatccaggaatacccaaaatccatattaaatatccacccttctctccttccggcattcggagggaaaggtttctatggttcaaaggtgcataaagctgttattgcctc

SEQ ID NO: 20877 - DNA, 263 bp, Zea mays
gctcccttggatgagaagattgagttttcattccaactttatgacctcaagcaacaaggcttcattgaaagacaggaggtaaagcaaatggttgttgctacacttgcggagtcaggaatgaatcttttagatgaggtcatagagagcatcattgataagacttttgaggaggcagacacaaagcatgatgggaaaattgacaaagaagaatggcgcaatttagtagtgaggcatccctctttattgaagaacatgacactaca

SEQ ID NO: 20878 - DNA, 264 bp, Zea mays
ctggtcttactactgaggttaagtccgttgagatgcaccatgaggctctccaggaggcccttcccggtgacaatgttggcttcaacgtgaagaatgttgctgtgaaggatctgaagcgtgggtatgtggcctccaactccaaggatgaccctgccaaggaggctgctagctttacctcccaggtcatcatcatgaaccaccctggccagattggcaatggctatgccccagttctggactgccacacctcacacattgctgtca

SEQ ID NO: 20879 - DNA, 261 bp, Zea mays
gaaccctatacagtttgagaaggatgatgataccaatttccacatggacttgatcgctggctttgccaacatgcgggctaggaattacagcattcctgaagttgacaaattgaaggcaaagttcatagctggaagaatcatcccagccatcgccacctcaactgcaatggccaccggccttgtctgcctggagctttacaaagtccttgctggtgggcacaaggttgaagactaccggaacacatttgcgaacctggcgat

SEQ ID NO: 20880 - DNA, 257 bp, Zea mays
attcgatccaactcctgagcactttctcctcgtccccgacaagccaatcgaagccgagatacggccatggactccaccggcaccggagcagggggtaaggggaagaagggagcggccgggcgcaaggtcggcgggccaaggaagaagtcggtgtcgaggtccgtgaaggccgggctccagttccccgtcggccgcatcgggcgctacttgaagaagggccgctacgcgcagctgtcggcaccggcgcccccgtctac

SEQ ID NO: 20881 - DNA, 133 bp, Zea mays
gttgcacttggactacttgatgagggcaaagttgttctgggtgtgttgggatgtccaaatcttccattaagatcaacaaacaagaacaatagcagctcttttggggatcgaataggttccctcttttttgcta

SEQ ID NO: 20882 - DNA, 262 bp, Zea mays
cacctaacgacccacacgagcaccaagccgaggggaggggcgatggcgagaggtgtggtgtcgacgaagggcggcacggcccgggcaagaagaaggggtcggtagccttcacgatcgactgcacaaagcccgtggaggacaagttcatggaaatcccctcgctcgagagattcctgcaggagcgcatcaaggtcgccggcggcaacgccgacaacctcggcgactccgtcaccatctcccgcgagaagaccaaggtcaccgt

SEQ ID NO: 20883 - DNA, 259 bp, Zea mays
cttgtgtctcaggtgatctcatcgctgactgcttctctgaggttcgatggtgccctcaatgtggatgtgaacgagttccagaccaacctggttccttacccgaggatccacttcatgctctcctcctacgcaccggtgatctcttctgcgaaggccttccacgagcagctgtctgtggcggagatcaccagcagcgcgttcgagccggcttccatgatggtcaagtgcgacccacggcacggcaagtacatggcttgct

SEQ ID NO: 20884 - DNA, 260 bp, Zea mays
tttgcaatccttcggcgagcaactgaggaagaactatgaggagacaaaagagctactccttcaggttgctggttacaaggacgtccttgaaggtgatccttatctgaagcagcgtctgcggctgcgtgagtcctacatcaccactctgaacgtgtgccaggcctacaccctgaagcggatacgcgacccgagcttccaggtgagcccgcagccgcccctgtccaaggagttcaccgacgagagtcagccggcggactggt

SEQ ID NO: 20885 - DNA, 257 bp, Zea mays
gttatgggcttggatgccactgctctgtcttatggtgaccttgtcaagagggtcctccggtgctttggcccctcagagttttccgttgccgtgaccatcttcggcgggcgtggccatgccgggacatggggaaaggcacttggtgcagaggtctatgactgcaacaacatggtggagcaggagctgcctggaggcgggctcctcgtgtaccagagcttctgtgctgctgaagacgctgttgctacctcgcccaaatc

SEQ ID NO: 20886 - DNA, 253 bp, Zea mays
gcggcacggacctggaccacggcgtgcggcggtcggctacggcgtcacgacgacggcacgccctactggatcgtcaagaactcgtggggcccttcctggggagagggcggctacatccggatgcagcgcggcaccggcaacggcggcctctgcggcatcgcatggaggcgtcctttcccatcaagacctcgcccaacccgtcgcgcaaccccgccgcgcgctcatcaccagggacgcctcttcccagtgacag

SEQ ID NO: 20887 - DNA, 259 bp, Zea mays
acgaagcagacggcgcgcaagtccacgggcggcaaggccccgaggaagcagctggcgaccaaggcggcgcgcaagtcggcccctgcgaccggcggcgtgaagaagccgcaccgcttccgcccgggcaccgtggcgctgcgcgagatccgcaagtaccagaagagcacggagctgctcatccgcaagctgcccttccagcgcctggtccgcgagatcgcgcaggacttcaagaccgacctccgcttccagtcctccgccg

SEQ ID NO: 20888 - DNA, 258 bp, Zea mays
gccaggagaatggtctggtgccaattgttgagcctgagatccttgttgatggccctcatgacattgatcgctgtgcttacgtcactgagaccgtccttgctgcctgctacaaggcgctcaacgagcaccatgtcctcctggagggtaccctcctgaagcccaacatggtgactccaggctccgactccaagaaggtgacccctgaggtgattgctgagtacaccgtccgtaccctccagaggaccgtacctgctgctg

SEQ ID NO: 20889 - DNA, 256 bp, Zea mays
ggattctcagaacacctttgcaatgctgagtacatttaatgaagttgacatgaccaatttgatgaagcttcgttctgattataaagatgaatttgtcacaaagcatggtgtaaaattgggtcttatgtcttgctttgtcaaggctgctgtttctgcacttcaaaaccagccaattgtcaatgctgtcattgatggtgatgacatcatatacagagactacgtagacatcagtgttgctgttggcacttccaagggc

SEQ ID NO: 20890 - DNA, 215 bp, Zea mays
tctcaaccggataggtagcaccggagcaggtagaacgctgcacaatccccttcgccgccgccaagatggtgaacgttcctaagaccaagaagacgtactgcaagaacaaagagtgcaagaagcacacactccacaaggtgactcagtataagaagggcaaggatagcctgtctgcccagggaaagcgccgttatgaccgcaagcagtcaggatat

SEQ ID NO: 20891 - DNA, 252 bp, Zea mays
ctcagaggtgggttggcttctcctcccccaccggttcgtgttcaggttctggttcgtgggcgagagggaagagatcgcggcgtcggacgttgagtaccgttgcttcgttggcggcctcgcctgggccaccgacgaccactccctcaacaacgccttcagcacctacggcgaggtcctcgagtcgaagatcatcctggatcgggagacgcagaggtcccgcggcttcggcttcgtcaccttctccacggagga

SEQ ID NO: 20892 - DNA, 254 bp, Zea mays
ctaagaaggagactgagaggcttcaccgcatgctggagaagtcaatcagtccttccaaagctgatgaattcatcgttaagaagaacattctttcgatattctcttcgtgaaggtgatgatccacagccacggcctgccagtgacttgaactgatagcgaaccaccactttacggaaaacagaacaaatcggatgatgtgagagaaaggtggtagtgaagtccagtagtggcagagctacttcgtgcacgtagat

SEQ ID NO: 20893 - DNA, 241 bp, Zea mays
gcgagaagaccagaaggtgagaagagagagagagagtgtgtgtgatcggtacaaggatcaccgctgtgcctgcgcgtgctgcttcaccgaatcgagtcagatcctgtccgaatccgagctaagggatggcaaccggtagtgaagcctcgaaggcagctgaggctgtggttgactggcataaacacgacagcaagaggatgctccatgcggttttacgtgttggggattctggacgcacaat

SEQ ID NO: 20894 - DNA, 255 bp, Zea mays
gctgccagcttcaccgcgcaggtgatcatcatgaaccacccgggtcagatcggcaacggctacgccccggtgctggactgccacacgtcccacatcgccgtgaagttctcggagctgctcaccaagatcgaccggcggtcgggcaaggagctggagagcgcccccaagtttctcaagaacggtgacgccggcttcgtcaagatgatccccacgaagcccatggtggtggagactttctccgagtatcctccactg

SEQ ID NO: 20895 - DNA, 252 bp, Zea mays
ctactactcaagtatccatccttattgagtacagtgttgatccatggactcggaaggagttgtagcagcaaaggtggcagatgagactactaaaccggcaatccaagaagacggcgccgagagcaaggccgggatgactgatctgctgatgctgaccgacaagtcgcagctgcaggcgctggcgatgctgctgcggaacaacgaggagctcatgatgagccaggcgatcaagtcggagacggagcgcattga

SEQ ID NO: 20896 - DNA, 253 bp, Zea mays
caccaccaccacctgtttcaccaccgcaagccagaggaggagggcgctccgcgaggtcgactacgagaagaaggagaagcaccacaagcacatggagaagctcggcgagctcggcgccatcgccgccggcgcgtacgccctgcacgagaagcacaaggccaagaaggacccagagaacgagcacgggcaccgggtcaaggaggaggtggccgccgtcgccgccgtgggctccgccggcttcgctttccacgag

SEQ ID NO: 20897 - DNA, 249 bp, Zea mays
gatggatcagacggaggttcttcacctgctggagtcgccagatgctctgaaagccaaggttgctgaagccatggaggtcctccgctctgcccagcatctccagcagagcaatgtttctactgagcagcagctggctaatctatcattgaatgatggcgtcgtctccagctgaacgttaatgtttctgatgtttcggaagtgctgccagtttttgcttgaatactaccctatctagagtgtaatgacttt

SEQ ID NO: 20898 - DNA, 247 bp, Zea mays
gtcgttcaacgccaagctcggggacttcggcctagcgcgcctcatcgacgacggccgccgctcgcacaccacgggcgtcgccggcacgttcgggtacatggacccggagtccatgctcgccgggaaggccagcgtcgagtcggacgtgtacagcttcggcgtcttcctcctagagatcacgtgtgggcgtcggccggcggtgctcgtgagagaggaggactacgtccacctggtgcagtgggtctgg

SEQ ID NO: 20899 - DNA, 133 bp, Zea mays
atcagattggaatgttctgctacagtgggatgacacctgaacaagttgaccgtttaacaaatgaataccacatttacatgacccgcaatgggaggataagcatggctggtgtaacgacaggaaatgttggtta

SEQ ID NO: 20900 - DNA, 245 bp, Zea mays
gcgcttctcttcttctcttttcgctgtgcttttagtctgttcgtttgatgcccagatctactagcagtgtaacattttccttcagccatgggcaaggagaagactcacatcaacattgtggtcattggacatgtcgactctggcaagtcgaccaccactggccacctgatctacaagctcggcggtattgacaagcgtgtgattgagaggtcgaggaagaggccgcggagatgaacaagcggtca

SEQ ID NO: 20901 - DNA, 267 bp, Zea mays
gtcttgtgttgttcggagcgggcagcagcacacagccccatcccaatcctagtcgatcttcttcccctcctcaaggaagaaaagaagctgaaccatggggaagagaaagtcagctgctaagccacctcctaagaagcggatggacaagcttgacactgtcttttcctgcccattctgcaaccacgggagtagtgttgagtgccgaattgacatgaagaatctgattggcgaagatcttgtagaatctgtcaggacaacttcagcaca

SEQ ID NO: 20902 - DNA, 270 bp, Zea mays
cagctcttgggatcaagaagggaacagtggacgagtgggtgaggtgtcacgacgcagacctgccgtacacgatcgacctcaagagcgccatcaagtaccaccggaacctgacgtccagaggctaccgcgccctggtgtacagcggcgaccatgacctgctggtgccacacctgggcacccaggcatgggtcaggtccctcaacttccccgtcgtcgacgactggagggcgtggcatctcggtggccaagccgccgggttcacgataaatt

SEQ ID NO: 20903 - DNA, 218 bp, Zea mays
tccgccgccatcgcttcaagcagcgaaccctagccgccctcagcgacggattgcagatctcccagccatgacgttcaagcggaggaacggcggacgcaacaagcacgggcgcggccacgtcaagtacatacgctgctccaactgcgccaagtgctgtccaaaggataaggctatcaagcggttcttggtgaggaacattgttgagcaggctgctgtga

SEQ ID NO: 20904 - DNA, 261 bp, Zea mays
gggtactgatcgacgtctcccgtatcgacatggccacaaacattctgggcttcagcatttccatgcctatcatgatcgctccttcagccatgcagaaaatggctcatcctgatggagagcttgccacggcaagagctgcagcttccgcaggaacaataatgacattgtcctcatggtctacttccagcgttgaagaggtcaactcagttgggccgggcatacgtttcttccagctctatgtctacaaggacaggaatatcg

SEQ ID NO: 20905 - DNA, 172 bp, Zea mays
ggcagaggcgcactgctgggcggtggggtggacttggcggcaatgttcgaacgatcgaccttggcgacgccgaggatgttagagaagtctcgggaacatacggcgcatttgaaggtgccattacgctgacctcgctcaggctcgtcaccagcagcagaacctggggcccctg

SEQ ID NO: 20906 - DNA, 264 bp, Zea mays
cagcccgccatcagtaagatttacttctgagatgtggcatccgaatgtttatcctgatggacgtgtttgcatttctattcttcatccacctggtgaagatcccaatggttatgagcttgcaagcgaacgatggacaccagtgcacacggttgaaagtatagttctgagcatcatttcgatgctctctagtccaaatgacgagtctccagcgaatatcgaagctgccaaggattggagagaaaagcgggatgagttcaagaaaaa

SEQ ID NO: 20907 - DNA, 263 bp, Zea mays
ctctagtaaagtgaaaaatacacttatattcaacacatttgtattgtgccaggtgtttaatgaggtcaattctcgtaaaccagaagaactgaacatcttttccggagtttcaagaaatcatcttttcttggcagtagtgagcataactgttgtgatgcaggtgataattattgagttcctcgggaaatttacatcaacagtgagactcaactggaagctttggcttgtttctgtagttattgcttttctaagttggcccttgg

SEQ ID NO: 20908 - DNA, 256 bp, Zea mays
gcatgcctcgcgcatgaccccgacagcaaggtggcgtgcgagacctgcaccaagaccaacatggtgatggtgttcggcgagatcacgaccaaggcgaccgtgggactacgagaagatcgtgcgctacacctgccgcgagatctggttcacctccgacgacgtgggcctcgacgccgaccgctgcaaggtgctggtgaacatcgagcagcagtccccggacatctcgcatggcgtgcacgggcacttcgcgaagcgg

SEQ ID NO: 20909 - DNA, 264 bp, Zea mays
gctgcttgagacccatcttgtgccgtcttccactgcccccgagtccaaggtcttctatctcaagatgaagggtgattactacagataccttgctgagttcaagactggagctgagagaaaggacgccgctgagaacacgatggtggcatacaaggctgcccaggacattgctctggctgagcttgctccaactcaccctattaggcttggactggcacttaacttctcagtgttctactatgagattctgaactcacctgatcg

SEQ ID NO: 20910 - DNA, 266 bp, Zea mays
aatccattggggcccctgggatggcagttctccagtttgctttcggaggtggttctgacaaccctcatttgccacacaaccatgaaatggatcaagttgtgtacactggaacacatgataacgatacagttcttggctggtggcaaaatttaccagaggaagaaaagaaaattgtgatcaagtatctaccagaagccgagaatattgacataacatggacactgattacggctgccctctcttccgtcgcgaggacttccgtggta

SEQ ID NO: 20911 - DNA, 270 bp, Zea mays
ctctctccctctctacctgccccgttcctcaccagtctcttccgccggcgtcgacgagagctgcgctaggtgatctcgactgcttcctcgccccccatggcgacggcgctcaaatcgttcctgaacagccccgtcggccccaagaccacccacttctggggccctgtcgccaactggggcttcgtcatcgcgggtttggttgacatgaacaagcctcctgaaatgatatctggcaatatgacagcagccatgtgtgtgtattctggactc

SEQ ID NO: 20912 - DNA, 120 bp, Zea mays
cgcacgaagcagacggcgaggaagtcaactggcggcaaggcgccgcggaagcagctggccaccaaggcggcgcgcaagtcggctccggccaccggcggcgtgaagaagccgcacaggttc

SEQ ID NO: 20913 - DNA, 200 bp, Zea mays
gcgcttccagttccggctgtccccttcctacacgcatgcgccgtacaccgtccttctgctgcatcctcagcatggcgcgccaattattttcgacaggatctgactgcccttgcatgacatcgtcgatcgttgtcagcatgtgtcacagtgcaaataaactcgtatgaataatattgtgttagggagagtctagttctgtg

SEQ ID NO: 20914 - DNA, 251 bp, Zea mays
caccactgtcaagaatgcatcagtcttgtgtctcaccactgtcaagaacgaggataagcttgagttcagcaagatcttggaggctattaaggcaaacttcaacgacaagttcgatgaggtcaggaagaagtggggaggtggcatcatgggatccaagtcgcaggccaagaccaaggcccgggaaaagctgctcgccaaggaggctgcgcagcggatgacctagattgtctactgctgtgtctgccctgtag

SEQ ID NO: 20915 - DNA, 252 bp, Zea mays
cgacgtagaacatgtactcgacttccaggcgtccctcgcagagccccgcgcgcagaacgcgctggccgaggtccaggagtatacgtccttcctccgggtgctcgggagctaccccatggacatgacccccatgaccgccggctcctcctccaccgttgtttcctcgtccgatgatccctcgtcgtcttgattgccgttggaggctggagctagctccgaggagaagtcgtcgagtagggacgttggttttct

SEQ ID NO: 20916 - DNA, 254 bp, Zea mays
gccgccaccaggtgcagagtctttcgtcatctcttctccggcgaagaacccccagtcgcccaccagatcacttgttaaactttgttgaggggtgatggcggtttctttcgcaaacctcaactccgaggcagggcttaaaaagcttgatgagtaccttctcactcgcagctacatcactggctaccaagcttccaaggatgacttggctgtctacacttcgttttcggctgctccctcgtccaagtatatcaacg

SEQ ID NO: 20917 - DNA, 245 bp, Zea mays
gttctagctactgttgtgaagtcaaatctggctcctgtgcggtattgtgatgattctaacaatattactgagacctatcccttcaaccctaatggttctccactgggtatagcagccctttgctcacctgacgggaggcacctggctatgatgccgcatccagagcgttgcttcatgatgtggcaatatccatggtatcccaaggaatggcaggttgagaagagtggccccagcccttggctgcg

SEQ ID NO: 20918 - DNA, 240 bp, Zea mays
ctaaaccctacccacagccaccgccgccgccgccgctacctgacccctagtgtccggatttaacttcaaacatggcggacgtcgatgtcgagccggaggtcgccgccggtgctcccaagaagaggacgttccgcaagtacagctaccgcggcgtcgacctcgatgcgctgcttgacatgtccaccgacgacctcgttcagctcttcccagcgcgcgccaggagaaggttccagaggggtt

SEQ ID NO: 20919 - DNA, 254 bp, Zea mays
ctagcataaaggagaagattgagtcaattgctaagttctatggtgctagtggcgttgaatattccgagcaggctgagaagcagattgagatgtacaccaagcaagggttctccagcctccccatttgcatggcgaagacccagtactcgttctcacatgtcccgtccatgaagggcgccccgaccggctttgttctgccgataagagacgtgagggccagcatcggcgctgggttcatctacccgctcgtgggc

SEQ ID NO: 20920 - DNA, 253 bp, Zea mays
gacaaacgttggggatgaaggtggttttgcacctaacattcaggaaaacaaagaaggccttgaactattgaaggcagccatagaaaaggctggctacactggaaaggtggtcattggaatggatgttgctgcttctgaattcttcggtgagaaagacaagacttatgatcttaatttcaaggaggagaacaacgatggctcaaacaaaatttcaggcgacagctgaacagacctgtacaagtcctttgtttct

SEQ ID NO: 20921 - DNA, 184 bp, Zea mays
ctgaatgtactgctgaagaagcatataactggactcagggtcgtgcaatatttgccagtggcagtccatttgaccctgtggagtacgatgggaaggtttttgtacctggacagtcgaacaacgcctacattttccctggattcggcctcggtcttgttatctctggagccatccgtgtccacga

SEQ ID NO: 20922 - DNA, 275 bp, Zea mays
gggacaccacgcgtcgggacgtggtctgactgctgtccatgatggcatcctggaggatgttgtcttcccagctgagattgtggggaagcgtgtcaggtaccgtctggatggtgccaagatcatcaagatcttcttggacccaaaggagaggaacaacacagaatacaagctggacacctacactacggtctaccgcaggctgtgtgggaaagatgtggtctttgagtaccctatggccgaaaatgcataaatatgacgcccggatatccccattt

SEQ ID NO: 20923 - DNA, 262 bp, Zea mays
gtgcggattgccacctacctggcacgctgtgcgtgtggactgactgcactacctgcttcgaaggctgtgctaccacagccggcgagtgcggtggttgcttgggaggggctggggaagccgggctaccgcttctcctcatcatgggggtcattgtgctggggcttttcacggtcatcggcatattctacagtgtcctggtcgcgaccatggttggccagcggatctggcagcgccactaccacattcttgccaaacggttgct

SEQ ID NO: 20924 - DNA, 268 bp, Zea mays
cccacgcgtccgtgatgaccttgatctttttggtgatgaaactgaggaggacaagaaggcagctgatgagcgtgccgccgctgccaaggcctcttctaaaaagaaagaaagtggtaaatcctccgtccttatggatgtcaaaccatgggacgatgagactgatatgaagaagctggaggaggctgtccgcagtgtccagatggagggtctgacttggggagcatcaaagcttgtgcctgttggatacggcatcaagaagatgactatc

SEQ ID NO: 20925 - DNA, 272 bp, Zea mays
ctcactactacatacatcaccagctaggatcgatctctcgacagcaaatagctagcaatggagaagtacaccaaagccctagcgtcattgctcagcatgctggtgctggcacctctcctcgccatggccaccgacccagaccccctgcaggacttctgcgtcgccgacctcaacggcaagctgtcagtgaacgggtacccatgccagccgccgtcgtcggccggcgaccagttcctcttctcgaccaagatcgccactggaggcaacccctg

SEQ ID NO: 20926 - DNA, 248 bp, Zea mays
ggcagtggcggtgcgaacgtggctaatgtggtcaccgacgcgttcttcaacggcatcaagaaccaggccgggagcgggtgcgagggcaagaacttctacacccggagcgcgttcctgagcgccgtcaacgcgtacccgggcttcgccatggcgggacggaggtggagggcaagcgcgagatcgccgccttcttcgcgcacgtcacgcacgagaccggacatttctgctacatcagcgagatcaacaag

SEQ ID NO: 20927 - DNA, 260 bp, Zea mays
aagatgtccgcacgaactacaactacacagagcctacccttgcggcaaacgctggcctggtggcagcgctcatttctatatctgatatcaaaaccggacggttcggcatcgacaagaacaccatcttctctgcgatccctccgatgtttccgacaccaccgccaccgccatcagcatggaaaccatagagagacagacctctgaatatattttccccccaaagcatcaacacagggaagtggagcaaacatatgatcagt

SEQ ID NO: 20928 - DNA, 235 bp, Zea mays
ggcaaagtctggcttgaccccaatgaagtcagcgagatctccatggctaactcccgccagaacatccggaagttggttaaggatgggtttatcatcaggaagcctcagaaggttcactctaggtcccgtgcaagaagggcacatgaggccaagcagaagggaaggcactctggatacggcaagcgcaggggtaccagggaggctaggctccccaccaagattctgtggatgagga

SEQ ID NO: 20929 - DNA, 253 bp, Zea mays
tgcttttttggcatcagagaccatcatcaagcaaattccccgtctccttggtcctggtctcaacaaggcaggcaagttccccactctggtcactcaccaggaatccctggaatccaaggtgaatgagacgaaggctacagtcaagtttcaactgaagaaagtcctttgcatgggtgtcgcggtcggtaacctgtctatggaggagaagcagatccaacagaacatccagatgagcatcaacttcctcgtgtct

SEQ ID NO: 20930 - DNA, 246 bp, Zea mays
acttcttgtacatgctggactctttgggtgacagaacatataaaccaaatcctcgacttgctcgagctctagatattctttttattctgcatgctgaacatgaaatgaactgctccactgctgctgttaggcaccttgcttcaagtggtgtggatgtatttactgctctttctggtggtgttggagctctatatggtcctctgcatggcggcgcaaacgaggcagtacttaaaatgttaaatgaga

SEQ ID NO: 20931 - DNA, 251 bp, Zea mays
ggtgagcgccgcaacggggtacatcgactacgagaagctcgaggagaaggcacttgacttccgccccaagctcatcatctgcggtggcagtgcgtacccgagggactgggattacgccaagctcagggccgtcgccgacaaggtcggggccctgctgctctgcgacatggcgcacatcagcgggctcgtcgccgcgcaggaagctgcaaatccttttgaatattgtgatgtggttaccacaaccacgcaca

SEQ ID NO: 20932 - DNA, 260 bp, Zea mays
attgctgctcagttggaacagtacccaaaagcaactgagatatttgaagcgatcgctcgtcagtcaatcaacaacaatcttcttaagtatagtgtcagaggaattcttcttaatgctggcatctgtcaactatgtagaggtgatcctattgccatcacaaattcattggagcgataccaggaaattgacccgactttctctgggacacgtgaatacaagcttttagctgatcttgctgcatctatggatgaaggggatgt

SEQ ID NO: 20933 - DNA, 180 bp, Zea mays
gtagacaagctcatggagaacgagaagcacgaggtcattgttgctgataactttttcactggttcaaaagacaacctgaagaagtggattggccacccaagatttgagctcatccgtcatgatgtcaccgagccgcttcttgtggaagttgaccaaatctatcaccttgcttgccctgct

SEQ ID NO: 20934 - DNA, 274 bp, Zea mays
ggtgaggaagcacagcgaccgcaaggactgctggctcatcatcgccggcaaggtacgtatatttcgtcaccggccgacgatcgactccgaccgtgtttgacgcccccggcctcgctcctgctgctgctgctctgctcaggtgtacgacgtcacgccgttcatggaggagcaccccggcggcgacgaggtcctgctggcgtccgtcggtaagtaaagtagtctcagactccagaccggtggtggtgactggtgagttggtagcgcttactgatga

SEQ ID NO: 20935 - DNA, 169 bp, Zea mays
gaaagctaaagactatgtgaacatgctgaaggactggtacggcaatggagcgtcgaagctgtgcgtgatctacaaccagacgggcggaaccctgcggtacgtcgacgacaaggactggctgggctacccggggccgacgccctacccgacggagatcggcaacgggcat

SEQ ID NO: 20936 - DNA, 86 bp, Zea mays
gggccaaaccatggccactatatcagtttggttaagagccacaatcattggttattctttgatgacgagaacgttgagatgactga

SEQ ID NO: 20937 - DNA, 166 bp, Zea mays
tccgagattagaaggctattggactcgtacaatggcgagaactgcagcatcacgctaaccggtcacatcctgggcgcggcgctctccacgctcaccgccatcgacatcgtcgccaacgtcctcaacgtccggggccccaacaacgacacggtccccgtcgccgcca

SEQ ID NO: 20938 - DNA, 265 bp, Zea mays
gtagcacggggccgagatgctcgtcgtcggcagccatggttacggagccattaaaagggctgttcttggaagtgtgagcgactactgtgcccatcacgcgcactgcaccgtgatgatagtaaagaagcccaagcagcacaagcactgatcaatgccgactgatcactacgtgtactgcaaataatttgtactactgcaaagttatgtgtgcgtccgtccgtttgtgaataattgggtcatcaaccatcacatcttcggttgcttc

SEQ ID NO: 20939 - DNA, 128 bp, Zea mays
ggattatctaccgattcttgccgcctgactctgaatggtcataccaacgagaagaattttgtagggctatctgttcatgatggatacataacttgtggctctgaaaccaatgaagtgttttcttacta

SEQ ID NO: 20940 - DNA, 230 bp, Zea mays
acaatcctaaaaccatctgcttcagccttcagctagccccaagtttagtcggccgatcgatcactgaagtagtaatggcctccgccaacagctggaccctcgagatcgcgtcgccggtggccccgcagcgcctgttccgcgccgccgtgatggactggcacaccctggcgcccaaggtcgcctcccacgtcgtcgccagcgcgcagcccgtggagggcgacggcggcgtt

SEQ ID NO: 20941 - DNA, 211 bp, Zea mays
cctggaggctacgtttatcagaaggcctacctcgaattcttctgcgcaaaggagaagttggaccaactaattgagaagatcaaagcattcccttctctcacttacattgctgtgaacaaggatggagaaacattctccaatatttcaccgaacgccgtgaatgctgtcacgtggggtgttttccctggcaaggagattatccagcctacgg

SEQ ID NO: 20942 - DNA, 86 bp, Zea mays
cgacaacgctgagttcaagatcgtgctcaccatcatccgcgacgggctcaaggctgaccccaagaagtaccgcaagatgaaggaga

SEQ ID NO: 20943 - DNA, 263 bp, Zea mays
cctggtgctcctgctgtattcaatgttgttgttgagatcacaaagggaagcaaagtcaaatacgagcttgacaagaaaactggactgattaaggttgatcgagtcctttactcatcagttgtataccctcacaattatggtttcattccaaggactctttgtgaagacaatgacccaatggatgtgttggtcctgatgcaggagcctgttgttcctggttcgttcctgagagctagagcaattggccttatgcccatgattga

SEQ ID NO: 20944 - DNA, 259 bp, Zea mays
cttatgccaaactcactgatgagattggacagaaagtgcagattgtaggagatgatcttctcgttaccaaccccaccagggtcgccaaggccatcaatgagaagacctgcaatgctctcctcttgaaggtgaaccaaatcgggtctgtgaccgagagtatcgaagctgtcaggatgtccaagcgcgccggatggggagtgatggcaagccacaggagtggcgagacagaggacaccttcattgctgacctctcagttgg

SEQ ID NO: 20945 - DNA, 123 bp, Zea mays
cgagtgcaccgccttcgccgagggcgtcaatgcggcgtgccccgaggcgatgctcgcctacaacctctcgccgtccttcaactgggacgcgtccgggatgacggacgccgagatggccgcctt

SEQ ID NO: 20946 - DNA, 121 bp, Zea mays
ctcctcgtcgccaaaaccctagccctgcttctttgccatggcgagcagcgctaccaggcgagcctcctgctccagaagcagctcaaggatcttgcgaagaaccccgtggatgggttctccg

SEQ ID NO: 20947 - DNA, 263 bp, Zea mays
ctacaatcctaaaaccatctgcttcagccttcagctagccccaagtttagtcggccgatcgatcactgaagtagtaatggcctccgccaacagctggaccctcgagatcgcgtcgccggtggccccgcagcgcctgttccgcgccgccgtgatggactggcacaccctggcgcccaaggtcgcctcccacgtcgtcgccagcgcgcaccctatggagggcgacggcggcgttggcagcgtcaggcagttcaacttcacctcag

SEQ ID NO: 20948 - DNA, 202 bp, Zea mays
caccggttgcgatccgccggcatcgcttcaagcagcgaaccctagccgccctcagcgacggattgcagatctcccagccatgacgttcaagcggaggaacggcggacgcaacaagcacgggcgcggccacgtcaagtacatacggctgctccaactgcgccaagtgctgtccacaggataaggctatcaagcggttcttggt

SEQ ID NO: 20949 - DNA, 260 bp, Zea mays
ctcaacgccgccgtcgaaggcgagctgtggcggctcatcgacccgcatggaacggcgccgggagtcatcggctggtggcctgccaaggcgtcacctttgtcgacaaccacgacaccggctccacgcaggccatgtggccgttcccctccgacaaggtcatgcagggctacgcctacatcctcacgcaccccggcaacccgtgcattttctacgaccacttcttcgactgggggtttaaggacgaaatcgccgccctggtg

SEQ ID NO: 20950 - DNA, 258 bp, Zea mays
caccgagggtgaggtaaccgggctacttatcgcagcgctctttgctggacagcataccagctcaatcacctcaacctggactggagcgtacatgcttcgcttcaagcagtactttgcagaagccgtagaggagcagaaggatatcatgagacggcatggcgacaagatcgatcatgacatcctggcagagatggatgtcctctaccggtgcatcaaggaggcccttcgtctccacccgccgctgattatgttgcttcg

SEQ ID NO: 20951 - DNA, 248 bp, Zea mays
cacatcaccaccaggaagtctccctgtggagaaggtaccaacacctgggatcgctttgagatgaggattcacaagagggtgatcgatctcgtcagtacaccagacgttgtcaagcagatcacctcaatcaccattgaaccaggtgtcgaggttgaggtgactatcagtgacgcttaatatggtagccttatcatttcaaaaggcttctagtgaacaggatattttcaattcctagtgagaacttgtgt

SEQ ID NO: 20952 - DNA, 164 bp, Zea mays
ggattatagtcactttgcttgggattcttagacagaaaaatggaaaatttggtgttgctggagtttgcaatggcggcggcggcgcttcagccctcgttttggagctcatgcaatcctcttcgcatatccattcatcgttgtgaagttggtgcgagcaaattagc

SEQ ID NO: 20953 - DNA, 165 bp, Zea mays
gtggaaacttccttgttaaccttcttgggaagtggaaggagtctgaatactctggccattctattcctgttggtggtcttgcttactatgtaactgccccatcaagtttggctgatgtccttgcaaatccattccatgcactgttttatgtggtcttcatgctgt

SEQ ID NO: 20954 - DNA, 258 bp, Zea mays
cgacgccgaccgctgcaaggtgctggtgaacatcgagcagcagtcccccgacatcgcgcagggcgtgcacgggcacttcacgaagcggcccgaggagatcggcgcgggcgaccagggccacatgttcgggtacgccaccgacgagacccccgagctgatgccgctgagccacgtgctggccaccaagctgggcgcgcgcctcaccgaggtgcgcaagaacggcacctgcgcctggctgaggcccgacggcaagaccca

SEQ ID NO: 20955 - DNA, 254 bp, Zea mays
ggtcgccgtcctcgcaacacacccgccgcgcccacggagggatgctttggatggctcgatcgtagcggctacgctggcgcatgagttgtcttggacccgtgactgcttggaggacccccgctgccgtgcggccgactcccggcgcccgtgtcccatcgctcgtgcgggcatcccgtgcctgctgcgttgagaagtgcttgcgtgctgctacccgtcccacgggaagccgtgctcgatacacgttgccttcgtcg

SEQ ID NO: 20956 - DNA, 259 bp, Zea mays
caagcaattgtcaaccgactctatcttagctctctttgcaagccagtaggtcaccactcaaaagcttgtgaagcaggtgagatgggcaaggaggtggatgtgtccactctggaggccggcggcgtccgtgaccgtgactacgcggaccctccgccggcaccgctgatcgacatcgacgagctcggcaagtggtccctgtaccgcgccgtgatcgccgagttcgtggccacgctgctgttcctgtacatcacggtggcca

SEQ ID NO: 20957 - DNA, 259 bp, Zea mays
ctttgggtgacagaacatataaaccaaatcctcgacttgctcgagctctagatattctttttattctgcatgctgaacatgaaatgaactgctccactgctgctgttaggcaccttgcttcaagtggtgtggatgtatttactgctctttctggtggtgttggagctctatatggtcctctgcatggcggcgcaaacgaggcagtacttaaaatgttaaatgagattggacacatggaaaatattccagatttcattgt

SEQ ID NO: 20958 - DNA, 243 bp, Zea mays
aggtacacaacgagcggcccgtggggatggtgggcggcgtccgggacgcgccggtgggccgcgagaacgacctcgaggccatcgagctcgcgcgcttcgcggtcgccgagcacaacagcaagaccaacgcgatgctggaattcgagaggctggtgaaggtgaggcaccaggtcgtggccgggaccctgcaccacttcaccgtcgaggtgaaggaggccggcggcggcgaaaagaagctgtacg

SEQ ID NO: 20959 - DNA, 252 bp, Zea mays
ccaattggtttagatgaaagccttaaggtggatttgattgtgattgggtcagtggcagttgatccaagttcaggagcacggttagggaagggagagggatttgcagagctggaatatggaatgcttcgctatatgggagctatagatgattcaaccatgatagtaactactgtgcatgacaagcagttagttgatgacattccagtggagaagctgctagttcatgatgtgccagttgacattatctgcacc

SEQ ID NO: 20960 - DNA, 254 bp, Zea mays
gttgacagcttacttggtgcaagaggtggtgcatttgagcatgaagcaacaagaaggatgcgcaatgaattcatggcagcttgggatggtctcaggtccaaagagaaccaacggatccttattcttggtgcaacaaatcgtccatttgatctggatgatgctgtgatacggcgtttacctagacggatatatgttgaccttccggatgcgcagaaccgaatgagaattctaaagattttacttgcgaaggaaaa

SEQ ID NO: 20961 - DNA, 249 bp, Zea mays
aaacccggagcagaagctcaagtatctgcccaagctgatcagtggggagcatatcggggcactggcgatgagtgaacccaactctggctctgatgtcgtcagcatgaagtgcaaagctgagaaagtggacggtggctatgtccttaatgggaataagatgtggtgcaccaatggcccgtctgctcagacactggttgtttacgcaaaaacagatctagctgcagggtcaaaaggcataactgcattcat

SEQ ID NO: 20962 - DNA, 261 bp, Zea mays
gtattttgagcttgaggacaatggtggattaagccttgctttacaggaagatagtgcaaaaactggaaaagttacttctgcgggcatgttctttctaggctttcctgtgtatcgatttgaacaaaacaattcagctgctgctgcgaaggatcctgacagtgctttctttaaaagattggatggctttcaaccttgtgaagtaaatgaactgaaagcaggaagccattattttgctgtatatggtgacaatttctttaaaag

SEQ ID NO: 20963 - DNA, 253 bp, Zea mays
attgtcttcaagaatggcatggcgaagtccattcatcatgctcgtgtgctcatcaggcaacgccacattagagttgggaggcaacttgtcaacattccctcattcatggtgagagttgactcagagaagcacatcgacttctctcttaccagcccacttggtggtggagaacctggaagtgtgaagagaaagaaccaaaagaaggcttctggtggaggcggtgacgacgaagaggaagagtgatcatgtgatg

SEQ ID NO: 20964 - DNA, 252 bp, Zea mays
  unsure (1)..(252): unsure at all n locations
aatgattccatcgacgtcgcggagtcccctttcggaataacagatgggaagacatagggtaaatacagcaaagcgaacgggncatgtaggccacagtagtcagtctgttgttccgaaagatgtgtatatatgtattagcagcatgattgttctgattatctttttactgattttcgatggtaggtctattccatcaagtatttaactaatcatttgttgctgttggtataggtcttttgttcttttagccgt

SEQ ID NO: 20965 - DNA, 240 bp, Zea mays
atccacttacagtttatggaaaaggtggtcagacccggggatatctggacatcagagacactgtacagtgcgtggagctagcaatagccaacccagccaaacctggcgagttcagagtcttcaaccagttcaccgagcagttctctgtcaatgagctagccaaactggtgactgcggcaggagcgaaacttgggcttgaagtggagaccaaatcgatacccaacccacgagtcgaggctg

SEQ ID NO: 20966 - DNA, 240 bp, Zea mays
tggtggccaaccttgggaaggtgccacaaagagcggtctggtttcgagggggcctggactacaaaccctttggtctttgacaactcttacttcaaggaacttctgagtggtgataaggagggccttcttcagctcccaagtgacaaagccctgctgagcgaccctgttttccgccctcttgtcgagaaatatgctgcggatgagaaggctttctttgatgactacaaagaggcccacctc

SEQ ID NO: 20967 - DNA, 239 bp, Zea mays
gaacaatgagcttcaagaccgtactgcaaaattcaggaaacatgccaccgcaatagctgaatgggataagagaattctgcaaaacagaaatgttcttattaggcttgaggctgaggtggctaaagttgttgaaacacaaacaggcttggagcgtcaacttgaattgatagaaactcatcaacgagaggtagacaaggctctacagagtatggaggaggaagctgaacgcgtattccagg

SEQ ID NO: 20968 - DNA, 239 bp, Zea mays
tgttacccgcaagacccgtatcctcgacgtggtctacaatgcatcaaacaatgagcttgtgaggacacaaacccttgtgaagagtgccattgtgcaagttgatgctgccccattcaagcagtggtacctcactcactatggagttgacattggtaggaagaagaaaacccctgctgcaaagaaggataatgctgagggacaagaggttgaggcagcagctgaggaaacgaaaaagagca

SEQ ID NO: 20969 - DNA, 237 bp, Zea mays
attctgtgcagactatgcaaattttgaactccgatgatcatgcgaattatttgaggaagcagaatcacaatcctgcagattataggcctgatatcattcatcaggctctactagcaatatttgatagccctcttactaaggctggaaggttacaggctgtttatgtgagaactgaaaagggcgtattgtttgaaatcaaacctcatgtccgcatgccaagaacctttaaacggttct

SEQ ID NO: 20970 - DNA, 235 bp, Zea mays
atcaactttgcagtgttcccatctctccaaggtggccctcacaaccaccagattgctgcacttgctgttgctctacagcaaactatgtcgcctggcttcaaggcctatgcaaagcaagtgaaggccaatgctgttgcaattggaaactatctcatgagcaagggctacaagatggtgactgatggaactgagaaccaccttgttctctgggatctccgaccccttggcttgactg

SEQ ID NO: 20971 - DNA, 243 bp, Zea mays
gaaattgggaagcttattgaaaagacgatgatgcaaaaatatggagttgaaaatgtaaacgatcacttcatggccttcaatactatttgtgatgccactcaggaaagacaagatgctatgtatcagctggtgaaagagaaagttgaccttattcttgttgttggaggatggaattcaagtaacacctctcatctgcaagaaattggagaactcagtggaattccatcatactggattgacagt

SEQ ID NO: 20972 - DNA, 242 bp, Zea mays
aagatcgccacgggaggcgaccccctggccaacccgaacggctccaacgtgacggagctggacgtttccgagtggcccggcgtgaacacgctgggcgtgtccatgaaccgcgtcgacttcgcgcccggcggcaccaacccgccccacgtccacccgcgcgccaccgaggtcgggctcgtcacccgcggcgagctcctcgtgggcatcgtcggcagcctcgactccgggaacaggtactactc

SEQ ID NO: 20973 - DNA, 239 bp, Zea mays
gtagacagaggtgttcattgtctatctgaagaagaaagaacaaatctaatttcagatgctcccaaagacttggaggagagtggagcctctggaatccggcaacctgacaaagctgaggcaggcactgcagagtacctcattgagcttgaagaacggcgatcaattaaggtattcggttcaaacaccttcatcgggctggggatcgtcttcttcgcgggcgtgtgcttctcgctcttctc

SEQ ID NO: 20974 - DNA, 238 bp, Zea mays
gtagacagaggtgttcattgtctatctgaagaagaaagaacaaatctaatttcagatgctcccaaagacttggaggagagtggagcctctggaatccggcaacctgacaaagctgaggcaggcactgcagagtacctcattgagcttgaagaacggcgatcaattaaggtattcggttcaaacaccttcatcgggctggggatcgtcttcttcgcgggcgtgtgcttctcgctcttct

SEQ ID NO: 20975 - DNA, 235 bp, Zea mays
ggtcgttggatccactcagccagtggtaggacttaccactcaaaatttgcacctccaaagtctccaggagttgatgatgtaactggagagccattgattcaaaggagagatgacaccgctgaggtcttgaagtcaaggcttgaagctttccacagacaaaccgaacctgtgattgattattactccaagaagggcttagtggtgaacctgcctgcagagaaaccaccgaaggaag

SEQ ID NO: 20976 - DNA, 234 bp, Zea mays
cctgcaaggtcgccggctacaccatcccggccaacacccgcgtcgtcgtcaacgcctgggcgctcggccgccacagcggctactgggagcgcgagaacgagttcgtcccggagaggttcctcagcggggacgtggccggcggcgtcgacctcaagcccaacgagttccagttcctggcgttcgggtccgggcggaggatgtgccccggtgtccactcggcgtccgcgaccatcg

SEQ ID NO: 20977 - DNA, 233 bp, Zea mays
gtgtttgatgcttcagctgctagaaggtgtaaaatatctacatgacaattgggtgcttcatagggatctgaagacctcaaatcttttgttgaataaccgtggtgagttaaaaatatgtgattttggactgtctcgtcaatatggaagcccattaaaaccttatactcaactggttgtgactttgtggtacagggccccagaactgttgttaggaacaaaggagtattctactg

SEQ ID NO: 20978 - DNA, 213 bp, Zea mays
ggagctccttgggtgggagccgaagatccccctccgcgagggccttcccctcatggtcaccgacttccgcaagcgcatcttcggcgaccaagacaccgcggctgccaccaccagaaaccagcaaggctaggacggaagaggagcacgggacttggaaatttttggtggcctgcttctagctgcttggtcgaccctcctctccttaatgacaaa

SEQ ID NO: 20979 - DNA, 247 bp, Zea mays
ctcctccagggccgcttcgccggcaggaaggcagttatcgtgcgcgtgttcgaggagggcacccgcgaccgcccctatggccactgcctcgtcgcaggcctcgccaagtacccaaagaaggtgatccgcaaggactccgccaagaagactgcgaagaagtcgcgcgtcaagtgcttcatcaagctcgtcaacttcactcacctcatgcccacccgctacaccctcgacgtcgattttaaggatgtcg

SEQ ID NO: 20980 - DNA, 226 bp, Zea mays
cctgaattgaacgtggtagtgtttatgatgattagatgtctaggctttctatgtttgcgtgaatcgtttctgctggattgtccattgtcatcaccaccttatgttcaatactttaaatcttgcgcaggtgatcgtcggtgctgtcggtggtggtgcaatgatggtgagcggaggtggcggcggcggtgctgctgcatctggtggtgctgctgccgaggctcccaag

SEQ ID NO: 20981 - DNA, 223 bp, Zea mays
ccggcgcggccgggtacatcgcctcgtggttggtgaagctgctgctcgagaagggatacactgtgaagggcaccgtcaggaacccagatgacccgaagaacgcgcacctcaaggcgctggacggcgccgccgagcggctgatcctctgcaaggccgatctgctggactacgacgccatctgccgcgccgtgcagggctgccagggcgtcttccacaccgcctc

SEQ ID NO: 20982 - DNA, 275 bp, Zea mays
ttcctctcccaccaccaacccccagatcgcagcgatctccgccgccgccctctctgggattccgcgcgacaaagtcaggcgtagaggctccaggcggcggagggaggcgcacacgccgggtcggggagatgttcctctgggactggttctacggggtgctggcctccctcggcctgtggcagaaggaggccaagatcctcttccttgccctcgacaacgccggctagaccacgctgctccacatgctcaaggacgagcggttggtgcagcaccag

SEQ ID NO: 20983 - DNA, 111 bp, Zea mays
cgagacatcgtgaaataataataataagagcgcctgatatgtgatcagtggtgtactcgccattaagcacctgtggcaaccgatgagctgaactgtgttggactgttggat

SEQ ID NO: 20984 - DNA, 328 bp, Zea mays
cgtacgcctaccgtaccgaactcgcgtgccgacgcacgcgtccgaaactctttcccttctatccttcctcccccctgatccatcccattcggccaccagcgacaggactgggctcacgctacgaggtggaggtcaccgtgggctccgcccgggacctcaagaacgtcaactggcgcaacggcgaactcaagccgtacgccgtcgtctggatcgactccggtgccaagtgctccacccgcgtcgacctcgacaacggcgagaacccgacgtgggacgagaagctcctcgtcccgctcccgcccacctcgcgcctcgacgacgccgtcct

SEQ ID NO: 20985 - DNA, 270 bp, Zea mays
  unsure (1)..(270): unsure at all n locations
agtggacggtggctatgtccttaatgggaataagatgtggtgcaccaatggcccgtctgctcagacactggttgtttacgcaaaaacagatctagctgcagggtcaaaaggaataactgcattcataatcgagaaagggatgcccgggttcagtactgctcagaagttggacaaacttggcatgagaggaagcgacacgtgtgagcttgtttttgagaactgctttgtgccatgcgaaaatgtcctcggtgaagaaggcanaggtgttta

SEQ ID NO: 20986 - DNA, 271 bp, Zea mays
gtagtctgtaccccaagcaccggcgcggcggcggcggctaccatggcagtcgggaagaacaagaggatctccaagggaaagaagggtggtaagaaaaagaccgtcgatcccttctctaagaaggactggtatgacatcaaggccccatcggtcttcagtgtgcgcaacattgggaagactctcgtgtccaggacacagggtaccaggattgcctctgatggtctgaagcacagagtctttgaggtttgtctagctgatcttcagggtgacg

SEQ ID NO: 20987 - DNA, 264 bp, Zea mays
atctatctgattgatgaaccaagtgcttatcttgattcggagcagcgtattgttgcctcaaaagttatcaagagattcattcttcacgcgaagaaaactgcatttattgttgagcatgatttcatcatggcaacatacttggctgacaaggtcattgtttatgaggggcgaccttctattgactgtactgccaacgcaccacagtctttagtatctgggatgaataaattcttatcgcatctcgacatcacttttagaagagac

SEQ ID NO: 20988 - DNA, 269 bp, Zea mays
gcctgcaagaaatgatgctggactggcagcagctgaattagcattagcagtcgagaaacatgtcctggaatcaggatcaattgatacggttggcaccgttggtattctgcagttacatccaggagcaatcaatagcatcccaagcaaatcacacctagaaattgatgtaagagatattgatgagaagagaaggaatgatgtcattgagaagattcgccagtctgcagcacatatttcaaagaaccgtggagtagagctttcagaattta

SEQ ID NO: 20989 - DNA, 271 bp, Zea mays
gaactggggttgattggattgcgtatccaaagaatgcctagtgagccaaacttggaatttggtattccttctcagtatagctatatgacggtttgtgctccctcatgtcatgactgctctacattacgtgcttggtgggaagaagatgaaggaagaagaagtcgtttctacaagactgtagttggcagtgatgaggaggccccatctcgttgcaccccggaagtagtgcacttcattgttcagcagcattttgacgctccatcaatgtggg

SEQ ID NO: 20990 - DNA, 273 bp, Zea mays
atccagatcatgagcttgttgagatgttttgggaggtcttgaagagcttaagttcagacaaccagaaaaaatttctcaagtttgtgactggatgttctcgtggccccctccttggatttcagtatctcgaaccgaaattttgcattcagagagctggtgttccaggtctggaggagcatgcagaccgcttgccgacatcagctacctgcatgaaccttctgaagctccccccctataaaagcaaggagcagatgcaaaccaaactattgtacg

SEQ ID NO: 20991 - DNA, 273 bp, Zea mays
cctgaggttcgatggtgccctcaatgtggatgtgaacgagttccagaccaacctggttccttacccgaggatccacttcatgctctcctcctacgcaccggtgatctcttctgcgaaggccttccacgagcagctgtctgtggcggagatcaccagcagcgcgttcgagccggcttccatgatggtcaagtgcgacccacggcacggcaagtacatggcttgctgcctgatgtaccgcggcgacgtggtgcccaaggacgtgaacgccgcggt

SEQ ID NO: 20992 - DNA, 275 bp, Zea mays
cttcgtgaccaccactggcaacaaggatatcatcatggttgaccacatgaggaagatgaagaacaatgccattgtctgcaacattggccactttgacaatgaaattgatatgctcggccttgagacctaccctggcgtcaagcgcatcaccatcaagccccagactgaccgctgggtgttccccgagaccaacactggcatcattgtccttgctgagggtcgcctgatgaaccttgggtgtgctactggccatcctagctttgtcatgtcctgct

SEQ ID NO: 20993 - DNA, 215 bp, Zea mays
catcggaccgcctgacaccctatatgatggaggctacttcaatgcaataatgaccttcccccagaactatcccaacagcccgccatcagtaagatttacttctgagatgtggcatccgaatgtttatcctgatggacgtgtttgcatttctattcttcatccacctggtgaagatcccaatggttatgagcttgcaagcgaacgatggacaccag

SEQ ID NO: 20994 - DNA, 264 bp, Zea mays
cagaagcggcggcggcggacaaacgcaggcgaaggcgagggtgtgagggaaggagcaccagccatggtgcacgtcaacttctaccgcaactatggtaagacgttcaagaaaccaaggcgtccttatgagaaggagcgtcttgatgctgaactgaagctggtcggtgagtatgggctgaggtgcaagcgtgagctttggagggtccagtatgcactgagcaggatccgtaatgctgcaaggcacttgctcacccttgacgagaag

SEQ ID NO: 20995 - DNA, 263 bp, Zea mays
ggaacattcggctatgttgcgccagagtacgccatgacgggtcatcttcttgtaaagagtgatgtgtacagttacggagttgtattgcttgagctcctcactggtaggaaacctgtggatatgtcacggcctgctgggcaagaaaacctagttgcatgggctcgaccgcttctaacaaatgttctgagcctacgccaagctgtcgatccacttcttggacctaacgttccactggacaatgtagcaaaagcagctgccatcgc

SEQ ID NO: 20996 - DNA, 263 bp, Zea mays
gaacatgctgggacttgcaaagagagttggagctaggattttgttgacatcaacatctgaagtttatggtgatccacttgagcatcctcaaaccgaggcctactggggcaatgttaacccaattggagtcaggagttgttatgatgagggtaagcgtgtagcagagacgctgatgttcgactatcacaggcagcatggcattgaaatccgaattgccaggattttcaacacctatgggccaaggatgaacattgacgatggcc

SEQ ID NO: 20997 - DNA, 262 bp, Zea mays
ctgttcacttctccaggtaaggaaagggttcgtactcatggcgccgccgcagccaaagtcgggcctcttcgttggcatcaacaagggtcatgtcgtcaccaagcgcgagctgcctccccgcccgtgccaccgcaaggggaaatcaacgaagagggtgtctatggtcaggggcctgatcagagaggttgctgggtttgctccttatgagaagcgtatcactgagcttctgaaggttggcaaggacaagcgtgccctgaagctt

SEQ ID NO: 20998 - DNA, 262 bp, Zea mays
aggtggtggtgcaccgggacatcaaggccagcaacgtgctgctcgacaaggagatgaacgcgcggctgggtgacttcgggctggcgcggctgtacgcacacggcaccgacccgcacaccacgcatgtggtgggcaccatggggtacatggcgccggagctgggccacacgggcaaggcgtccaaggcgtccgacgtcttctccttcggcgccttcatgctggaggtggcctgccggaggacacccgtggtgcaggacgagcg

SEQ ID NO: 20999 - DNA, 84 bp, Zea mays
agtacctcgacgagaagaccatcttccacctcaacccgtccgggcgcttcgtcatcggcgggctctacggtcgacgtcggtctc

SEQ ID NO: 21000 - DNA, 245 bp, Zea mays
gtaccacggtgtcgccaagtttgatccggcgaccgggaagcagttcaagtcccccgccaagacgctgtcctacaccaactacttcgccgaggcgctcatcgccgaggcggagcaggacagcaagatcgtggccatccacgcggccatgggcggcggcacggggctcaactacttcctccgccgcttcccgagccggtgcttcgacgtcgggatcgcggagcagcacgccgtcacgttcgcggccg

SEQ ID NO: 21001 - DNA, 268 bp, Zea mays
atgatagctgaggctatgaaaaaggttgggcggcagggagtggtcacacttgaagaaggaaagagtgctgaaaataacctctattctgttgagggaatgcagtttgaccgtggctatatttctccctactttgtgactgacagtgaaaaaatgacagtcgagtatgagaactgcaagcttctccttgtggacaagaaaattaacaatgccagagatcttatcactatcctggatgatgctattagaagtggatatccaattctaatag

SEQ ID NO: 21002 - DNA, 270 bp, Zea mays
caccaagtacgaaaaggtcattttcccacctaggctatgcttcttagggggtcttaccttcatgggtaaaaacgagatgccagttacctttccgtattccacaatgcttaagaaactggacttgcagttcactttcctcaccactgaagaccactgtcagcttattgctaaatgccccaacctaagtgttctcgaggtgaggaatgtgattggggatagaggactggaagttgttgctgctacatgcaagaagctacgaaggctcagaat

SEQ ID NO: 21003 - DNA, 108 bp, Zea mays
cgcagaagcgcttgctctgtacggtctcattgttggaattatcctttcatcccgtgctggtcaatcccgagcagattaagtgcactaccattctgcgattaccgtact

SEQ ID NO: 21004 - DNA, 257 bp, Zea mays
cgatcgaagacccatttgatcaggatgactggagcacttatgccaaactcactgatgagattggacagaaagtgcagattgtaggagatgatcttctcgttaccaaccccaccagggtcgccaaggccatcaatgagaagacctgcaatgctctcctcttgaaggtgaaccaaatcgggtctgtgaccgagagtatcgaagctgtcaggatgtccaagcgcgccggatggggagtgatggcaaccacatgagtggcg

SEQ ID NO: 21005 - DNA, 126 bp, Zea mays
caagtttacacgcaagtttgtgcctcttgtcactccatgtccttgatttcataccgtgatttggttggcgtggcctatactgaagaggaaacaaaggcaatggctgctgagattgaggtagttgat

SEQ ID NO: 21006 - DNA, 120 bp, Zea mays
gtggtcacccaagttcactgtgattgttgctcaaaagaaccatcacaccaagttctttcagacggcatcaccagacaatgttcttcctggaactgtggtggatagtaaagtttgccatcc

SEQ ID NO: 21007 - DNA, 251 bp, Zea mays
ccgagatgtgaagccccacaatgttatgatagatcatgagcttcggaaactccggctgatagactggggtcttgctgaattctatcatcctggcaaggaatataatgtccgtgttgcatccaggtacttcaaggggcctgagcttcttgttgacttgcaagattatgattattctttggacatgtggagtctgggctgcatgtttgctgtgatgatttttcgtaaggaaccatttttctacgggcatgaca

SEQ ID NO: 21008 - DNA, 120 bp, Zea mays
gcccagcatgttgaggaggccgagaagatgggacttgactacatggatgttgaggctctcaagaaaatgaacaagaacaagaagcttgttaagaggcttgccaagaagtaccatgctttc

SEQ ID NO: 21009 - DNA, 120 bp, Zea mays
cggcctcaacgcgtgcttgcagaacgtccgcaactgctgcgtgcgtctggacgccatcgacaagctgcgggcgcactacgacgccctcgccgacgccgtcgccgaaccggccgccaacgt

SEQ ID NO: 21010 - DNA, 269 bp, Zea mays
agatcaacgacagtgtgtgaacgtgtggcgatttatccaaactatcaacgagagaaaagacttgacagagaacctgaagcagctacagtgcaggacactaatttttgttggtgagaattcccagttccatgctgaagctgttcacatgactgcaaagcttgataggcgatatagcgctcttgtggaggtacaagcttgtggctccgttgtgacagaggagcaacctcacgcaatgctgataccaatggagtactttctcatgggatatg

SEQ ID NO: 21011 - DNA, 263 bp, Zea mays
ccaaccttgactggtacaaaggcccaaccctgcttgaggctcttgaccagatcaccgagcccaagaggccttcagacaagcccctgcgtctgcccctccaggatgtgtacaagattggtggtattggaactgtaccggttggtcgtgtggagactggtgtcatcaagcctggtatggtagtcacctttggtccaactggcctgactaccgaggtgaagtctgttgagatgcaccacgaggcacttcaggaggctcttccgggt

SEQ ID NO: 21012 - DNA, 256 bp, Zea mays
gagttcgaggactccgttgcccaggctttctttgatctggagaacgggaaccaggagctcaagagcgacctcaaggacctgtacatcaacaatgctatccagatggatgttaccgggagtaggaaggctgttgtcattcacgtcccataccgcctgcgcaaggccttcaggaagatccatgtcagactcgtctaggagctggagaagagattcagcggcaaggatgtggtaattgttgctacacggaggattgtga

SEQ ID NO: 21013 - DNA, 259 bp, Zea mays
atttatcaccatgtggttggtggtgttctaaacccgaatgctgcgtaccttatccttcgaggcatgaaaacacttcatctccgtgtgcaatgtcagaataacactgctcttcggatggcccagtttttagaggaacatctaaagattgcccgtgtctactatcctggcttgcctagccaccctgaacatcacattgccaagagtcaaatgactggctttggtggtgtggttagttttgaggttgctggagactttgatg

SEQ ID NO: 21014 - DNA, 262 bp, Zea mays
aggggattgaatctgttgtcgggaaagaaaacctgggctcagatgtcatgtgctcggcctgtcagatggctgtcgtgtggatagagaaccagctccgcgaaaacaagaccaaggagctcatactgcagtacgctaaccagctgtgtgagcgtctgccgagccccaacggagagtcaacagtcagctgccaggagatctccaagatgcccagccttgcgttcaccatcgcaaacaagaccttcaccctaacacccgagcagta

SEQ ID NO: 21015 - DNA, 260 bp, Zea mays
atggtcttcaggtccttcccttggaggacgttgtctcggaagctgacatcttcgtgaccaccactggcaacaaggatatcatcatggttgaccacatgaggaagatgaagaacaatgccattgtctgcaacattggccactttgacaatgaaattgatatgctcggccttgagacctaccctggcgtcaagcgcatcaccatcaagccccagactgaccgctgggtgttccccgagaccaacactggcatcattgtcctt

SEQ ID NO: 21016 - DNA, 257 bp, Zea mays
cttttgtgagatcgatgatgactatatacaggatgattttaacctgtgtggtctgagtaatcaggtgccatattatgattatgcacttgatctcatcttagacattgagtcttctaatgatgacgggtttaccgaggagcaaaatgaattaatcgagtcatctgcagagatgctgtacggtttaattcatgcacgatacattttaaccagcaatggtctagctgcaatgttggagaagttcaagaactacgactttg

SEQ ID NO: 21017 - DNA, 245 bp, Zea mays
cctcccgacccactcgcccaaaaccgtagcgccctcgcctgctcgccgccgccgtcgttgcgagctccccatcttcctccgttaaccatggcgacccagatcagcaagaagaagaagttcgtcagcgacggcgtgttctacgccgagctcaatgagatgctgacgcgggagctcgcggaggacggctactccggcgtggatgtgcgtgtcacaccgatgcgcacggagatcatcatccgggaacg

SEQ ID NO: 21018 - DNA, 252 bp, Zea mays
gtgagcctgcccaagggcaagggtatcaagctcagcatcatcgaggagcagaggaggcgcgactttgctgcccaggctgctgccaaggcataagttctctgaatgtgctgcttggagctttttgctatgtctagttttatttttatctgcaaggatatagagctaccttcccaagacgttttatcatcatgttttgttgcttttggttcttgaacagcgtttgcagctaactgaaatggcttaattcgactt

SEQ ID NO: 21019 - DNA, 259 bp, Zea mays
gccgccaccaggtgcagagtctttcgtcatctcttctccggcgaagaacccccagtcgcccaccagatcacttgttaaactttgttgaggggtgatggcggtttctttcgcaaacctcaactccgaggcagggcttaaaaagcttgatgagtaccttctcactcgcagctacatcactggctaccaagcttccaaggatgacttggctgtctacacttcgttttcggctgctccctcgtccaagtatatcaacgtagca

SEQ ID NO: 21020 - DNA, 255 bp, Zea mays
atccatttcggcatttccaacgccttcgccctaccagccacgtcgcttcgaggccgatcgaccgagcagctggtggcaatggcggcggcggcggaggtcgtgctgctggacttctgggtgagccccttcgggcagcgctgccggatcgcgctggcggagaagggcgtggcctacgagtaccgcgagcaggacctcctggacaagggcgagctgctcctccgctccaagcccatccacaagaagatccccgtcctg

SEQ ID NO: 21021 - DNA, 255 bp, Zea mays
agtacattcaaatcggacaaactaccgctagggactgtctcatccgtttctgccatgcaatcatctcatgctacaaccaacgttacctccgtattcctaacagaaacgatgttgctcgcatacttcgtgtcaacgctgataggggtttcccgggcatgcttggctcaattgactgtatgcattgggaatggcgtaactgtccaactgtatggcggggtcaattttgtggccggaactcacgtccaaccatgatat

SEQ ID NO: 21022 - DNA, 246 bp, Zea mays
cctcgtcgtcgcctcgctgtctcctccgccgttgcctgcgatccccatcatggagggcgacagtaccaacctcgacgcggctatagagtcgctcctgaacgtggagaagcagatgaggctggccggcgatgtcgccggcacgcggaaggccgtcatcgacatcgtcgagctctgctacaaggccggcgcgtggaagacgctaaacgaccagatcgttctcctctccaagaggagatgccagcttaa

SEQ ID NO: 21023 - DNA, 247 bp, Zea mays
atgctgccaaaccggacgaatcagtgagcaccggcagcaagaatagcaccggagctgcagtcacgagggcaccgtctcagctgagaaaaaacgcaaccaccgagaaggagaaccagttgcgataatccgattgctgacatgcagtatccgtgtcgcttaaagccttgttcgtttgtgccggattggtgggtcggaacgattcgtaatcggattgcttctctaatttatataaactttgattagctgg

SEQ ID NO: 21024 - DNA, 136 bp, Zea mays
gtgttggtcctgatgcaggagcctgttgttcctggttcgttcctgagagctagagcaattggccttatgcccatgattgaccagggtgaaaaggatgacaagataatagcagtatgtgctgacgatcctgaatacc

SEQ ID NO: 21025 - DNA, 264 bp, Zea mays
agctcatccctggagaatgagccttccaatgtagtaggttctagtgagggggcaaataactctctggagctgtggaaagcagaaagtgatggtagcataccttgcccaccaaaggagctaggaggctgtggcggttcgattttggatctcaagtgtttttttccagaaaagatgctttcaaatttagaagaacgagctgacagaattatgaggagcgaagtatttgcaaaagcagtagccaaaagaagtgaccagtgcccttgt

SEQ ID NO: 21026 - DNA, 139 bp, Zea mays
catcgcgtcgctggcgcgggccaactacccgccctacggcatcgacttcgccgccggccccaccggccgtttcagcaatggcctcaccaccgtcgacgctatatctcggcttctgggcttcgacgattacatccccgcg

SEQ ID NO: 21027 - DNA, 260 bp, Zea mays
ggaattagttcgggaatataccaaggaaataaaatggcgtgatgaggattatgtccccaaaacattgaaagaacacctaaaagtttcactcataagcattggaggtacactggtgctgtgttccgcgtttgttggaatgggtgatgtagtaacaaagaagatcatggaatgggttatgagtgatgctgaacttgttaagtcttttggtatatttgtacggctctccaatgatattgtatcaaccaagcgtgaacaaagag

SEQ ID NO: 21028 - DNA, 130 bp, Zea mays
acctgatcccaaggacaaaaagcctgagtcatgggatgacgatgacgatggtacatggaagcctagaatgatacctaatccagaatacaagggaccatggaagcggaagaaaattaagaatcctaactac

SEQ ID NO: 21029 - DNA, 260 bp, Zea mays
attccactggcaggcaacaataatgggtccatctgatagcccatattctggtggagttttcctagttacaatccattttcctcccgattatcctttcaaaccaccaaaggtggcattccgcaccaaggtgttccatccaaacatcaacagcaacgggagcatctgccttgacatcctgaaggaccagtggagcccggcgctaaccatctccaaggtgctgctgtccatctgctccctgctgaccgatccgaaccccgacg

SEQ ID NO: 21030 - DNA, 260 bp, Zea mays
agctacaatcctaaaaccatctgcttcagccttcagctagccccaagtttagtcggccgatcgatcactgaagtagtagtggcctccgccaacagctggaccctcgagatcgcgtcgccggtggccccgcagcgcctgttccgcgccgccgtgatggactggcacaccctggcgcccaaggtcgcctcccacgtcgtcgccagcgcgcagcccgtggagggctacggctgcgttggcagcgtcaggcagttcaacttcac

SEQ ID NO: 21031 - DNA, 132 bp, Zea mays
ctgctgtccttcctggcgaagatcaacctggacgtgacggacctggtggcgctgtcgggcgggcacacggtgggcatcgcgcactgcggctccttcgacaaccggctgttcccgacgcaggacccgacgctg

SEQ ID NO: 21032 - DNA, 255 bp, Zea mays
gaagattaaagcacaggagctaagggagcttggaactcacaagagggcaaagaagaagagagaggagatggcgggcgtcctcaggaagatgaggtcggctggtacgcacactgacaaaaagaaatagagagcatttcaagttcatggagctggctgccagagattatgttccagtgtctgattttccatacatgtagaacctaatagacatgtcaaagtattatgtatcgaaccagctcatgggattttgctcct

SEQ ID NO: 21033 - DNA, 244 bp, Zea mays
atgcagcatacctgaggattcatggagagacagtgcttgatgaggcaatttcttttactacgagatgccttcaagatagattagaacatttggaatcaccaatagcagaggaagtgtcgtctgcccttgataccccactttttagaagggttggaactttggaaatgaaggattacattcctatctacgaaaaggacgctaaacaaaacaaatcaatattagagtttgcgaaactggacttcaa

SEQ ID NO: 21034 - DNA, 235 bp, Zea mays
gtcaattggcaattctatattttatcgtccgaagacaaacaagttcatgcagataatgcaaggttgaatttccacactggcaatgttggggaccatatagcactactaaatgtgtataattcttggaaagaaacagactattcaactcaatggtgttatgaaaactatatacaggtgcgcacatgatagagggcaagagatattcgggatcaactagatgggcttatggaaagag

SEQ ID NO: 21035 - DNA, 175 bp, Zea mays
gactcgaccgccgccgtcccagttcgcttcgcgtcaccgagagctcgtcggcctccgtccccgcgagaagcgagagcatggacacccaggtgaagcttgctgttgtggtgaaggttatgggcatgaccgggtccaagggtcaggtgacccatgtcagagtgaagttcttggatga

SEQ ID NO: 21036 - DNA, 263 bp, Zea mays
gtgaattcatcacaactgtccaacagcgtggtgctgcaatcattaaagcgagaaagttctccagtgctctctcggctgctagctctgcttgtgaccacattcgtgattgggttcttggaacacctgagggtacatttgtttccatgggtgtgtactctgatggttcatacggtgttccttctggactcatttattcattcccagtaacatgcagtggtggtgaatggaaaatcgttcaaggcctcccgattgatgagttctca

SEQ ID NO: 21037 - DNA, 163 bp, Zea mays
gcataggccgcatctcttctatcattgtcttaccactctaggtttctatggtctgaagacttgtgattttctccgcactgctgttgctattcccgtgtcgtaataatacgagatgttttaagcggctgaacacacggtggtgtaatctgttactggtaaggtg

SEQ ID NO: 21038 - DNA, 264 bp, Zea mays
agcaacttcacaaccgggaagggcaacgtgaacttggccgactccaatgtccggcccctggagatcttcatgtgcagtgtggtgcgcaagatgggctatggcgaaggcttcaaatggatgtctcagtacatcaagtgagtcgctgctgtcctcttttgtccatggcgctgctgctttcgcaagagggttgaaatcaagtctggtcgtgacatggcagctgcatggaaaggtttatggtagctagtgataggcaaagcttgtaag

SEQ ID NO: 21039 - DNA, 244 bp, Zea mays
gaataaagctttctatctgactgatctcggaagcgaacatggtacctggattaccgacaatgaaggtagacgttaccgcgtgccaccaaacttcccagttcgtttccatccctccgatgtcattgagtttggttccgataagaaggctatgttccgggtgaaggtgctgaacacgctcccgtatgaatctgcaagaagtgggaatcggcacaacagcaagtctttcaggcagctgaattggaga

SEQ ID NO: 21040 - DNA, 258 bp, Zea mays
ctcactagtactcagccgccgcaatcagggacaggtagctcgagcgcgcgctccacctgctccgacgcgatgcgggccaagtggaagaagaagaggatgcggaggctcaagaggaagcgccggaaaatgaggcagagatctaagtaggcgcatcttgtgaccgaggatggcgagcttctcctgcaccatggctgagacgcgttgggatgattgtctccctttgtagacgtgctttgctgtagacgtaggcgatgtaaa

SEQ ID NO: 21041 - DNA, 179 bp, Zea mays
gagctgtcggtggccgctcctacgatcgaggcgtccttggactcgaggttcctgagcgggctgaaggacgagcgggtggatgcctccaagatcttccatggtgactactactccaccggctcgccggtggacaaggcgcactggttggaggacgtgatgcaggccctgtacgcgtccaa

SEQ ID NO: 21042 - DNA, 220 bp, Zea mays
cttcaatcaccaattgcccttccaaaggctgttaagaaccccacagaactggatggattgaggaaggcgcatattcgagatggtgccgctgttgtacagtaccttgcttggctggataatcagatgcaggagaactatggagcttctgtttatttcagtgagataaaagggtcgcataataatgaactttagcacccaatcgtactgaggtttctgtgaa

SEQ ID NO: 21043 - DNA, 168 bp, Zea mays
gatcgctgctgacctgaaggagcatgtcatcaagcctgtcatccctgagcagtaccttgacgagaagaccatcttccaccttaacccatctggccgctttgtcattggtggacctcacggcgatgctggcctcactggccgcaagatcatcattgacacctacggtgg

SEQ ID NO: 21044 - DNA, 253 bp, Zea mays
gtggtggcaggaagaggcctgtgcccaagggtattgtctatggcaagcccaagcaccagggtatcacccagctcaagttccagaggaacaagaggtctgtcgctgaggagagagctggacgtaagcttggtggactgagggttcttaactcctactgggtgaatgaggatagtacctacaagtacttcgagatcatccttgtggacgttgcccacaaagccatcaaaaccgacccgaggatcaactggctatg

SEQ ID NO: 21045 - DNA, 247 bp, Zea mays
gtggtcactcgttggggtgtcacccgccttccccgcaaaacccacaggggtctccgcaaggttgcttgtatcggtgcatggcatcctgctagggtctcctatacagttgcctgtgctggtcagaacgggtaccaccaccgcaccgagatgaacaagaaagtttacaagatcggcaaggctggacaagagacccacgatgcctccacagagtttgacaggaccgagaaggacatcactcccatgggtg

SEQ ID NO: 21046 - DNA, 266 bp, Zea mays
  unsure (1)..(266): unsure at all n locations
ccaaggcttggtgaggacaaggtgaaacaatgtgttgatccaagattgaatggagagtaccctccaaagggagtagcaaagctagcggcagtggcggctctctgtgtccaatacgaatctgagttcagaccaagcatgagcattgtagtcaaggcgttgtctcctcttcttgtgaatgcaccgtatcagccggctgctgctcctgatgtatcttcagatgcatgacagcatgagcaactgaaaacccatgtanagaaacaccattt

SEQ ID NO: 21047 - DNA, 263 bp, Zea mays
aagagtgtggagaagaaggacccgaccggcgccaaggttaccaaggcagctgccaaaaagaaatgatgcaacctgtcgttaatcctgtatctgcttttgcaatacctgacttgtcactccatcccgaagttttgtatgcggttgttactgttattgtgtactgttaagctctgctgcggcgtgccctgttgtttgggtagcgtcaacgtcgagcgccacttgcgggtgtgcctttgtctgctatcagtagcggcaaaaattga

SEQ ID NO: 21048 - DNA, 262 bp, Zea mays
aaatcttttgtgcaggtgaagtggcaaagcttttttctgatgctggtgtcatatgcattgctagcttgatatctccatacaggagagatcgtgatgcatgccgtgctctacttccacattctaactttattgaagtatttattgatttgcccctaaaaatttgtgaagctcgtgatcctaaaggcctgtacaagcttgcacgtacaggaaagattaaaggtttcactggaattgatgatccatacgaaccaccaattaatgg

SEQ ID NO: 21049 - DNA, 265 bp, Zea mays
gtccgtgttcagccctgaggtgcttgacctttccgaggaggacctgattgagaagtttgccactggtgtctccatggttgcctccctgtcactggcgatctcgtacccgacccttgctgctgtgccccacatgttcatcaatgggtacaagaatgtgcttgctgttgctgtcgagacagactactcgtacccacatgctgacaagatcaaggagtacctcaaggacccaagcaagtttgctgttgccgccccggttgctgctggg

SEQ ID NO: 21050 - DNA, 248 bp, Zea mays
actagagtatttgacgcagatccatcaaaggaaaaaaagaaaccaaaggagggtgacaacattgttcaggatgctcctgcagatattccttccctcctagaattgaagcgtatctactatgaactgatgattcgatattacttgcacaacaatgattacctggaaatctgtcgttgttacaaggctatttatgatatcccagcaataaaggaagatccaaccaagtggataccgattcttaggaagat

SEQ ID NO: 21051 - DNA, 247 bp, Zea mays
gaacgcccggggcggtctccacaacgtgcgcttctgctagaaggaccttcagacggcgatcgaccgcgaggctgtgttcgcgtactccgacgacccgtgcagccccaactacccgctgatgcagaagctccgctcggtgctggtcgagcacgcgctggccaacggcgacgccgagcgcgccgcggagacgtccatcttcgccaaggtggccgagttcgagcagcaggtccgcgcggcgctgcccaag

SEQ ID NO: 21052 - DNA, 254 bp, Zea mays
ctacagatttcgcagttttgctgggggtaactacggaatggggggcggatccggatctttcctcaaggtcttggtcaacaacatggatgtcctcgcggggcctttggtttcacttgcgtatcctctgtatgcctctgttagagcaattgaaacaaaatctgctgtggatgatcagcaatggctcacgtactgggtgctgtactcatttatcactctattcgagctcacctttgctccggtactcgaatggcttc

SEQ ID NO: 21053 - DNA, 255 bp, Zea mays
caaggatatcatcatggttgaccacatgaggaagatgaagaacaatgccattgtctgcaacattggccactttgacaatgaaattgatatgctcggccttgagacctaccctggcgtcaagcgcatcaccatcaagccccagactgaccgctgggtgttccccgagaccaacactggcatcattgtccttgctgagggtcgcctgatgaaccttgggtgtgctactggccatcctagctttgtcatgtcctgctc

SEQ ID NO: 21054 - DNA, 256 bp, Zea mays
agtgaatgaaccatctcttgataattgctttgtcacaacgagctatgacgccaccacacattttgagacaactgtaacagatgtcctgaacatgtatacaatgatcactggaaagactgtggatcttagtgtggatttgagtgcagctagtgctgctgaagaatactgatttcagtcataatgtttatcaaagatcacatcattggggacagcacatgaccaaacttcaatgagtggctagtatgagtttagtcgg

SEQ ID NO: 21055 - DNA, 249 bp, Zea mays
gctgatgggaacacagcatgtgccaaggaaatgacaaagctctctggcatctctgaaatcatccccgagatggagatctgcgattttgactttgaaccctgtggctactccatgaatgcgatccatggctctgcattctccacaatccatgtgacgcccgaggacggtttcagctatgccagttatgaggttatgggcttggatgccactgctctgtcttatggtgaccttgtcaagagggtccttcgg

SEQ ID NO: 21056 - DNA, 250 bp, Zea mays
tcctattctgcgggaaacaaaaacaaggctgtggtctgggaggagaacactctgtatgactacctgcttaaccctaagaagtacattcctggaaccaagatggtcttccctgggctgaagaagccgcaggaacgtgctgatctcattgcgtacctgaaggaagcaactgcgtagtataatgacacgcctttgccatgaagagaaaattcgttttgcagtttaataataaacatttttagacaatttggga

SEQ ID NO: 21057 - DNA, 247 bp, Zea mays
aggcagacaagttcttctacttcatgttcttcctaacctgctccttcctctacttttcactttttggtgcgatgctggttacctgcactccttccgcaatgcttgcgagtattgttgtctcattcagtctaaccggctggaacatcttcgccggattcctcgtaccccgaccggcgttgcctatctggtggcgatggttctactggtgcaaccagtgtcctggaccatctacggcgtcacggcgtcg

SEQ ID NO: 21058 - DNA, 251 bp, Zea mays
gagaccttcaatcatctcgcaagttggttagaagatgcaaggcagcatgcaaatgctaacatgactgtgatgctgattggaaacaagtgtgatctttctcatagacgtgctgtcagctatgaggaaggtgaacagtttgccaaggagcatggtctggtctttatggaggcatctgctaaaactgcacaaaacgttgaggaggcattcattaagaccgctggtacaatatacaagaaaatccaagatggcat

SEQ ID NO: 21059 - DNA, 218 bp, Zea mays
tgttagtgtccactgtgaacagacatcgaccatccatttgcaccgaacagtcaatcagattaaaagtctaggagcaaaggcaggagttgttttgaatccagcgactccactcactgcaattgattaggttcttgatgtggttgacctggtgctgattatgtctgtgaatcctgggtttggtggccagagctttatcgagagtcaggtaaagaaaattg

SEQ ID NO: 21060 - DNA, 246 bp, Zea mays
caaggagtgtgacaatcgttgttgcatatctcatgaagaagcatcaaatgagcctcgaaagtgccttgtcactagttagaagtaaacgacctcaagtggctcctaatggggggtttatttcccagctggagaagtttcagaaatccttgcaagtggagcaggaatggagaatgcaacctgtgcagcactgataattatactagtgttataataggtgcagaaggcctcatatgttgtgaaggcgta

SEQ ID NO: 21061 - DNA, 243 bp, Zea mays
gagaaactaaaacttgcatcgatcgctcgctcgtcagttctttctgatcatcggtcgcctctctagctagtagctagctacctacctgatcggccatggctgaggagaagaagcaccaccacctgttccaccgccacaaggacggcggcgaggaggaggcgagcgccggcggcgaggtggactacgacaagaaggagaagcaccacaagcacctggggcagctcggcgggctcggcgccatag

SEQ ID NO: 21062 - DNA, 208 bp, Zea mays
cccacgcgtccgttccatcctgtcgtgggatcccagccaccgccgctagaagaagagctcggcgattgccaggtcccgcgagaatatgccggagcagatccatgagattaaggacttcctcctcaccgcgaggaggaaggatgcccgctcagtgaagatcaagatgagtaaggatgttgtcaagttcaaggtgcgctggtccaagtac

SEQ ID NO: 21063 - DNA, 243 bp, Zea mays
caccgccgaggaagcagcaagcagcaaggtcgacatgtcgtctccgccgccggtgaagctgatcggcttcttcggcagcccgtacgcgttccggcggaggcggcgctgtgcctgaaagcgtgccgtacgagctgatcctggaggacctgttcggcagcaagagcgagctcctgctccaccacaaccccgtgcacaagaaggtgcccgtgctcctccacggcgacggccgtgccatctccgagt

SEQ ID NO: 21064 - DNA, 243 bp, Zea mays
gttgtatatgacaatcaattctttgcactccgaaaaaagtgttgcccatccgagcttgcatatattacttccttaagccgctgcaagaagtggaatgctcaaggtggaaagagcaaggcctattttgcaaagacaacagatgacaggttcatcataaagcaaatcaagaaaacagagttcgattcatttattaaatttgcacctgattactttaggcatgtttaccattctctggacactgga

SEQ ID NO: 21065 - DNA, 247 bp, Zea mays
gtaagacctgcccctgtaataaccgaggaagtgacagcttcccttgaagaaatgataaagaaaagaatcgcagagagtcattttgatgatgttgagaagccgtctctcttgccatctaaagctccaaaggagcacaaggaactggatgaaactaagagcaagaagggtcttgctgaactgtatgaggatgactatgcacaaaaagcaggcattgcacctgccccactttctatttcagatgaactaa

SEQ ID NO: 21066 - DNA, 248 bp, Zea mays
gtgaagattctgatgtgagtggttccgagggagaggacacgtcctggatttcatggttctgtacattgcgaggcaatgaattcttttgtgagatcgatgatgactatatacaggatgattttaacctgtgtggtctgagtaatcaggtgccatattatgattatgcacttgatctcatcttagacattgagtcttctaatgatgacgggtttaccgaggagcaaaatgaattaatcgagtcatctgca

SEQ ID NO: 21067 - DNA, 235 bp, Zea mays
gggccgcagcagcaacagcagctgcgccacaacctgccgccgccgggccgatgccggcagctcagcctgtgcagcaggaagccgaactgcccaagaccgccccgtcggtaaacaggcctccggagaagcggcagagagtcccgtcggcatacaaccggttcatcaaggacgagatccagcgcatcaaggccggcaacccggacatcacccaccgggaggcgttcagcgcaccgca

SEQ ID NO: 21068 - DNA, 242 bp, Zea mays
caagaacattagcttcacggtctgggatgtcgggggtcaggacaagatcagacctctctggaggcattacttccagaacacacagggtcttatctttgttgtggatagcaatgaccgtgaccgtgttgttgaagccagagatgagctgcacaggatgctgaacgaggatgagctacgtgatgctgtgctgcttgttttcgccaacaagcaagatcttcctaatgccatgaatgctgctgaga

SEQ ID NO: 21069 - DNA, 240 bp, Zea mays
ccaggtctgtcctatctgccttgtgaaccccaaagacatggcgtttggctgtggacaccagacctgctgtgactgcggacagagtctcgagtcgtgtccaatctgtcgcactcccatcaccacaagaataaagctatactagcaagtggtggctttggatcattgccaatgggtggtatactggagccacctgcctcacactggaggatcgccacagcatgtcccagtaaccgtcgggac

SEQ ID NO: 21070 - DNA, 238 bp, Zea mays
gggtcctcgaaagtatacctcaagatataattgatacacacgagttacaaacaatcactctcgactacagaagggagtgtcaacaggatgatatagttgattctcttacttgcatagaggaaggagaggagaaaagcatgaacggctctgcttctgcagcagcggcctcacaaagaagagcggcagcagttcctgcattgcgtgagatttgcagccaacggacacgatatcaaccgtg

SEQ ID NO: 21071 - DNA, 201 bp, Zea mays
ggtgaagtacgagggtgtcatcctcaacaaggcccaaaacacctcgtaatcattgatagtcatcaaacgacttgccctttagcactccagttcaagtataatctgtgtactatgaattctgtgtttgttggataccaaatgcactgccagttttgcgtctgtgcccataattccatcttgatcagactagcagttaggaac

SEQ ID NO: 21072 - DNA, 236 bp, Zea mays
atttgaagttgatgttttgtatgtggacacatgcgactcgcaaattccacagaagataagcacttacacaattggacctttccaaccctccaaaggtgagagggccaaactgaaagttaaagtgcgtctcaacatccacgggattgtcacagttgattcagctatgatgctggaggaggatgtggcagttccagtctcatctgctaatgaagctccaaaggatactacaaagatgg

SEQ ID NO: 21073 - DNA, 174 bp, Zea mays
attagctaccattgcctcctgagtctgttaagaatcgagaatgtcattgttccatccgcggttatgatgatgaagaatacgattcttcagttcaaaatgtaacactaatacgagtaatgatgcatgaaattaacttgaagaagttgtgcaactcagttgtgtttctgaaccaag

SEQ ID NO: 21074 - DNA, 261 bp, Zea mays
  unsure (1)..(261): unsure at all n locations
tttagtgttgtggagcaggaactgtgctgacactgaggctgttacagacatggtcagctcgcagctacagctgcaccgttacgcaacgggtcgcgaatctagagtcgtaactgctcttacactgctgaagtcacatctctttaggtatcaaggccatgtcagtgctgcccttgttcttggtggagtggattgtactggaccgcatcttcacactngttatccacacggctccactgatactcttcattttgccagatgggt

SEQ ID NO: 21075 - DNA, 267 bp, Zea mays
gcgaccactcccaagtattccaaggcccgttacgatgagattgtgaaggaagtttcatcctacctcaagaaggttggatacaaccctgacgagattgcctttgtccctatctctggttttgagggtgacaacatgattgagaggtccaccaaccttgactggtacaagggtccaaccctgcttgaggctcttgaccagatcaccgagcccaagaggccttcagacaagcccctgcgtctgcccctccaggacgtgtacaagattggt

SEQ ID NO: 21076 - DNA, 272 bp, Zea mays
tgcgcctctacatttcttctctctctgctcctccgcctccgcctgatccatccaagacagggatcgccatgtcggactcggaggagcaccacttcgaatcgaaggccgacgctggggcgtccaagacctacccgcagcaggctggcaccgtccgtaagaacggcttcatcgtcatcaagaaccgtccctgcacagttgtggaggtttctacctccaagactggtaagcatggccacgccaaatgccactttgtcgccatagacatattcaat

SEQ ID NO: 21077 - DNA, 267 bp, Zea mays
acaagttggggctggaccgttctaaagtaaatgtaaatggaggcgcgattgcccttggacaccctctgggtgcaacaggtgcccggtgtgtggctactcttctaaatgaaatgaagcgccggggcagagactgcagatttggtgttgtcaccatgtgtatcggatctggaatgggggcagcagctgtgttcgagcggggagacgcggtggatggactctccaacgtgaaggacatgcaggcacataattttctatctaaggatgcga

SEQ ID NO: 21078 - DNA, 216 bp, Zea mays
ggtttcaatgttgaaactgttgagtacaagaacattagcttcactgtctgggatgtcgggggtcaggacaagatcagacctctttggaagcattacttccagaacacccagggtcttatctttgttgtggacagcaatgaccgtgaccgtgttgttgaaccagagatgagctccacaggatgctgaaccgagatgagctacgtgatgctgtgctgc

SEQ ID NO: 21079 - DNA, 240 bp, Zea mays
gccgacgacgaccagcagacggttgactggaggcagaaatgcgcggtcaccgggatcaagaaccagtgccagtgtggttagtgctgggccttcgctgcggtagcagccgtggaaagcatccaccagatcacgacgagcaacttagtggcactatcgggtcagcaggtgctggactgcgagaccgacggtaacaacggctgcaacagcggctacatcgacaacgccttccaatacatcgtc

SEQ ID NO: 21080 - DNA, 253 bp, Zea mays
tggatcatcccctccttttggaatgtgctttcatatgccctcctcgtgatcatatgcatcctttggtcaccatctcgcaatccaacagggtttgcctattcagaggatgcaggtgagggagctgatgaggaagggctctctctagtaggcagtgcagtgaaaggaactggggatatggtaaacatgcatatctttccggaggataagcgtgcatgataaattttggtctgaattcagctgtactcctggcaga

SEQ ID NO: 21081 - DNA, 260 bp, Zea mays
ggaaattttcttgggcgttcttcggcttcattgtcacaaggttcgagttcgtcaccgtctagtacgactgtgcgagggaggaagaggcgaggagaagatgcagatcttcgtgaagaccctgacggggaagaccatcaccctcgaggtggagagcagcgacaccgtcgacaacgtcaaggccaaaatccaggacaaggaagggattcccccagatcaacagcgactgatattcgctggcaagcagctggaggatggacgca

SEQ ID NO: 21082 - DNA, 262 bp, Zea mays
agaagctacaatcctaaaaccatctgcttcagccttcagctagccccaagtttagtcggccgatcgatcactgaagtagtaatggcctccgccaacagctggaccctcgagatcgcgtcgccggtggccccgcagcgcctgttccgcgccgccgtgatggactggcacaccctggcgcccaaggtcgcctcccacgtcgtcgccagcgcgcacccgtggaaggcgacggcggcgttggcagcgtcaggcagttcaacttcac

SEQ ID NO: 21083 - DNA, 263 bp, Zea mays
gggagtgaatgccatttgcttttatgccagtgaaatatttgtttcagctggtttctcatcaggaaatacaggaatgctggctatggttgctgttcagattccgatgacaggactaggagtacttctgatggacaaagctggacggaggccacttttgatggtatctgcagctggaacatgcctgggttgcctactagttggattgtcattcttagctaaggaacatcactggggaaaggacctgaacttagtgctggctttgg

SEQ ID NO: 21084 - DNA, 263 bp, Zea mays
atccgcctctcttctcagtgccagccgccgtgcgctcgctctctctgtccctcaaggccttcgccggcgaagagcgcctagtcacccaccaggatgaagtttgttgctgcttacctgcttgctgtccttgctgggaactccagcccctctgctgaggacttgacggccattctggagtcagttggctgtgaagttgacaatgaaaagatggagctcctgctgtcccaactgagcggtaaggacattaccgagctcattgctgc

SEQ ID NO: 21085 - DNA, 250 bp, Zea mays
attcatcacaactgtccaacagcgtggtgctgcaatcattaaagcgagaaagttctccagtgctctctcggctgctagctctgcttgtgaccacattcgtgattgggttcttggaacacctgagggtacatttgtttccatgggtgtgtactctgatggttcatacggtgttccttctggactcatttattcattcccagtaacatgcagtggtggtgaatggaaaatcgttcaaggcctcccgattgat

SEQ ID NO: 21086 - DNA, 250 bp, Zea mays
ctcctgctgtcccaactgagcggtaaggacatcaccgagctcattgccgcgggcagggagaagtttgcttcagtcccatgtggtggcggtggtgtcgctgttgcggcagcttcacctgctgctggcggagtgctcctacagctgaggcaaagaaagaagagaaggtggaagagaaggaagaaagcgatgatgatatgggcttcagcctcttcgactaggctgcacagtcatcacagtattgtttcgggca

SEQ ID NO: 21087 - DNA, 250 bp, Zea mays
cggacgcgtggtgcgcggcggggcagaagtactacgggcgcggcccgctgcagatctcgtggaactacaaatacgggcccgccgggagggacatcggcttcaacgggctcgccgaccccaacagggtggcgcaggacgccgtgatcgcgttcaagacggcgctctggttctggatgaacaacgtgcaccgcctgatgccgcaggcttcggcgccaccatcagggccatcaacggcgccctcgagtgcaag

SEQ ID NO: 21088 - DNA, 251 bp, Zea mays
aacaccaccatgtcgtctgtccaggaggagcttaataacacacaggacatgctccaaggttacgtggagctctacaattacagtctctcctacgtgaagaccatggcgatcgggtgcgcgatccagctaggcatccctagcgccatccaccgccttggtggggcagcaacaatctcggacatcgtcaccgagaccggcgtcgacccgtcgaagctcccgtatctccgacggctcatgcgcgtgcttaccgt

SEQ ID NO: 21089 - DNA, 258 bp, Zea mays
accaatgaaggtggttgatatgtttggatgcggattgcctgtttgtgctgcttcattctcctgcattgaggagcttgtaaaagtaaacaaaaatggtcttcttttctcaacatcttcggagcttgctgatgaacttatgatgctctttaaggggtttccagaagaatgcaatgccttgaaatccctcaaagaaggtgccatgaagtcagcatcatcttcgaaatggtcaacagaatgggaaaccaatgcactaccttt

SEQ ID NO: 21090 - DNA, 261 bp, Zea mays
gtgagtgacaaacttgaaggcttccgtgcaacaagagagaactttaaaggtttgaattttcctacaatttcatctgtgggaccaaatgcagcagttattcactataaacctgaagcaagcacatgttcggaaatggatgctgataaaatatatctttgtgactctggggcacagtacctggatggtacaacagacattacgagaactgtacattttggtaaaccctcagcacatgagaagtcatgctacacagcagttttg

SEQ ID NO: 21091 - DNA, 232 bp, Zea mays
gaggcatctcactggagagtttgagaagaaatatgaaccaaccattggtgtggaagttcatccgttggatttcaccactaactgtggtaagatcaggttctactgctgggataccgcagggcaagagaagtttggtggcctcagggatggatactatatccatggccagtgtgcgatcatcatgtttgatgtaacctcaaggcttacttacaagaatgttcctacgtggcat

SEQ ID NO: 21092 - DNA, 231 bp, Zea mays
agcgcgcttgctcgttgagcgtgaagaacgccgaggccaccttccctggtgtacagaaggatagcattccatatatctgcatggacctcgtttatcagtacacattactcgtggaaggattcggcgtcgatccggaccacgagatgaccttggtaaagaaggtcccttacagcgacgcctacgtcgaagccgcatggccgcttggcagtgccatcgaggttgcatcttcgt

SEQ ID NO: 21093 - DNA, 229 bp, Zea mays
gcaagccactccgaggccaagtctagggtttgggaatctgtaggaggggagaggggagcgcgctcagggtcagggaggcgaagatgatcgaggtggtgctgaacgaccgcctggggaagaaggtgcgggtgaagtgcaacgaggacgacaccatcggcgacctcaagaagctggtggcggcgcagacggggacgcgccccgagaagatccgcatccagaagtggtacac

SEQ ID NO: 21094 - DNA, 234 bp, Zea mays
ctctctccatccttgtgaatgactgtcctggtgtcctcaacattgtaacaggagtctttgctcgcaggggctacaatatacagagccttgctgttggcccagctgagaaggaaggcatttcgcggattacaacagttgttcctggtactgttgaatccattgagaagttagttcagcagctttacaagcttattgatgtgcacgaagttcatgacattacccactcaccttttg

SEQ ID NO: 21095 - DNA, 217 bp, Zea mays
ccgtgcgtgccgacgacgtcgacgccatagcgcgcgtcgctagtgacggcggcgggtgggacggcgagaccgtggtgtatgcgcaccgcacgcgggagctagtgcgacttccgcggggcgtcgcgctgcccgtgacgctaggcccgctccagtatggggtgttccatgtgtgcccgctccgcgccgtggtccggggggtctcgttcgcagcccgtcg

SEQ ID NO: 21096 - DNA, 225 bp, Zea mays
caccattcccaccaaacttcaaggaagtagtgaagacgatattcaagcgcttgttgcgtgtttatgcccacatataccactcgcatttccagaagattgttagccttaaagaggaggcccatctcaatacctgtttcaagcacttcattctgtttacaaatgagtttggcctgattgacaagaaggagctggctccactccaggagctcattgaatccatcatcg

SEQ ID NO: 21097 - DNA, 223 bp, Zea mays
gttcgtcgaacacgccaagaagttcactcaggtcgtcttcctgaaggtggacgtggacgaagtgaaggaagtcaccgcggcctacgaggtcgaggcgatgccgaccttccacttcgtcaagaacggcaagacggtcgcgaccatcgtgggtgccaggaaggacgagctcctggcccagatcgagaagcatgccgcgcctgcgcctgcgtctgcgtctgcctaa

SEQ ID NO: 21098 - DNA, 229 bp, Zea mays
ggccctaccactgtcaccggaagtgtctctggcctcaagcctggcctccatgggtttcatgtgcatgcgcttggtgacaccaccaatggctgcatgtcaactggaccacactacaatcctgcgagcaaggaacatggagcaccagaagatgagaaccgccatgccggtgatcttggaaatgtgacagctggagcagatggtgttgcaaacattaatgttaccgacagcc

SEQ ID NO: 21099 - DNA, 225 bp, Zea mays
ccttctgatgcgccccactacgtcggtcgccacctacttcagcctggaagagtggttcaaggacgcgggcgccaccgccacgctcttcgaggtggcgcacggcatgtccccgtggagcttgacgaagaacgacgcgctgtacaacaagaccttgaacgacgggtgcgcggcggacagcaacttcgccatggacacgctcctgagagagccccgggccgcgggtat

SEQ ID NO: 21100 - DNA, 216 bp, Zea mays
ggcgcagagcagcagaagcagggcgccatgatgacggcgctcaaggccgcgacggccgcgaccttcggcgggtcgatgctggtgctgtccgggctgatcctggccggcaccgtgatcgcgctcacggtggccacccccgtgctggtgatcttcagcccggtgctggtgccggccgccatcgcgctggcgctcatggcggccgggttcgtcacctcc

SEQ ID NO: 21101 - DNA, 221 bp, Zea mays
ctcaagtccctgatcgaggcgttccacagcaagggcgtgaaggtcatcgccgacatcgtcatcaaccaccgcacggcggagcaccaggacggccgcggcatctactgcatcttcgagggcggcacgccggactcacgcctcgactggggcccccacatgatctgcagcgacgacagggcgtactccgacggcacggggaaccccgacaccggcgccgactt

SEQ ID NO: 21102 - DNA, 220 bp, Zea mays
agaacaacgatggctcaaacaaaatttcaggcgacagctgaaagacctgtacaagtcctttgtttctgagtaccctatcgagtcgatcgaagacccatttgatcaggatgactggagcacttatgccaaactcactgatgagattggacagaaagtgcagattgtaggagatgatcttctcgttaccaaccccaccagggtcgccaaggccatcaatgag

SEQ ID NO: 21103 - DNA, 196 bp, Zea mays
ctcggtatctagtttggctctccgagtctctggttccctcctctctgcggctgtgctggtctctcttcatctccggcgtggctgctggcgtctgacctcttcattcaagttagctaatgtcatgttgcatggatgcgcaggccatcctcaagggcccgagtgtggttaatgtgatcttcattggactgtcctttgg

SEQ ID NO: 21104 - DNA, 226 bp, Zea mays
agccggagcccctgtccgtgttcgtcaactcgtacggcaccggcacgatccccgacaaggagatcctcaagatcgtgaaggagaacttcgacttcaggcccgggatgatcagcatcaacctcgacctgaagaagggcggcaacaggttcatcaagaccgccgcctacggccacttcggccgtgacgacgccgacttcacctgggaggtggtgaagcccctcaagtt

SEQ ID NO: 21105 - DNA, 96 bp, Zea mays
caagtctatcagcgccggcgccgcgaagaaggcagcgtcgagtagctccaaggccggactccagttccccgtggggaggagtgcgagggtcctcaa

SEQ ID NO: 21106 - DNA, 250 bp, Zea mays
ggccccgcgctgctcccagaggatgctgcgaagaggcagtttgctgacgaactgttcgcgtctgccaacgcgttcaccaaagccctctactcgccgttgctgtcccacgcggccgtgtcagacgaagttgttgcggctctggataaactcgaagctgacctatccaagttcgacgacgggcccttcttcctaggccaagtcagctttgcggatttagcgtacgttactactctggaaagggttcagatat

SEQ ID NO: 21107 - DNA, 281 bp, Zea mays
acgaaatgaggtgaccagtgatggtttattttctgttggagaaatggagtgcatgggttgctgtgtgaatgctcctatgattgctgtggctgactactcgaaaggctcagaggggtacacatataactactatgaggacctcactccaaaacgagttgttgagattgttgagatgcttagaagaggtgaaacaccccctcgaggtacacagcacccagagcgaaaaaactgtggccctgccggggggaacaccaccttgcacggagagccgaaacctcctc

SEQ ID NO: 21108 - DNA, 280 bp, Zea mays
gaaagatctaaagaaagagcttcagaaagttgttgaatggcccatcaagcatgctgctgcattttctagacttggaataccaccagtccggggggtgctgttgcatggcccaccaggggggtccaagagtaagcctttccaagcctcagcgaagtcgtccaagcctccttcttttctttgagtggtgcagatttatattccaagtatgttggagaaggggaagctctgttgcgtagaacatttcagaaagctcgtcttgcttctcccagcattatatttt

SEQ ID NO: 21109 - DNA, 271 bp, Zea mays
aacacacaggacatgctccaaggttacgtggagctctacaattacagtctctcctacgtgaagaccatggcgatcgggttggcgatccagccagggaagcccagtgggcatccaccgccgaggtggggcagcaacaatctcggacatcatcaccgagaccggcgtcgacccgtcgaagctcccgtatctccgacggctcatgcgcgtgcttaccgtctccagcatcttggccaccacaggcacagacgagactgagactgagagcgacgac

SEQ ID NO: 21110 - DNA, 270 bp, Zea mays
ggtcaccggtgggcctgagattcccttccaccccggtagggaggacaagcctcaacccccacctgagggccgccttcctgacgccactaagggttctgaccacctgaggcaagtttttgggaaacaaaagggctttgtggtcaaggcattgttgccctctctggtggccacaccttgggaaggtgccacaaagagcggtctggtttcgagggggcctggactacaaaccctttggtctttgacaactcttacttcaaggaacttctgagt

SEQ ID NO: 21111 - DNA, 272 bp, Zea mays
ccactctcccagcctctcttactctccgccgtcgccctgctcgcccgaagcagctgccggcaaaatggccccgaagagaggcggtagggcgccggtccccgccaagaagaaggcggtggtgacgaaaccgctctttgagaagaggccgaagcagtttgggatcggcggcgcccttccgcccaagaaggacctccaccgcttcgtcaagtggcccaaggtcgtgcgcatccagcgccagcgccgcatcctcaagcagcgcctcaaggtgcccc

SEQ ID NO: 21112 - DNA, 270 bp, Zea mays
gctccacatgatctctatgagagttactacaacagtaacaagtcaaacctcaagttgtatgttaggagagttttcatctctgacgaatttgatgatcttcttcccaagtacctgagctttttgaagggtattgttgactcggacacgctgcccctgaatgtgtcacgagaaatgcttcaacaacatagcagtctcaagaccatcaagaagaagctgatccgcaaagcccttgacatgatcaggaaacttgctgaagaagaccctgatgag

SEQ ID NO: 21113 - DNA, 278 bp, Zea mays
ggtacatggacgacagtgaagaggaccagaggcttcctcatcatcgcgagcccaaagaattcatccctctcgacaaactttccgaactaggaatattaagctggcgcctaaatgctgatgattgggagaatgatgagaacctcaagaaaattcgtgaagccaggggttactcttacatggacatttgtgatgtgtgcccagagaagttgccaaattacgaggctaagataaagaatttctttgaagaacacttgcatactgatgaagagatacgatat

SEQ ID NO: 21114 - DNA, 266 bp, Zea mays
ggcttttgcaattatgcatgagatgagcaaattgtcataccgggttacggaagaagatgttatccgtgcacgtaatcagctgaagtcctctatccaactccaccttgatgggtcaactgctgttgttgaggacaatgggcgccaactgcttgactctgggcggagaaatcctaacccccgagcgttttgcaagaatagatgctgttgatgcaagcactgtgaagcgtgttgcaaaccgcttcatctttgatcaggatgttgctatt

SEQ ID NO: 21115 - DNA, 265 bp, Zea mays
agaggtcactctttgttggaagccggtcagatcctaatgattcagcttcttccctatcattgtcctctccacagatatcagaaagacatgctactatcacatgcaagaataaagctttctatctgactgatctcggaagcgaacatggtacctggattaccgacaatgaaggtagacgttaccgcgtgccaccaaacttcccagttcgtttccatccctccgatgtcattgagtttggttccgataagaaggctatgttccgggt

SEQ ID NO: 21116 - DNA, 267 bp, Zea mays
gtcaagtggcccaaggtcgtgcgcatccagcgccagcgccgcatcctcaagcagcgcctcaaggtgcccccggcgctcaaccagttcacacgtaccctcgacaagaaccttgcaacaaacttgttcaagaggcttcttaagtaccgccccgaggacaaagctgccaagaaggagaggctcttgaagagggcccaggctgaaaacgaggggaaaactgttgagtcaaagaaaccaattgttgtgaagtacggccttaaccatgtgact

SEQ ID NO: 21117 - DNA, 266 bp, Zea mays
cctgagcgccgtcaacgcgtacccgggcttcgcccatggcgggacggaggtggagggcaagcgcgagatcgccgccttcttcgcgcacgtcacgcacgagaccggacatttctgctacatcagcgagatcaacaagagcaacgcctactgcgacgcgagcaacaggcagtggccgtgcgcggcggggcagaagtactacgggcgcggcccgctgcagatctcgtggaactacaactacgggcccgccgggagggacatcggcttca

SEQ ID NO: 21118 - DNA, 268 bp, Zea mays
cgatcccagcatccgagagagctccacaggccaggtccccatcgccgcggcgcttgccccacctctcccccgcccggtagtagcctcgccgccgttgccgagatggggttcgtgtccttcgtcgggagggtgctcttcgtcgccgctttcctcctctccgcctaccaggagtttaatgaattcggtgctgatggtggaccagcagctaaggcccttcggcccaaattcaacgtgtttgtcaaaaatgtatctgctcatctgggagtag

SEQ ID NO: 21119 - DNA, 269 bp, Zea mays
ggcgaaccaaacatttcttacatctgttctaggtactacagagctccagagctcatatttggtgctactgaatacacaacagccattgatgtttggtctgctggctgtgtgctcgctgagctgcttctaggacagcctctgttccctggagaaagcggtgttgatcagcttgttgaaatcatcaaggttctgggcacacccacacgtgaagaaattaagtgcatgaatccaaattataccgagtttaaattcccgcaaatcaaagctca

SEQ ID NO: 21120 - DNA, 259 bp, Zea mays
gtcatctctccgtgcaaaatgtgaagcgggttgtttcacaggcagatggttatcagcctcatttaattgctcctgagcaagggtaccgtcggctgattgaatcttctctcaattattttagaggaccagcggaagcctctgtagatgctgtgcattctgttttgaaagagctggtgaggatatccattggggagacacaggagttaaaacgatttccatctctacaaacggagctagctgctgcatgctataaggccct

SEQ ID NO: 21121 - DNA, 258 bp, Zea mays
gcgttgcgtcttgggggagagagagaagtgggagacccgcgagaggctgccgtgtagggactagggaccgtagagtaagcgacacacaggatggagagggggatggccgggatcgggccgatcagacaggactgggagccggtggttgtgcggaagaaggcacccaccgccgctgccaagaaggatgagaaggccgtcaacgccgcgcgccgctccggcgcggagatcgagaccatgaagaagtacaacgctggtatg

SEQ ID NO: 21122 - DNA, 259 bp, Zea mays
atatttaagaagccagttattgtctataactatccgaaaggaataaaggcattttatatgagactcaatgatgatgacaagacggtggctgcaatggatgttcttgtgcctaaggttggtgaattgattggtggaagccaaagggaggaacggttagatgttctgaaacagaggatacttgatgctggccggcctttggaaccctatgaatggtacttggacctccgtcgctttggatctgtaaagcacagtggttttg

SEQ ID NO: 21123 - DNA, 257 bp, Zea mays
gcttctcaaccggataggtagcaccggagcaggtagaacgctgcacaatccccttcgccgccgccaagatggtgaacgttcctaagaccaagaagacgtactgcaagaacaaagagtgcaagaagcacacactccacaaggtgactcagtataagaagggcaaggatagcctgtctgcccagggaaagcgccgttatgaccgcaagcagtcaggatatggtggtcagaccaagcctgtcttccacaagaaggccaag

SEQ ID NO: 21124 - DNA, 257 bp, Zea mays
gccccacagtgcttcaagaagttcgccgagacagccgagaagtgtgtttctgatcagggcatcgaccgcccttcgatgggtgatgtgctctggaacctggagttcgcccttcagatgcaggaaggcgcagaagagagcggaagccttggctgcgggatgtcagacgagggcgctcccttgatggtcgggaagaaggacccgaacgacccatcgatcgagtcaagcaccaccaccacaaccaccacttctataagcat

SEQ ID NO: 21125 - DNA, 259 bp, Zea mays
ggctcctcgtgtaccagagcttctgtgctgctgaagacgctgttgctacctcgcccaaatctgttttccactgctttgacggcgagaacgtggagagtgctcctcctcctatgaagaaggactacaaactggctaatcttctatgctgggaggaggaagcggatgccatggaggagaaggcgggagtgcttgatgagtaagacgggcttctggggtcgatttgcttctgagttgtttattttatatcgtcgcaatttcg

SEQ ID NO: 21126 - DNA, 252 bp, Zea mays
gacccttgctatggtcgtgccgtcgctcgctgtagccatcctctgcatcctagtccggtccgcctccgcggagttctggctcgacgagttcaccacggacggcgacgtcgcagagactacgaccgttctggccggcacgtggcgtcgcttgtcctcgaccagcgttctggcgctggcttcaactccacgcgcaagtacctcttcggcgagttcagcgtggagatgaagctcgtcggcggcaactccgctggg

SEQ ID NO: 21127 - DNA, 253 bp, Zea mays
gtcatctctccgtgcaaaatgtgaagcgggttgtttcacaggcagatggttatcagcctcatttaattgctcctgagcaagggtaccgtcggctgattgaatcttctctcaattattttagaggaccagcggaagcctctgtagatgctgtgcattctgttttgaaagagctggtgaggatatccattggggagacacaggagttaaaacgatttccatctctacaaacggagctagctgctgcatgctataa

SEQ ID NO: 21128 - DNA, 254 bp, Zea mays
gcgttgcgtcttgggggagagagagaagtgggagacccgcgagaggctgccgtgtagggactagggaccgtagagtaagcgacacagaggatggagagggggatggccgggatcgggccgatcagacaggactgggagccggtggttgtgcggaagaaggcacccaccgccgctgccaagaaggatgagaaggccgtcaacgccgcgcgccgctccggcgcggagatcgagaccatgaagaagtacaacgctgg

SEQ ID NO: 21129 - DNA, 254 bp, Zea mays
atatttaagaagccagttattgtctataactatccgaaaggaataaaggcattttatatgagactcaatgatgatgacaagacggtggctgcaatggatgttcttgtgcctaaggttggtgaattgattggtggaagccaaagggaggaacggttagatgttctgaaacagaggatacttgatgctggccggcctttggaaccctatgaatggtacttggacctccgtcgctttggatctgtaaagcacagtgg

SEQ ID NO: 21130 - DNA, 247 bp, Zea mays
gcgagatccccgagctgtgggcacctgccggccctcgacctctgctactccatgagccagcgcttcctggacgagcaccaccaccagcagctgggcaaggcggaggaggcgccgccgctcgctccggcctcgccggcgcacgccgccaccaccaactggaagatctccagccctggcgacagccggacgaggtgaaggcgaggctcaagtactgggcgcaggcggtggcgtgcaccgtcaggctctg

SEQ ID NO: 21131 - DNA, 255 bp, Zea mays
gtaccccgcctcccggttcaaccaaatccctctcgcctcatccccaccagcgcaaagccgccctatcgtcctgtcgtgagaagcaatggcgggccgtggcaaggcgattggcgctggtgccgcgaagaaggcaacgtcaaggagctccaaggctgggctgcagtttcccgtcggcaggatcgctcggttcctcaaggccggcaagtacgccgagcgcgtgggcgccggcgcccctgtctacctcgcagctgtcct

SEQ ID NO: 21132 - DNA, 254 bp, Zea mays
cttccaggtcctcatcagtcctatgcttgggggaaccaccgaccagaaagttgtggatgagaaccttgagaagctgaagaaggtgctagaggtgtacgaggcacgcctgaccaagtgcaagtaccttgctggagacttcctcagcctcgccgacctgaaccatgtgtctgtcactctctgcctgttcgctacgccctacgcatctgtgctcgacgcctacccgcatgtgaaggcctggtggtctggtctgatgg

SEQ ID NO: 21133 - DNA, 257 bp, Zea mays
caaaatacttcatgagaagatccataagaaggcttacagtgatgaggagatcattagaattctcaccacacggagcaaagctcagctacttgcaacattcaatagctacaaggatcagttcactcatgcaatcaacaaggatctgaaagctgaccccaaggatgagtttctttcaacactgcgggcgatcatccggtgcttcacctgccctgacagatacttcgagaaagtcattcgactggctcttggaggcatgg

SEQ ID NO: 21134 - DNA, 246 bp, Zea mays
gctgatccaagcgagaaagaggctgatgatggtgtatcaggtaaagatatgatgagaaaacatcgccggcaagtgctattcagtggtattatcactgctgttggaattagcttgcataatcttccagagggaatggctgtatttcttggatctgtcaagggtcttcatgtgggcctgaacttggctgttgctattgccttacataacataccagagggggttgctgtagctcttccaatctatttt

SEQ ID NO: 21135 - DNA, 247 bp, Zea mays
ggaggaacggcggacgcaacaagcacgggcgcggccacgtcaagtacatacgctgctccaactgcgccaagtgctgtccaaaggataaggctatcaagcggttcttggtgaggaacattgttgagcaggctgctgtgagggacgtgcaggaggcttgtgtgcatgatggatatgttcttcccaaattgtacgcaaaggttcatcactgtgtctcatgcgcaatccatgcgcacattgtccgtgtccg

SEQ ID NO: 21136 - DNA, 247 bp, Zea mays
caaacggtgtcatcttcaagaagttccatgagcagagaagcgaagggaacatcatacaactcaccatccatgctttctgtccggtgctcggaccgagaaagcgctcggccgcaaaagttggaccgtggggtgggagcggcgggtctccggtggacatcacggcagagccccagcgtctgaagagcatcaccgttgctactggcatcgccgtgacctcgattgccttctcctacgtcgactccgccgg

SEQ ID NO: 21137 - DNA, 245 bp, Zea mays
gtgattgtggatagattgactaaagtggctcactttattcctgtcaagactacttataaaggttctcaactagcagagttatatatggctcggattgtgtgtttgcatggagtaccaaagaagatcgtgtctgatcgaggttcgcagtttacctcaagattttggagaagctttcatgagaatatgagtacaaagttgaatttcagtacagcttatcaccctcagactgatggacagactgaaag

SEQ ID NO: 21138 - DNA, 248 bp, Zea mays
gtcgcatcctacgatccaaagctctctctgctcgcagccatggcgaagaactacccgaccgtgagcgccgagtacagcgaggctgtggagaaggccaggcgcaagctccgagccctcatcgccgagaagagctgcgccccgctcatgctccgcctcgcgtggcactccgcggggacgttcgacgtgtcgtcgaggaccggcggtccattcggcacgatgaagcatcagtcggaattggctcacggcgc

SEQ ID NO: 21139 - DNA, 246 bp, Zea mays
actgcctgacgccacaaccactcttgcggaaacacacagttttgatttgcaggcattccgttttagtgcagacaaagagtttctgaggcaatcaagagttgttcgagtaggtctaattcagaactcaattgctgttcccactacttgtcactttgctgaccaaaagaaggcaatcatggacaaaataaaacctctaattgatgcagccggcgcttctggtgtcaatattatgtgcttacaagaagc

SEQ ID NO: 21140 - DNA, 261 bp, Zea mays
tctcggagagcctgggcctagaggcgagctacatgaaggaggcgctgggcgagcaggagcagcacatggcggtcaacttctacccgccgtgcccggagccggagctcacctacggactcccggcgcacaccgaccccaacgcgctcaccatcctgctcatggacccggacgtcgccggcctgcaggtgctccacgccggccagtgggtcgccgtcaacccgcagcccggcgcgctcatcatcaacatcggcgaccagctgc

SEQ ID NO: 21141 - DNA, 259 bp, Zea mays
caatcgaccagttccccagtcttgctccctgcagtcctccctcctccatctccagcgttgtgttctgactcacctgcaccaatggctgttctttctgctgctggtgctcccccggcctcagctatcgggtttgagggctatgagaagcgccttgagatcacattctctgaggcacctgtctttgtggacccccatggcagcggtttgcgtgccctctccaggtcccagattgactctgttctggatcttgcacggtgca

SEQ ID NO: 21142 - DNA, 258 bp, Zea mays
cggaccctggcttcttcaccatcctcctgcaggacggcatgggcggcctgcaggtgcgcctcggcgacgggcagaacggcggctgctgggtggacatcgctccccggcctggggcgctcatggtcaacatcggtgaccttctgcagctcgtgaccaatgaccggttcaggagcgtggagcaccgggtgccggccaacaagagcagcgacacggcgagggtctccgtggcgtccttcttcaacacggacgtgaggaggt

SEQ ID NO: 21143 - DNA, 256 bp, Zea mays
aaattcgtcttgcctccagcaaccctcttgtgcccaaacatcttgcttcacaccacgcctaccatcaattccaaagcctcggaaacctaaatcctcccagaaaaggcttccacagcttgttgtagagcctactgatgcacgttctaattcctttgttggcacacatgagtaccttgcaccagaaatcatcaaaggggatggccatggaagcgctgttgactggtggacgtttggtgtcttcctttatgaacttcta

SEQ ID NO: 21144 - DNA, 262 bp, Zea mays
aggagcaggaagcccgagaccaagatgtcgtcggtgttcagcggcgatgagacggcccccttcttcggtttcctcggcgccgccgccgccctcgtcttctcatgcatgggcgcacgtacgggaccgcgaagagcggcgtcggcgtggcgtcgatgggtgtgatgcggccggagctcgtcatgaagtccatcgtgcccgtggtcatggctggtgtgctcggtatctacgggctcatcatcgccgtcatcatcagcactgggat

SEQ ID NO: 21145 - DNA, 256 bp, Zea mays
gaacaagagcgatctaactgctaacaaagttgtggcaaccgagacagcaaaggcgtttgctgatgagatgggcatcccattcatggagacgagtgccaaaaacgccatcaatgtggagcaggccttcatggctatggctgcatccatcaaggacaggatggccagccaaccagctgcggctaacgcaaggccagcgaccgtgcagatccgcggtcaacccgtcaaccagaagacgtcttgctgctcatcctaaggt

SEQ ID NO: 21146 - DNA, 252 bp, Zea mays
agctcgtccgagaccatgaagagcagcccacacctggtgctgatcctgtgcctccaggccgctctggtcatgggcgtcttcgccgctttggctaaagaaaatgccctggttgagagcaaggccatcgacatcaacccggggcagctcaagtgctgcaccaactgcaacttctccttctcggggctctacacctgcgacgacgtcaaaaaggactgcgaccccgtctgcaagaagtgcgtcgtcgccgtgcac

SEQ ID NO: 21147 - DNA, 251 bp, Zea mays
ccaatgatgagatcgctgctgacctgaaggagcatgtcatcaagcctgtcatccctgagcagtaccttgacgagaagaccatcttccaccttaacccatctggccgctttgtcattggtggacctcacggcgatgctggcctcactggccgcaagatcatcattgacacctacggtggctggggagcccatggtggtggcgctttctccggcaaggacccaaccaaggttgaccgcagcggagcctatgtc

SEQ ID NO: 21148 - DNA, 250 bp, Zea mays
gtagcagagacgctgatgttcgactatcacaggcagcatggcattgaaatccgaattgccaggattttcaacacctatgggccaaggatgaacattgacgatggccgtgttgttagcaacttcattgctcaggctgtgcgtggcgaaccccttactgtccagaagccaggaacacagactaggagcttctgctatgtcgccgatatggttgatggtcttattaggctgatgaacggaaacaacactggac

SEQ ID NO: 21149 - DNA, 246 bp, Zea mays
ggactacacggacgctcccccggcgccgctgatcgacgcggctgagctggggtcctggtcgctgtaccgcgccgtgatcgccgagttcatcgccacgctgctgttcctgtacatcacggtggccaccgtgatcgggtacaagcaccagacggacgcgtcggcgtcgggtgccgacgcggcgtgcggcggcgtgggggtgctgggcatcgcctgggccttcggcggcatgatctgcgtcctcgtcta

SEQ ID NO: 21150 - DNA, 236 bp, Zea mays
gcaacaagctagtagcagatgttttcttcttccacgacgtcctacgcccagggtccgtaatcacgccgatcatcccaccgaccaccaccctaccacctctgctgcctctccgcgaggccgacgcgctcccgttctccaccgggcgcttcgccgacatcctcgccatgttcgcgccgacgacatccgacgccatgggcgaagagatacggtccacgctcgacaactgcgagaacacg

SEQ ID NO: 21151 - DNA, 252 bp, Zea mays
caagtatctatcaccaccgacaccagtctcggcgtcctcacagatggaggagaaaagttggaatctctcttttacattggtttggaactctatagtgtggcttgtgcttctgaacttctccgttaagataatcacgtcgacggcacaggattatctcaaaaagcagcaggatatggagatggaacgcgtttctgattctccgcccccggaacaaaactaactagcggcgcaagtttatttcagctgctagct

SEQ ID NO: 21152 - DNA, 250 bp, Zea mays
aggacaagttaacccaaaaataagcgcattccagaaagcacaggattgtcttctgcccatgggaattacttctgaaaatgttgcccatcgatatggtgtaaccaggcaagagcaagatcaggccgccgctgagtctcataggagagctgctgcagccacggcctctggaaaattcaaggatgagatcgtcccggtcccaacaaagatcgttgatcctaaaactggagaggagaaggaagttgtgatatca

SEQ ID NO: 21153 - DNA, 247 bp, Zea mays
atttcagctgaagtcctctatccaactccaccttgatggttcaactgccgttgttgaggacattggccgtcagctgctgacctatggacgaagaattcctacccccgagctttttgcaagaatagatgctgttgatgcaagcactgtgaagcgtgttgcaaaccgcttcatctttgatcaggtactgttttggcaacctagaacctctcaccctgtagaacgttcagcatctttatgcttccttctc

SEQ ID NO: 21154 - DNA, 248 bp, Zea mays
atgccatcttcatctttggcagaggtactgaagcaattgaaggacaaatcattaaagcgagcagggctgactgaagaacaattgcaagagcagattgagcagagaaatgtcgcaaggaagaataagcagtttgagatatctgatggaatcaggaaaaaccttgctaccaaaggcatcgccctgatggacgaaccttctggtacagtatggagaccatgcgaaccagagcggtctgaagagtcatgatt

SEQ ID NO: 21155 - DNA, 249 bp, Zea mays
caacactaaggatgatcttagactcccaactgatgagactcttgtggcccagattaaggaagggttcgaaagcgggaaggatcttgttgtgactgtccagtctgcgatgggggaggagcagatctgcgcgctgaaggatgttggccccaagtaacttccttggctttggagacggaaccctactctatctcaacttaaatcggaaaagaagtgtatcaccaaaggattgctaccgagacattcacctgg

SEQ ID NO: 21156 - DNA, 265 bp, Zea mays
gccagggagctgctcaccctggatgagaagaacccacgccgtatctttgagggcgaggcgctcctccgccgcatgaacagatatggtcttcttggtgagggacagaacaagcttgattacgtgcttgctctcactgttgagaacttcctccagcgccgcctccagaccatcgtcttcaagaatggcatggccaagtccatccaccatgctcgtgtcctgatcaggcagcgccacatcagggtgggaaggcagctcgtcaacatcc

SEQ ID NO: 21157 - DNA, 132 bp, Zea mays
tgccgaactttatgatgcctatggttcagcaaggacagcaaccacagcgtcctgctggtagacgtgctggtggaatgcagcagcccatgccaatgggtggtcagcaacaggtgttccctagaggtggtcgtg

SEQ ID NO: 21158 - DNA, 262 bp, Zea mays
cagatattccagtagtgcaggtatctgaggaccttgttgtgaatgtttcacgggcattacggaatgacatcaacagagcgcttcacttgttccgtgagatcgcaatggggcatgatctgaagaagtttttgggtgtgatcgtggggctgtgggttctctccggagttggaagcagctgtgacttcctcacgttgacatacattgccgtcctgatgctccacacggtgccaatcttgtacgacaagtaccaggacaaggtgga

SEQ ID NO: 21159 - DNA, 262 bp, Zea mays
ctgggctcggcggggatccgccctgcagcatgcccttcggcgccgaccagttcgacccccacacggagtccggcaagcgcggcatcaacagcttcttcaactggtactacttcacgttcacggcggccatgatgatctccgccaccgtcatcatctacgtgcagagcaacgtgagctggcccatcgggctgggcatccccacggcgctcatgttcctggcctgcgtgctcttcttcatgggcacgcgcctctacgtgcggat

SEQ ID NO: 21160 - DNA, 262 bp, Zea mays
atccggcctccttcacccgtgccaagaaatgggttcaagaacttcaagctcaaggaaatcagaataccatagtggctcttgctggaaacaaggctgatatgctagatgcgaggcaggtgccagcagaggaagcaaaggcgtatgctcaggagaatgggctcttcttcatggagacatctgctaaaactgcaatcaatgtgaatgacatattttatgagattgcaaagaaattgcttcaagggcaacaagctccaagcccaca

SEQ ID NO: 21161 - DNA, 259 bp, Zea mays
caaaaatacacgacaacaactggatgatatacgatctaaacttctggataatctttcaaaacttcgacatgctcctagtgtccactttcaagagagagttcctgacacagaaatacctgagcaagatgaagaccaagatgatccagatgaacgacatgatcctgactctgatatggaagtggatgatcacaaggctgtggaagagtcatcgaggaggagcattctaggtataaaaatcaagagagaatttggtgaaaat

SEQ ID NO: 21162 - DNA, 260 bp, Zea mays
tccttccccagctccgacgctgctcatcgccctccctccgcgcccccgatccagatccagatccaggggcttgtcatggcatccaaacgtatcctcaaggaattaaaggacttgcaaaaggaccctccaacatcatgcagtgcaggtcctgctggtgaggatatgttccactggcaggcaaccatcatgggtcctcctgatagtccatatgctggaggtgttttcttggtgaacattcatttcccgccagactacccctt

SEQ ID NO: 21163 - DNA, 259 bp, Zea mays
gaatgttgctgtgaaggatctgaagcgtgggtatgtggcctccaactccaaggatgaccctgccaaggaggctgctagttttacctcccaggtcatcatcatgaaccaccctggccagattggcaatggctatgccccagttctggactgccacacctcacacattgctgtcaagtttgctgagctcgttaccaagattgataggcgatccggcaaggagctggagaaggagcccaaatttctcaagaacggtgatgct

SEQ ID NO: 21164 - DNA, 262 bp, Zea mays
acatgtcgaggaggaagaccagggagcccaaggaggagaacgtcacccttggacccactgtccgtgaaggagagtatgtctttggtgtcgctcacatctttgcatccttcaatgacaccttcattcatatcactgatttgtctgggagggaaactctggttcggatcaccggtggcatgaaggtgaaggctgaccgtgacgagtcgtcaccttacgctgctatgcttgctgctcaagacgtcgcacagcgctgcaaggagct

SEQ ID NO: 21165 - DNA, 256 bp, Zea mays
agaaggagtccaccctccacctggtgctccgcctccgcggtggcgccaagaagcgtaagaagaagacgtacaccaagcccaagaagatcaagcacaagcacaagaaggtgaagctctccgtgctgcagttctataaggtggacgacgccacaggcaaggtgacccgcctccgcaaggagtgccccaacacagagtgcggcgcgggcgtcttcatggccaaccacttcgaccgccactactgcggcaatgcggcctc

SEQ ID NO: 21166 - DNA, 254 bp, Zea mays
ctgaaaagcttttttgggacaaatatgagaaggccaagtttgtctatagcaagctgtggaatggttcttacttcagttatgatgatggcgacaacaaaatgagcacatctatccaagcagatcaattggctggacaatggtatgccaaagcctgtggtctcttcccaattgttgacaaagacaaggcacaaagtgcgctagagaaggtatattctttcaatgtgatgaagttcaagggtggtacaaggggagcc

SEQ ID NO: 21167 - DNA, 252 bp, Zea mays
gtatgatctacacattttacaaggcacaaggatattctgttggaaaatctctcgtggaagaggataaacttgagctcgcaacttctcttattgagaaggcgaaggcaaagggggtttctcttttgcttcccactgatattgtagtagcggacaagtttgcagccgatgctgagagcaagattgtccctgccactgctatccctgatgactggatgggtcttgatgttggccctgatgccacgaaaaccttca

SEQ ID NO: 21168 - DNA, 254 bp, Zea mays
ctgtactgtgaacaggcccctgtcaaaaactgtgaggttcaatgtcgttaaagtcattccagctggatccgcagctgctggaaagaaggccttcacagcagcctgagtttatagactatgttccatgagtagtctatagaatgatgtctttttaattcaaaagagatctctcttctaggctggtgcttttcgactataatttggagattgttccaatgtccgtgcaatcatctgaacatgttactacttattgt

SEQ ID NO: 21169 - DNA, 250 bp, Zea mays
ggacctggcgcggatcgaattaggctctccgagtctccggttccctcctctcggcggcggctcaggtccctctccatctccggcgtggcgcttggcgtctgacctcaacaagcaagaaagcaaatggcaggcggcagggttgcgcatgccaccctcaagggcccgagtgtggtgaaggagatcttcattggactgaccctgggtctgatcgcgggaggcatgtggaagatgcaccactggaacgagcaga

SEQ ID NO: 21170 - DNA, 256 bp, Zea mays
cctaccaccacagctcaccgcggtttggctttctcccctcttccgcaccgcttctcgctccggattccggattccctctgctctttccctaacgaaggtagccatggcggggagaggtaaggcgatcggctcaggcgccgccaagaaggccacgtccaggagctccaaggctggcctccagttccccgtgggaaggatcgccaggttcctcaaggccggcaagtatgccgagagagtcggcgccggcgcccctgtc

SEQ ID NO: 21171 - DNA, 256 bp, Zea mays
tgccgttcagcttcatgaaggagcgtctcgagttcctggacgcggacaagtgcgagtgcaagaacacgctcatcgagggcggcggcatcggcgtcgccatcgaaacggcgacgtcgcacatcaaggtggagcccgcggccggcggcgggagcgtggtgaaggtcgagtccacttacaagctgctgccgggcgtggaggtgaaggacgagatcgccaaggctaaggagtccgtcaccgccatcttcaagggtgccga

SEQ ID NO: 21172 - DNA, 256 bp, Zea mays
gcagacagaaggacaggcaggcagcgagtgcaaacaaccgcgagagcgatcagcgatgggctccttcttctcgaccttagtgacgccccctccgcccgccgccgacgacccgaactgcgccgtggtggccgcgcactccaaggccacctacgacgagcagtgggcggcccacaagagcagcagcaagctgatggtgatcgacttctcggcgtcctggtgcgggccctgccgcttcatcgagccggccttcaaggag

SEQ ID NO: 21173 - DNA, 255 bp, Zea mays
gactacctggctgtgactgcggcgaacacgcgacattcctgccgcactccgcggggcgctactccaagaagcggttccgcaaggcgcagtgcgccatcgtcgagcgcctcaccaactcgctcatgatgcacgggcgcaacaacggcaagaaggtcatggccgtccgcatcatgaagcacaccctggagatcatccacctgctcactgacgccaatcccatccaggtggtcgtggacgcgattatcaacagtggac

SEQ ID NO: 21174 - DNA, 271 bp, Zea mays
ctgggagaagccatgggagaacttcaaggagctgcaggaattcaagcctgttgaagagggtgctagcgcctaaggatctctccttctccatgtgcgagcctgaagctcaaagcaaagttgcagaataaggagccacctcccaacatgctagaccatgctcccttgtgtaatttcataagactacaacccttttagggcttgttcgtttgtgtctgtgtctaagggaattgaaggtgattaaatttccttctatacaaatagaggggcttta

SEQ ID NO: 21175 - DNA, 269 bp, Zea mays
ggcggttgaggaggaggagaagaagaagaagaagatggcttcctccgcgtacgcctcatggtccaagcggtggatccgtcccgaggtgtacccgctgttcgtgccgatggccgtggccctgggtatctgctcgtaccagcttgtgcgcaacatcacgggcaaccccgaggtgcgggtgaccaaggagaagagggcggccggcgtcctggacaaccacgacgagggcgagaggtacgccatgcacggcctcaggaagttcgtccgcggga

SEQ ID NO: 21176 - DNA, 244 bp, Zea mays
gaaaaatcgtagtcatgtttggactttaactttgttttatgttggaaagtacttgaaagacttttcctgtggtaattctaggcgtaggttgctgtgctggttggggtttactggtgaaccagagtttttctatctcccactatgaatttgttacctcaagttacctggatgttcactattttgttggtacatgtcgattttgcctcgttcatgcatgtccactgagtgagtatgcgcatgtgtt

SEQ ID NO: 21177 - DNA, 267 bp, Zea mays
acggactttactggaagtgagcataatgatgagttctatatggatgaggctggaaatgtgaggacacgaactaatcgctcaggcggtgttcagggagggatatcaaatggtgaaattatttacttcaaagtggcttttaagccaacagcaactatcggaaagaagcaaaatactgtgtcaagggagcatgaggatgttgaacttttggcaagggggcgccatgacccctgtgttgtccctcgagctgttcctatggtggaatccatg

SEQ ID NO: 21178 - DNA, 267 bp, Zea mays
attccaaggactctttgtgaagacaatgacccaatggatgtgttggtcctgatgcaggagcctgttgttcctggttcgttcctgagagctagagcaattggccttatgcccatgattgaccagggtgaaaaggatgacaagataatagcagtatgtgctgacgatcctgaataccgtcactacaacgacatcagcgagctgtctcctcaccgcctgcaagagatcaagcgcttctttgaagattacaagaaaaacgagaacaaagaa

SEQ ID NO: 21179 - DNA, 269 bp, Zea mays
aattctagggttttgctgctctccgaccccgagctccgaaggccgcagcatcaggcgaggcccccctcgcgtgtgaccgagatggcgctgccgaatcaggggaccgttgattaccccagcttcaagctcgtcatcgtcggcgatggtggaactggtaaaactacatttgtgaagaggcatctcactggagagtttgagaagaaatatgaaccaaccattggtgtggaagttcatccgttggatttcaccactaactgtggtaagatcag

SEQ ID NO: 21180 - DNA, 264 bp, Zea mays
ctggtagtgccgagaattgtcttggaagcacttcctgctgttttactattcgaaaagaagcaaaaggcaaaagctattgatataatagtgagtgaatgcagggataagggctatgacggtattgtgctcgagtcctggtcaagatgggctatttatggcgtgctggatgatcaagagctacgttacatggcacttgaatttgttaagcagctgggagaggctttgcattcagtcaattccaaatcaagtagccaccatttggaa

SEQ ID NO: 21181 - DNA, 261 bp, Zea mays
ggtggacaaggtttgtgaaattgtgaagaagcagcttgctcttcctgaccacactgaagtttgtggtgaatcgaaattctctgaacttggtgcggattcgctggacacggttgagattgtgatgggccttgaggagcacttcgacattagcgtggaggagtccagcgcgcagacaattgccaccgttgaagacgccgctgacctcattgacaagcttgttgctgtgaaggcataggccgcatctcttctatcattgtctta

SEQ ID NO: 21182 - DNA, 262 bp, Zea mays
ggagtaccggagtgacatttttggcgagcgaggtattttgcttggtgctgtccatggcatggtggaggctcttttcaggagatacacagaacaaggaatggacgaggactcagcatataagaatactgtagagagcatcactggaattatatcgaaaactatttcaaagaagggtatgcttgaagtgtataactccttgactgaagaaggaaagaagcagtttattgaggcctatagtgcagcatattacccatgcatggac

SEQ ID NO: 21183 - DNA, 263 bp, Zea mays
gctaaaaagtgtggatccagaccggatcattctgaagaaaattgttctgaccgggtatccacagagagtctcgaaactgaaatcgatcgtgcggtatatgttccacaatcccgacgacgtaaaatggttcaagcctgttgagttgtggacaaaacatggtcgtcgtggccgcatcaaggagactgttggtactcatggtgccatgaaatgcttattcaatagcagcattcagcagcatgatactgtgtgcatgagcttgtaca

SEQ ID NO: 21184 - DNA, 262 bp, Zea mays
tttcacgcaacatcctccagcagctgcaggagatgggcatcattgatgtcgatcccaagggtggacggcgcatcacctcccagggaaggcgtgatctggaccaggtggctggaagggttgctgttgaagcttgagcaatctcatatttggtttctatgatgtcatgtttgattgttgagatggctacactttatttgcactttggattaggatttttgtgttaagagaactcaaggcattctagctatggttcacactgtat

SEQ ID NO: 21185 - DNA, 273 bp, Zea mays
gggcaccacgcgtccgggacgcggcaagtatggagtttccgggtatccaacaatccaatggtacccgaaaggatccttggagcccaaaaagtatgaaggacaacgcactgcagaagcccttgctgaatttctcaatactgaaggaggcacaaatgtaaagctggcaaccattccttcaagtgttgtggttctcaccccagagacctttgactcaattgtccttgatgaaaccaaagatgtccttgttgagttctatgccccatggtgtggtca

SEQ ID NO: 21186 - DNA, 264 bp, Zea mays
tgtgttcagagagcctattatatgcaaaaacgttccaagacttgttccaggatggactaagcccatctgcattggaaggcatgccttcggtgatcaataccgagctaccgatgcagttctgaaggggcctgggaagctgaagctagtttttgagggaaaagaagaacagattgatctggaggtattcaacttcactggtgctggaggagttgccttgtctatgtacaacaccgacgagtcaatccgagcttttgctgaggcttc

SEQ ID NO: 21187 - DNA, 267 bp, Zea mays
tgctaacttcaagagagttgaaattactgaagatgcaaaaccagattggacagacaaagaaactcttcacttgcttgaggctgtcttgcattatggggaagactggaaaaaggtgtctgaacatgttagtagtcggtcagaaaaagattgtattgcaagatttataaggctaccttttggagaacagttcatgggacacaaggaggatagaatgaggtttgagaatactgatgagcctggagcaaatgtctcaaaacgactacgtct

SEQ ID NO: 21188 - DNA, 265 bp, Zea mays
cctggaactagggttgcttataggatgacagttcggcaattggaagcattgattcggctgtcagaagctattgctcgaagccatttagaaagagttgttctcccagctcatgtccgcctggcagttaaattgctcaagacatccatcatcagtgttgagtcaagtgaagttgatctctctgacttccaagatgctgaagatggaacaaatgtaccttctgagagtgacgccggacagccagctgaagaagatgctgctcctcagc

SEQ ID NO: 21189 - DNA, 257 bp, Zea mays
gttcctcaagggcctcatgggcaggcagaaccgcaccccgaccatcgtcgtcgtctgggccatcctgctggcgtccatcttctccttgctgtgggttcgcatcgaccccttcaccacccgcgtcactggcccggatacccagacgtgtggcatcaactgctagggaagtggaaggtttgtactttgtagaaacggaggaataccacgtgccatctgttgtctgttaagttatatatatataagcagcaagtggcgtt

SEQ ID NO: 21190 - DNA, 260 bp, Zea mays
cagaagctacaatcctaaaaccatctgcttcagctagccccaagtttagtcggccgatcattcactgaagtagtaatggcctccgtcaacagctggaccctcgagatcgcgtcgccggtggctccgcagcgcctgttccgcgccgccgtgatggactggcacaccctggcgcccaaggtcgcctcccacgtcgtcgccagcgcgcacctcgtggagggcgacggcggcgttggcagcgtcaggcagttcaacttcacctc

SEQ ID NO: 21191 - DNA, 258 bp, Zea mays
cttgagcactattgaactaaggattccaaatagttctttggggtctattgtcggtgctggtggggtcaatctagcagagatccgtcagtttctggtgcaagactgaggctacatgaggctcatgctggttcttctgagtctgtggtggagatccagggcacactggaccaagcaaaagctgcccagagcctcctgcatagctttattagtgcaaacagccggcagcaacagcagccctattcttctcgcatgccactt

SEQ ID NO: 21192 - DNA, 258 bp, Zea mays
agaaggccgagaagaagccaagggcggagaagcgcgtgccgagtaaggagggcggcgagaagaagggaaagaagaaggcgaagaagagcgttgagacgtacaagatctacatcttcaaggtgctcaagcaggtgcacccggacattggcatctcgtccaaggccatgtccatcatgaactccttcatcaacgacatcttcgagaagctcgctgccgaggcagccaagctcgcccgctacaacaagaagcccccatcac

SEQ ID NO: 21193 - DNA, 257 bp, Zea mays
gtcaaacattaagcacaaagagactcaggtcttgtttgatctcttcatcatgacgatcaatggcgccgagcgagacgaacatgagtggaaaaagataatttccgaagctggatttagcgactacaaaatcatacccgttctaggtgttcgatccatcatcgaggtctacccatgattatttggcgaatacgtgtttcgtttttttctgaataagttgtttggttaactagcatgggacgagtgtccatgagatcatg

SEQ ID NO: 21194 - DNA, 253 bp, Zea mays
gttccggtctggctcctcccgtgtgctcatcaccaccgacctgcttgctcgtggtattgatgttcagcaggtgtccctggtcatcaactatgatctccccacccagccagagaattacctgcatcgcattggtcgtagtggtcgtttcggtaggaagggtgttgccatcaactttgtgacccgcgacgacgagcggatgctgttcgacatccagaagttctacaacgtgttgattgaggagctgcctgccaac

SEQ ID NO: 21195 - DNA, 251 bp, Zea mays
atcagcaaagtgttcactcaaatcttttcatttattaatgttcagttatttaatagtcttcttcttcgccgggagtgttgttcatttagcaatggggaatatgtgaaagctggattggcagaattagagcagtggtgcatttatgcaactgaagagtatgcaggttcttcctgggaagaattaaaacatattaggcaggctgttggattccttgtgattcatcaaaagccaaagaaaacattgaaagaaat

SEQ ID NO: 21196 - DNA, 256 bp, Zea mays
gctgatcggcttcttcggcagcccgtacgcgttccggcggaggcggcgctgtgcctgaaagcgtgccgtacgagctgatcctggaggacctgttcggcagcaagagcgagctcctgctccaccacaaccccgtgcacaagaaggtgcccgtgctcctccacggcgacggcagggccatctccgagtccctcgtcatcgccgagtacgtcgacgaggccttcgacgggccgccgctgctccccgccgacccctacgc

SEQ ID NO: 21197 - DNA, 261 bp, Zea mays
gacagggatcgccatgtcggactcggaggagcaccacttcgaatcgaaggccgacgctggggcgtccaagacctacccgcagcaggctggcaccgtccgtaagaacggcttcatcgtcatcaagaaccgtccctgcaaggttgtggaggtttctacctccaagactggtaagcatggccacgccaaatgccactttgtcgccatagacatattcaatgggaaaaagcttgaagatattgttccttcatcacacaactgtga

SEQ ID NO: 21198 - DNA, 252 bp, Zea mays
gacaaggttcggaatgatggcagctcagcccaaggcgttcttcgatgccaccggtgggctctggagggagcagagcctcgctggcaagcctgccggcatgttcttcagcactggaacccagggtggtggccaagagactacaccgctgacggcgattacccagttgacgcaccacggcatggtgtttgtgcccgtgggctacaccttcggcgccaagctgttcggcatggaccaggtccagggtggcagccc

SEQ ID NO: 21199 - DNA, 253 bp, Zea mays
cttcggcaacgaaactgaggcaaagatctttgccaaagtcagaggatgggagactgagaatattgaggagattgctttgaagatctctcaacttcctttggcttcaggcaagcaaaagaggattgctgtgattactcaaggtgctgatccagtggttgttgctgaggatgggaaggtgaaaacgttccctgtgatcctattgcccaaggagaagcttgttgacaccaacggcgcaggtgatgctttcgttgga

SEQ ID NO: 21200 - DNA, 253 bp, Zea mays
tcataaggttgttcaacgccactttcatgatctttcacaacgatatggcaagataattgttgctgacttgactgataaacgaggtgatgaaggagatttgagcaatgcatttgctgctgaaatggacagaattcctggtgtcaggtatatacattttgatttccatcatgtttgtcgtggaggtaactttgacaatttgcaagctctctacaatcaaattgaggaagctattcataagcaaggatattttctt

SEQ ID NO: 21201 - DNA, 251 bp, Zea mays
aaaaagatgcaaagtattgttcctaataaattaacttctggcacagtccaatgtgcctttgatgatgtaaatatagaccacccagacttcctgtatatccaatctttaggagaatctggtataatatccagcaagttgtcaaactccttggaaacattaacaactggctctccttcccagggaaattccttgttcctacctgatagttacctctctcgtttcgatcttgtcaactggaaagtgcttgtgga

SEQ ID NO: 21202 - DNA, 240 bp, Zea mays
ccatctgcttcagccttcagctagccccaagtttagtcggccgatcgatcactgaagtaggaatggcctccgccaacagctggaccctcgggatcgcgtcgccggtggccccgcagcgcctgttccgcgccgccgtgatggactggcacaccctggcgcccaatgtcgcctcccacgtcgtcgccagcacgcacccgtggagggcgacggcggcgttggcagcgtcaggcagttcaactt

SEQ ID NO: 21203 - DNA, 128 bp, Zea mays
accccgtcgcttccggctcccgcagcgtcgccgaccttcacagccggttccttcctctgccaccatggggaagacacgtggtatgggagctgggcgcaagctcaagacccaccgcatgaaccagaggt

SEQ ID NO: 21204 - DNA, 241 bp, Zea mays
acaaacttggcattcttgcctgttcttaattattgccaggacaggagaaacaaagatgaggcctcagctgatactcgtcggcactctggctgttctcgccatcctcgcagctctcggcgaaggctcgtcgtcctggccctgctgcaacaactgcggtgcttgcaacaagaagcagccgccggagtgccagtgcaatgacgtgtcggtcaacgggtgccatccggagtgcatgaactgcgtc

SEQ ID NO: 21205 - DNA, 245 bp, Zea mays
ggaacgtggtgctggagcaactcttgcctgtggtactggtgcttgtgcagtggttgttgcagctgttcttgagggtcgagctgagcggaaatgtgtagttgatttgcctggcgggccattggaaattgagtggagggaggatgacaatcatgtttacatgactggtcctgcagaggtcgtcttttatggatctgttgttcactaggtactggggaccaagatagaagggttggctgccactcaga

SEQ ID NO: 21206 - DNA, 249 bp, Zea mays
gccatctcccacgtccagaacctcatcaagggggtcaccaagggctaccgctacaagatgaggtttgtctacgcccatttccccatcaacgcgtccatcaccaactccaacaccgccatcgagataaggaacttcctcggcgagaagaaggtcagaaaggtggacatgcttgacggcgtgaccatcctccgctccgagaaggtcaaggacgagcttattctcgatggcaacgacgtcgagttagtctct

SEQ ID NO: 21207 - DNA, 246 bp, Zea mays
ggcaagcgcgagatcgccgccttcttcgcgcacgtcacgcacgagaccggacatttctgctacatcagcgagatcaacaagagcaacgcctactgcgacgcgagcaacaggcagtggccgtgcgcggcggggcagaagtactacgggcgcggcccgctgcagatctcgtggaactacaactacgggcccgccgggagggacatcggcttcaacgggctcgccgaccccaacagggtggcgcaggac

SEQ ID NO: 21208 - DNA, 245 bp, Zea mays
caccaccaacggctgcatgtcgactgggccacacttcaatcctgttggcaaggagcatggcgcaccggaagatgaggaccgccatgccggtgatcttgggaatgtgacagcgggagaagatggtgttgttaatgtcaatattactgacagccagatacctcttgctggaccccactcgatcattggccgagctgttgttgtccatgctgatccggatgaccttggcaaaggtggacatgagctta

SEQ ID NO: 21209 - DNA, 244 bp, Zea mays
ctcgtgttcctcatctttctatcgtgactgaatttctgccaaggggtagtttatttcggttaatccataggcccaataaccagttggatcaaaaaggcgtttaaggatggcacttgatgtggcacgtggtatgaattatttacacaattgcaccccagtcatagttcaccgagacttgaaatctccaaatctacttgttgacaaaaattgggttgtgaaggtctgtgattttggtttatcacgt

SEQ ID NO: 21210 - DNA, 253 bp, Zea mays
gatgaactgaccatagaagatgtgagaaggaagaacccaaggggaatacttatttctccaggacctggtgaaccacaagattcgggaatatcattgcagactgttcttgaattaggcccaaccatcccaatttttggagtttgcatgggtctgcaatgcattggagaggcatttggaggaaagattatccgtgctccttctggagtgatgcatgggaaacgctctccagtttattacgatgaggaattaggaa

SEQ ID NO: 21211 - DNA, 254 bp, Zea mays
cactcatccacagctcgcagccgtattcctgtctcgaatcctctctcgccgctccgatggcccgcacgaagcaaacagcaaggaagtcgaccggcggcaaggccccccggaagcagctggccactaaggctgcgcgcaagtcggccccggccaccggcggcgtgaagaagccccaccgcttccgccccggcaccgtcgcgctccggagatccgcaagtaccagaagagcactgagctgctcatccgcaagctcc

SEQ ID NO: 21212 - DNA, 252 bp, Zea mays
agcttggtgccaagctgaccaagctcaccaagtctcaggccgactacatcagcgtgccgatcgagggtccctacaagcctgcccactaccggtactaggcacacggcttgcagctcactcgggccgttgtgtgctatgaagttcgctacactggcctgtcagttatcttttgcatgcatatgcattatcatatacgcagtcgcgtacagggctttcttatggttatcgcttgacgtgaggggggagggaagg

SEQ ID NO: 21213 - DNA, 244 bp, Zea mays
tctggaaccccggcttcgacttcgacgacaaaatcctcggcttcatcaagggctacaagcgcacctttaatctcgcttgcattgaccacagaggcacaccggagcatccggcgaggacctgcacgcttgaaaccgacgacgaggccatatgctggggaattgcatattgtgtcaagggtggtccagaaaaagagctaaaagcaatgcagtacttggagagaagagagtgtgagtacgaccagaa

SEQ ID NO: 21214 - DNA, 232 bp, Zea mays
ggaagattgaaattccgctacccaacgagcaatcaagaatggaagttctaaaaatccatgcagccggtatcgccaagcatggggagattgattatgaagcagtcgtgaaactagctgaaggtttcaatggggctgatcttcggaacgtgtgcaccgaagctggcatggctgcaattcgtgcagagagagattacgtagtccacgaagacttcatgaaggctgtgaggaagct

SEQ ID NO: 21215 - DNA, 248 bp, Zea mays
ccaagattgataggcgatccggcaaggagctggagaaggagcccaaatttctcaagaacggtgatgctggtatggtgaagatggttcccactaagcccatggtggtggagaccttttctcagtatcctcctcttggtcgatttgctgtccgtgacatgaggcaaacggtggctgtcggagtcatcaagagtgtggagaagaaggacccaactggagccaaggtgacgaggctgctgccaagaagaaat

SEQ ID NO: 21216 - DNA, 250 bp, Zea mays
ctttagtcggccatctgaagatagaactattccattaagtgttattgctgagcagactaagctttcaatcagtgatgtggagtatctccttatgaagagcctctcggttcatcttattgagggaataattgatgaagtggacagtacagttcatgtttcgtgggtccagcccagagtgcttggaatcccacaggttaaggctttgcgcgaccgcctggatgcctgggttggaaaggtgcatactacattg

SEQ ID NO: 21217 - DNA, 250 bp, Zea mays
ggatgtcaagaaggaggctccaaaggaggcccccaagccaaaggtggttgaggcaccagcagaagaggaagcaccaaagccaaagccaaagaatcctcttgacttgctgccaccaagcaagatggtccttgatgactggaagaggctatactcaaacacaaagactaacttccgggaggttgccatcaaaggtttctgggacatgtacgacccagatggctactctttgtggttctgtgactacaagtac

SEQ ID NO: 21218 - DNA, 250 bp, Zea mays
ggtcgacatgtcgtctccgccgccgccggtgaagctgatcggcttcttcggcagcccgtacgcgttccggcggaggcggcgctgtgcctgaaagcgtgccgtacgagctgatcctggaggacctgttcggcagcaagagcgagctcctgctccaccacaaccccgtgcacaagaaggtgcccgtgctcctccacggcgacggcagggccatctccgagtccctcgtcatcgccgagtacgtcgacgaggc

SEQ ID NO: 21219 - DNA, 245 bp, Zea mays
ccctaacagccgttttttcccagtttgggaaaattcttgatgtgcttgctttcaagactttgaagcataaaggtcaagcttgggttgtcttcgaagatgtcgcatcagctactgaggctctgaagaggatgcagggctttcccttctatgacaaaactatgagaattcaatatgccaagaccaaatcagatattatagcaaaggctgatggcacctttgtacctcgagaaagaagaaagagggct

SEQ ID NO: 21220 - DNA, 210 bp, Zea mays
ggccgagctcatcaacaacaggcacgtcatggagaagctacagacggaggtgaggacgacgatgcgctcgccggacggcaagaagctggacatgctagcggaggaggacctcggcagcatgccctacctcaaggcgaccatcaaggagacgctgcgcctgcacccgccggcgccgttcctcctcccgcactactccacggccgactccga

SEQ ID NO: 21221 - DNA, 247 bp, Zea mays
gaagaagtacggtcaggatgcgacaaacgttggggatgaaggtggttttgcacctaacattcaggaaaacaaagaaggccttgaactattgaaggcagccatagaaaaggctggctacactggaaaggtggtcattggaatggatgttgctgcttctgaattcttcggtgagaaagacaagacttatgatcttaatttcaaggaggagaacaacgatggctcaaacaaaatttcaggcgacagctga

SEQ ID NO: 21222 - DNA, 236 bp, Zea mays
agataactctgcgcagtgtcccaaattgacacggagcaactgctggcccatctagtagaaacagaaatgataaagagaacgaaagaaggaaggtacaagggaaggaagttcagttcagtatgtcatttctttggatatcaggctcgaggatctacaccatcaaatttcgactgtgactatgcttatgctcttggacgtatctccctgcatatgattacagttggattgactggcta

SEQ ID NO: 21223 - DNA, 240 bp, Zea mays
cagcaaatgatgtctatgaatttgttaaaaagattggaaaattcaaggaaacaaaaaggacagacggggtttctacttcagatctcataatgaggatcttgaaggactataaccagtatgtcatgaggaatttagcacggggctactcgaggaaagatcttggtgtgagctatgtcaaggagaaacaattgcaagttaatatgaagatcaataaactgcgggagactgtgaaggcacatc

SEQ ID NO: 21224 - DNA, 230 bp, Zea mays
agcacatctccgtgccatggagattgccaaagaggcaggtgcactgctctcttatgacccaaacctgagggaggcactatggccatcccgtgaggaggcccgcacccagatcttgagcatctgggaccaggcagacattgtcaaggtcagcgaagtcgagctcgagttcttgacaggcatcgactcggtggagtacgattttgtcatgaagctggggcggcctaccatga

SEQ ID NO: 21225 - DNA, 254 bp, Zea mays
aattcaggtggtccagcttttaatgatagaggcaaatgtgtcggtatagcatttcaatctcttaaacatgaagatgccgagaatataggctatgtgataccgactccagttattacacatttcatcgaggactacaaaaattctggaggatacacagggtttcctatactaggagttgaatggcagaaaatggagaatcctgatctccgtaaagcaatgggaatgaaaccagatcaaaagggtgttcgtgttag

SEQ ID NO: 21226 - DNA, 258 bp, Zea mays
gctacccagcacagcagtcagcagtgtatacaattacattcatgcacacgatggcactcagcactcaggacttgctcgaagctcacgtcgagctctggcaccagtccctgtgctacgccaaatcgctcgcgctcgcagtggcactggacctccgcatccccgacgcgatccaccaccatggcggcacgccacccttccccagatcctcgccgagactgcggcccacccaagtaagcttcgcgctctacgccgcctcat

SEQ ID NO: 21227 - DNA, 263 bp, Zea mays
gctcgtcgtcggcagccatggttacggagccattaaaagggctgttcttggaagtgtgagcgactactgtgcccatcacgcgcactgcaccgtgatgatagtaaagaagcccaagcagcacaagcactgatcaatgccgactgatcactacgtgtactgcaaataatttgtactactgcaagttatgtgtgcgtccgtccgtttgtgaataattgggtcatcaaccatcacatcttcggttgcttctacaagtatccgatcca

SEQ ID NO: 21228 - DNA, 264 bp, Zea mays
ggagtacaacaaggcccgcctcgtgtccctcgagctccccgaccgcagtggcgacataatcatcacaacttatggggagattgacaagaacaattatctggaccccaggactgcgcaagttgctactatagatcatacgaaacagacttgtacgaaactgaggcccgctgaagatgaggagcttccatcggcttacattgaagagtttaggtagactacctgtgcgtctttcctttgacttattccagttaccatattatatca

SEQ ID NO: 21229 - DNA, 253 bp, Zea mays
gccaaaggtggttgaggcaccagcagaagaggaagcaccaaagccaaagccaaagaatcttcttgacttgctgccaccaagcaagatggtccttgatgactggaagaggctatactcaaacacaaagactaacttccgggaggttgccatcaaaggtttctgggacatgtacgacccagagggctactctttgtggttctgtgactacaagtacaatgatgagaacaccgtctcctttgtgaccctgaacaag

SEQ ID NO: 21230 - DNA, 246 bp, Zea mays
ctggaaagtaccttggtacagctagctttgacaagacttggagattgtgggacatcaatactggcaaggaactgctactccaagaggggcacagcagaagtgtatatggagttagctttcaccctgatggttctttggcagcatcttgtggtcttgatgcatatgctcgagtatgggatctgagatctggaagattgttctttacactcaagggccatgtgaaacctgtcctaggagtcagcttct

SEQ ID NO: 21231 - DNA, 248 bp, Zea mays
ggcccacaccatgtacagatcttgcatgagccaattggtgttgcaggtcagatcatcccatggaactttcctcttctgatgtatgcctggaaagttggccctgctttggcatgtggaaatactctcgtgctcaagactgctgaacaaacccctctatcggctttgtatatctccaaattgttgcatgaggctggactacctgagggtgttgtgaatgtcgtttctggttttggccctactgctggtgc

SEQ ID NO: 21232 - DNA, 251 bp, Zea mays
tccgccgccgccgaagacggaaggagaagagggtacggccgtctcctcgcccccatggcccacgagaagaagctgtccaacccgatgcgggagatcaaggtgcagaagctcgtcctcaatatctccgtcggggagagcggcgaccgtctcacccgcgccgcaaaggtgctcgagcagctcagcggccagacccccgtcttctccaaggcgaggtacacggtgcggtcgttcggcatccggcgtaacgagaa

SEQ ID NO: 21233 - DNA, 127 bp, Zea mays
ggtgagccgtgcgtccctcgaccagaagctcgccctcgccaagcgttgctcccgagaggcgaccctcgccggagccaaggcggcagcggtggcgactatcgcctccgcgatccccaccctggccagc

SEQ ID NO: 21234 - DNA, 245 bp, Zea mays
gttcttatgcgtggccattgggctttgggctggtctcgccatcggcttcaccaccgagtacttcaccagcaacgcctacagcccggtccgggacgtcgctgactcatgcaggacgggcgctgcgaccaacgtcatcttcggcctcgccctcgggtacaagtccgtcatcgtgcccgtcttcgccatcgccgtgtccatctacgtcggcttcacgctggcatccatctacggcatcgcggtcgccg

SEQ ID NO: 21235 - DNA, 244 bp, Zea mays
cattaatattggcagcaagctaggatcatcagcatctgagcttattattactaaatcgatcggttgccatggcggggatgagagtcggcaagctggcgctggctgcggtgctgctgtgcgcggcggcggccatggccacggcgcacaggcctccggcgtgtgcgccacctacaacttctacaacccgcagcagaacaactgggacctcaacgccgtgagcgcgtactgcgcgacgtgggacgca

SEQ ID NO: 21236 - DNA, 247 bp, Zea mays
ggcaattcgccgcagcctctcaccctcgcgagtcccgacctcccgcagccgccgcacagatggcacccaaggcggagaagaagccggcggccaagaagcccgcggaggaggagcccgcgacagagaaggtggagaaggctccggcggggaagaagcccaaggccgagaagcgcctcccggcgggcaagtccaaggagggcggcgagggcaagaaggggaaaaagaaggcgaagaagtccgtggagac

SEQ ID NO: 21237 - DNA, 243 bp, Zea mays
ctcacggcgatgctggcctcactggccgcaagatcatcattgacacctacggtggctggggagcccatggtggtggcgctttctccggcaaggacccaaccaaggttgaccgcagcggacctatgtcgcaaggcaggctgccaagagcatcgtcgccagcggccttgctcgccgcgccatcgtccaggtgtcttacgccatcgggtgcccgagcctctctccgtgttcgtcgacacgtacggc

SEQ ID NO: 21238 - DNA, 247 bp, Zea mays
gagcgcatcaagaagaccaaggatgagaagaaagcgaagaaggcggaggtgagcaagtcccagaagacgcagacaaagggtgcggtccagaagggttccaagggccccaagttgggcggcggtggtgggaagcgctgaaagaacttaaggcctgtttggaggctgacgtcgagcgccacaccccgcctaagatgcggcggccaatttggccccacaactgcggcgcgtggcgtgtggcgcggcgtgg

SEQ ID NO: 21239 - DNA, 251 bp, Zea mays
ggctacccggccttcgcgctcgtcaacaaggtcaccggcgaggcgctcaagcactccacggggcagggccaccccgtcaagctcgtgccctacaacccggactaccaggacgagtccgtgctctggaccgagagccgcgacgtcggcaacggcttccgctgcgtccgcatggtcaacaacatctacctcaacttcgacgccttccacggcgacaaggcccacggcggcgtccatgacggtaccgagatcgt

SEQ ID NO: 21240 - DNA, 252 bp, Zea mays
ttttagaaggtcttggatatgaaaggccttcagtaaaaataccagtctctgttatgatgccagtggctcatgttgtagaatggacttaccagaaatttgccaagtatggaatgaaagttcctcagctgaccccttcaaggatcaggctgctttcatgtaacaggacattcagttgctcaagagcaaaggagcagcttggttatgaacctctcgtgtcccttaaggatggagtgaagagaacagtagagtcgt

SEQ ID NO: 21241 - DNA, 276 bp, Zea mays
ggctaatattgctatacaaatggcgacctccagaaaaggatgagcgtcctgtcatcaaggatgcaatcccaaaccttttctttgccaaccagataattaacaaagcctgcgcaacccaagctatcgtttcggttctcttgaactctcctggcattacccttagtgatgagcttaaaaagctcaaggaatttgcaaaggatttgccacctgagctcaaaggactggctatagtcaactgcgcaacacttcgtatgttaaacaattcgtttgcgaggt

SEQ ID NO: 21242 - DNA, 274 bp, Zea mays
ccatgagaatatagttaccaagatggctaaggctgctcagaaatttggaatgaagagagcattggtcgtccattcaaagggtttggatgaaataagcccacttggtcccggatatatccttgatgttactccagagaagattgaaaaaatgttcttcgatccattggattttggcattcctcgctgcatattggaagatctgaaaggaggcgatccagcgtttaatgcaaaagttctccaggatgttcttgctggtcaaaggggggcgattgca

SEQ ID NO: 21243 - DNA, 274 bp, Zea mays
gttgaaatgggaacatactttcaagttcaggatgactatctagattgttttggtgatcctgaattcattggcaagatcggaactgacattgaagactacaaatgttcctggctagttgtgcaagctcttgagcgtgctgctgagaaccaaaagagcattctgtttgaaaattacggaaagtctgatccagcgtgtgttgcaaaggtgaaggacttgtacaaagagcttaaactggaggaggttttccatgagtacgagagggagagttacaaca

SEQ ID NO: 21244 - DNA, 274 bp, Zea mays
aattctagggttttgctgctctccgaccccgagctccgaacgccgcagcatcaggcgcggcccccctcgcgtgtgaccgagatggcgctgccgaatcaggggaccgttgattaccccagcttcaagctcgtcatcgtcggcgatggtggaactggtaaaactacatttgtgaagaggcatctcactggagagtttgagaagaaatatgaaccaaccattggtgtggaagttcatccgttggatttcaccactaactgtggtaagatcaggttct

SEQ ID NO: 21245 - DNA, 273 bp, Zea mays
agagacacttttcttcaggaagaagttcagtcggagtatccagatgtccctttctgtgctccttcttggtgttggtgttgcaactgtcactgatctgcaactcaatgctgtgggatccatactctccttgctggcaattatcacgacttgcattgctcaaattatgacaaacactatccagaagaagttcaaggtctcatcgacccaactgctctaccagtcttgcccttatcaatcactgaccctgtttctcattggccccttccttgatgg

SEQ ID NO: 21246 - DNA, 272 bp, Zea mays
ctcctgttcaccccgcgtcgtcttcgctctcacgatccctcggcagtcggcgacggctgggcgaccgccacttccgccttctcttcctactgagcgtctccaggcacgcttctgaattcggagttgccagcattcgctcgaggtgccggaccagatctcaccatcatgcaggctagcgatagattcaacataaactctcagcttgagcatcttcaagccaaatatgttggtacagggcatgctgatttgtctagatttgaatgggctgtaaa

SEQ ID NO: 21247 - DNA, 277 bp, Zea mays
gcggccgctcgggtctgggcgccggatctgccccggggccaacttcgcgctcgcgaccatggagatcatgctcgccaacctcatgtaccatttcgactgggaggtccccaatgagaaggaagacggtggcgggaaggtgagcatggatgagacgttcgggctgatgcttcgcaggaacgagccgctctaccttgttcctagggccgtctagctagctagttactgtgccgccgccgcctcctatccaagaatgcatgagtcttagacgtgtggcagt

SEQ ID NO: 21248 - DNA, 182 bp, Zea mays
gtggtttgctcttcaagctacttcagagattcctggaaatgttgcaaatgttcagaagctgctgtctcaccctgctttcgacctgaggaatcccaacaaggtgtactcactaatcgggggattctgtggctcacctgtgaacttccacgcgaaagatggttctgggtacaagttcttgggtg

SEQ ID NO: 21249 - DNA, 266 bp, Zea mays
gggttggtgaatcgacaggtgtcttgcagcgtcttgcaaggccttttgttttgttacggccgcgcgcctcgtggcgcgcctcgggctcgcgataattggcgaatttcgacatctggccgatccccggattgaaacaattgcaggggtccagctcgcgatagaactcggccagcgccggcttggcgcgatacaggtggccgacgttgtgctcggccggatattcggcgccgcgcgcgtcgagcaggcgccacatgcggtgctccaga

SEQ ID NO: 21250 - DNA, 269 bp, Zea mays
acaatgattacctggaaatctgtcgttgttacaaggctatttatgatatcccagcaataaaggaagatccaaccaagtggataccgattcttaggaagatctgttggtacttggtgctagcacctcatgatcctatgcaatcgagccttctcaatgctacactagaggataaaaacctttcagaaatcccaaatttcaggttattgctgaagcagctggttaccatggaggtcatccagtggacagcattgtgggaattctctaagcac

SEQ ID NO: 21251 - DNA, 274 bp, Zea mays
attgaaaaaaaaaacaggcaaggaaaatggctccgaccgccgccaaggacagtggctccgccgatcgctggcgcgaggtgcaggcgttcgaggacagcaagctgggtgtgaagggcctggtcgactccggcgtcaagtccatcccggccatgttccaccacccgccggagtccctcaaggatgtcatttctccaccagctctgccctcctccgacgatgcgccggccatcccagtggtggacctgtccgtggcgcggcgcgaggatctggtggc

SEQ ID NO: 21252 - DNA, 269 bp, Zea mays
tggatgtgaagctccaggagctcaaagacgccatttctggtggatcaacacagagtatgaaagatgccatggctgctctgaaccaggaggtgatgcagattggccaggcaatgtataaccagcctggtgccagtgctgctgggcctactcctggtgctgaggccggacctacgcctggtaccggaccaacgcagaatgatggggatgtcattgacgcagacttcacagatagcaattgaggggtgattgatgcatggccatgtgttgag

SEQ ID NO: 21253 - DNA, 263 bp, Zea mays
cccacgcgtccgggtgggcgagcacggggacagctccgtggccgtgtggtcgagcgtcagcgtcgccgggatgcccgtgctcaagacgctgcgggacagccacagcagcttcggcgaggaggcgctcgagggcatccgccgcgctgtcgtcgacacgcctacgaggtcatcggcctcaagggctacacgtcctgggccatcggctactccgtcgccaacctcgtgtcctcgctcgtccgcgaccagcgacgcatccagccggt

SEQ ID NO: 21254 - DNA, 260 bp, Zea mays
gtcatcgtgaagattggatcaagatacgactgcgggcacctcatcccagaaggcttccaggtcgtggcgcacggagatggctatgccgtctgggagaaaaactgagccaaatctgtgcctgatccgtccgtccggtccggcacgacgagttttagcggatttgacctgcattttccttagcttattattactccaaatacgggatatatatagcgacaacctgtattcgagattcatccgtaaacaggtgaggtgaggat

SEQ ID NO: 21255 - DNA, 265 bp, Zea mays
gatcctgaattcattggcaagatcggaactgacattgaagactacaaatgttcctggctagttgtgcaagctcttgagcgtgctgctgagaaccaaaagagcattctgtttgaaaattacggaaagtctgatccagcgtgtgttgcaaaggtgaaggacttgtacaaagagcttaaactggaggaggttttccatgagtacgagagggagagttacaacaagctgattgccgacatcgaggcccagccgagcaaggcagtccaaa

SEQ ID NO: 21256 - DNA, 262 bp, Zea mays
caacctcctctgctctcccccacctcccggtccggcagcagagagcgggggtgcagagagatcgagatccggaggccgcgagtgggagcgccaccaccagcgactgcggcaatggcgggcacggtgacggtcccggggtcgtcgaccccctccacgccgctgctcaaggacgagctcgacatcgtgatcccgacgatccgcaacctcgacttcctggagatgtggcggcccttcttccagccctaccacctcatcatcgtgc

SEQ ID NO: 21257 - DNA, 262 bp, Zea mays
gggagacagcttttgcgcttcgcaagctgcctttgaccaaggctaagcgataccttgaggatgttattgctcacaagcaggcaattcccttccggagatactgtggaggtgttggtcgcaccgcacaagcaaagtctcgccactccaatgggcagggtcgctggcctgttaagtcagccaggttcatattggatttgctgaagaatgctgagagtaacgctgatgtgaaatgcttggacgtggacaacctctatgtttcaca

SEQ ID NO: 21258 - DNA, 264 bp, Zea mays
gcggcctgctatttggattgtcctgtacacataggagtcctatgtggatacaccttaaagcttcatttggtaaacaactcttgacaagggatgagtccactaaattcattgcctttccttcattccataagctccatgcctgaaccaatggaatcaatttcatagaacattaataagtacctttttgctgcattgcaaaaaaaaaaaaatgccaccattcttacataagctaatagatttgggaaatccgtgatgtggtttaat

SEQ ID NO: 21259 - DNA, 263 bp, Zea mays
agcaatcagctcatctgtcagcgccacaggtgaccggaaaaccacggccggcgttcctgcttctctacccggtccgaattgctgaccggatcaacccgagaccttgcaggattatcgatctgattgcggcatgatccgcttcatcctgctgcagaaccggcaggggaagactcgactggccaagtattacgtcccgctcgaggactcggaaaagcacaaggttgaatacgaggtacaccggctcgtggtcaatcgggacccta

SEQ ID NO: 21260 - DNA, 263 bp, Zea mays
gattaaatacagcactcctgtttttcttttccattccacaggaacttcagaagcatggtagtcctggtattgtaatggttttggttggtaataaggctgatctacatgataatcgaagtgtatcctcgcaggatgcgcaggactacgcagagaagaacaatatgtttttcattgagacgtcggccaagacagctgataatataaaccaactgtttgaggaaattgcaaagaggttgcctaggccaacggcatcgtgacagaac

SEQ ID NO: 21261 - DNA, 262 bp, Zea mays
cgagaagcagatcctgagatccggcaccggccccaagccgataaagggccagaaggtcaccgttcactgcaccggctacgggaaggatcgtgatctgtccaagaaattttggagcaccaaggaccctgggcagcagccattcagtttcagcattggtcagggttcagtgatcaaaggatgggacgagggagttatgaccatgcaagtgggtgaagttgctcgtatccagtgcacgcctgattatgcttatggagccggcggg

SEQ ID NO: 21262 - DNA, 263 bp, Zea mays
cacaaacgcaagccccaatctcgccgtcaccacccccaatccagcaaacgcaaacccgatatcgccgccgccgccgccgccgccgcgatgtctcgccgctatgacagccgcacgacgatcttctcgccggaggggcgtctctaccaggtggagtacgcgatggaagcgatcggcaacgccgggtcagccctcgggatcctagcggccgacggcgtggtcctcgtcggcgagaagaaggtgacctccaagctcctccagacctc

SEQ ID NO: 21263 - DNA, 245 bp, Zea mays
agcttctacctcggcgtcccagcgtctccccaggccgcgggcagcgggtacatcgaccccggcaccctgacgggcacggtgatccccgccatccgaggcattggcaactacggcggcatcatggtgtgggaccgctttaacgacgtgcagaacaactacagcagccaggtgaagggcagcgtctgatgggcatacgaagcttcaagctacagcacctagccatgcatatatatatagttgctatt

SEQ ID NO: 21264 - DNA, 253 bp, Zea mays
agcgatcaagtcggagacggagcgcgttgagtacctcaagacggtgagcgactgctacacgcggacaatgaagctccttgacgactccatggcggccaggatcacgtacgagcgttcgggcggaacgaggagcctcgtcgcccgggacatggacgactacgtcgtctacggcctcaacgcgtgcttgcagaacgtccgcaactgctgcgtgcgtctggacgccatcgacaagctgcgggcgcactacgacgcc

SEQ ID NO: 21265 - DNA, 257 bp, Zea mays
actgagtatcagctgattgatatttctgaggatggatttgtgagccttcttacttcagatggcaacactaaggatgatcttagactcccaactgatgagactcttgtggcccagattaaggaagggttcgaaagcgggaaggatcttgttgtgactgtccagtctgcgatgggggaggagcagatctgcgcgctgaaggatgttggccccaagtaacttccttggctttggagacggaaccctactctatctcaact

SEQ ID NO: 21266 - DNA, 260 bp, Zea mays
atccatcctcgctacaagacgagaagaagcttgtagagtctattaaattcgctaatgcgtgtggagcaatcaccgccacgaagaagggtgcgatcccgtctttgcccactgaaactgaggtcttgcagctaatagagaaggcatagatagatcactgtaattgctttggttttcactagcttccacttctgcaaattgcaaaatgtattgtattctgatctggaacagaagaagtgggtgctccatcttacctgccattt

SEQ ID NO: 21267 - DNA, 248 bp, Zea mays
gattttcgtgttctggtgagaaaaagtcgaaagcaggcacagcagtattatcggttgtacaaggagcatatacctgtaacacagcttgtgcgggagactgctgctgtgatgcaggagttcacacagtcaggtggtgtaagaccatttggagtatcgctgttgattgctgggtatgatgacaatggcccacagttgtatcaggttgatccctcaggatcatacttctcctggaaggcatcagccatggg

SEQ ID NO: 21268 - DNA, 257 bp, Zea mays
gtcgctccgccgccgccgaaacagcacatcgctctctcgatctcagccatggcggaggtggagcagccccaggacgcggtgaagctcttcaaccgctggaccttcgacgatgtccaggtgaacgatatctcgctgaacgactacctggctgtgactgcggcgaacacgcgacattcctgccgcactccgcggggcgctactccaagaagcggttccgcatagcgcagtgcgccatcgtcgagcgcctcaccaactcg

SEQ ID NO: 21269 - DNA, 261 bp, Zea mays
  unsure (1)..(261): unsure at all n locations
agaagctacaatcctaaaaccatctgcttcagccttcagctagccccaagtttagtcggccgatcgatcactgaagtagtaatggcctccgccaacagctggaccctcgagatcgcgtcgccggtggccccgcagcgcctgttccgcgccgccgtgatggactggcacaccctggcgcccaaggtcgcctcccacgtcgtcgccagcgcgcacccngtggagggcgacggcggcgttggcagcgtcaggcagttcaacttc

SEQ ID NO: 21270 - DNA, 246 bp, Zea mays
ggatgagatcgtcccggtcccaacaaagatcgttgatcctaaaactggagaggagaaggaagttgtgatatcagttgatgatgggattaggccagggaccacagcatctggattggcgaaactgaaaccagtttttaaaaaggatggaactacaactgcaggcaattccagtcaagtgagtgatggtgctggagctgttcttctcatgaaaagatctgtggctctgaagaaagggctgcccattct

SEQ ID NO: 21271 - DNA, 251 bp, Zea mays
gccgaggaaggtcgacatgtcgtctccgccgccgccggtgaagctgatcggcttcttcggcagcccgtacgcgttccggcggaggcggcgctgtgcctgaaagcgtgccgtacgagctgatcctggaggacctgttcggcagcaagagcgagctcctgctccaccacaaccccgtgcacaagaaggtgcccgtgctcctccacggcgacggcagggccatctccgagtccctcgtcatcgccgagtacgtc

SEQ ID NO: 21272 - DNA, 253 bp, Zea mays
gaactgcagcgctacttctctggaagcctgaaagatgcggccaagagtctcggtgtttgtccgacaacgatgaagcgcatctgcaggcagcacggcatctccaggtggccgttccgcaagctcgccaaggcgaaccgctccctggacaagatcaagcgcgtcttcgagtcggtgcaaggctcatcacaggccatggccgccgctcctgctcctccacctgccgccgctgctgcttcctattctcagcaagctc

SEQ ID NO: 21273 - DNA, 254 bp, Zea mays
aaagggccacctgaatcaagaggctgggcttgtgccaagcttgaatcctcttgtgaaggagtttctcaatgctgctgatgacaagcggaaggaagtcctctctaaaatagaagaggatgttgctaagctcagcggttctgcagccaagcatggaaagatatatgtgacagctgcaaagaagatcatagacaagggctctgactacactaagaaggagactgagaggcttcaccgcatgctggagaagtcaatca

SEQ ID NO: 21274 - DNA, 243 bp, Zea mays
cacgcgcgtcctcgtgaacggctgggccatcggcagagacccggcggtctgggagaagcccgaggagttcatgccggagaggttcatgcgcgacggctgggacaagtccaacagctacagcggccaggacttcaggtacctgccgttcgggtctgggcgccggatctgccccggggccaacttcgcgctcgcgaccatggagatcatgctcgccaacctcatgtaccatttcgactgggaggt

SEQ ID NO: 21275 - DNA, 243 bp, Zea mays
gtatactcgcagtgcagacaccgtaagtgttcatgttgcaacacagtgaaccttgttagaccagtgaataatatagctcatgtgaactgcggccagtgccggacaactttgatgtatccatacggcgcaccttcagtaaaatgtgccgtatgcaattatgtcacagctactggagtaaatactgtggcacccaccccatctgcgaggccaacatcagatgggtcttcatatagtggctcatct

SEQ ID NO: 21276 - DNA, 246 bp, Zea mays
atcaaatgtcccattacaggcaaaacgttcatccaagaaacccgcagcacgggcaaaggttccttttgagaaaggctatagtcaaatggattggctaaaactgacacaaacacatcctgatctagctgggcttaaggggcagtcaaaccgaagttaatttctttggaagaggttaagcagcacaaagcaggagattgtatttggacagttctcaaaggccgcgtgtacaacattgctccatacatg

SEQ ID NO: 21277 - DNA, 246 bp, Zea mays
attgagggtgatacagaagggggggctgatggtgggaataaaagctccaaatatatcaatgatatcgtaataaaaccacttgaccgtcacaatcttctacgcccagagactgtggaatcactatttgttttgtatagaatcacagaggattccaagtatagggagtggggttggcagatctttcaggcttttgagaagtacacaaaagttgattctggtggttacacatcattggatgatgtcaca

SEQ ID NO: 21278 - DNA, 250 bp, Zea mays
cttaaagcagcatcggctactaccaccgactcttgctcacacagctcgttctctgcagctgccgcacatagctagtgaacgaccatggcgtcccaggccatcgagagccaccgtgccggtgctgaggtcgtcaccggaggagacgccgtctgcaggaagaagtcaatcgagctgctggaggagctcggcctccccaagggcttcctgccccttgaggacatccaggagttcgggtacaaccgcgtgacag

SEQ ID NO: 21279 - DNA, 165 bp, Zea mays
ccttaattaataattaataaatgcgctactactatagccaggcttcacagtaacacatacttctattgcccatgctacatatatgtgttcttatttacatccccaataagtgttattgtgttgtatcacatttacctatatatatatcaaatggaacatttcttc

SEQ ID NO: 21280 - DNA, 258 bp, Zea mays
agataggaggttggagaagataatttcttccttttcggtgccaaagccgatgaagttgctgggctgaggaaggatagagaaaatggtctgttcaaaccagacccacgttttgaagaagccaagcagtttataaggagtggcgcttttggcagctatgactatgaacctctcttggattcccttgaagggaattctggatttgggcgtggtgattatttccttgttggctatgacttcccaagctacatcgatgcacag

SEQ ID NO: 21281 - DNA, 260 bp, Zea mays
actgataacacgatttttgcaatgccagaaacagctctaggcctctttccagatgtaggggcctcttattttctatctcggctaccagggttctatggagaatatgttggtctaactggtgccagattggatggtgcggaaatgcttgcctgtggcctggcaactcattttgtcccgtcaaagaggttgccattgcttgaggaatcgcttaaaaagctggacacgtccagtacttttgctgtgtcgggtattatcgacca

SEQ ID NO: 21282 - DNA, 264 bp, Zea mays
ctggcttgccatacatctggcacagcaaggctagcaaccccttcgttaacttgaagaaggaatacaagggcatcttctggcaggaggacatcatccccttcttccagaacgtgaccattcccaaggattgcgacaccgtccagaagtgctacatctacctctctggacaggtgaaggagaagcttggcaagatcgacccctactttgccaagctcggtgacgccatggtcacctggatcgaggcctgggatgagctgaacccgg

SEQ ID NO: 21283 - DNA, 266 bp, Zea mays
gattgttccatcagaggtgactataaagctgttgcaggaggcaatgataaaaaatgaaaatgacaaattcctgatcgacggatttccaaggaatgaggagaatcgtgcagcatttgagaatgttaccaaaatttctcctgcatttgtgctattctttgactgttctgagaaagagatggagaaacgtctcttgggacgcaatcagggaagagttgatgataacattgaaactatcaaaaaaaggttcaaaacctttgttgagtcaa

SEQ ID NO: 21284 - DNA, 267 bp, Zea mays
aaacgcaaaaccgcatcctctcatcagcttccttccacattcgtctcgagatctcgccccgtcgccatggacgcgatcgacagcgtggtggatcccctccgcgacttcgccaaggacagcgtccgcctcgtcaagcgctgccacaagcccgaccgcaaggagttcaccaaggtggcggcgcggacggcgatcgggttcgtcgtcatgggcttcgtcggcttcttcgttaagctcatcttcatccccatcaacaacatcatcgtcggt

SEQ ID NO: 21285 - DNA, 266 bp, Zea mays
caaaacaacttattgagaggcttgtatttgctgaaggtgcagaaaatggccttgatttcacaatcgtgagacctttcaattggattggaccaaggatggacttcattcctggtgttgatggtcctagtgaaggtgtgcctcgggttttggcttgcttcagtaacaatctgctccggagagagcccttgaagcttgttgatgggggtcagtctcagagaacctttgtctacatcaaggatgccatcgaagctgtagtgctgatgatt

SEQ ID NO: 21286 - DNA, 252 bp, Zea mays
cacactgcaacagccaagtgcaagtgatcgagctcccccctcctcatcagtcgctaggcacagcgcacttgcaggatggcgcaggtctctaagacgcttctccttgtggccctggtgttcgtgtcgtcggcggcggtggagctgtgccgcgcgatcgacttcgacgagcgggacctggcgtcggacgaggcgctgtgggacctgtacgagcggtggcagacgcaccaccgggtgcaccggcaccacggcgag

SEQ ID NO: 21287 - DNA, 235 bp, Zea mays
tggaactcctgctgtcccaactgagcggtaaggacatcaccgagctcattgccgcgggcagggagaagtttgcttcagtcccatgtggtggcggcggtgtcgctgttgcggcagctgcacctgctgctggcggactgctcctgcagctgaggcaaagaaagaagagaaggtggaagagaaggaagaaagcgatgatgatatgggcttcagcctcttcgactaggctgcacagtca

SEQ ID NO: 21288 - DNA, 258 bp, Zea mays
cccacgcgtccggcaggatggcgcaggtctctaagacgcttctccttgtggccctggtgttcgtgtcgtcggcggcggtggagctgtgccgcgcgatcgacttcgacgagcgggacctggcgtcggacgaggcgctgtgggacctgtacgagcggtggcagacgcaccaccgggtgcaccggcaccacggcgagaagggccggcggttcgggacgttcaaggagaacgtgcgcttcatccacgcgcacaacaagcgcg

SEQ ID NO: 21289 - DNA, 256 bp, Zea mays
gcaagaaggcaagcaccaatcagccagcagtccagcacaatatcatgaacaagcgtcaggtcgccgcggcggtggctgccctcctggcgctgctagccgcatcatcgacggccggcgccgtgacgttcgacgcgacgaacacggcgtccgatacccccggcgggcagcggttcgaccaggccgtcggcctcgactacgccaagcaggtcctggccgacgcgtccacgttcatctggaacaccttcgaccagcccag

SEQ ID NO: 21290 - DNA, 260 bp, Zea mays
ccgagcccgttcgtgatccgcgtcctgatcgccctgaagctgaagggcgtcgagttcgagttcgtggaggaggtggtgggcaggaagagcgagctgctgctgaggtcgaacccggtgcacaagaagatccccgtcctgctccaccacggcaagcccatctccgagtctctgatcatcgtccagtacatcgacgaggtctggtcctccggcgcgccggccttcctccccgccgacgctcacgcccgcgccgtccagcggtt

SEQ ID NO: 21291 - DNA, 264 bp, Zea mays
agaacttctacacccggagcgcgttcctgagcgccgtcaacgcgtacccgggcttcgcccatggcgggacggaggtggagggcaagcgcgagatcgccgccttcttcgcgcacgtcacgcacgagaccggacatttctgctacatcagcgagatcaacaagagcaacgcctactgcgacgcgagcaacaggcagtggccgtgcgcggcggggcagaagtactacgggcgcggcccgctgcagatctcgtggaactacaactacg

SEQ ID NO: 21292 - DNA, 256 bp, Zea mays
agagcgtgagattcaaagaactatgttggagctgctgaatcagctagatggttttgactcgcgtggagatgttaaagttattctagcaacaaaccgcattgaaagtcttgatcctgctttgcttcggccaggccgtatagaccggaagattgaattccctctcccagatattaaaactagaagacgcatcttccagattcacacatcaaaaatgacattagctgacgatgtgaacttggaagagtttgttatgacc

SEQ ID NO: 21293 - DNA, 254 bp, Zea mays
atgttaaacaagccagagtgcaaggttgaattcgatatggaggggaaagtgtgtggtgtcacatctgaaggtgaaactgcaaagtgcaagaaggtggtctgtgatccttcgtatttaccaaacaaggttaggaagattggtagagttgttcgtgcaattgctatcatgagccacccaatccctaatacaaatgagtcccactcggttcaaattattttgcctcagaaacaacttggacgtagatcagacatgta

SEQ ID NO: 21294 - DNA, 250 bp, Zea mays
ccttgcaagtatagtctcggcggctctagaagacgatgggcaaggacgacgtgatcgagagcggcgctggcggcggcgagttcgctgccaaggactacacggaccctcccccggcgccgctgatcgacgcggctgagctggggtcctggtcgctgtaccgcgccgtgatcgccgagttcatcgccacgctgctgttcctgtacatcacggtggccaccgtgatcgggtacaagcaccagacggacgcgtc

SEQ ID NO: 21295 - DNA, 249 bp, Zea mays
aaaaccaaatggatttctcagcctaaggagccatatctggacagataccgataacaaccgtgcagggatgctcccttttgtctttgacaactcatttgggtttgagcaatatgtggattatgcattagatgtccccatgtattttgtgtaccgaaataataagtatattgactgcaccggaatgtcatttcgggtctatttctgtccttgatgtccttttacttctgtagttctgtattgtaaaggttt

SEQ ID NO: 21296 - DNA, 252 bp, Zea mays
gcgcgacgaaggtaagatgttcctgcggaggatcctgaccggcgggggcggcctggcggccctgagggcggcgcgcgccgtgaaggagacgacggggatcgtgggccttgaggtggtgcctaacgcgcgagaggttctggtagggctctacgagcgcacgctcaaagagatcaaggccgtccccgaagacgagggttaccgcatagccgttgaatccttcaccggtcaccgcctccagatctgccaggagga

SEQ ID NO: 21297 - DNA, 219 bp, Zea mays
cgacatcaaccgcatcctcgggcccaaggcctcctgcatctccttcaaggactccgcctgccgctgcttcggctacatggtctccaagaagaagtacatctacaccatcgacgacgactgcttcgttgccaaggacccatctggcaaggatatcaatgctcttgagcagcacatcaagaacctcctcagcgcatcaaccccgttcttcttcaacacctg

SEQ ID NO: 21298 - DNA, 218 bp, Zea mays
ggctcaagtatgctcttacataccgtgaggtcatttccatcctgatgcaacgccatgtacttgttgatggcaaggtcaggacagacaagacctaccctgctgggttcatggatgtcatttccatccccaagaccaatgagaactacaggctgctgtacgataccaagggccgcttccgccttcacccaatcagggatgaggatgctaagttcaagctt

SEQ ID NO: 21299 - DNA, 241 bp, Zea mays
cgtccgacgacggcggctggtgcaacccgccgcgcgcccacttcgacatgtcgcagcccgtgttccagcgcatcgcgctctacagggctggcattgtccccgtctcctaccgcagggtcgcgtgcaacaagaagggcggcatccggttcaccatcaacggccactcctacttcaacctggtgctggtgaccaacgtgggcggcgccggcgacgtgcacgcggtggccgtgaagggcgaccg

SEQ ID NO: 21300 - DNA, 242 bp, Zea mays
cgacggcatcagtcggctcaaaacggttacgatgatactgtacgaggtgctcaggctgtacccgccggcggtgacgctgaaccgaagaacgttcaaagacatgcagatcggaggcatcacgtaccctgcgggggtgatcctggagctccccgtgatcgtcgtccaccacgaccccgacgtctggggcaaggacgcgcacgagttcaggccggagaggttcgccgaggggatctccaaggcga

SEQ ID NO: 21301 - DNA, 161 bp, Zea mays
gcagcccgatcttgcatcagctagctaactaagcaagtaagctaagctagccctaggcaacgagccgaccgtcaagctcatcgcagaccacgagccatggcctccaccaacagctggactgttgagatcgcctcgcctgtcgccgcgcggcgcttcttcgg

SEQ ID NO: 21302 - DNA, 233 bp, Zea mays
agctgatcctcaccggcgtcgccatcgtaatcgccttggacagcggcaccagaacctctgcctccgcagggtgcttgctggtatcattacaatctggtagttttagtggttgggcttgacttcctactattcagaaacacagtaccgagaagtctttaggtggggtcaaagatggtgtcgctgaagttgcaaaagcgccttgccgcgagctacctcaagtgtgggaaaggcaa

SEQ ID NO: 21303 - DNA, 236 bp, Zea mays
gagctcatgggcgtgcagatgatacaatgaaccttggtggaattaaggttagttccattgagatcgagaggatctgcaacagagtacatgacgccatccttgaaacagcagctatcggggttccacctgtagggggtggccccgaacaactaaccatagccgtcgtgttgaaggaccagagctctcaaatagaggacttgaaccagctgaaactagcatgcaacatggctctgaag

SEQ ID NO: 21304 - DNA, 205 bp, Zea mays
gcaattgccaccccaatgttttgaataaaaaaagaaactccaactcgattcatagattctcactcagaactgctgcacgtcgcagtgcaggcgtgttgctggcttcgcccagcttctttttttgcctgtgatttgcacgacatttatatttattgaaatcttgcagaatcgcttgacgatgaaagtggtagcatacttttgttgc

SEQ ID NO: 21305 - DNA, 227 bp, Zea mays
ggttatttggcatttgaacatataacatgggctccataccagaccaagctgatagacaccgagcttctgacccctgttgagatcgactgggtgaacacgtaccactcagactgccggaagatcttggagcctcatctgaacgagcaggagaagcaatggctgatgaaagctactgagcccgtagctgcaagaggctgagccttttcgtcaacgttgcatgccaccga

SEQ ID NO: 21306 - DNA, 173 bp, Zea mays
ccgccggcgttgagatgttggtttatcaggatctcctatctggcgacgagctcctgtcggattcattcacctacaaggagctcgagaacggcgtcctgtgggaggtcgagggaaagtgggtcacccaaggtcctgttgatgtggacattggtgccaatcaatccgccgagggt

SEQ ID NO: 21307 - DNA, 235 bp, Zea mays
ggcgctcaaggaccagggtggcctctgccgctggaactacgcgctgcggtccgtcaaccgcaccgccaaggccaacgtccgcagcagcctcgccgcgcacgggacaaggagctggccccggcggcggagtcgaagaggcggccgggcaaggccgccgcggaggaggggatgaggtccgtcatgtacctcagctgctggggacccaactaggaggactagctagggttcactgttc

SEQ ID NO: 21308 - DNA, 236 bp, Zea mays
atcaccaactaggatcgatctctcgacagcaaatagctagcaatggagaagtacaccaaagccctagcgtcattgctcaccatgctggtgctggcacctctcctcgccatggccaccgacccagaccccctgcaggacttctgcgtcgccgacctcaacggcaagccatcagtgaacgggtacccatgccagccgccgtcgtcggccggcgaccagttcctcttctcgaccaagat

SEQ ID NO: 21309 - DNA, 235 bp, Zea mays
gacctaccctggcgtcaagcgcatcaccatcaagccccagactgaccgctgggtgttccccgagaccaacactggcatcattgtccttgctgagggtcgcctgatgaaccttgggtgtgctactggccatcctagctttgtcatgtcctgctcattcactaaccaggtcattgcccaacttgaactgtggaaggagaagagctctggcaagtatgagaagaaggtgtatgtgctc

SEQ ID NO: 21310 - DNA, 231 bp, Zea mays
cagagttctctcacctgaatattagacaaccttctcccccacctgtcctagctcaagtgcaccctgagcatggtcaaattcctccatcaagagttgctgatccaagaccaggacttgctacatctgcaaccggacgctatcagaatttgcatgtgccagtggcattaatggagtgtttcctgaggctcgctgagttaaataccgcaaagaatttggaaacctgtggaattc

SEQ ID NO: 21311 - DNA, 178 bp, Zea mays
cgaaagcagcgtcaagatcctccggcagtgcaagagagcgatccctgcaagagacgccggagggaaagtggtgatcatgaacatggtggtcgggtacggttcgtcagataggtttgtcaaagagacgcaggtgatgtgcgacatgtggataatgcggaacgttggggttgagcgggag

SEQ ID NO: 21312 - DNA, 190 bp, Zea mays
cggggccgccatcaaggcgcccaggatcacatctaagaacctcatcagtgtcatcttctgtgaggctgttgcaatttatggtgtaattgtggcaatcatcctccagacaaagcttgaaagtgtgccaacatcccaaatgtacgatccggagtctcttcgagctggctatgcgatctttgcatctggtctt

SEQ ID NO: 21313 - DNA, 212 bp, Zea mays
aatccaagggcgccgccaaggccgatgccaagctggcggtgaagagcaagggggcggagaagcccgccaagggcaggaaagggaaggccggcaaggaccccaacaagcctaagagggctcccagcgctttcttcgtgttcatggaggaatttcgcaaggagttcaaggagaagaaccctaagaacaagtctgtcgctgcggtggggaaactg

SEQ ID NO: 21314 - DNA, 213 bp, Zea mays
cgcaccgtcaaaggcaccaggctgagcaacccctccctctctccctcttatccccaaggcgaggagcggatcggagaggagggcccttctgcttgtttctccgctttgcaagatgtcgtccccgagcaagcgccgcgagatggaccttatgaagctgatgatgagcgactacaaggtggagatggtgaacgacgggatgcaggaattcttcgt

SEQ ID NO: 21315 - DNA, 230 bp, Zea mays
aaaaccctagccctcgcgccgccgccgccgtgcccagcgctcgagctcctcgcctgccgcgagctcgcgccgcaacgccaccatgaagttcaacatcgcgaacccgtctaccgggtgccagaagaagctggaaatcgatgacgaccagaaactacgtgccttttatgaccgaaggatatcccaggaggtcagtggtgatgctctgggtgaggagtttaagggttatgtct

SEQ ID NO: 21316 - DNA, 229 bp, Zea mays
gaactgcagcgctacttctctggaagcctgaaagatgcggccaagagtctcggtgtttgtccgacaacgatgaagcgcatctgcaggcagcacggcatctccaggtggccgttccgcaagctcgccaaggcgaaccgctccctggacaagatcaagcgcgtcttcgagtcggtgcaaggctcatcacaggccatggccgccgctcctgctcctccacgtggcggctgct

SEQ ID NO: 21317 - DNA, 174 bp, Zea mays
gctgatcttcagggtgacgaggatcaggcttacaggaaaatcaggctccgtgctgaagatgtgcaaggcaggaatgtgctcacaaacttctggggcatgaattttaccaccgataagctcagatctctagtaaagaagtggcagacattgattgaagcccatgttgatgtcaag

SEQ ID NO: 21318 - DNA, 270 bp, Zea mays
cagtaattttatattgcttggtcactcttttggaggatatgttgctgcaaaatatgcgctaaagcaccctgaacacgttcaacagttgattttggttggtcctgctggcttctcatcagaaacagagcatagctctgagtggttaaccaagtttcgagcaacatggaaaggcatgctaatgaatcatctttgggagtccaattttactccccaaagggttattagaggattgggtccttggggtccaggtctagtacaaagatataccag

SEQ ID NO: 21319 - DNA, 264 bp, Zea mays
gaagtcgctgaggcaacagcgccttatgttggctcacaacttaaacagcgtgatgatctattttggtttggaaagcctcgggtactctggtggcttatacagttcatttcatttcagaatgcttttgagctggcgacattcttatggtctctgtgggaactcagtgcacatacatgtttcatgaagcactactacatggttgccattcggttgatttctgggctcctagttcagttttggtgcagctacagcacactgccgctg

SEQ ID NO: 21320 - DNA, 266 bp, Zea mays
agcagctacatacgtcctcctccattaatattggcagcaagctagctaggatcatcagcatctgagcttattattactaaatcgatcggttgccatggcgatgagagtcggcaagctggcgctggctgcggtgctgctgtgcgcggcggcggccatggccacggcgcacaggcctccggcgtgcgcgccacctacaacttctacaacccgcagcagaacaactgggacctcaacgccgtgagcgcgtactgcgcgacgtgggacgc

SEQ ID NO: 21321 - DNA, 266 bp, Zea mays
ctccattaatattggcagcaagctaggatcatcagcatctgagcttatatattactacatcgatcggttgccaaatggcggggatgacagtcggcaataagctggcgctggctgcggtgctgctgtgcgcggcggcggccatggccacggcgcacaggcctccggcgtgcgcgccacctacaacttctacaacccgcagcagaacaactgggacctcaacgccgtgagcgcgtactgcgcgacgtgggacgccagcaagccgctgt

SEQ ID NO: 21322 - DNA, 271 bp, Zea mays
gtcccgcagcaacgccgagggagagcgaggagagacagatacagatcgcgcgctcagatgtcgtcggactcctcgtcgtgggcgcgcgccctggtgcagatctcgccctacaccttctccgccatcggcatcgccgtctccatcggcgtctcggtcctcggcgcggcatggggtatcttcatcacggggagcagcctcatcggggccgccatcaaggcgcccaggatcacatctaagaacctcatcagtgtcatcttctgtgaggctgttg

SEQ ID NO: 21323 - DNA, 273 bp, Zea mays
cacgaatgatcatggttggcgacagtctcaaggatgatgttgtttgtggaaagagggcaggagctttcacttgcttgcttgatgaaacggggcgatatggtcctcacgattctttacctgaggaagtaaaacctgacttcaaggtgtcctcactgacagaagtattcgctgtgctggaggagcacttcgatttggcaccagtgcctgccgagagtagaatatgacagggaagttttattggacctcccttctaatgtgaaatcggctacccaa

SEQ ID NO: 21324 - DNA, 258 bp, Zea mays
cggacgcgtggcttcaaggagggcctggcgcccatcaacctggtggtgcatgacgagttccaccgcgcgatgcccggcggcaccggcggggtcaagaccatcgccaactacgcgccggtgctgagggcgcagatggacgccaagagcaaggggttcacggacgtgctgtacctggactcggtccacaagcggcacctggaggaggtgtcgtcgtgcaacgtgttcgtcgtcaagggcggcgtggtcgccacgccggac

SEQ ID NO: 21325 - DNA, 261 bp, Zea mays
gtggatctccacagacgaaaaagctacaggatgttctccctggtatcattaaccagcttggccctgacaacatggagcacctgaagaggattgccgaggagatgcagaagcaggtggctgctgccggtgcggcacacaggtcaaggaagacaacgatgacgatgttccagagcttgttcctggagagacttttgaagaagtagctcaggagacaaaagcctgatcataggctctaaatagtgaagtgttactgcaccaatg

SEQ ID NO: 21326 - DNA, 262 bp, Zea mays
atctgatcctccgtctgatggaggacccggacaagcgcgaccaggttcggcgggagcatgtctacaagatgaaggagcggtgcgagcgcactaaggcggcgaggagcctccctctgcgcccctacggcttctggaccttcgaccgcttcaactcgcagctctcctgggatccccagatcagccaggccgccggccgtcgggacccctacgacgacctcatcgcccgccactctggctcgccgccgtcttcctgaacacccgt

SEQ ID NO: 21327 - DNA, 262 bp, Zea mays
caaggttgaccgcagcggacctatgtcgcaaggcaggctgccaagagcatcgtcgccagcgcgccttgctcgccgcgccatcgtccaggtgtcttacgccatcgggtgcccgagcctctctccgtgttcgtcgacacgtacggcaccggcgcgatccccgacaaggagatcctcaagattgtcaaggagaacttcgatttcaggcctggcatgatcatcatcaaccttgacctcaagaaaggcggcaacgggcgctacctca

SEQ ID NO: 21328 - DNA, 264 bp, Zea mays
cattgttgaaacaatgatgcagcagcttttgtccaaggagattcttcatgagcccatgaaggacattgtggaaaaatatccaaaatggctggaggataataaaaacaagataagcaaagaagaatatgagcgttataataatcagctagaactcatggtgaagcttattgaagtctatgaaaatgatcctgagaacatgactaagatttttgacagcatgcaaaacatgcaagaatgtggtcagccccccagtgatcttgtcca

SEQ ID NO: 21329 - DNA, 268 bp, Zea mays
gtgagcaactgggatgacatggagaaaatctggcatcatactttctacaacgagcttcgtgttgcaccagaggagcaccctgtgttgctcactgaggctcctttgaacccaaaggccaacagggagaagatgacccaaattatgtttgagactttcaatgttcctgccatgtatgttgcaatccaagcagttctatcactctatgctagtgggcgtactactggtattgttcttgactctggtgatggtgtgagccacactgtgccca

SEQ ID NO: 21330 - DNA, 270 bp, Zea mays
gagagagccccgggccgcgggtatattccgcgggctcggctcgctcgtcgacgtcggcggcggccacagcgccgctgcgatggccatcgctagggccttcccgcacatccggtgcagcgtgttggacctcgagcaggtggtcagcggggcacctgctgatggcacggtgaagttcatcgccggcgacatgttcgagtctatcccggctgcagattgtgtcttgcttaagtatgttctgcattgctgggacgacgaaagcagcgtcaagat

SEQ ID NO: 21331 - DNA, 257 bp, Zea mays
catcagcgggctcgtcgccgcgcaggaagctgcaaatccttttgaatattgtgatgtggttaccacaaccacgcacaagtccctcagagggccaagggctggcatgatcttctacaggaaaggccctaagccccccaagaagggccagcctgagggtgctgtttatgattacgaagacaagatcaactttgcagtgttcccatctctccaaggtggccctcacaaccaccagattgctgcacttgctgttgctctac

SEQ ID NO: 21332 - DNA, 253 bp, Zea mays
ctatccagaagcgcaagactccaaagccgtcgccttcctatccatcccttcctcgccgcgggggtcgcctgagatcacataaacaatggtgaaggctgttgctgtgcttggtagcagcgatggtgtcaagggcaccatcttcttcacccaagagggagatggccctaccactgtcaccggaagtgtctctggcctcaagcctggcctccatgggttccatgtgcatgcacttggtgacaccaccaatggctgc

SEQ ID NO: 21333 - DNA, 257 bp, Zea mays
ctgccccctgtggtacggctacggagggcggctcaagttcctggagagattcgcgtacatcaacaccaccatctacccgctcacgtccatcccgcttctcatctactgcatcctgcccgccatctgtctgctcaccggaaagttcatcattccagagatcagcaacttcgccagcatctggttcatctccctcttcatctcgatcttcgccacgggcatcctggagatgaggtggagcggggtgggcatcgacgagt

SEQ ID NO: 21334 - DNA, 262 bp, Zea mays
cttgcaggatggcgcaggtctctaagacgcttctccttgtggccctggtgttcgtgtcgtcggcggcggtggagctgtgccgcgcgatcgacttcgacgagcgggacctggcgtcggacgaggcgctgtgggacctgtacgagcggtggcagacgcaccaccgggtgcaccggcaccacggcgagaagggccggcggttcgggacgttcaaggagaacgtgcgcttcatccacgcgcacaacaagcgcggcgaccggcccta

SEQ ID NO: 21335 - DNA, 249 bp, Zea mays
gacaagaagaagccgatcatcttctcgatggcgcgtctcgaccgcgtgaagaacatgacaggcctggtggagatgtacggcaagaacgcgcgcctgagggagctggcgaacctcgtgatcgtcgccggtgaccacggcaaggagtccaaggacagggaggagcaggcggagttcaagaagatgtacagcctcatcgacgagtacaagttgaagggccatatccggtggatctcggcgcagatgaaccgc

SEQ ID NO: 21336 - DNA, 211 bp, Zea mays
gaggagtcctacaaggacagcactttgatcatgcagctccttcgtgataacttgaccctatggacctctgacatctcggaggaccctgctgaagagattagggaggcgcccaagcgcgactcgagtgaggggcagtaaagccggctttatgtgcctagaaactagtagctagtgtttgctgctgtcgaatgacactatgcaatgtgatctg

SEQ ID NO: 21337 - DNA, 247 bp, Zea mays
cgtattttgcatatagacgaagcacaatagatatgtctagtcttggagacttgtgggcacttgcacctgtcattgttgtaaatatgcaattggccatggacattattaggtggaactggataatacatgcgtttgtatggggcacaatagccgcaacaacagtttgtctctttgtgatagattcgatatgggttcttccagggtatggggcaatttttcatataatggggactggtctgttttggtt

SEQ ID NO: 21338 - DNA, 211 bp, Zea mays
cccacgcgtccgcctctcacaacccagtcgctcaaaaccctagagctctcgcctgctcgcctccgccgccggagcgagctccccatcttcatccgtcaaccatggcgacccagatcagcaagaagaagaagttcgtcagcgacggtgttttctacgccgagctcaatgagatgctgacgcgggagctggcggaggatggctactctgccgt

SEQ ID NO: 21339 - DNA, 248 bp, Zea mays
aacgagaaggagtacaagtctgacattaacattgtctccaatgctagctgcacaaccaactgccttgctcctcttgctaaggtcatcaatgacaagttcggtatcgttgagggtctgatgaccactgtccatgccatcactgctacccagaagactgttgatgggccctcatctaaggactggaggggtggaagggctgctagtttcaacatcattcccagcagcactggagctgctaaggctgttgg

SEQ ID NO: 21340 - DNA, 239 bp, Zea mays
ctcggtctaagtgaccgtttgagagagggaaagagttgaaagagacctggtctttgtgaccacctcaacggggagtaggtttgcaagaaccgaacctcgttcaaacaaatcatcgtgtcatccgccttatttgcttgtgatttgttttcgccctctctttcggactcgtttatatttctaacgctaaccccggcttgtagttgtgcttaaagtttctaaatttcagattcgccctattc

SEQ ID NO: 21341 - DNA, 237 bp, Zea mays
cgtgttgagactggtatcatcaagcctggtatggttgttacctttggtcctagtggccttactactgaggtgaagtctgttgaaatgcaccatgaggctctccaggaggcccttcctggtgacaatgttggcttcaatgttaagaatgttgctgtgaaggatctgaagcgtgggtatgtggcctccaactccaaggatgaccctgccaaggaggctgctagcttcacgtcccaggtc

SEQ ID NO: 21342 - DNA, 240 bp, Zea mays
ggttgggatgcccaagtgcttggagaagcaccctacaaattcaaaagtgcacttgatgctgtgaaaacactgagagcacagcccaaagccaatgatcagtacttgcccccatttgtgatagttgatgacagtggcaatgctgttgggcctgtattagatggtgatgcagttgtcactatcaacttccgagctgatcgcatggttatgcttgcgaaagcactagagtatgcagattttgac

SEQ ID NO: 21343 - DNA, 226 bp, Zea mays
atgtcccggaactggggccagaactggcagagcaactcgtacctggacaggcaggcgctctcgttccaggtcaccgccagcgacggccgcaccgtcaccagcaacggcgccgtccccgctggctggcagttcagccagaccttcgagggcggccagttctgaggatgaacagctagcgcgcgcgcggctagctattggataattaattacggtactgtcgatttgg

SEQ ID NO: 21344 - DNA, 242 bp, Zea mays
cccgaaggcaaatatgtggtggatatagataagagcattgatatcactaagatcacaccttcaacaagagttgctcttcggaatgacagttatatgctccatctgatcctaccaagcaaagttgatccattggtcaatctcatgaaagttgagaaggttccggattctacctatgatatgattggacggcttgaccagcaaattaaagagatcaaagaggtcattgagcttccaatcaaaca

SEQ ID NO: 21345 - DNA, 234 bp, Zea mays
gctccctcttgaaaagagggccgagttcgtccggattgttgagtcaattggacgggaaaatttcgtggggcagaaggaggcccaggttctagatgatgacgatttcgtgttgatcagtaggtactaggaaaatgagtttgccagtctatgtatcttggcgaataaactagtagtttgtaccttgcgttcagacttcgttctgttgttcatcagtcgttgggttcgtctatctat

SEQ ID NO: 21346 - DNA, 180 bp, Zea mays
ggctgggctacccggggccgacgccctacccgacggagatcggcaacgggcagtgggcgtccttcctccacgtccacaagaccggcgcctcgtcggggtccatggccgctgtcgtctaccgcggcaaggacggcggcggcagcgagcgcgacttcgccatggcctggagcaccccctggg

SEQ ID NO: 21347 - DNA, 193 bp, Zea mays
gtcctccccggtgagcttgccaagcacgccgtctccgagggcaccaaggccgtcaccaagttcacttcttcttaggctcatagtactaggctgggtggtgttggtagacgtggctcaatttatctggtaggggtagtgatggatgatatgatctgcgtctatttgagctgttaagactgatgaacattgttcc

SEQ ID NO: 21348 - DNA, 227 bp, Zea mays
ctgcaacagccaagtgcaagtgatcgagctcccccctcctcatcagtcgctaggcacagcgcacttgcaggatggcgcaggtctctaagacgcttctccttgtggccctggtgttcgtgtcgtcggcggcggtggagctgtgccgcgcgatcgacttcgacgagcgggacttggcgtcggacgaggcgctgtgggacttgtacgagcggtggcagacgcaccacggg

SEQ ID NO: 21349 - DNA, 272 bp, Zea mays
ggtaagcagcagcaggaaccctagcaccgccgcatccgcagccatgggtatcgacctcgttgccggtgggaggaacaagaagaccaagcgcacagcgccgaagtccgacgatgtttatctcaagctccttgtcaagctctaccgtttcttggtcaggaggaccaagagcaacttcaatgctgtcattctcaagaggctcttcatgagcaaaaccaatcgcccaccaatctccatgcgccgccttgtcaagttcatggaaggaaaggagaaga

SEQ ID NO: 21350 - DNA, 273 bp, Zea mays
agaaattcaagagtggcctcaatggcattcaggttgaactccaggccacagatgcgagtgaaatcagcctcgatgagatcaaggatcgggcacgctaggcgcaccgccatcgcgagtttcatgatcacgcatcatggactcgcctactactgtggatttgtatgccattatagacttggtgctgcgaaagactgctttggtgatttgtgggtttgttgctgtgtaaaaagatcctcatggcttccagaagaccatgaaggtttggatctatca

SEQ ID NO: 21351 - DNA, 271 bp, Zea mays
ggggaagaagcctctggcttacacaagagacggagatgcatgggtaattgataatggcaaatatataagtgaatcagcttctatatcaaaagggtttcctctcaaccatatcaatcaggggatatcaggatataaaaacttgagcccttcttgtaagctgcgtgttctgaattttctttgtgatgagaccctctctactgacaagctgaggaactggattgacatgcaaaatgacatagctgctgaaccagtgaatgctgctagagaaaag

SEQ ID NO: 21352 - DNA, 272 bp, Zea mays
ccctttctctaagaaggattggtatgacatcaaggcaccgtcggtgttcagtgtgcgcaacatcgggaagactctcgtatccaggacacagggtaccaggattgcttctgagggtctgaagcacagagtctttgaggtttgcctagctgatcttcagggcgacgaggatcaagcttacaggaaaatcaggctccgtgctgaagatgtgcagggcaggaatgtgctcacaaacttttggggtatgaattttaccactgataaactgagatccc

SEQ ID NO: 21353 - DNA, 272 bp, Zea mays
ggcggctcattgacgaggagcggcggaggctggacgacggcgtcgagagcgagaacaaaagtatgatggctgtgctgctcactctgcagaagtcagaaccggagaattacagtgatgacatgatcatgtctctgtgcttctccatgttctctgcgggaacggaaaccactgcgaccacggcggaatgggcgatgtcgctgctcctgaacaaccccgaggtcctgaagaaggcgcagggggaaatcgacgcgcatgtggggaattcccgcctg

SEQ ID NO: 21354 - DNA, 269 bp, Zea mays
gtttccaagacaggacttccgcctgcatttccgcaacatgtctcctggcgcagtcgatttgttggaaaggatgcttgtgtttgatccaagcagacggattacagttgatgaggctctgcatcatccatacttggcttcacttcatgagatcaatgatgaacctacctgccctgcacctttcagctttgattttgagcaaccatcctttacagaagcgcatataaaagaactcatctggagggaatctttagcatttaacccagagcctc

SEQ ID NO: 21355 - DNA, 262 bp, Zea mays
atcagattggaatgttctgctacagtgggatgacacctgaacaagttgaccgtttaacaaatgaataccacatttacatgacccgcaatgggaggataagcatggctggtgtaacgacaggaaatgttggttacctagcaaatgcaattcatgaggttaccaaaccaaattgagttagggtgctaccttctttggtcgatggaagctgatggaatgagactgtgaagcggcgtttcccccctctgttcctgacagaaataag

SEQ ID NO: 21356 - DNA, 265 bp, Zea mays
caagcgcaatggcatcacgccgacgagcgagctcaccatcctcgagcacgacggtgactcctacgtggcggagattgacggcaaggtcattgtaaagatcgggtccaggtacgacgtcggccatctcatcccggcgggttttgaagtcgccgcccacggcaacgactacgccgtctgggagaaagccggcgccgaacaagtgactcgagcataatagagtgctcgagataccgatttgattctcagtacaatgtacacgggactg

SEQ ID NO: 21357 - DNA, 261 bp, Zea mays
agtctccctagcaatctctagcagcagatcctcgtgcgaacaaaggctagccccttcgtactgtcccgatggcccgcacgaagcagacggcgaggaagtccactggcggcaaggcgccaaggaagcagctggccacgaaggcggcgcgcaagtctgccccggcgaccggcggagtgaagaagccccaccgtttccgccccggcaccgtcgcgctccgggagatccgcaagtatcagaagagcacggagctgctgatccgca

SEQ ID NO: 21358 - DNA, 262 bp, Zea mays
cgccatcacgggcgccacggcgctggacatggccttcttcgaggagcacgggctggcgcgcgccgtgtggagctccggctcgctccacacccagatcgggtggttccgggacatgaagcccaacatctgcagctccccgcaagagtgccgtgagctgttccggcggtcgctgttcgtggtgggcgagttcgggggcaacgactacgggtcgaccatcttctcgttccggccgctggaggaggtgcacgcgctggtgccgcac

SEQ ID NO: 21359 - DNA, 266 bp, Zea mays
aaagcaacaaggcagcagcacaagcaagaaccacacctcctcccttcgcctgtgatcatgtcgtcttgctgcggcggcaagtgcgggtgcggctccagctgctcctgcggcagcggatgcaacggctgcggtatgtaccctgacgtggagaccgccgccaccagcagcgtcaagaccacggtcctcgccgcgccgaccaccaaggccagcgccggcggcttcgaggcggccaccgagggcggcggctgcgactgcaacacctgcaa

SEQ ID NO: 21360 - DNA, 263 bp, Zea mays
ctggataaaaaagttcccgttcttttgcagtgaccgtgaatacatctttggaggacgcatatgggaatctgggaagacttactattgtgttactaagggtgttccatatccatcattgcccaagaaagaaaaaccgaggcgtgtggagctgtacttctcaagttggcgtattagagctgttcaatcgcctaaacatgtgggtcagcaatctgcgtgtgaagtaactttggttcactatgaggacatgggtataccaaaagatg

SEQ ID NO: 21361 - DNA, 258 bp, Zea mays
ggaaaacaaagaaggccttgaactattgaaggcagccatagaaaaggctggctacactggaaaggtggtcattggaatggatgttgctgcttctgaattcttcggtgagaaagacaagacttatgatcttaatttcaaggaggagaacaacgatggctcaaacaaaatttcaggcgacacctgaaagacctgtacaagtcctttgtttctgagtaccctatcgagtcgatcgaagacccatttgatcaggatgactgg

SEQ ID NO: 21362 - DNA, 256 bp, Zea mays
gccgtgtgtcgaacacgacacgcgataatggcactcatgcaggagagcagccaggacttgctcgaagcgcacgacgagctcttccaccactgcctgtgcttcgccaaatcgccgccgcattcccgcacgtcaagtgcagcgtgcttgacctcccgcacgttgtcgccggtgctccatccgatgcctgcgtgcagttcgttgcgggcaatatgttccacagtattccacctgcaaccgccgttttcttcaagacaac

SEQ ID NO: 21363 - DNA, 258 bp, Zea mays
gtaacatacaagctgcaacatgttcaggatggcaacacagagcaatgcgtaatttgccgtgtggaattggaggagggtgaatctttgattgcactcccctgcaagcacttataccatcctgaatgcataaaccagtggctgcaaataaataaggtatgccctatgtgcagcgcagaagtatcaacctcgggtaacaaggagccatgactgctctccgatggcaatcttgggaacttggtgggaataactagcggcatc

SEQ ID NO: 21364 - DNA, 256 bp, Zea mays
cgaacagagcaaggggaacgcgctgaacgagctccttgagctcaggagctgctccagctgccttttcttcgagtgcagaaaacagaaggatctttacctttggatggtgaagtctcctggaggaccatcagtaaaatttctagttaatgctgttcacaccatggaggagttgaagcttaccggtaaccatctgaaagggtcacgcccacttcttacattttctacaaattttgatgagcaacctcattggaagctt

SEQ ID NO: 21365 - DNA, 257 bp, Zea mays
gcaacatcaccctgttccgggggctcctgtactgggtggcgcactgctggggtccaccgtggcgtgcttcctgctccgcttctcgacgggcgggcaggccacgggcaccttcgggctgacgggcgtgtcggtgtgggaggcgctggtgctggagatcgtgatgaccttcgggctggtgtacacggtgtacgccacggcggtggacccgaagaagggcagcctgggcaccatcgcccccattgccatcggcttcatcg

SEQ ID NO: 21366 - DNA, 257 bp, Zea mays
ggcgaaggcgctagatgagctcggcgacgacgacgactacttcatcgaccagttcggcgacagggccgacacccatgccaggttcagctactaccctccgtgcgcgcggccggacctcgtcttcggcctgaggcctcactccgacggcacgttcctctcgcttctcatgctagacgacagcgtcggcgggcttcaggttttccgggacggagtctggtacgacgtgcgcaccagacctcacaccctgctcgtcaatc

SEQ ID NO: 21367 - DNA, 259 bp, Zea mays
acaagttgatgctgctccattcaagcagtggtacctcactcactatggagtggacatcggtaggaagaagaaggtgcctgttgctaagaaggatgcgactgatggacaagagggtgaggctatagctgaggaaacaaagaagagtaaccatgtgcagaggaagattgagaagcgacagcaggaccgtgcactcgacactcatattgaagagcaatttggcagtgggagattgttggcctgcatttctgcccgtcctggg

SEQ ID NO: 21368 - DNA, 237 bp, Zea mays
tggagctgtgccgcgcgatcgacttcgacgagcgggacctggcgtcggacgaggcgctgtgggacctgtacgagcggtggcagacgcaccaccgggtgcaccggcaccacggcgagaagggccggcggttcgggacgttcaaggagaacgtgcgcttcatccacgcgcacaacaagcgcggcgaccggccctaccgcctccgcctgaaccggttcggcgacatggggcgggaggagt

SEQ ID NO: 21369 - DNA, 236 bp, Zea mays
acagcttccaaattttgacatagcttctgatgcttcggctacctttaaggaactgttgacaaggcataaagcaaccgtggctgaatttctctccaacaattatgattggttctttgaagaatttaactctaggttgctgtcatcaaccaactacataacaaaaaggcaagctatcaagttgttgggagatatgctgctggatagatcaaatgctgcagtcatgatgcgctatgtta

SEQ ID NO: 21370 - DNA, 233 bp, Zea mays
gaacaacgatggctcaaacaaatttcaggcgacagctgaaagacctgtacaagtcctttgtttctgagtaccctatcgagtcgatcgaagacccatttgatcaggatgactggagcacttatgccaaactcactgatgagattggacagaaagtgcagattgtaggagatgatcttctcgttaccaaccccaccagggtcgccaaggccatcaatgagaagacctgcaatgct

SEQ ID NO: 21371 - DNA, 234 bp, Zea mays
ggcaaggagcttgagaaggagcccaaatttctcaagaatggtgatgctggtatggtgaagatggttcccactaagcccatggtagtggagaccttttctgaatatcctcctcttggtcgctttgctgtccgtgacatgaggcaaacggtggctgtcggagtcatcaagagtgtggagaagaaggacccaactggagccaaggtgaccaaggctgccgcaaagaagaaatgatgt

SEQ ID NO: 21372 - DNA, 233 bp, Zea mays
atcgcttggacacctctgcaagggagcacatggctctcgagaaggccaaggagatcatcgcgtcctccccggtcgacctagctctccgaaaggccaaggagaccgtcgcctcccaccccgtcgtcgtcttcagcaaaacttactgccctttctgcacccgagtgaaacaattgctagcaaagttgggggcaagttacaaggctattgagttggatgtggaaagtgatggcgct

SEQ ID NO: 21373 - DNA, 232 bp, Zea mays
cactgctacccagaagactgttgatgggccctcatctaaggactggaggggtggaagggctgctagtttcaacatcattcccagcagcactggagctgctaaggctgttggcaaagtgcttcctgtccttaacggaaagttgactggaatgtctttccgtgtcccaaccgtcgatgtttctgttgttgatttgactgttaggcttgaaaagtcagcaacctatgatgagatc

SEQ ID NO: 21374 - DNA, 237 bp, Zea mays
gtccatggccgtcgccgccgtgtactatcgcttcagctggcaaatggagggcggcgaggtgccggtgatcgagacgctgggcacgttcgcgctctccgtcggggcggcggtcgggatggagttctgggcgcggtgggcgcaccgggcgctgtggcacgcctccctgtggcacacgcacgagtcgcaccaccggccgcgcgaaggccccttcgagctcaacgacgtgttcgccatcgt

SEQ ID NO: 21375 - DNA, 234 bp, Zea mays
atccccattcccatcccgagacaggagaaggcaaggatgctgctcctgagctcccccttcgtgtccgtgtcgccgccgccgccgccgctcagctcccatggcgctcgcccggcgctgcggatcgaggcggccaggcagctgacgcggcgggtggtgacgaccaaggcggacaagacggtcggggtggaggtggtgcgcctggctccacaccccaagtacaagcgccgggagcgc

SEQ ID NO: 21376 - DNA, 231 bp, Zea mays
ctcaccgcgcaccatggcggaacagactgagaaggctttcctcaagcagccaaaggttttcctcagctcaaagaaatctggcaagggtaagaagcctggcaagggcggcaaccgattctggaagagcattggccttggcttcaagactcccagggaagcaatcgaagggacctacattgacaagaaatgcccattcactggaactgtttctatcagaggcagaattattgc

SEQ ID NO: 21377 - DNA, 232 bp, Zea mays
gggctgtccactccttcagaatcaccaactgcgagatccaggacaccacccagatccacacccacatgtgctactccaacttcaacgacatcatccactcgatcatcgacatggacgcggacgtgatcaccatcgagaactcgcggtccgacgagaagctgctctccgtgttccgtgagggtgtcaagtacggcgcgggcatcggccccggtgtctacgacatccactcccc

SEQ ID NO: 21378 - DNA, 230 bp, Zea mays
caatttggagcacaagattaagctgtcagggaatggagcacatagcagtgcttgctatgatgtgctcgtggatgttcctttcccgctgcagaaagagatgatggcgttccttgccaacacagagaagcacaaggacattgaggcttgcgacgaggtgatatctgcttcgatcaagaagatccatgagcaccgcaggaggagggcattcttcctgggtttcagccagtccc

SEQ ID NO: 21379 - DNA, 230 bp, Zea mays
gcaagttattttactttgcaggtatggagacaacatcagtccttcttacttggacacttattgtgctaagcatgcacccagaatggcaagagagagcaagagaagaggttttgagccactttggaagaaccacaccggattatgatagcttgagccgcctcaagactataaccatgattctacatgaggtccttaggttgtacccaccggcaacctttctaacaagaaga

SEQ ID NO: 21380 - DNA, 226 bp, Zea mays
cgtcgacgaccccatgttcgtggaggccaccaggttcaactccgagcgcaccgcctcgcgcagagcttcgactacaactacggcgacttcatccccgtcctgcgccccttcctgcgcggctacctcgccaggtgcaaggacctgcaggccaggcggctcgccttcttcaacagcaactacgtcgagaagaggaggaaggtcatggacgcgccgggggacaagggca

SEQ ID NO: 21381 - DNA, 232 bp, Zea mays
caagaactcgtcctactttgtggagtggatccccaacaacgtcaagtccagtgtttgtgatatccctccgcgtggcctctccatggcctccaccttcattggcaactccacgtccatccaggagatgttccgccgtgtgagcgagcagttcactgctatgttcaggaggaaggctttcttgcattggtacactggtgagggcatggatgagatggagttcaccgaagctgag

SEQ ID NO: 21382 - DNA, 236 bp, Zea mays
ctacaatcctaaaaccatctgcttcagctagccccaagtttagtcggccgatcattcactgaagtagtaatggcctccgtcaacagctggaccctcgagatcgcgtcgccggtggctccgcagcgcctgttccgcgccgccgtgatggactggcacaccctggcgcccaaggtcgcctcccacgtcgtcgccagcgcgcagcccgtggagggcgacggcggcgttggcagcgtcag

SEQ ID NO: 21383 - DNA, 227 bp, Zea mays
tccctcccgacccactcgcccaaaaccgtagcgccctcgcctgctcgccgccgccgtcgttgcgagctccccatcttcctccgttaaccatggcgacccagatcagcaagaagaagaagttcgtcagcgacggcgtgttctacgccgagctcaatgagatgctgacgcgggagctcgcggaggacggctactccggcgtggaggtgcgtgtcacaccgatgcgcacg

SEQ ID NO: 21384 - DNA, 227 bp, Zea mays
caaagcctccgacgcccaagccgaccccaccgacgtacaccccttccccaaagcctccgacacccaagccgaccccaccgacgtacactcccacaccgaagccgccggccaccaagccgcccacctacactccgacgccgccggtgtctcacacccccagcccgccgccaccatactactagaaagcgatgcctaccataccacactgctgtcagtctctggagcat

SEQ ID NO: 21385 - DNA, 224 bp, Zea mays
gttggattgggttcaaagttgggcttttggacagctgtggtgtgcacggcagctctgtgacttgcgatgaggaagggaggaagaaagcggatccatggcgtcgaagcggatcctcaaggagctcaaggacctgcagaaggatcctcccacctcttgcagcgcaggccctgttgccgaagatatgttctactggcaggcgacgattatggggccatcagatagcc

SEQ ID NO: 21386 - DNA, 281 bp, Zea mays
ggctgtgcgtggcgaaccccttactgtccagaagccaggaacacagactaacagcttctgctatgtcgccgatatggttgatggtcttattaggctgatgaacggaaacaacactggaccgattaacttggggaacccaggtgaattcaccatgctggaacttgctgagaatgtgaaggagttgattaacccagatataacagtgacgatgaccgagaacactcctgatgatccccgccagaggaagccggacatcaccaaggcaaaggaagttctagggt

SEQ ID NO: 21387 - DNA, 283 bp, Zea mays
ggagaagcctgacatccacacgaagctgatggagaggtacagcgaaatcccagcatggtggttctactcgttgatggcgctatcaattgtagtgtcccttctcctctgtaccgtgctgaagcgtgaggtacagctcccatggtggggcctcatcttcgcatgtggcatggcattcgtcttcacacttcccatcagcatcatcactgcgacgaccaaccagacgccaggtctgaatgtgatcactgagtatgctatgggtctaattatgccgggctctcctatc

SEQ ID NO: 21388 - DNA, 277 bp, Zea mays
caccaccattccttccccaactctgcaggctgctcgtcgccctccctccacgccggacgcgccccgatccagatccaggggcgtaacatggcatcaaaacgtatcctcaaggaattaaaggacctgcaaaaggaccctccaacgtcatgcagtgctggtcctgctggtgaggatatgttccactggcaggcaaccatcatgggtcctcctgatagtccatatgctggaggtgttttcttagtgaacattcatttccccccggactaccctttcaagc

SEQ ID NO: 21389 - DNA, 280 bp, Zea mays
gcgccgccaccgccaccgcgaggatgccgttcaagaggttcgtggagatcgggcgcgtggccctggtgaactacggggaggactatggccgtctcgttgtcatcgtcgatgtggtcgaccagaacagggcacttgtggatgcccctgatatggtcaggtgccaggtgaacttcaagcggctctcacttactgacatcaagattgacatcaaacgtgtccccaagaagacagccctgatcaaggcgatggaggaagctgatgtgaagaccaagtgggagaa

SEQ ID NO: 21390 - DNA, 277 bp, Zea mays; identical to SEQ ID NO: 7610

SEQ ID NO: 21391 - DNA, 279 bp, Zea mays
gtgatggtgttcggcgagatcacgaccaaggcgaccgtggactacgagaagatcgtgcgcgacacctgccgcgagatcgggttcacctccgacgacgtgggcctcgacgccgaccgctgcaaggtgctggtgaacatcgagcagcagtcccccgacatcgcgcagggcgtgcacgggcacttcacgaagcggcccgaggatatcggcgcgggcgaccagggccacatgttcgggtacgccaccgacgagacccccgagctgatgccgctgacccatgtg

SEQ ID NO: 21392 - DNA, 285 bp, Zea mays
cagaacaggctcaagtatgctctgaactaccgtgaggtcatttctatcctgatgcaacgccatgtacttgttgatggcaaggtcaggactgacaagacctaccctgctgggttcatggatgtcatttccatccctaagacaatggagaactacaggctgctttatgacaccaagggccgcttccgtcttcacccaatcagggatgaggatgccaagttcaagctctgcaaggtgaggtccgttcagtttggccagaagggcatcccctacctgaacacctacgac

SEQ ID NO: 21393 - DNA, 276 bp, Zea mays
ggcaaacgcgccgaggatcctggccctcggcctgctagcgctcctgtgcgctgccgccggcccggccgccgcgcagaactgcggctgccagccaaacttctgctgcagcaagttcggctactgcggcacgaccgacgcctactgcggcgacgggtgccagtcgggcccgtgccgctcgggcggcggcggcggcggcggcggcggcggaggcggcggaggcagtggcggtgcgaacgtggctaatgtggtcaccgacgcgttcttcaacggcatcaa

SEQ ID NO: 21394 - DNA, 275 bp, Zea mays
tgcaaagcaggcttttgacgaggccatctcggaactggacaccctgagcgaggagtcctacaaggacagcactttgatcatgcagctccttcgtgataacttgaccctatggacctctgacatctcggaggaccctgctgaagagattagggaggcgcccaagcgggactcgagtgaggggcagtaaagccggctttatgtgcctagaaactagtagctagtgtttgctgctgtcgaatgacactatgcaatgtgatctggaacctggtttcttg

SEQ ID NO: 21395 - DNA, 260 bp, Zea mays
atgagccacctcaagaggagggcgatgatcaagggggagatgacaatgatcaagacaaggaaaactgagccctcgcgtttaggcggggaattatgtgacccgtttgggggattttttttggttgtttgacttagctggaactcaacttagggaactgtttagtgccttatgaagtcaaccaacttgaaaggagactgctatatcataatctcggtatatctatcaacgcagtttgacctgtgattcagtttgtttgtgct

SEQ ID NO: 21396 - DNA, 271 bp, Zea mays
gtcacagagatgggactacagataagagagatgatgtacgaaaagattaagatcaataaaataatgtcgagaattactggaaaatctgaggagcagattgatgaagacacgaagtttgattatttcatgagtccttcggaagccaaggattatgggatagttgacaatatcatagatgaggggaaaccagggttggtagctcccttggcaggatctgttccgcctcccaaatcgcgtgtgtggtacttgtggaaggcttcggggccgacca

SEQ ID NO: 21397 - DNA, 278 bp, Zea mays
atgaagactgcttaaatttgattgctcggcttccaccagtggcttcttatgtttaccggagaattttcaaggatgggaaatcaatagaagctgataattctctggattatgcggcgaatttatcacatatgcttggttttgacgaccccaggatgctggagctgatgcggctccatgtaacaattcacgctgatcatgaaggcgggaatatcagttctcatactggtcatctggttggaagtgctctgtcagatccttatctttctttcgcatcatct

SEQ ID NO: 21398 - DNA, 279 bp, Zea mays
ctccaagaacatcggccgcgcgctggacgacgcgttcaagccgctcggcatctccgactggaactccatcttctgggtggcgcaccccggcgggcccgccatcctcgaccaggtggaggccaaggtcgggctggacaaggccaggatgcgcgccacccgccacgtcctctccgagtacggcaacatgtccagcgcctgcgtcctcttcatcctcgacgagatgcgcaacgctccgccgaggacggacaggccaccacgggcgagggcctcgactggggg

SEQ ID NO: 21399 - DNA, 279 bp, Zea mays
gcatgcacaaactgcctggtggctcaaaagtccgaggatcaaaatggccagagttatggccgcaaaggcttgagaagacccctttctggattgatggttccaaggttggtgtctatggaaagcctgcaaatgaagattttgaggcagataatgcccactggaaacgggttgtaagtaaatcgtatgtgaatggcatgggaattgactggtccaaagtgagaaatgtcatggacatgagagctgtctatggaggttttgctgcagctctgagggaccaaa

SEQ ID NO: 21400 - DNA, 281 bp, Zea mays
ggcggcgctctcggagaccctgcgcctgtacccgtccgttcccgaggactccaagcacgtcgtggccgacgactacctccccgacggcacgttcgtcccggcggggtcgtcggtgacctactccatctactcggccgggcgcatgaagacggtgtggggggaggactgcctcgagttccgccccgagcggtggttgtccgccgacggcacccggttcgagccgcacgactcgtaccggttcgtggcgttcaacgccgggccgaggatctgcctcggtaagg

SEQ ID NO: 21401 - DNA, 273 bp, Zea mays
cagaaaatctgagcggtattgatggcgcccaaggcggagaagaagccggcggcgaagaaggtggcggaggaggagccctcggagaaggcggctccggcggagaaggcccccgcggggaagaagcccaaggcggagaagcggctacctgcgggcaagtccgccggcaaggagggcggcgacaagaagggtaggaagaaggcgaagaagagcgtggagacctacaagatctacatcttcaaggtcctgaagcaggtgcaccccgacatcggcatc

SEQ ID NO: 21402 - DNA, 271 bp, Zea mays
gggacttgcgtcagagaggtgcaatacaaactcttcccgacaaataccagatcacagccgttagcttctcagaggcagcagataaggtattcactggtggcctggacaacgatgtcaagtggtgggatcttcgcaagaatgaaacgacagaatatctcaaaggacatcaggacatgatcactgggatgcagcttagccctgatgggtcttacctcctgaccaatgcaatggacaatgagctcaagatctgggatctgcgcccttacgcacc

SEQ ID NO: 21403 - DNA, 270 bp, Zea mays
cttcgcttacatcaggctccgcgagcaggagatcaggaacctgatgtggatctctgaatgtgtcgctcagaaccagaagtcccgggtccatgacagtgtcgtcttcatattctgagaacccccgccactatatatgtatgtacaaaatgcctgctttgatgatggcacaatcgctcgacaattataaatctgggacttattattattcccattccctctgttagacgccggcgtaaaaaatgccagacctggagttgatgtattatttgt

SEQ ID NO: 21404 - DNA, 250 bp, Zea mays
cggagctaccgcgtggtgagtgggaggctcagggacgtggctgtctacagcttcatctctaccgaccctgtcgttgagtgatcaggattcgaaaatgacccaaagtcgtgcacgaaaaccagatggcattggcattggcattgctgcttgcagacagcatctcagctatgggttacagttacagacttattataactctccttccgctattttatctccaagaagacgcacttcttggaattattaactg

SEQ ID NO: 21405 - DNA, 271 bp, Zea mays
gtcaaatctaccgagggtgaaggcgacgacgattactcgtatgaagtttctttagacgaggacttcttgacttcattggaatacggaatgccaccggcatcaggaatgggcctcggtatcgaccggttaataatgcttttgacgaactcttctagcataagggacgttattgcctttcctgtcttgaagattcagcaatagatccccttcattctgtgaagaggcgtggctgctgaagaaaacaccagcagccttccttttgtgcttggtt

SEQ ID NO: 21406 - DNA, 274 bp, Zea mays
gaattctagggttttgctgctctccgaccccgagctccgaatgccgcagcatcaggcgcggcccccctcgcgtgtgaccgagatggcgctgccgaatcaggggaccgttgattaccccagcttcaagctcgtcatcgtcggcgatggtggaactggtaaaactacatttgtgaagaggcatctcactggagagtttgagaagaaatatgaaccaaccattggtgtggaagttcatccgttggatttcaccactaactgtggtaagatcaggttc

SEQ ID NO: 21407 - DNA, 239 bp, Zea mays
ggcacggagtggaagtggaccagcttccggccgtgggacgcgtacacgtcggacacgtccatcgacatagggaagcaccacgcgccgacgacgctgcccgacaaggcggcgtacctgatcgtcaagtcgctgcgcgtgcccatggacctcttcttccagcaccggcacgccagccacgcgctgctgctcgagacggtggcggccgtgccgggcatggtgggcggcatgctcctccacct

SEQ ID NO: 21408 - DNA, 239 bp, Zea mays
ctattgacagctacgaagatataccagcgaacgatgagaagagtctgcagaaggcagttgcaaaccagcctgtcagtgtcgcaattgaggctgctggcacacatttcagctctacagctcgggtatcttcactggaagctgtggaacagcgctggaccatggtgtcacggccgtcggctacggcacagagaacggcaaggactactggatcgtgaagaactcatggggcagcagctggg

SEQ ID NO: 21409 - DNA, 237 bp, Zea mays
gttgaagcagcaaatattttctgacttagagaagtactgtccttcacattgcatccttgctactaacacatctacaattgatcttaatctgattggggagaaaacaaaggctcaagatcgtattgctggtgcacacttctttagtcctgcgcatgtgatgccacttctggaaatagttcgtactcagcacacttcaccacaagttgttgttgacttgctggatgttgggaagaagat

SEQ ID NO: 21410 - DNA, 238 bp, Zea mays
gccggtgacgctctccgtcggcggcttcggctccggctactcgctcccgtccacgcaggcggcgctggacctgttcgactacctctggaacgccttcctcggcgggtcgaagccaggcgtgcgccgccccttcggcgacgcgtggctcgacggcgtcgacctgttcctggagcgcggctcgcccgccgaccgctacgacgtgctggcgctcgagctcgccaagcacaacatccgcggc

SEQ ID NO: 21411 - DNA, 242 bp, Zea mays
aggcaccacacctcttcctcctcttcctcctcctagcacagctagcgcctgctccccttcgtctgtgatcatgtcttgcagcagcggcaagtgcaactgcggctccagctgctcctgcggcagctcatgcaactgcatgtcccctgacgtggagaccgccgccgccagcagcatcaagaccatggtcctcgctgcgccgaccaccaaggccagcgccggcggcttcgaggcggccaccgagg

SEQ ID NO: 21412 - DNA, 239 bp, Zea mays
cagcgcaccgctgaagcctaaactcgcagccagccatgtcgatgagaatcgagcgtgatctccacatggccacatggaacggagaaactagctacacaaaaaattctaggattcaagagaaagctatgtttcagatgaagtcggtacttgaggaggccactagagcagtatgcacagctctcctcccacaaaccatggttgtggccgacttaggctgctcatcagggcctaacacactg

SEQ ID NO: 21413 - DNA, 236 bp, Zea mays
cgcccttcgaccgcctcggcggcggcgcgtccccggcgttcggcggcctccccggcggcagcattcctggcagcagcattcccgggttcagcatgcccggcagcggcagcagcctacccgggttcagcttgcccggcagcggcagcatgcccctcttcggcggcggctccccgggcttcagcggcttcggcggcatgcccgggtcgcccaccgccggctccgtccccgagcacgcc

SEQ ID NO: 21414 - DNA, 239 bp, Zea mays
caatcctaaaaccatctgcttcagccttcagctagccccaagtttagtcggccgatcgatcactgaagtagtaatggcctccgccaacagctggaccctcgagatcgcgtcgccggtggccccgcagcgcctgttccgcgccgccgtgatggactggcacaccctggcgcccaaggtcgcctcccacgtcgtcgccagcgcgcaccaagtggaaggcgacggcggcgttggcagcgtca

SEQ ID NO: 21415 - DNA, 235 bp, Zea mays
cggacgcgtgggccaacaccagccgccgccatgtcgaagcgaggcaggggaggttcggcggggaacaagtatccgcatgtcgctgggtctgccggttgccgcgacggtgaactgcgcggacaacacgggcgccaagaacctctacatcatctccgtcaagggcatcaagggccgcctcaaccgcctcccgtccgcctgcgttggcgacatggtcatggccaccgtcaagaagggg

SEQ ID NO: 21416 - DNA, 237 bp, Zea mays
accgcatcagggagaaataccctgacagaatccctgtcattgttgagaaggccgagaggagtgacatcccagacattgacaagaaaaagtaccttgttcatgccgacctcacagtcggacagtttgtgtatgtggtacggaagcggatcaagctcagcgctgagaaggcaatcttcatcttcgtaaagaacaccctcccaccaacagctgctctgatgtccgccatctacgaggaga

SEQ ID NO: 21417 - DNA, 237 bp, Zea mays
cccacgcgtccggttctacaagaactggtgcaagagcaagaagaaggctttcacaaagtatgctctcaaatatgaaaatgatgctggcaagaaggaaattcagctgcagcttgagaagatgaagaaatatgcttctgttatccgtgtcattgctcatacccagattaggaagatgaagggtttgaagcagaagaaggctcacctgatggagattcaggtcaatggtggtaccattgc

SEQ ID NO: 21418 - DNA, 231 bp, Zea mays
gaattatctgctgagattctagcaaatgtgaaattcattcaagaaaagaagttaattggcaagtattttgaagagatcagtcaggatactgggaaatatgtctttggtgttgatgacactctgaaggctcttgaaatgggtgctgtcgagaccctgattgtgtgggaaaatctggatatcaacagatatgtgatcaagaacagtactactggggaaattattataaaacat

SEQ ID NO: 21419 - DNA, 236 bp, Zea mays
gtcgcctctcccagtcccagatctcgttcactcgcactcgcgcaaccccgcggccccgcgcctaatggcatcctgtggcgccggcgacgccgcgtcagccagccgagggccagtatctcgcacgtcatcttcgatatggacggccttctcctcgacacggagggcttctacacggaggtgcaggagaagatcctagcgaggtacgacaaggtgttcgactggtcgctcaaggccaa

SEQ ID NO: 21420 - DNA, 231 bp, Zea mays
ggcattttaccttgttcaatcctgattcctggactgttctttgtgcctgaatccccaaggtggttggcaaaaatggggaagatggaggattttgaatattcattgcaagttctgagaggatttcagacagatatcacagcagaagtaaatgaaataaagagatcattagcatcatcgaggaggaggacaaccataaggttcgctgatatcaaacagaagagatacagtgtt

SEQ ID NO: 21421 - DNA, 234 bp, Zea mays
gttaccgtaagcaggctccacgtcactatgtgttgcccgaggatgcgggtggcagcacttgggcgcctacgtcaacctgggctcgttctacctcgtcgggattccaacagcactcgtcctcggcttcgttctgaagatggaagggaaagggctttggatgggcatttcctgcggctccatagtgcagttcttgcttcttgccgtcataacgttcttcagcaactgggagaagat

SEQ ID NO: 21422 - DNA, 230 bp, Zea mays
gccctggcggtggtggccatgctggccaccgccttcttcgctgtgcccgctcgcgccgagcagtgcgggtcgcaggccggcggcgcgctgtgccccaactgcctgtgctgcagccagttcgggtggtgcggcacacctccgactactgcggcagcgggtgccagagccagtgcagcggcagctgcggcagcaccccgaacccgccgagcagcggcggcgtggcgtccatc

SEQ ID NO: 21423 - DNA, 231 bp, Zea mays
ctgcttgtttctccgctttgcaagatgtcgtccccgagcaagcgccgcgagatggaccttatgaagctgatgatgagcgactacaaggtggagatggtgaacgacgggatgcaggaattcttcgtcgaattcaagggcccggccgaaagtatctaccaaggtggtgtctggaaggttcgggtagaactgcctgatgcatacccttacaaatccccgtccatcggcttcatc

SEQ ID NO: 21424 - DNA, 212 bp, Zea mays
gtgcacggcagctctgtgacttgacaagaggaaggtaggaagaaagcggatccatggcgtcgaagcggatcctcaaggagctcaaggaattgcagaaggatcctcccacctcttgcagcgcaggccctgttgccgaagatatgttctactggcaggcgacgattatggggccatcagatagcccatacgctggtggcgtatttttggtcact

SEQ ID NO: 21425 - DNA, 220 bp, Zea mays
cgatctcgtttcaaatccatccatcctcgtttcctccgtcccgcagcatctcaaccccatggccaagatcaagatcgggatcaatgggttcggcaggatcggaaggctggtggccagggtggccctgcagagtgacgatgtcgagctcgtcgccgtgaacgaccccttcatcagcaccgactacatgacctacatgttcaagtacgacactgtgcacgga

SEQ ID NO: 21426 - DNA, 231 bp, Zea mays
ccttgaccagcaaattaaagagatcaaagaggtcattgagcttccaatcaaacatccggaactatttgagagccttggaattgcccaaccaaagggtgtcctcctttatggacctccaggcacaggaaagacattgctggcacgtgcggttgctcatcacactgactgtaccttcatcagggtgtctggttctgaattggttcagaagtatattggtgaaggttcccggat

SEQ ID NO: 21427 - DNA, 225 bp, Zea mays
actatactgatatggttaataaatactatgatcttgccactagcttctatgagtatggttggggtgaatccttccactttgctcacagatggaatggagaatccttacgtgaaagcatcaagcgacatgagcattttcttgccctgcaacttggtttgaaaccaggaatgaaggttttagatgtgggctgtggaataggtggaccactgagagaaattgcaagat

SEQ ID NO: 21428 - DNA, 228 bp, Zea mays
gttcggagtccctctggcggcgtttcagctgaaccaagagaagctcgcccggatgctcggtaacgtccagtcgatggtcctcgtcggctggcgtctctgcaagctctacgagtcggggaaaatgacgccgggccacgctagcctagggaaggcttggaactccaggacggcccgcgaggtggtctcccttggccgagagctgctgggtgggaacgggattttggccga

SEQ ID NO: 21429 - DNA, 261 bp, Zea mays
ggaatgtttgctcttcgtgagagaagggtgcacgttacccaggaagacttcgagatggcagtggccaaggtgatgaagaaagacacggagaagaacatgtccctgcgcaactctggaagtgaggctcgtgcccacctttcacggcctccccgaagctagtggcagtgccttcatatccatatcttttaccaaagcagtggaatggtgtaacggcatgctctggacaatgttatctcaagttgcgccgcgcatgcttatgtt

SEQ ID NO: 21430 - DNA, 259 bp, Zea mays
gcaatcctacgacaacagggcgccgctcctcctgcccgtcaagatcatggacgccgccgccgacgacaagccggaaatctccgacgatacggcccaccagattagcgttgatccttggtatcaagttggcttcgtcctcacaaccggggtcaacagcgcatacgttctaggatactctggatcaatcatggtccctctaggctggatcggcggcacatgcggcctcctcctagctgccgccatatccatgtacgctaat

SEQ ID NO: 21431 - DNA, 258 bp, Zea mays
gtggaggaacgagcagttctgggtcatcggaggcgtttcggcgcatctgttcgcggtgttccagggcctgctgaaggtgttcgccggcatcgacacgagcttcaccgtgacgtcgaaggccggggacgacgaggagttctcggagctgtacacgttcaagtggaccaccctgctgatacccccgaccacgctcctcctgctgaacttcatcggggtggtggccgggatctcgaacgcgatcaacaacgggtacgagtc

SEQ ID NO: 21432 - DNA, 261 bp, Zea mays
acttggctgtcttctatgacacatatcgcccttgaacggggatgctttgtgctgtcagcgtgccagttctgtcgtagaaagaactaccctccccctcccgagtacacattttgtggcctagaggaagagccatccccggaatccgttgtttgttctggagggagtgtcatcatctcaccattgggaacagtgttggcgggtcccaactacgaaagtgaggcccttctcactgctgacctggaccttggagagattgttcga

SEQ ID NO: 21433 - DNA, 265 bp, Zea mays
cttccgttctcaaaccaacctaggcaattcgccgcagcctctcaccctcgcgagtcccgacctcccgcagccgccgcacagatggcacccaaggcggagaagaagccggcggccaagaagcccgcggaggaggagcccgcgacagagaaggtggagaaggctccggcggggaagaagcccaaggccgagaagcgcctcccggcgggcaagtccaaggagggcggcgagggcaagaaggggaaaaagaaggcgaagaagtccgtgg

SEQ ID NO: 21434 - DNA, 266 bp, Zea mays
gcgccgggagatagcggaccgttctacgacaagaaggaggccgccaagctcgccgcgcaggccgccgccctagctgctgccccgctcccggtccgcgggcccccgccatcccaggatgccggcagctcccgcgcactagctcggcctcggctatggatgtggagatgtctgatgcagggaacaacaggtctaagaccttcttgaggccacttggcagcattagcaagaagaaggtgcagcttcatttgaagatcaagaaagacaag

SEQ ID NO: 21435 - DNA, 267 bp, Zea mays
gacaaggggagttgcttgggagggaccttgatattcttgtagttgatatgcccccaggcactggtgatgctcaactatcaatgtcccaaaggcttcggttatctggtgctttaattgtttcaactcctcaagatattgctcttatcgatgctagaagaggagccaacatgttccgcaaagttcaagttccaattctgggattggtagagaatatgagttgctttaaatgctcaaaatgtggtgagaaatcttacatctttggggaag

SEQ ID NO: 21436 - DNA, 253 bp, Zea mays
aggcagcccttatcctgctatgcctggtatgcagtatcctggatcatatcccggtggtcccatgggcaaccgtcatttgggaaattctcacaatccgattaaagctccaaattcgaatgccaattccactgtttcttctagtcccagcagcaatgctggtgggcaggttgaaggtcctcctggagccaacctatttatttatcatatcccacaagaatacggtgaccaggagctttccagcgccttccagagt

SEQ ID NO: 21437 - DNA, 252 bp, Zea mays
gtgatgttttggatctcacctttagcatggatgcagacgaagagaaactgatattgtacgagaaggcagaggtcactgattgtgagttgattcctggagggcgtaacatcagggttactgaggagaacaagcatgaatatgtcgaccgggtagcagagcatcgattgaccactgccatcaggcctcagattaatgccttcctggaagggtttaatgaactcattccacgggagctgatatctatcttcaacg

SEQ ID NO: 21438 - DNA, 249 bp, Zea mays
gcgctcctgtgcgctgccgccggcccggccgccgcgcagaactgcggctgccagcctaacttctgctgaaggcagttcggctactgcggcacgaccgacgactactgcggcgacgggtgccagtcgggcccgtgccgctcgggcggcggcggcggcggcggcggaggcggaggcagtggcggtgcgaacgtggctaacgtggtcagcgacgcgttcttcaacggcatcaagaaccatgacgggagcggg

SEQ ID NO: 21439 - DNA, 255 bp, Zea mays
gtgagtgaggttgaaaagcacaccatcgtcatggacggcggatactacggcggtcgcgatcagcgctacagcggcgggtactacggcggcggtggcatcgcaacgccggggtacgctccggcggtcccgtacgggatgtcgcaggtgaacatcgagggcaacgggtgcgggcgggcgctgccgccgcagccgaccgtgaaggtgtactgccgcgccaaccccaactacgccatgagcgtccgcgacgggaaggtg

SEQ ID NO: 21440 - DNA, 258 bp, Zea mays
cttttgtctaataattgaggcccatgataacttaagatctggcccaagactgttatccctgctagggttaatccactggctctcctatatagaagcgcggcgagagctcgcaccgccgccgccgccgctgtcgcatcacaggcctctcttccggtttccccccaaacccgtccgagaggcagtcatcccgccgcgatgagggccaagtggaagaagaagcggatgaggcggcttaagaggaagcgccgaaagatgagg

SEQ ID NO: 21441 - DNA, 259 bp, Zea mays
gaagttcaagggatgcaccttgatgcccaacattggttatggttctgacaagtcgaccaggcactacctccccaacaagttcaagaagtttgtggtccacaacgtttctgagctggagttgctcatgatgcacaacaggacctactgcgctgaaattgctcacaacgtgtccactaagaagcgcaaggagatcgtggagcgtgctgcgcagctcgacattgtggtcacgaacaagcttgctaggctccgcagccaggag

SEQ ID NO: 21442 - DNA, 260 bp, Zea mays
ggggcaacggtgaaccagtgcatgtactaccaaggggtgaatctgggctcgtcgtccatggcaacggccatgaccaacttgatccccgccatcaccttcgtcatggcggcatcagtcggcctagagagggtggaggccaggaggccgaggagcctggccaagatcttcggcacggccgtctgcgtgacggcgccatggccatggctttcttcaagggcccgaagctgctcggcgacggccccaacgctctccagctcctc

SEQ ID NO: 21443 - DNA, 265 bp, Zea mays
gtatggaagcctcctcgtcccctcgcctcccgtccccgcgccggcacgtcgcgcggcgctgtccgtcgtcgccaaggtcaaggtggccacgccccaggacgaccgcatcgcccgccacgtccgcctgcgcaagaaggtaagtggcaccactgagaggccgaggttgagtgttttccgctcaaacaaacatctgtacgctcaagtcatcgacgacacaaagcaatgtactctggcttcagcttcaaccatgcacaaatctctctcc

SEQ ID NO: 21444 - DNA, 250 bp, Zea mays
catgagcgagttccaagtgatctgaagaagaatctcatgcaagcaaggctcgataagaagctgacacaggcacaacttgctcagatgataaatgagaagccacaggtgattcaggagtatgaatcaggcaaggcaatccccaaccagcagatcattagcaagctcgagagggccctgggaaccaagttgcgtggcaagaaatagctttcctacgagtttgtgtcccggagcatcataatagggggaagac

SEQ ID NO: 21445 - DNA, 248 bp, Zea mays
gagacagacggttgctgttggagttatcaagagtgtggagaagaaggacccgaccggcgccaaggtgaccaaggcggctgccaagaagaaatgatgcgatcctgcgcctgctttagcaatacctagttttcatcatcacaagttttgtttgtgatcgttgctgttatcgtgtgaactgttgagatctgttagcatgtgcacttttatctatttatttggtaccatcttgctatttcaccttttgcaat

SEQ ID NO: 21446 - DNA, 252 bp, Zea mays
atcttgcatcagctagctaactaagcaagtaagctaagctagccctaggcaacgagccgaccgtcaagctcatcgcagaccacgagccatggcctccaccaacagctggactgttgagatcgcctcgcctgtcgccgcgccgcgcctcttccgcgccgccgtgatggactggcacaccctggcccccaaggtcgcctcccacgtcgtcgccagcgcccaccccgtggagggcgagggcggcgtcggcagcgt

SEQ ID NO: 21447 - DNA, 248 bp, Zea mays
ccctttgcaagtatagtctctctgctaagcgaggagcttcaagctagtctcggcggctctagaagacgatgggcaaggacgacgtgatcgagagcggcgctggcggcggcgagttcgctgccaaggactacacggaccctcccccggcgccgctgatcgacgcggcggactggggtcctggtcgctgtaccgcgccgtgatcgccgagttcatcgccacgctgctgttcctgtacatcacggtggcca

SEQ ID NO: 21448 - DNA, 251 bp, Zea mays
gcgtacgtagcacagtccattattgccgtctcccttttgcgtgacaaagaaagagagtgagaagcagtcgccatgtctggcatcatccacaagatcgaggagaagctccacatggggggcgaccacaagaataaggaggaggagcaccacaagaaggccgaggagcaccacaagatggaggagggggagcaccacaagaaggacggcggggagcacaaggaaggcatcgtggagaagatcaaggacaagat

SEQ ID NO: 21449 - DNA, 254 bp, Zea mays
cccatccaggtcgtcgtcgacgcgatcatcaacagtggaccccgtgaggatgccacccgtattggttccgctggtgttgtgaggaggcaggccgtggatatctcacccctgaggagggtgaaccaggccatctacctcctcaccactggtgccagggagagtgctttccggaacatcaaaaccattgccgagtgccttgcagatgagctgatcaacgctgccaagggctcatccaacagttacgccatcaagaa

SEQ ID NO: 21450 - DNA, 257 bp, Zea mays
ccaactgcgagatccaggacaccacccagatccacacccacatgtgctactccaacttcaacgacatcatccactcgatcatcgacatggacgcggacgtgatcaccatcgagaactcgcggtccgacgagaagctgctctccgtgttccgtgagggtgtcaagtacggcgcgggcatcggccccggtgtctacgacatccactcccccaggatcccgtcggccgaggagatcgccgaccgcatcgacaagatgctg

SEQ ID NO: 21451 - DNA, 259 bp, Zea mays
gagaaccaccttgttctctgggatctccgcccccttggcttgactggaaacaaggtcgaaaagctatgtgatctttgccacatcacattgaacaagaatgctgtcttcggtgacagcagtgcattgtctccgggtggtgtccgcattggcgcgccacaatgacctcgaggggtctactggagaaggatttcgagcagattggggagttcctccaccaggcagtgaccatctgcctgaacatccagaaggagtacggcaa

SEQ ID NO: 21452 - DNA, 182 bp, Zea mays
caagaaccaggccgggagcgggtgcgagggcaagaacttctacacccggagcgcgttcctgagcgccgtcaacaagtacccgggcttcgcccatggcgggacggaggtggagggcaagcgcgagatcgccgccttcttcgcgcacgtcacgcacgagaccggacattctgctacatcagcga

SEQ ID NO: 21453 - DNA, 238 bp, Zea mays
gcagtttatccgatacatgatctcatcaaatattggggaggtggtttgtatttttgtggcggcagtgcttgggatgcctgacacacttatacctgtccagctactctgggtgaaccttgttactgatggattacctgcaactgcaattggtttcaataagcctgatggcaacatcatgtcagtcaagcctcgaaaggttaatgaagctgtggttagtggatggctctttttccgttat

SEQ ID NO: 21454 - DNA, 237 bp, Zea mays
cagcaatagctcctcgtctgcaaccacgatactactcaatttcatcatctccaaagatggctccctccagaattcatgtaacatgtgcgttagtttatgggccttcaccaacaggaaggatccaccaaggagtttgttcaacatggatgaagaatacaattcctctggaatatagcgaagaatgcagctgggctcccatctttgtgaggcagtcaaatttcaagttacctgctgatc

SEQ ID NO: 21455 - DNA, 235 bp, Zea mays
tgaagtagtaatggcctccgccaacagctggaccctcgagatcgcgtcgccggtggccccgcagcgcctgttccgcgccgccgtgatggactggcacaccctggcgcccaaggtcgcctcccacgtcgtcgccagcgcgcaccctgtggagggcgacggcggcgttggcagcgtcaggcagttcaacttcacctcagtcatgccgttcagcttcatgaaggagcgtctcgagttc

SEQ ID NO: 21456 - DNA, 232 bp, Zea mays
cggagtacaacaaggcccgcctcgtgtccctcgagctccccgaccgcagtggcgacataatcatcacaacttatggggagattgacaagaacaattatctggaccccaggactgcgcaagatgctactatagatcatacgaaacagacttgtacgaaactgaggcccgctgaagatgaggagcttccatcggcttacattgaagagtttaggtagactacctgtgcgtcttt

SEQ ID NO: 21457 - DNA, 236 bp, Zea mays
ccatcttccacctcaacccgtccgggcgcttcgtcatcggcgggccccacggtgacgccggcctcaccggccgcaagatcatcatcgacacgtacggcggctggggagcccacggcggtggcgccttctccggcaaggaccccaccaaggtggaccgcagcggcgcctacgtggccaggcaggccgccaagagcatcgtggccagcggcctcgcccgccgctgcctcgtgcaggtg

SEQ ID NO: 21458 - DNA, 171 bp, Zea mays
caccgacaacctcaccatacttcagcagaagttcagcaacctcagcctcaacgatgtcgacctggtcgccctttcaggggggcacacgttcggccgggtccaatgcaagttcatcacggaccggctctacaacttcagcgggacgaacatgcccgacccgacgctggacgc

SEQ ID NO: 21459 - DNA, 235 bp, Zea mays
ggatggctgtgcagaaacaacattactgtccagaaatgtacaatggtttcaagatgatgcttgcagaatgtgtccgcacaatggttctgccccatctcatgcacaagcaaaatgacagctttttcagagagcttgtgaaaatgtggtcaaactattgcatcatgattagatgtgtaattggcttcttcagctatttggaccgctgctatgtgaacagtacaaactaccatcgctt

SEQ ID NO: 21460 - DNA, 231 bp, Zea mays
tgtctctgctggcagaaccccatttacttctgggattgggcttgaaactcttggcgttgagacagataaagctggcaggatccttgttgataagcgcttcatgaccaatgtgaagggagtctatgcaattggggatgcgatccctggtcccatgcttgcccataaagctgaagaggatggtgtcgcttgcgtagagttcattgctggaaaggaaggccatgttgactatga

SEQ ID NO: 21461 - DNA, 229 bp, Zea mays
ggacatcaccgagctcattgccgcgggcagagagaagtttgcttcagtcccatgtggcggcggcggtgtggctgttgcggcaggtgcacctgctgctggcggactgctcctgcagctgaggcaaagaaagaagagaaggtggaagagaaggaagaaagcgatgatgatatgggcttcagcctcttcgactaggttgcacagtcatcacagtattgtttcgggcagtgaa

SEQ ID NO: 21462 - DNA, 232 bp, Zea mays
agggttttgctgctctccgaccccgagctccgaatgccgcagcatcaggcgcggcccccctcgcgtgtgaccgagatggcgctgccgaatcaggggaccgttgattaccccagcttcaagctcgtcatcgtcggcgatggtggaactggtaaaactacatttgtgaagaggcatctcactggagagtttgagaagaaatatgaaccaaccattggtgtggaagttcatccgt

SEQ ID NO: 21463 - DNA, 228 bp, Zea mays
ccaaaggccaccaccattccttccccaactctgcaggctgctcgtcgccctccctccacgccggacgcgccccgatccagatccaggggcgtaacatggcatcaaaacgtatcctcaaggaattaaaggacctgcaaaaggaccctccaacgtcatgcagtgctggtcctgctggtgaggatatgttccactggcaggcaaccatcatgggtcctcctgatagtccat

SEQ ID NO: 21464 - DNA, 226 bp, Zea mays
caacactaaggatgatcttagactcccaactgatgagactcttgtggcccagatcaaggaagggtttgaaagcggcaaggatcttgttgtgactgtccagtctgctatcggggaggagcagatctgcgcgctgaaggatgttggccccaagtaacttacctgccttggaatactgtatctcaaaacctaaatcgaaaaaagaagtgtatcaaggattgctacagag

SEQ ID NO: 21465 - DNA, 135 bp, Zea mays
cgacgtgctgctcaacgactggtggcacaagagcacctacgagcaggccgccgggctcgcgtccgcgccgctcgtctgggtcggggagccgcagtcgctgctcatcaacggccgcggcaggttcgtcaactgctc

SEQ ID NO: 21466 - DNA, 219 bp, Zea mays
cttggtgaagaatggcatccgcacctttgcttgcagtgagacagttaaatttggccatgtcacatttttctggaacggtaaccgttcgggatactttgatgcaactaaggaggagtatgtagaagtacctagtgacagtggtattacattcaatgttgcacccaatatgaaggcgcttgaaattgctgagaaagccagggatgctctcctaagtggaaa

SEQ ID NO: 21467 - DNA, 215 bp, Zea mays
cggacgctgggcttggaggtggagagctctgacaccattgacaatgtgaaggccaagatccaggacaaggacggcattcccccagaccagcagcgtctgatctttgcgggcaagcagctggaggatggccgcactctcgcggactacaacatccagaaggagagcacccttcaccttgttctccgcctcagaggtggtatgcagatctttgtaaa

SEQ ID NO: 21468 - DNA, 230 bp, Zea mays
cgtctgacgtcgagggcgtggtcacgctcacgcaggacgacgatggacctacaactgtgaatgtccgtatcactggacttacccctggacttcatggcttccacctccacgagtttggtgatactaccaatgggtgcatatcgacaggaccacattttaatccaaacaatctgacacacggtgcaccagaagacgaatccgtcatgcgggtgacctgggaaacattgttg

SEQ ID NO: 21469 - DNA, 274 bp, Zea mays
gcgagagctagctagagggccgtgaaaatgccgatcaataggatcgccctggggagccaccaggaggtgtaccacccgggcgccctcaaggcggcgttcgctgagttcatctccaccctcatcttcgtcttcgccggccagggctccggcatggccttcagcaagctgaccggcggcggcccgacgaccccggcgggcctgatcgcggcggcggtggcgcacgcgttcgcgctgttcgtggcggtgtctgtgggcgcgaacatctccggcgggc

SEQ ID NO: 21470 - DNA, 273 bp, Zea mays
cgccccaagccgggcgtcgagcgcgtcgctgtctccctcgacctctacaaccagggatccgcgactgcctatgatgtgtccattaaagacgactcttggccaacagaagtgtttgagcttgtcactggagagaaatcgaagacattggaaaggcttgaccctggtgccactgcttcacacacatatgtcctggagaccaaaacacagggcaggttccagggttcaccagctatcattacataccgtgttcccacaaagacagctcttcaggag

SEQ ID NO: 21471 - DNA, 278 bp, Zea mays
  unsure (1)..(278): unsure at all n locations
catcgccgcacncaacccccccctccgccccgcgcttcgcctgggtaccggcgtccgccgcaccccgtcccgtccaggaacaggaagagcagtaacccatccatcggggatcaccaggggagcaagatgtcgactgccgccgccccaagattgcccgctcccagatccggggcaagctatcactatcagacgaccgcggctccggtggccaacaccctctccttcgccggccacgcgaggcaggcggcccgcgcgtccgggccacggctgtccagcag

SEQ ID NO: 21472 - DNA, 278 bp, Zea mays
tgccaattgtgctgagggagtgcggcgagacgtttcgtgggatcgactcgttggttgacgtcggtggtggccatggtggcgccgccgccaccatcgccgccgccttcccccacctcaagtgcagcgtgcttgacctcccgcacgttgtcgccggtgctccgtctgatggcaacgtgcagttcgtcgcaggcaatatgtttgagagtattccacctgcacccgctgttttcctcaagaaaactctacatgactggggtgacgatgagtgtgtcaagata

SEQ ID NO: 21473 - DNA, 276 bp, Zea mays
cgcgccgccgccgcagccgcaacaatgccgtcgcacaagaccttccggatcaagaagaagctggcacagaagatgcgccagaaccgccccatcccctactggatccgcatgcgcactgacaataccatcaggtacaacgccaagcgcaggcactggcgccgcaccaagctcggcttctgagcgtcgggattggccggctgctgcgtcggaaggctagggtctaagagctatcttccttctgttttatcaatgtgtcagtttttctgtaagctagca

SEQ ID NO: 21474 - DNA, 271 bp, Zea mays
tggtcttctgttcatagtcagcagctcatttggagcattcctcctgctcatttacttggcgtttataacccctattgtgtatgacttctacaaccatgaaatggagtcaacactgtttgtcgatctttttttcaagttcatacagaacttggcgtttatgggtgccctgcttttcttccttgggatgaagaactcaattccaaaacgtcgctccaagggaaggacaacaaaaaccaagacaaactgatgtcagtggttgtaggaggggaag

SEQ ID NO: 21475 - DNA, 269 bp, Zea mays
ggactcctcgttctcgtcggcgtccacgaggcggacacggactccgacgccaactacatttgtcggaaggtcctgaacatgaggctgttttcaaatgacaagactggaaaagcatgggatcaaagtgttatgcagcgtaactttgaagtgctattggtcagtcagttcaccttatacggcatcctgaagggtaataagccagattttcacgtggctatgtcacctgcaaaagcgaaaccattctatgcttctctagttgagaaatttca

SEQ ID NO: 21476 - DNA, 270 bp, Zea mays
ctgtcgcatcacaagcctctcttccggtttccccccaaacccgtccgagaggcagtcatcccgccgcgatgagggccaagtggaagaagaagcggatgaggcggcttaagaggaagcgccgaaagatgaggcagaggtccaagtaggcagattcatggagtgtccccgcctggagtctctctgcgttcggttgttgtttactgagtaattttagttttttttactaagacagtctgttatggatcagaaattctttgcgtttgtccgtgg

SEQ ID NO: 21477 - DNA, 272 bp, Zea mays
  unsure (1)..(272): unsure at all n locations
aagtttagtcggccgatcgatcactgaagtagtaatggcctccgccaacagctggaccctcgagatcgcgtcgccggtggccccgcagcgcctgttccgcgccgccgtgatggactggcacaccctggcgcccaaggtcgcctcccacgtcgtcgccagcgcgcacccngtggagggcgacggcggcgttggcagcgtcaggcagttcaacttcacctcagtcatgccgttcagcttcatgaaggagcgtctcgagttcctcgacgcggaca

SEQ ID NO: 21478 - DNA, 265 bp, Zea mays
caagaagccaaggcggccgtatgagaaggagcgcctagatgctgagctgaagctggttggtgagtatggcctgcggtgcaagcgcgagctgtggcgcgtgcagtatgccctgagccgtatcaggaatgcagccagggagctgctcaccctggatgagaagaacccacgccgtatctttgagggcgaggcgctcctccgccgcatgaacagatatggtcctcctggtgaaggacagaacaagcttgattacgtgcttgctctcact

SEQ ID NO: 21479 - DNA, 271 bp, Zea mays
catcgacaccatccgttcggccctgaccgtcatgatcgatgccggggcgaggacagtggtgatcacggggatgctaccgatcggctgcgagccgcagcagctggcccagttcgcaggcagcccggccggcgactacgaccctaccaccggctgcatcacgcggttcaaccagctcgccgagcaccacaaccacatgctgaggatgatgctgagggagctgcggaccaagtaccgcaggcgcaggcccctcaccctccactacgccgacatc

SEQ ID NO: 21480 - DNA, 274 bp, Zea mays
gaaccgcctcgtcgccgcgcggctccagttcgacgtcatgggcgtggagaccgtcctcgtcgcgcgcaccgacgccgtcgccgccacgctcatccagaccaacgtcgacgcgcgcgaccaccagttcatagtcggcgccaccaacccgggcctcaggggccagagcctcgcggccgtgctctcggccggcatgtcggcgggcaagagcggaagggagctccaggccatcgaggacgagtggctggccgcggcgcacgtcaagaccttctccgag

SEQ ID NO: 21481 - DNA, 267 bp, Zea mays
gctgatgggaacacagcatgtgccaaggaaatgacaaagctctctggcatctctgaaatcatccccgagatggagatctgcgattttgactttgaaccctgtggctactccatgaatgcgatccatggctctgcattctccacaatccatgtgacgcccgaggacggtttcagctatgccagttatgaggttatgggcttggatgccactgctctgtcttatggtgaccttgtcaagagggtccttcggtgctttggcccctcggag

SEQ ID NO: 21482 - DNA, 260 bp, Zea mays
cagtgttccctagaggtggtcgtggctatcgctatcctactggacgtggaatgcctgatcctggcatgcacagtgttggtgctgtgatgccaccttcatatgagatgggagggatgccaatgagagaagctgccccccaacctgttccaattggggcgctagcactgcacttgctaacgccccaccagatcagcagagacttatgcttggtgagaacctgtatcctcttgttgaacagctggaacgtgagcaggctgcca

SEQ ID NO: 21483 - DNA, 262 bp, Zea mays
gggcggagtgctcggagcagttggcggggctggcgacgtgcctgacgtacgtgcaggagcaggcgacggcgacggcgccgacgcccgactgctgcgcgggcctcaaggcggtgctgcagagcagccgcaagtgcctgtgcgtgctggtcaaggaccgggacgaccccaatctaggcctcaagctcaacgtcgacaaggcgctcggcctccccgccgtctgccacgcgcccgccaacatctccgactgccccaggctgctgga

SEQ ID NO: 21484 - DNA, 267 bp, Zea mays
ggaggtggtggatcctgacatggagttgaaaccagcgattcgtgctctgaagcgtgctcttctagtggcactgcgatgtgtagacccagatgctgagaaaaggcccactatgggtcaggttgttcggatgctcgaggcagaagacgtgccttcacgggaggaccgccggagccggagaggccacagcagccacgcagacaacgagtccaaggcaagttcaagcgagtttgagataagcagtgaccgaagagagtcggggccgtcatc

SEQ ID NO: 21485 - DNA, 268 bp, Zea mays
acgcccgacaacccctgctgcgactggtacgacgtggactgcgacgccaccactggccgcgtcgtcggcctcgccgtgttccaggacgccaacctgacgggcaccatccccgacgccgtctcgggcctcgtccacctccagaacctcatgctgcaccactctcccgggcatctccgggcccatcccgccggccatcggcaggctctctaacctctccttcctcaccatctcctggacgggcgtctccggccccgtgccgtcgttcctg

SEQ ID NO: 21486 - DNA, 267 bp, Zea mays
aagatactaaggacaagatcactaagctattggaggaatacaacactggtggtgacctaggagaagcctgcagatgcatccgtgatcttgggatgcccttctttaaccatgaggtggtaaagaaggcactggtcatggcgatggagaagcagaatgacaccagcatcttggtcctgctgcaggagtgtttcggcgaggggctcataaccatcaaccagatgaccaaaggctttgcccgtgtcaaggaaggccttgatgatctgatcc

SEQ ID NO: 21487 - DNA, 255 bp, Zea mays
gaaaaccgtcaaaggacgagcacaacttggggtggaggcgtttgcggtagctcttcttgttatacccaagactttggctgagaactctggtttagatactcaagatgtgattgtttctctccagaatgagcatgaccgtggattagttgtggggttgaaccatcactctggggatccgattgatccccagatggaaggcatcttcgacaactactctgtgaagcgccagatcatcaattctggacccatcattgc

SEQ ID NO: 21488 - DNA, 245 bp, Zea mays
caaggagctcgagaacggcgtcctgtgggaggtcgagggaaagtgggtcacccaaggtcctgttgatgtagacattggtgccaatccatccgccgagggtggtgaggatgaaagcgttgatgacacagccgtgaaggtggttgatattgttgacacattccgtctacaggagcaacctccttttgacaagaaatcatttgtctcttacataaaaaaatacatcaagaatctcactgctgtgttgg

SEQ ID NO: 21489 - DNA, 248 bp, Zea mays
ctgcttcctagctgggggtgctctctaccgtttcgagtacgcagtcaacccggcgctcttcctcgccaaagcgcgaggagggacgtgcacgctcgctccctctgaccctgacgacacggtggctcgccgcgccagatacctgctgagcaacggtttcaggtgctacaacctgttcaagagcaactgcgaggacttcgcgaagtactgcaagactggccttcttgtcgctgagcagggcgttgtcgggc

SEQ ID NO: 21490 - DNA, 245 bp, Zea mays
ggttatagaaccaatcaagtacaatgatggtctagatcagtatcgcctgtctccagcacagctgcgtgaagagtttgccaggcgcaatgctgatgcagtatttgcctttcagcttcgcaatccagtacacaatgggcatgctctacttatgaccgacacacgcaaacgcctccttgagatgggttataaaaaccctgttcttctgctccatccactgggaggattcacaaaagcagatgatgtgc

SEQ ID NO: 21491 - DNA, 245 bp, Zea mays
cccgggacctcaagaacgtcaactggcgcaacggcgaactcaagccgtacgccgtcgactggatcgactccggtgccaagtgctccacccgcgtcgacctcgacaacggcgagaacccgacgtgggacgagaagctcctcgtcccgctcccgcccacctcccgcctcgacgacgccgtcctctacatcgacgtcgtccacgccaacgccgccgagggcgtcaagcctctcgtcggctccgcacgc

SEQ ID NO: 21492 - DNA, 249 bp, Zea mays
cacgagctcgcccgagatggcgaacgcgagatcgggtgtcgctgtgaacgatgagtgcatgctgaagtttggcgagctgcagtcgaagaggctgcaccgcttcataactttcaagatggacgacaagttcaaggagatagttgtggaccaggtcggggatcgcgctaccagctacgatgacttcacaaacagcctccctgagaatgactgccgatacgcgatctatgatttcgactttgttactgcaga

SEQ ID NO: 21493 - DNA, 248 bp, Zea mays
tggacaggtaactcaagaggtccacttattgactcttatgaccatgtaattggtgttaatacaactacattaacacgtaaaggttggtagatctggaaggtcttgatggtctaatacctgtctatgagtacgaaagaaaaggcgagagaagtcggtctctgcagcatcgcgcgtgaaaaaaaatcagccaattccatgagcattgatgttgtcatgacttcaaggagagaccatgctaagaataatgc

SEQ ID NO: 21494 - DNA, 247 bp, Zea mays
cgcgtacctccactccgcggccgtgccgcccatctaccaccgcgacatcaagtccagcaacatcctgctggacgcccgcctggacgccaaggtctccgacttcgggctgtcccggctggcggagccgggctgagccacgtgtccacctgcgcccagggcaccctgggttacctggacccggagtactaccgcaactaccagctcacggacaagagcgacgtctacagcttcggcgtcgtgctgctcg

SEQ ID NO: 21495 - DNA, 244 bp, Zea mays
agaagttgctttcacagtttacgaggatttcgcacactacaaatctggagtgtacaagcacatcaccggtggcattatgggtggccatgccgtcaagttgattggatggggaaccagtgatgctggagaagattactggcttctggcaaatcagtggaatagaggctggggcgatgatggatacttcaagatcataaggggcaaaaatgaatgtggcatcgaggagggcgttgttgctggaatg

SEQ ID NO: 21496 - DNA, 246 bp, Zea mays
gtcctgagccacacccttctaataaccgagctttaccagcagcttaagttccctgttaagccagctgatatcaagaaaagaatagagagcttaatagaccgggagtacctggagcgggacaggagtaacccccagatctacaactatctggcttgacagagctttggaggatcattaaagagaccgctcactttattatcagaaaagacactgtaaattggtttgttttccagttccttgttcttt

SEQ ID NO: 21497 - DNA, 244 bp, Zea mays
caatgctggagtgattgtgaacccaaagggagagatgaaaggctctgccatcactggacccatcggaaaggagtgtgctgatctgtggcctaggattgccagcgcggcaaatgcgattgtctagtggaatcagttgatcgaaatttacttcaaataacatttgtttgtgttgcgaattgggaagagagtttttagttagacgagcttttgatggccctaaagatgttttcccggatgatgtttg

SEQ ID NO: 21498 - DNA, 242 bp, Zea mays
gcaagctcaaaccagaaattcaagagtggcctcaatggcattcaggttgaactccaggccacagatgcgagtgaaatcagcctcgatgagatcaaggatcgggcacgctaggcgcaccgccatcgtgagtttcatgatcacgcatcatggactcgcctactactgtggatttgtacgccattatagacttggtgctgcgaaagactgctttggtgatttgtgggtttgttgctgtgtaaaaa

SEQ ID NO: 21499 - DNA, 241 bp, Zea mays
cagcccgatcttgcatcagctagctaactaagcaagtaagctaagctagccctaggcaacgagccgaccgtcaagctcatcgcagaccacgagccatggcctccaccaacagctggactgttgagatcgcctcgcctgtcgccgcgccgcgcctcttccgcgccgccgtgatggactggcacaccctggcccccaaggtcgcctcccacgtcgtcgccagcgcccaccccgtggagggcga

SEQ ID NO: 21500 - DNA, 241 bp, Zea mays
  unsure (1)..(241): unsure at all n locations
cctaaaaccatctgcttcagctagccccaagtttagtcggccgatcattcactgaagtagtaatggcctccgtcaacagctggaccctcgagatcgcgtcgccggtggctccgcagcgcctgttccgcgccgccgtgatggactggcacaccctggcgcccaaggtcgcctcccacgtcgtcgccagcgcgcaccncgtggagggcgacggcggcgttggcagcgtcaggcagttcaactt

SEQ ID NO: 21501 - DNA, 243 bp, Zea mays
gcgggggactcgtgccaaccaccaatggccgtcatggcattcgcgggggatcaggcccagaacttccactactccccaatgggcaacgccaccagccaggctgcgaatgtgacgttcactgcacgcgctgagagaacacgtgtggcgttctatagcgtgtattacaacacgaggagtgacgaccacagctcgctgtgtggcccggtgattgacgatgtccgggtatgggcattgaacgccgcg

SEQ ID NO: 21502 - DNA, 240 bp, Zea mays
cggaaagcgccgtcccgtaaggccaagaagtaaagcggccaataaggggggcgcgatgctgtaaatttgatatcggagaggctcgggtacactggtcattcagtatccgagaccgatagctgaggctagtggcgatggaggactgtgttattactactataaactggtggttgtgtttctgtaactggtgaatgatcaagttggaagcttttagtctatcttagatatatcagtggatag

SEQ ID NO: 21503 - DNA, 237 bp, Zea mays
ggttactatggtctgactccttttctttgcctaactgttcatttgacatgataataacttctttaaaattagatgtgagtgcacaaaactataatttctgccttagactccacaatatcatttgttatatagcatgcctgtaatatgcctaaatcaatgtattgattttcagcaaagctagtgatcattgctaacaactgtcctccgcttcggaagtctgaaattgagtactatgct

SEQ ID NO: 21504 - DNA, 236 bp, Zea mays
gggagcggccgggcgcaaggtcggcgggccaaggaagaagtcggtgtcgaggtccgtgaaggccgggctccagttccccgtcggccgcatcgggcgctacttgaagaagggccgctacgcgcacgtgtcggcaccggcgcccccgtctacctcgccgctgtcctcgaatacctcgccgctgaggttctggagctcgctggtaatgctgccagggacaacaagaagactcgcattat

SEQ ID NO: 21505 - DNA, 235 bp, Zea mays
cgactcgctcgggccgcccctcccgtcgtccccgttcgaaggtgcggcaccggcagggagcgatttgattcgacatgaatcccgagtacgactaccttttcaaacttctgcttattggtgattctggtgttgggaaatcatgcttgcttctcagatttgcagacgattcttatttggacagctatatcagcacaattggggttgatttcaaaattcgcacagtggagcaagatgg

SEQ ID NO: 21506 - DNA, 240 bp, Zea mays
aacctggaggcgcacctgcacctgctggacggcttccgcggctccggcgcggggttcgagccccgcgggagggaccccgcgctggtgaacaagtccaccgacttcctccgggaggaccacatggtgccgcccgtgtggtaccaggcggagaacaagggcatggtgaggacggaggacggccggcgggtgctgccgcagcggcagagggtgctcgacgaccacccggaggacactgaccat

SEQ ID NO: 21507 - DNA, 273 bp, Zea mays
ggttcggcttcgatttgtggttccacgacttcctagagttcagctccaccggccgcctgctccggtacgacccgcgcacggcgagacgtccgtcgtgctcgaccgactcggcttcgccaattgcgttgcgctgccgagggacgaggccttcgtcgtcgtctgcgagaccatgaggttcaggtgcatcaaagtgtggctgaaaggggataaggccggcgaggcagagacgttcgtcgaccttccggggtggccggacaacatccgtctcgggtc

SEQ ID NO: 21508 - DNA, 273 bp, Zea mays
agctcgtcctgcacttctggagcgacgacgactgcgtcaagatcctggagctgtgcaggaaggccatcccttcccgcgaagaaggagggaaggtgatcatcattgagatactcctgggcccgtacatggggccggtcatgtacgaggcccagctgctgatggacatgctcatgatggtcaacaccaagggcaggcagcgcggcgaagacgactggcgccacatctttaccaaggctggcttctccgactacaaggttgtcaagaaaatcggag

SEQ ID NO: 21509 - DNA, 123 bp, Zea mays
gttctactcggagggcgtgttcacgggcgactgcggtacggacctggaccacggcgtggcggcggtcggctacggcgtcggcgacgacagcacgccctactggatcgtcaagaactcctgggg

SEQ ID NO: 21510 - DNA, 268 bp, Zea mays
cccgagcacccaacgcgctactagttctattgccgcaccccagatctccaggagggactcgttctttcagctaactacactgcacgcaatggccaccacggcgaccgaggcggcgccggcgcaggagcagcaggccaacggcaacggcgagcagaagacgcggcactccgaggtcggccacaagagcctgctcaagagcgacgacctctaccagtacatcctggacacgagcgtgtacccgcgggagccggagagcatgaaggagctc

SEQ ID NO: 21511 - DNA, 262 bp, Zea mays
gcgtctgtggtattcgcctattacaaggatggtgccactaatccgacattcctctatttctctcatggtcttaaggagatcaagtgctaggcgtgcggcgaaattagttacccatgttgggtactatctatgtactattattatatccaaaactatagttgtcctggctgaattgaactccaaagggtttgtttgagaaaaaattgtcccaagattggattgcttgttaaagctcaatattgttattgaagtgttattgctt

SEQ ID NO: 21512 - DNA, 267 bp, Zea mays
ggaacatcttcgtgaagaagcccaagatcactgacgtcgatagggccatcctcaccctcaagacgcagcgccgcaagctcgcccagtttcaacagcagcttgagaaggtaatcgaagcagaaaaggaagctgcacggcagttggttcaacagaagaagagagacagagctttgattgctctgaagaagaagaaagctcaggaagagctgttgaaacaagttgacacatggcaaatgaatgttgaacaacagctggcagatattgaac

SEQ ID NO: 21513 - DNA, 265 bp, Zea mays
cgactcccgcgtcaggcgtaagttcaagggatgcaccttgatgcccaacattggatatggctccgacaagaagaccaggcactaccttcccaacaagttcaaaaagtttgttgttcacaatgtctccgagctggagctgctgctgatgcacaacaggacttactgcgctgagatcgcccacaacgtgtccacccgcaagcgcaaggagattgtggagcgtgctgcgcaactggacatcgtggtcaccaacaagctcgccaggctc

SEQ ID NO: 21514 - DNA, 264 bp, Zea mays
cagcattcctatcctctccccgcccgcccgtgccgccgccgcggcttcccttcctctcccgagccaagatgaatgttgaaaagctcaagaagatggcaggtgctgtgcgcaccggggggaagggtagcgtgcgcaggaagaagaaggcagtccacaagactacaaccacagatgacaaacggcttcaaagcaccttgaaaagaataggagtgaacagcattcctggtattgaagaggtcaacatctttaaggatgatgttgtta

SEQ ID NO: 21515 - DNA, 263 bp, Zea mays
caaggcaccacacctcttcttcttcttcctcctcctcctagcacagctagcgcctgctccccttcgcctgtgatcatgtcttgcagcagcggcaagtgcgactgtggctccagctgctcctgcggcagctcatgcaactgcatgtcccctaacgtggagaccgccgccgccagcagcatcaagaccacggtcctcgccgcgccgaccactaaggccagcgccggcggcttcgaggcggccaccgagggcggcggctgcgactg

SEQ ID NO: 21516 - DNA, 260 bp, Zea mays
aatccatccgccgagggtggtgaggatgaaagcgttgatgacacagccgtgaaggtggttgatattgttgacacattccgtctacaggagcaacctccttttgacaagaaatcatttgtctcttacataaaaaaatacatcaagaatctcactgctgtgttggagccagagaaagcggatgagttcaaaaagggtgtcgagggtgcaaccaagtttctccttagcaagctgaaggaccttcaattttttgttggtgagag

SEQ ID NO: 21517 - DNA, 259 bp, Zea mays
cgcaagtccacgggcggcaaggccccgaggaagcagctggcgaccaaggcggcgcgcaagtcggcccctgcgaccggcggcgtgaagaagccgcaccgcttccgcccaggcaccgtggcgctgcgcgagatccgcaagtaccagaagagcacggagctgctcatccgcaagctgcccttccagcgcctggtccgcgagatcgcgcaggacttcgagaccgacctccgcttccagtcctccgccgtcgccgcgctgcagg

SEQ ID NO: 21518 - DNA, 259 bp, Zea mays
aaatacttaatccaaaaatcccgttgagtgaacaagaggaccttattgtttggatgcggactgcagcgcttccaacattcagaaagctgtatggtaggatatatgttgatctcaaggaaaacgatacaattacagttcagttggagaacaactacaacacctatagcttcagtggcaagaagaagctggtgctttctactgcaacctggattggtggaaagaacgattttctgggccttgcatatctcactgttggtgg

SEQ ID NO: 21519 - DNA, 258 bp, Zea mays
attacagtcatgtcattcttcctgttggccccggtaaccttacttacagaaggtgttaaagttagtccagcagttttgcagtctgctggtttgaacttgaaacagatatacacaaggtcattgattgctgcatgctgcttccatgcataccaacaggtgtcatacatgatcctcgccagggtatccccagtcacacattcagtgggcaattgcgtcaagcgtgtggtggtcattgtgacctcggttctgttcttcagg

SEQ ID NO: 21520 - DNA, 259 bp, Zea mays
gccgcttccgccttcacccaatcagggatgaggatgctaagttcaagctttgcaaggttaggtctgttcagtttgggcagaagggcatcccgtacctgaacacgtatgacggccgcaccatccgctaccctgacccgctcatcaaggccaacgacaccatcaagatcgatctggagaccaacaaaattgtggacttcatcaagtttgatgttggcaacgttgtcatggtgactggcggaaggaacactggccgtgtggg

SEQ ID NO: 21521 - DNA, 259 bp, Zea mays
cgggacgtggcggacgcgtgggcggacgcgtgggagagctctgacaccattgacaatgtgaaggccaaactccaggacaaagagggcattccaccagaccagcagcgtctgatctttgcgggcaagcagctggaggatggccgcactctcgcggactacaacatccagaaggagagcacccttcaccttgttctccgcctcaggggtggtatgcagatccttgtgaagaccctgactggaaaaaccataaccctggagg

SEQ ID NO: 21522 - DNA, 259 bp, Zea mays
gggaaccaccgaccagaaagttgtggatgagaaccttgagaagctgaagaaggtgctagaggtgtacgaggcacgcctgaccaagtgcaagtaccttgctggagtcttcctcagcctcgccgacctgaaccatgtgtctgtcactctctgcctgtttgctacgccctacgcatctgtgctcgacgcctacccgcatgtgaaggcctggtggtctggtctgatggagaggccgtctgtccagaaggtcgctgccctgatg

SEQ ID NO: 21523 - DNA, 257 bp, Zea mays
gcggagacttcggaatggcggcggcggctcgtgccgggttccggcggctcttctccgtctcggccttcgctgcaccgcctcctcctgccgcgcgccccgcggcggacccttgcaacaacctcttcgtctcagggttaaataaacgcacaacgtccgagggacttaaggaagcattttctaaatttggtcaggttattgaagcaagagtgatcactgataggatatctggatactccagaggatttggctttgtcaaa

SEQ ID NO: 21524 - DNA, 253 bp, Zea mays
ggcttcgccgtggaggccgtcgtcggcgcggctgtcaccaaggcggtcgcaaacgtcggcgccggcgtctttgcttgctctctcgccggcttcgtcgtgggcgccatcgccgggctgatcttcgtcggcgtcacggcctcctcattaacctcatcatcggctccccaaggaaggtgcctgacatgagcaagctcatgttccacaccgccgtcatgcccgatggaatggcccttgcgtatgcggtatctcatta

SEQ ID NO: 21525 - DNA, 255 bp, Zea mays
gagaacatggtgctgaagacggaactttgccgcttcagcggccagaagatttatcctgggaaaggcattagatttatccgtgctgattctcaggtcttcctttttgccaactcgaaatgcaagcgctacttccacaaccgcctgaaacctgcaaagcttacctggacagcaatgtacaggaagcagcacaagaaggatatccatgctgaagcagtaaagaagaggcgccgcgccaccaagaagccatactccagg

SEQ ID NO: 21526 - DNA, 251 bp, Zea mays
gctggaactgaggcgattgccaagaagctagctgagcttacaaccacgaagggtgtcactaccatcatcggcggcggcgactctgtcctgctgtcgagaaggctgggctggcggacaagatgagccacatttcgaccggcggcggtgcgagcttggaactcttggaaggcaagactctacctggtgtccttgccctcgatgacgcctagatccgctgctgctgctgctgctgctactcaggttctgccagc

SEQ ID NO: 21527 - DNA, 248 bp, Zea mays
actctcatgagttgccacgatatggtcttgaagttggtctgaccaactatgcagctgcctactgcactggacttctgttggctcgccgtgtgctaaagatccgtggtttggataaggagtatgagggcaatgttgaggccactggtgaggacttctctgttgagccagctgatgagaggagggcattccgtgctctcttggatgttggccttatcaggactacaacagggaacgtgtctttggtgccc

SEQ ID NO: 21528 - DNA, 235 bp, Zea mays
ggagaccaatattgccatgctaactgaagatcaaaccaaccaattgctgtcttcattctggattcaggcaaatcaaacagataataccccttttaattatgaggctattggacattcatacagcctaacagttctttcttcccgccttaagaattcaagcaatggcaatatcattcagtttttccaattgccattatctcttcgaagtgttgctttaaccccgagtgaagttctg

SEQ ID NO: 21529 - DNA, 110 bp, Zea mays
cgatcgcgcagcccgcccgccctctcgcagctctctccgatgggccgcacgaagcagacggcgaggaagtcaactggcggcaatgcaccgcggaagcagctggacaccaa

SEQ ID NO: 21530 - DNA, 252 bp, Zea mays
ccgaatcagtgatccgatcgcaagaagcaagcaacaatgtcgccggcgcgcagagcagcagcaacgtcttcgacccgctgtcgctggacttctgggcgtcgttcgccgacccgttcggcgtcgtccggccgctggcggagcagtgccccgtcctcaccaacgtgcgcgtcgactggaaggagacccccgaggcgcacgtgttcagggccgaccttccgggcgtcaggaaggaggctgccaacgtcgaggtgg

SEQ ID NO: 21531 - DNA, 247 bp, Zea mays
ggataactggagcgtgggacagcgccaacttattgcactgggtagggcgctgctcaagcaggcaaaaattttggtactcgatgaggcgacacatctgtcgacacagcaacagacaatcttatccaaaagatcatccgcagtgaattcaaggactgcacagtctgtaccattgctcaccgtattcccaccgttattgacagtgaccttgttctggtccttagtgatggtaaaatcgcagagttcgaca

SEQ ID NO: 21532 - DNA, 223 bp, Zea mays
aacgcggtggtgctccgggagtggtttgaccgcgtcgacgccggccgcaccggcaacatcaccgctgcccagctccagggcgcgctcgctgtcggcaacctcaacttccccatctccgtcgtgcagcagatgattaggatgtatgacttcgatcggaatggcaccatgaacttcgaagagtttctggctcttaacaaattcctacagaaggtgcaaaatgtgt

SEQ ID NO: 21533 - DNA, 235 bp, Zea mays
ctcctatccactgcggcctggacgcgtgcgagagacttgaccaagcagcagcagcagggatggcgcctctgaagctgtacgggatgccgctgtcccccaacgtggtgcgcgtggccaccgtgctcaacgagaagggcctcgacttcgagatcgtccccgtcgacctcaccaccggcgcccacaagcagcctgacttcctcgaactcaatgctttcggccagatcccggctctcgt

SEQ ID NO: 21534 - DNA, 235 bp, Zea mays
cgacgtcgcacatcaaggtggagcccgcagccggcggcgggagcgtggtgaaggtcgaatccacttacaagctgctgccgggcgtggaggtgaaggacgagatcgccaaggccaaggagtccgtcaccgccatcttcaagggtgccgaggcctacctcgtcgccaaccccgacgcctacaactaaaccagtgggatgagcttcatttcccttgcggcttgtttggatatagaagg

SEQ ID NO: 21535 - DNA, 242 bp, Zea mays
cagattttggtgtgagtgccattatatctagttcctcttcgcaacgagatacatttattggcacacgcaactacatggcgccagaaagaatcgatggaaagaaacatggttctatgagtgatatctggagtttgggactagtgatactggaatgtgcaaccggcatctttccatttcctccttgtgaaagcttctacgaacttctcgtggctgttgttgatcaaccgccaccttctgcgccg

SEQ ID NO: 21536 - DNA, 238 bp, Zea mays
gttccgcgtttgttggaatgggtgatgtagtaacaaagaagatcatggaatgggttatgagtgatgctgaacttgttaagtcttttggtatatttgtacggctctccaatgatattgtatcaaccaagcgtgaacaaagagagaagcattgtgtctccactgttcagtgttacatgaagcagcatgaactaccaatggttgagccatgtgcgcagataaaagaccttacagaagattc

SEQ ID NO: 21537 - DNA, 180 bp, Zea mays
gtgatcatgtcttgcagcagcggcaagtgcgactgtggctccagctgctcctgcggcagctcatgcaactgcatgtcccctaacgtggagaccgccgccgccagcagcatcaagaccacggtcctcgccgcgccgaccaccaaggccagcgccggcggcttcgaggcggccaccgagggc

SEQ ID NO: 21538 - DNA, 234 bp, Zea mays
cttcggtcgccgtcctcgcaagcagacccgccgcgcccagcgcgagggatgctttggatggctcgatcgtagcggctacgctggcgcatgagttgtcttggacccgtgactgcttggaggacccccgctgccgtgcggccgactcccggcgcccgtgtcccatcgctcgtgcgggcatcccgtgcctgctgcgttgagaagtgcttgcgtgctgctacccgtcccacgggaagc

SEQ ID NO: 21539 - DNA, 220 bp, Zea mays
cgcggacgatgaagctcctcgacgattccatggcggccaggaccacgtacgagcgttcgggcggaatgaggagcctcgtcgcccgggacatggacgactacgtcgtctacggcctcaacgcgtgcttgcagaacgtccgcaactgctgcgtgcgcctggacgccatcgacaagctgcgggcgcactacgacgccctcgccgacgccgtcgccgaacccgg

SEQ ID NO: 21540 - DNA, 229 bp, Zea mays
caacccgtcagcccctctcgtttttcatccgccttcgcctccaaccgcgtgcgctccacgcctcctccaggaaagcgagagcttctgcataagaacaacaaatcaaaagcgtgatcagctcggtgccaacaaaacctcaacaaccaagtttcatgtctgatctcgacgtccagcttccatctgcctttgatccgtgtgctgaggcaaatgctgaggactctggtgctgg

SEQ ID NO: 21541 - DNA, 231 bp, Zea mays
aaacacctcgcttcactagaggaataatctagcagcttctgttgcctccaaattgtccggagaaaggagttgaagcagtgtgagagggccctgagacgatggcgaacctgttcctcaagcaggcaaagcagtacgtggcgacgcggccggtctacccgccggagctcttcgacttcatcgcctccaagacccctcgccgcgacatggcctgggatgtcggcaccggcaacg

SEQ ID NO: 21542 - DNA, 230 bp, Zea mays
cctctcccccatggtcgaaccggagctcgaggccgggcccgggctcccaaccagcggctccgacgagttcaagcccttcatccgtcgcctccccgagttcaagttctggtatgccgtcacaaaagccttttgcattgcctttgtcatgaccttcttctctgtattcgacgttcctgtcttttggccaatacttctctgttattggattgtgctttttgtcctgacaatga

SEQ ID NO: 21543 - DNA, 232 bp, Zea mays
ggcaccacacctcttcctcctcttcctcctcctagcacagctagcgcctgctccccttcgtctgtgatcatgtcttgcagcagcggcaagtgcaactgcggctccagctgctcctgcggcagctcatgcaactgcatgtcccctgacgtggagaccgccgccgccagcagcatcaagaccatggtcctcgctgcgccgaccaccaaggccagcgccggcggcttcgaggcgg

SEQ ID NO: 21544 - DNA, 231 bp, Zea mays
gcgcctcgacgatgacacagagaacctcgcccatgagcgagttccaagtgacctgaagaaaaatctcatgcaagcaaggctcgataagaagttgacccaggcacagcttgctcaggtatttctgtggattcattagattttagaacttcagcagttccattcatagtgtctgaaccttgatttgtcgtttgagtctatcccgacttgcttgggactaaaagtctatgctgt

SEQ ID NO: 21545 - DNA, 223 bp, Zea mays
gactacctggctgtgactgcggcgaacacgcgacattcctgccgcacatccgcggggcgctactccaagaacgcggttccgcaagcgcatgcgccatcgtcgagcgcctcaccaactcgctcatgatgcacgggcgcaacaacggcaagaaggtcatggccgtccgcatcatgaagcacaccctggagatcatccacctgctcactgacgccaatcccatcca

SEQ ID NO: 21546 - DNA, 258 bp, Zea mays
gtttcgcgtccgcctcagcccgccgcaaggagaggtaagttcaggagacatcttcgagaagctgaaatggctcctaaagctgctcctgccaagaagggtgatgccaagacccaggccttgaaggttgccaaggctgtgaagtctggggcagccaagaagaagaccaagaagatccgcacgtctgtgacatttcaccgccccacgaccctgaagaaggctagggaccccaagtacccacgaatcagcactaccggaagg

SEQ ID NO: 21547 - DNA, 250 bp, Zea mays
agctcatacggaagccacacctgatgaagaagctgcaggaagaagtgcggcggaacgtgccggcggggcaggagatggtcaccgaggacaacctccccggcatgacctacctcaaggccgtcatcaaggagacgctccgcctgcacccgccggtcccgctcctcctcccgcactactccctggacgcctgcgaggtcgccggctacaccatcccggccaacacccgcgtcgtcgtcaacgcctgggcgct

SEQ ID NO: 21548 - DNA, 255 bp, Zea mays
aaccagaccaccaaacaagtgccagcgccctctcgcagtcgccgcaatggagagcaccttcatcatgatcaagcctgacggcgtccagaggggcctcattggtgagatcatcagccgtattgagaagaagggcttctacctcaaggccttgaagcttgtcaacgtggagaggtcgattgccgagaagcactacgccgatctcgcctccaagccctatcttccagggcctcgttgactacatcatctctggccctg

SEQ ID NO: 21549 - DNA, 257 bp, Zea mays
aacacatgttgctccatctgaggaagcaacttcaaaagggtcttctccgccgaaagttgaagagaaatcaagggtagaggaaaaagccccgaaagtagaacctcccaagatgcaagcaccgaagccaactgcaccattaaaaacgtccccttcagaaccacaactccctccaaaagaacgggagcggcgggtgccgatgccaaggctcaggaagcgtattgcaaaccgtcttaaggattctcagaacacctttgcaa

SEQ ID NO: 21550 - DNA, 249 bp, Zea mays
agatattctttttattctgcatgctgaacatgaaatgaactgctccactgctgctgttaggcaccttgcttcaagtggtgtggatgtatttactgctctttctggtggtgttggagctctatatggtcctctgcatggcggcgcaaacgaggcagtacttaaaatgttaaatgagattggaagcatggaaaatattccagatttcattgtaggagtgaagaacaggaagaggaagatgtccggttttgg

SEQ ID NO: 21551 - DNA, 246 bp, Zea mays
aatttgggcacggtcgcttccagactaccgatgagaagcagaggttctttggcaagctcaaggcgtaaggtgctgcggtgcacgaagtcccatttctcaaaatcatcaaactgtgatacttttgtttgtaaccttgctgtaccaagttttgtagccatggtccggtcgtctatggattgttccatgcttcagaactgcactgtctatgttttgtgctattttggttgtttaatgccccaatcattg

SEQ ID NO: 21552 - DNA, 249 bp, Zea mays
cccacggccacaacctcatcctcaaggttgttgactccaagatggtcgtccagagaggccgcgacggagggccccagggaagacagatgaggattgcggagtgcttggttggtgatgaaaccggcatcattgtcttcactgcaagaaacgatcaagtggatgtaattaggcctggaacaactgttgaactgaggaacgcaaagatcgacatgttcaagggttcgatgcggcttgcagtggacaagtggg

SEQ ID NO: 21553 - DNA, 244 bp, Zea mays
ggcagcagcacaagcaagaaccacacctcctcccttcgcctgtgatcatgtcgtcttgctgcggcggcaagtgcgggtgcggctccagctgctcctgcggcagcggatgcaacggctgcggtatgtaccctgacgtggagaccgccgccaccagcagcgtcaagaccacggtcctcgccgcgccgaccaccaaggccagcgccggcggcttcgaggcggccaccgagggcggcggctgcgactg

SEQ ID NO: 21554 - DNA, 242 bp, Zea mays
cggctattaatcatacatcttccaaaactaaatttggagactaggaaagatgctactcaagttgttgcaaacttgcaagacagcaagtatcctcaaagatagtagcgtctgagtacctagagtcaaataaagatctcttggacattttaattttagggtatgagaacatggacatcgctttacattatggtgctatgttgagggaatgtattcgccaccaaagcattgcaaggtatgtttta

SEQ ID NO: 21555 - DNA, 243 bp, Zea mays
catggatcggagtacagttttggagcacatgatcacccatcgagtggagattttgaggtggaaccaaagagctgcccagggttcatatacagatgtacggttttcataggccacacaactctgaattccttggaatttcgagaattcattcagaggatggcctcagaataccatggagatacctaccacctcatttccaagaactgtaaccactttacagatgatcttagcaccagattaaca

SEQ ID NO: 21556 - DNA, 244 bp, Zea mays
gctggagcaggatcagcaactctttcaatggcttatgcagctgccaaatttgcagatgcttgcctgagaggattgcgtggtgatgctgggataatagagtgctcttatgtggcttctcaggtcacagagttgcctttctttgcatccaaagtgcggctagggcgatgtggcattgaggagatcctaccacttggaccattaaatgagttcgagagatctggtctggagaaggcaaagaaagagc

SEQ ID NO: 21557 - DNA, 240 bp, Zea mays
cggacgcgtgggcaagtcggagacggagcgcattgagtacctcaagacggtgagcgactgctacacgcggaagatgaagctcctcgacgattccatggcggccaggaccacgtacgagcgttcgggcggaacgaggagcctcgtcgcccgggacatggacgactacgtcgtctacggcctcaacgcgtgcttgcagaacgtccgcaactgctgcgtgcgcctggacgccatcgacaagct

SEQ ID NO: 21558 - DNA, 242 bp, Zea mays
gttacatgcctggccgtctgtacgacctggacgcgtccaagtacgggacggcagcggactcaagtccctgatcgccgcgttccacggcaagggcgtgcaggtggtggcggacatcgtcatcaaccaccggtgcgccgactacaaggacgcccgcggcatctactgcatcttcgagggcggcacgccgatcggccgcctggactggggcccccacatgatctgccgcgacgacaccatatact

SEQ ID NO: 21559 - DNA, 140 bp, Zea mays
ttttgtgaatgatctagctagctatccgtaaatgatctagttatgaatgatattataattgtgatgcaaaacacaaaacaaaaaaaaaaaaaaagaaagaagaaaaaggccgaagggaagtgaaggcgccccggcgcggg

SEQ ID NO: 21560 - DNA, 237 bp, Zea mays
gcgacatctcgctcaccaagatcgagagcaggccgcaccgccaccgccccatccgcctcgtcgacgacgccaacgtcggcaccgccaagcacttcgagtacatgttctacgtcgacttccaggcgtccctcgcagagccccgcgcgcagaacgcgctggccgaggtccaggagtacacgtccttcctccgggtgctcgggagctaccccatggacatgacccccatgaccgcgggct

SEQ ID NO: 21561 - DNA, 211 bp, Zea mays
ctgatgctctagatgctgcaggaaataccacggctgcaattgggaagggttttgccattggctctgcagccttggtttcccttgcactatttggtgcgtttgtaagccgggctgctatctccactgttgatgttctgactcctaaagtattcatcgggcttattgtcggtgctatgctcccgtactggttctcggcaatgaccatgaagag

SEQ ID NO: 21562 - DNA, 240 bp, Zea mays
gtagtgccatggcacacagggctgttgatgctgtattaggtccccggaccattcagcatgagactgttgcctcagaagctgctgctgctgcccctgcccctccagtgatgaatgctgatgcttgcagcatccattctaaggctttccaagattgtctcaacaactatggcagcgagatcagcaattgccagttctacctagacatgctgaacgagtgccgccgtggtggtgtgtctgcct

SEQ ID NO: 21563 - DNA, 239 bp, Zea mays
gacaaaaccagaccaccaaacaagtgccagcgccctctcgcagtcgccgcaatggagagcaccttcatcatgatcaagcctgacggcgtccagaggggcctcattggtgagatcatcagccgttttgagaagaagggcttctacctcaaggccttgaagcttgtcaacgtggagaggtcgtttgccgagaagcactacgccgatctcgcctccaagcccttcttccagggcctcgtgga

SEQ ID NO: 21564 - DNA, 237 bp, Zea mays
acccgtcagcccctctcgtttttcatccgccttcgcctccaaccgcgtgcgctccacgcctcctccaggaaagcgagagcttctgcataagaacaacaaatcaaaagcgtgatcagctcggtgccaacaaaacctcaacaaccaagtttcatgtctgatctcgacgtccagcttccatctgcctttgatccgtttgctgaggcaaatgctgaggactctggtgctggtcctggaacg

SEQ ID NO: 21565 - DNA, 223 bp, Zea mays
gaagaattcaagagttgcacaatgctcataattgcccaccgtttgaacacggtcattgactgtgacaggttgcttattctaagttctgggcaggttctggaattcgactctcctgagaatcttctaagcaacgaggggagtgctttctccaagatggtgcaaagtacaggacctagcaacgcagaatacctcaagagtcttgtatttgcaagtggagaagaga

SEQ ID NO: 21566 - DNA, 237 bp, Zea mays
agcaccttgaaaagaataggagtgaacagcattcctggtattgaagaggtcaacatctttaaggatgatgttgttattcagtttgtaaatcctaaagtgcaagcgtcaattggtgctaatacatgggtggtcagtggaactccacagacaaagaagctgcaagatctgcttccgtcgattatcaaccagcttggtcctgacaacctggacaatctgcggaggctcgcagagcaattc

SEQ ID NO: 21567 - DNA, 230 bp, Zea mays
tgaagaagcacttgaagaggctcaatgcgcccaagcattggatgctcgacaagcttggcggagcttttgctcccaagccatcttctggacctcacaagtccagggagtgccttcctctgatcctcatcatcaggaacaggctcaagtatgctctgaactaccgtgaggtcatttctatcctgatgcaacgccatgtacttgttgatggcaaggtcaggactgacaagacc

SEQ ID NO: 21568 - DNA, 235 bp, Zea mays
gtctcgccgctctcgtcctccgcgaagatgccgaagaacaagggtaagggaggcaagaaccggaagcgaggaaagaacgaggctgacgacgacaagcgcgagcacgtcttcaaggaagacgggcaggagtacgcgcaggtgacccggatgctcggcaacgggcggtgcgaggccatctgcgtcgatggcacgcgccgcctctgccatatccggggtaagatgcacaagaaggtct

SEQ ID NO: 21569 - DNA, 235 bp, Zea mays
atagccatccctccgcagcatggaacacaccagatggtgactctgccatcaaatcttcctgaacatgagttccttaatgatcttgaacccttggatggatgcatacacaaccaaatgaagctccacagctatcgccacaggacctgacatcacatgccaagattctggagaacaacaaacaatgggatggtgagaagtgcatcattctgacatgcagcttcaccccaggatcttg

SEQ ID NO: 21570 - DNA, 232 bp, Zea mays
gttggtcacactggtgatattgaggccaccgtagttgcttgcaaggcagctgatgaagctgttaagattattttggatgctgtcgagcaagttggtggtatttaccttgttaccgccgatcatggcaatgctgaggatatggtgaaaaggaacaagtctggcaagccgttgctcgacaagaatgaccgtatccagattcttacctcgcatacccttcagcgggtcccggttg

SEQ ID NO: 21571 - DNA, 231 bp, Zea mays
cacattgatgcgctcgtgaggctgagcggaattactgcagagggccaaggtgtgaaggttgaatcgtcagcagttccttcagccccaactccagatgttgctgaagcacaggccccagttgctgaggaggacgacgacgatgatgttgacctttttggtgaggagaccgaagatgagaagaaggctgctgaagagcgtgctgcagctgccaaggcttctggcaagaagaaa

SEQ ID NO: 21572 - DNA, 230 bp, Zea mays
gtgaacgactactacaacaacggccttccctccaacctgtccggtgggcgtaacccgagcttggactacggtttcaagggtgccgagatcgccatggcctcctactgctccgagctccagttcctgggcaacccggtgaccaaccacgtccagagcgctgagcagcacaaccaggacgtgaactccctgggcctcatctcctccaggaagaccgccgaggccatcgacat

SEQ ID NO: 21573 - DNA, 226 bp, Zea mays
gattcctgcagcggatggacctgtgccgcaagtacgcctttgggaagatgctcgtgataggctctgagccacccttcaagctgaagggcctttggctcttccgtggccaggatgttcccaagtttgtaatggacgaggtctatgacatggagctctacgagtggaccaaggtggacatctctgatgaggcccagaaggagcgtgtcaatgcgatgattgaggacca

SEQ ID NO: 21574 - DNA, 227 bp, Zea mays
atttttcatatcctcactcgccgccgccgccgctcgtccctcgccccatcgcgatggcccggatcaaggtgcacgagctgcgggggaagagcaaggcggatctgcaagcgcacttgaaggagtttaagtcggagctctccctgctacgcgtaccaaggtcaccggcggggctcccaacaagctctccaagatcaaggttgtgcgcacctccatcgcgcgcgtgctga

SEQ ID NO: 21575 - DNA, 225 bp, Zea mays
atcgatggctttgaagatgtgcctgagaacgacgagaagtcgctgcagaaggcggttgctcaccagccagttagcgttgccattgaggccggtggccgggagttccagctctacaaatcgggtgtcttcagcggaagtgcaccacgaaccttgaccatggtgtcgtcgcggtcggctacggcgccgagaacgggaaggactactggatcgtccgcaactcgtggg

SEQ ID NO: 21576 - DNA, 225 bp, Zea mays
gaagaagctggaggaggctgtccgcagtgtccagatggagggtctgacttggggagcatcaaagcttgtgcctgttggatacggcatcaagaagatgactatcatgttgacaattgtcgacgatcttgtgtccatcgacactctaattgaggaccaccttacgcaagagcccatcaatgagtacgtccagagttgcgacattgtggctttcaacaagatctagag

SEQ ID NO: 21577 - DNA, 227 bp, Zea mays
gtgaacgactactacaacaacggccttccctccaacctgtccggtgggcgtaacccgagcttggactacggtttcaagggtgccgagatcgccatggcctcctactgctccgagctccagttcctgggcaacccggtgaccaaccacgtccagagcgctgagcagcacaaccaggacgtgaactccctgggcctcatctcctccaggaagaccgccgaggccatcga

SEQ ID NO: 21578 - DNA, 268 bp, Zea mays
agctatccttagcaggttcccagcaaatgtagcagttcaggtcaccaaggacaagaaggaatttagcatccatttggactcttccatcgcagcaaagcatggagagaacacatcatctcttgctggttttgatatccagactgttgggcggcacttgcatatattctccgtggggagacaaaaatcaagaatatcaagaagaacaaaaccacaggagggttctcagtaactttcctgggcgacatgtgtggcactggactgaagattg

SEQ ID NO: 21579 - DNA, 264 bp, Zea mays
ggcacaggtctatgaacaatcacttattcagagcaacggaacgaaggctggcgagagcgctcatttcatgcagatatatcgtagtcgtgaagtgggccagtcttatgttacatccatcgcaacaacattgctagccacgctgcatgctatgtggctagtgataagaatcagaccacaagcgatattctgcaacggtccagggacgtgctttcctctatgcatctcagctttcgttctgaaggtgcttggcttgggatggtcatc

SEQ ID NO: 21580 - DNA, 258 bp, Zea mays
cgacggagagcttgatgttcctggcgcacttcgtcggcgacgtccaccagcctctccactgcggccacaccgacgacctcggcggcaacaccatcgtcgtccactggtaccgaaggaagaccaacctgcaccacgtctgggacgtgaacgtcatcgagacggccatgaaggacttctacggcaacgaccagagcaccatgatacaggccatccagcagaacatcacggaggagtgggctgatgaggagaagaagtggg

SEQ ID NO: 21581 - DNA, 265 bp, Zea mays
cattgattgccaccctgccattggaggtccgcacaaagataggtggtttcattagagctgtattttctgttttccaagacttggatttctcatttcttgagatgaacccattcaccttggtaaatggtgaaccgtatcctctggatatgagaggagaactagatgacacagctgctttcaaaaacttcaataagtggggcaatattgtgtttcccctaccatttggaagagttctcagtccctccgaaagttttatccatgaact

SEQ ID NO: 21582 - DNA, 260 bp, Zea mays
gacggagcacgagttcgaggcccccgacgacacctacatcctcgaggcggccgagaccgccggggtggagctgcccttctcctgccgcgccgggtcctgctccacctgcgccgggaggatgtcggccggcgaggtcgaccagtcggaggggtccttcctcgacgactgccagatggccgaggggtacctcctcacctgcatctcctaccccaaggcagactgcgtcatccacacccacaaggaggaggacctgtactaga

SEQ ID NO: 21583 - DNA, 260 bp, Zea mays
atgctggacaagctgtgggacgacgtggtggccgggcctcgcccgagacgggcctcgagaagctccgcaaggccaccaccgcccgcccgctcgtcatcaacaaagacgcggacggcggcagctacaagccggcgcagtcgacgccgtcgaccccgacgacgccggtgacgccgtcgtcgtcgacgacgccgcgcggcgccggcaacgtgtggcgcacgtcttccacccggggagcaacctggccaccaagggcatgggcg

SEQ ID NO: 21584 - DNA, 257 bp, Zea mays
cgaggagttcatgccggagaggttcatgcgcgacggctgggacaagtccaacagctacagcggccaggacttcaggtacctgccgttcgggtctgggcgccggatctgccccggggccaacttcgcgctcgcgaccatggagatcatgctcgccaacctcatgtaccatttcgactgggaggtccccaatgagaaggaagacggtggcgggaaggtgagcatggatgagacgttcgggctgatgcttcgcaggaacg

SEQ ID NO: 21585 - DNA, 259 bp, Zea mays
gtggtgacgggactgtcccattacctccaagcatggtgcatggagctgaaaggccccgtgttcctggcgatgacgaacccgctctgcttcgtcttcaccatattcagctcctccttcttcctgggagagatcgtgcacctcggcagcatcttgggtggagctctgcttgtggccggcctgtacagcgtgcactggggtaagctcaaggaagacaggaggtctgaggcggcggaacaggagaagaccaagccgcaggaag

SEQ ID NO: 21586 - DNA, 262 bp, Zea mays
ggaaagctctccatttcctgttcgtcaagtcggagaccaagacaccgggctgcctcgcggcgaggcccgtcctcacgagctactacaagagcaaccacttcaggaaccgcccgttcgacgcgtacaacaactacacgagccccacggcggccatcctctgcgcggacgcgttccagagcatgtacgcgcagatggtgtgcgggctgtgccagctgcaggacgtgctgcgcgtgggcgccgtgttcgcgtctggcctcctccg

SEQ ID NO: 21587 - DNA, 259 bp, Zea mays
gcgtcttgatgctgaactgaagctggtcggtgagtatgggctgaggtgcaagcgtgactttggagggtccagtatgcactgagcaggatccgtaatgctgcaaggcacttgctcacccttgacgagaagaacccccgtcgtatctttgagggtgaggcgcttcttcgccgcatgaaccgctatgggctgcttgctgagggtcagaacaagcttgattatgttcttgccctcaccgctgagaacttcctcgcaaggcggc

SEQ ID NO: 21588 - DNA, 254 bp, Zea mays
aatctcgccttccgaggaaactcaccagcccaccacagacccgagcggaagaagccatgtccgggcgcggtaagggtggcaaggggctcggcaagggcggcgcgaagtcaccggaaggtgctgcgcgacaacatccagggcatcaccaagccggcgatccggcggctggcgaggaggggcggcgtcaagcgcatctcggggctcatctacgaggagacccgcggcgtgctcaagatcttcctcgagaacgtcat

SEQ ID NO: 21589 - DNA, 253 bp, Zea mays
atctcagccatctaccactacggcttcgcaaaccttatgatgcgcaggtatgttgaggccactcgtgaattcaacaagattcttctgtatatcctcaagtacaagcagtaccaccagaattcccctcagtatgatcagatactgaagaaaaatgagcagatgtatgcattgttggcaatttgcctatctttgtgcccacagaacaagctcattgatgaaaatgttagcacccagctgaaagaaaagtataatg

SEQ ID NO: 21590 - DNA, 255 bp, Zea mays
cttcagtccatatggagagcttctctatgtcaaaatacctgtaggaaagcgctgcgggtttgtccaatattctaacagggcatcagctgaggaggccataagggtgctaaatggaagccagctgggaggtcagagcataaggctctcatggggccgtagccctgcaaacaagcagcctcagcaagagcagagccaatggagtggtggcggctattatgggtatccccaaggatacgatccatatggctatgctcg

SEQ ID NO: 21591 - DNA, 254 bp, Zea mays
gtaggacatggcagagagcatggggagagacggtggtgatggtgagctcaagctgctggggctgtgggcgagcccgttcgtagcgagagcgaactcgcgctccagatcaagggcctaagctacgagtacgtcgaggaggatctcggcaacaagagcgagctgctgctcagctccaacccggtgcacaagacggtgccggtgctgatccacaacgggacgccggtctgcgagtcgacggtcatcgtccagtacat

SEQ ID NO: 21592 - DNA, 254 bp, Zea mays
gttccttcatcacacaactgtgatattccgcatgtgaaccgtactgagtaccagctgattgatatatcagaggatggatttgtgagccttcttacttcagatggcaacactaaggatgatcttagactcccaactgatgagactcttgtggcccagatcaaggaagggtttgaaagcggcaaggatcttgttgtgactgtccagtctgctatgggggaggagcagatctgcgcgctgaaggatgttggccccaa

SEQ ID NO: 21593 - DNA, 252 bp, Zea mays
gcaacaaggcaccacacctcttcctcctcttcctcctcctagcacagctagcgcctgctccccttcgtctgtgatcatgtcttgcagcagcggcaagtgcaactgcggctccagctgctcctgcggcagctcatgcaactgcatgtcccctgacgtggagaccgccgccgccagcagcatcaagaccatggtcctcgctgcgccgaccaccaaggccagcgccggcggcttcgaggcggccaccgagggcgg

SEQ ID NO: 21594 - DNA, 209 bp, Zea mays
atgttgcgttgcatgagattgatgggaacgtggtaaggttaaagctgcaaggagcatgtggttcatgcccggcttcagtaacaacgatgaagatgggtattgaacggcgcttgatggagaaaatacccgagattgttgcaattgagcccattgctgatgaggaactggccttgagttgaaccaagagaacattgaaaaggtacttgacg

SEQ ID NO: 21595 - DNA, 286 bp, Zea mays
atttgatagagaagcacaatgacgagcttgctgctttggagacatgggacaacgggaagccatatgagcaagcagcccagattgaagtacccatggtggcccgtcttatgcgttactatgctggttgggctgataagatccatgggctcattgtgccggctgatggcccacaccatgtacagatcttgcatgagccaattggtgttgcaggtcagatcatcccatggaactttcctcttctgatgtatgcctggacaattggccctgctttggcatgtggaaatac

SEQ ID NO: 21596 - DNA, 266 bp, Zea mays
ggctgaagggcgtcgagtacgagtacgtcgacgaggacctcgccaacaagagcgccgacctgctccgccacaacccggtgaccaagaaggtgcccgtgctcgtccacgacggcaagccggtcgcggagtccaccatcatcgtggagtacatcgacgaggtctggaagggcggctaccccatcatgccgggcgactcctacgagcgcgcccaggcgaggttctgggccaggttcgcggaagacaagtgcaacgctgctctgtacccg

SEQ ID NO: 21597 - DNA, 240 bp, Zea mays
atcaaggtcgagtcctactggccggccctcttcgccaagctcctggagaagcgcaacgtcgaggacctcatcctctccgttggatctggtggcggactgctccagttgctgctgccgcacctgctggtggtgctgcggctgctgcagccccggctgtcgaggagaagaaggaagaggccacagaggagtctgatgacgacatgggcttcagcctgttcgactgaggagcccccttaccca

SEQ ID NO: 21598 - DNA, 255 bp, Zea mays
gagaaggtacctttggtcaggtgttggagtgttgggataaggaaacaaaagaaatggtggccataaagatcatcaggggcattaagaagtacagggatgctgcaatgatcgaaattggcatgcttgagaagcttggtaaatatggtgaaagcagatccagttgtgttcaaattcggaactggtttgactatcgtaaccatatctgtattgtctttgagaggcttggaccaagcttatatgatttccgaggaaaaa

SEQ ID NO: 21599 - DNA, 163 bp, Zea mays
gagcaccaaaagcagaaaagaacccttttttttcaatctctctagagtctgacgagtggtggtctgcactcgtcgtaatgtcgtttgcctaaactgattttgatggaacaggaaatcttgctggtcttgccataaaaaaaaaaaaaaaagtggcggccgctct

SEQ ID NO: 21600 - DNA, 230 bp, Zea mays
cctaaaaccatctgcttcagctagccccaagtttagtcggccgatcattcactgaagtagtaatggcctccgtcaacagctggaccctcgagatcgcgtcgccggtggctccgcagcgcctgttccgcgccgccgtgatggactggcacaccctggcgcccaaggtcgcctcccacgtcgtcgccagcgcgcactccgtgagagggcgacggcggcgttggcagcgtcag

SEQ ID NO: 21601 - DNA, 220 bp, Zea mays
aagagccaagtccatgaagttcaaggatggctacatgatctcatctggtcagccagtgaatgagtacatcgactcagctgtgagacacgtcctcctcagacagggtgttctgggtatcaaggtgaagatcatgcttgactgggacccgaaggcaaggttggcccgatcacccctcttccggacctggtgaccatccataccccgaaggaggaggacgagc

SEQ ID NO: 21602 - DNA, 196 bp, Zea mays
agggacgcgtgggagctactgcaactcgagcaacacgcatgctgtagttcttgttgacctcgctgacgtaacagaaatggccggtcaacaagaacaacagctactgcaactcgagcaacacgcagtggccgtgcgccccggggaagaagtactacggacgcggcccgctgcaggtctcgtggaactacaactacgg

SEQ ID NO: 21603 - DNA, 234 bp, Zea mays
gccagaactggcagagcaactcgtacctggacaggcaggcgctctcgttccaggtcaccgccagcgacggccgcaccgtcaccagcaacggcgccgtccccgctggctggcagttcagccagaccttcgagggcggccagttctgaggatgaacagctagcgcgcgcgcggctagtaatgggataattaattacggtactgtcgattgggttttttaccctgatttttttttgg

SEQ ID NO: 21604 - DNA, 195 bp, Zea mays
agcaagacctggacagaagtggcacgtcttctacgccactgagtacccagagcaaccaatggttaaccttgagatgtgcatgactggtctggacaagaagaaagcttctgtctttttcaagactaatgctgatgggaacacagcatgtgccaaggagatgacaaagctctctggcatctctgagatcatccccga

SEQ ID NO: 21605 - DNA, 141 bp, Zea mays
cccacgcgtccggaatcttgaagctgcttgactcccacctagtgccttcttctactgctgctgaatcaaaggtcttctacctcaagatgaagggtgactatcacaggtatcttgcggaatttaagactggtgctgagagga

SEQ ID NO: 21606 - DNA, 119 bp, Zea mays
atggattcttcactccagacactgcaatggcaaatgagttctttgcgaaggcaactgaatgtttccagaaggctgctgatgtggaacctgcaaatgagctgtacaggaagtcattagac

SEQ ID NO: 21607 - DNA, 195 bp, Zea mays
gtctgtctccaactcactagtactcagccgccgcaatcagggacaggtagctcgagcgcgcgctccacctgctccgacgcgatgcgggccaagtggaagaagaagaggatgcggaggctcaagaggaagcgccggaaaatgaggcagagatctaagtaggcgcatcttgtgaccgaggatggcgagcttctcctg

SEQ ID NO: 21608 - DNA, 261 bp, Zea mays
gaagctacaatcctaaaaccatctgcttcagccttcagctagccccaagtttagtcggccgatcgatcactgaagtagtaatggcctccgccaacagctggaccctcgagatcgcgtcgccggtggccccgcagcgcctgttccgcgccgccgtgatggactggcacaccctggcgcccaaggtcgcctcccacgtcgtcgccagcgcgcacccgtggagggcgacggcggcgttggcagcgtcaggcagttcaacttcac

SEQ ID NO: 21609 - DNA, 246 bp, Zea mays
attttctattacattctttggtgagtggggtgacaagagccagattgctactattggcttggctgctgatgaaaacccatttggtgttgtcctgggtggaatcatagcgcaagcactctgcactactgctgctgttcttggtggaaagagcctagcctcccagatatccgagaagatggtcgaactgtcaagcggagtgctcttcctgctgttcggtatcatgtcattgctctctggaccaggaga

SEQ ID NO: 21610 - DNA, 261 bp, Zea mays
gggccttactgggatgtcccagtaggaagactggactccaagaaggcgagcctagacctagcaaacagcgacatccctacggcccagcaaggcctcctcacgctcattgccaagttctgggagaagggccttgatgccactgacatggtggccctcgtcggatcccacacgatcggattcgctaggtgcgagaatttccgggacagaatctacggcgacttcgagatgacgtccaagtacaacccgtcgtccgaggcctac

SEQ ID NO: 21611 - DNA, 262 bp, Zea mays
atcggtgttcccgctgatctaaaatacattgatccaacatatatggttcgggcctgccgggcaaatgcatctgatgctattctctgcaccgtacttgggcaaaatgctgtccatggagcatttgctgggttcagtggcatcacgtcaggtgtttgcaacacacattatgtctaccttcccatcacagaggtcattacaacaccaaagcacgtcaaccccaacagcagaatgtggcaccgctgcctcacatccactggccagc

SEQ ID NO: 21612 - DNA, 173 bp, Zea mays
aggtattagcagtcgaccggttcctcggagcacgatgaagtttgttgctgcctacctgcttgctgtcctcgctgggaacgccagcccctccgctgacgatttgactgccattctggagtcagttggctgtgaagttgacaatgaaaagatggaactcctgctgtcccaactga

SEQ ID NO: 21613 - DNA, 249 bp, Zea mays
ccaattcacccaatccagatgcgcaaacatcgaatcgtctcgctagtggctgccctactcgtgctgcttgccctcgccgccgtttcctccacgcgcagccacaaaaggagtccgcggctgacaacgccgggatgttggcaggcggcatcaaggacgtgccggcgaacgagaacgacctccagctccaggagctcgcgcgcttcgccgtcaatgagcacaaccgaaaggccaatgctcttctggggttcg

SEQ ID NO: 21614 - DNA, 258 bp, Zea mays
gcagcacaagaaggacatccatgctgaagctgtcaagaagaggcgccgcgccaccaagaagccatactcgaggtccattgtgggtgcttccttggaagtgatccagaagaagagagctgagaagcctgaagtccgagatgctgctagagaagctgctcttcgtgagatcaaggagcgcatcaagaagaccaaggatgagaagaaggcgaagaaggctgaggtgtccaagtcccagaaggcgcagacgaagggtgctgt

SEQ ID NO: 21615 - DNA, 275 bp, Zea mays
cgtcgatatcggcatcccagcgaacaacaaggggaggaacagcattggatgtctgttctggcttctgtccaggatggttctgcaaatgaggggcactattcttcctgggcacaagtgggaagtcatggtcgatctgttcttctacagagacccagaggaagcaaaggagcaggaggaggaagttgccgtagcccctgagtttgccgcaatcactgattaccaacgaactgatcagtggggtggtgatcagtggacctctgattggggtgctgctc

SEQ ID NO: 21616 - DNA, 116 bp, Zea mays
gactcggcggcctcggccacctggccgtccgcttcggcaaggcgttcgggatgaaggtcaccgtcatcagcacgtcgctgggcaagcgggacgaggccctcggccgcctcggtgcc

SEQ ID NO: 21617 - DNA, 103 bp, Zea mays
gggtggtggccaagagactacaccgctgacggcgattacccagttgacgcaccacggcatggtgtttgtgcccgtgggctacaccttcggcgccaagctgttc

SEQ ID NO: 21618 - DNA, 91 bp, Zea mays
gacgacttgtttcattgattcttgaagagatcgagcttcttttgcaccacaaggtcgaggatgtcttgcaactgcggatcaagctgcggct

SEQ ID NO: 21619 - DNA, 125 bp, Zea mays
actggcgctcatgccatcgctgggaggcacacccctggtaccttcactaaccagctccagacctccttcagcgagcctcggctgctcatccttaccgacccaaggactgaccatcagccaattaa

SEQ ID NO: 21620 - DNA, 209 bp, Zea mays
gttcctgttctactgcgtcgtgatcccactgtctgtcatggtccccgaagtcagcatccctgcctggggaatgttctacattcccactgccatcaccatcatgacagccatcaggagtccttggtctatccatctggtcccaatatggatcctgttcgagaacgtcatgtccatgcaccgaatgcgcgcggcgctgacggggctgctgg

SEQ ID NO: 21621 - DNA, 243 bp, Zea mays
gtccgtaagaacggcttcatcgtcatcaagaaccgtccctgcaatgttgtggaggtttctacctccaagactggtaagcatggccacgccaaatgccactttgtcgccatagacatattcaatgggaaaaagcttgaagatattgttccttcatcacacaactgtgacattccgcatgtgaaccgtactgagtatcagctgattgatatttctgaggatggatttgtgaccttcttacttcag

SEQ ID NO: 21622 - DNA, 249 bp, Zea mays
cttgtctctggtgttcagattgccatttctgcatccaacactggtggtgcctgggacaacgccaagaagtacattgaggctggagtttcagagcatgccaggacccttggcccaaaaggttctgaccctcacaaggcggctgtcattggtgacaccattggagatcctctcaaggacacgtctggcccttccctcaacatcctcatcaagcttatggcggttgaatcccttgtcttcgcccccttcttc

SEQ ID NO: 21623 - DNA, 254 bp, Zea mays
gccgcaagtgctatgcgcggcttccgcccagggcaaccaactgccgcaagaaaaagtgtgggcacagtaacgagctgaggtcgaagaaaaggttcatgtccaagattggcgggaaatgatcggcttttgtcattgcgtgacatatatggagcatcagctgaaatttcttagacgcttaataatttttactttaacgccgtggatgtgatattttactgaataaagttgtagtagaaacaaaaaattcgtgctac

SEQ ID NO: 21624 - DNA, 257 bp, Zea mays
caccgacatcaccgcctcgactaagccggagtacccggtggtggatcggaacccggccttcaccaaggtggtcggcaacttctctgcgctcgactacatgcgcctctccaccatctccgccgtctccgtcaccgttggctacctctccgggatcaagccggggatccggggcccgtcgatggtcacgggcggcctcatcggggtcatgggagggttcatgtacgcctaccagaactccgccgggcgcctaatgggat

SEQ ID NO: 21625 - DNA, 231 bp, Zea mays
gggcgtcgactacgtggacgagagcgaggtgctcacccccgccgacgacgcgcaccacatcaacaagcacaacttccgcgtccccttcgtctgcggctgccgcgacctcggcgaggcgctccgcatggtgcgcgagggcgccgccatgatccgcaccaagggggaggccggcacgggcaacgtcgtcgaggccgtgcgccacgtgcgctccgtcatgggcgacgtccgcgc

SEQ ID NO: 21626 - DNA, 226 bp, Zea mays
cccaagaccattcatgttcctactggggagaagctttctgtttttgatgcggccatgagatacaaatctgagggccatgctactataatcctcgctggtgctgagtatggaagcggcagttctcgtgattgggctgctaagggtccgatgctcctgggagttaaagctgtaattgccaagagctttgagcgtatccacagaagcaacttggtggggatgggaatca

SEQ ID NO: 21627 - DNA, 156 bp, Zea mays
ctcggcaacggatatctcggctctcgcatcgatgaagaacgtagcaaaatgcgatacctggtgtgaattgcagaatcccgcgaaccatcgagtttttgaacgcaagttgcgcccgaagccttctggcggagggcacgtctgcctgggcgtcacgcc

SEQ ID NO: 21628 - DNA, 225 bp, Zea mays
ctggttactcaccaggaatccctcgagtccaaggtgaacgagactaaggcaaccgtcaagttccagctcaagaaggtcctttgcatgggtgtcgccgtcggcaacttggcgatggaggagaagcagatccagcagaacatccagatgagcgtcaacttccttgtttcccttctgaagaagaactggcagaatgtgagatgcctgtacgtcaagagcaccatgggg

SEQ ID NO: 21629 - DNA, 212 bp, Zea mays
agttcatcaagtcccacggcggcatcaccaccgagtccgcgtacccgtaccacgcctccaacggcacctgcgacggcgcgcgggcccggcgcgggcgggtcgtggcgatcgacggccactaggctgtgccggccggcagcgaggacgcgctggccacggcggtggcgtagcaaccggtgtccgtggccatcgatgcggggggccaggcgctg

SEQ ID NO: 21630 - DNA, 228 bp, Zea mays
cgagccgaccgtcaagctcatcgcagaccacgagccatggcctccaccaacagctggactgttgagatcgcctcgcctgtcgccgcgccgcgcctcttccgcgccgccgtgatggactggcacaccctggcccccaaggtcgcctcccacgtcgtcgccagcgcccaccccgtggagggcgagggcggcgtcggcagcgtcaggcagttcaacttcacctcagccatg

SEQ ID NO: 21631 - DNA, 226 bp, Zea mays
ggaacaacgaggagctcatgatgagccaggcgatcaagtcggagacggagcgcattgagtacctcaagacggtgagcgactgctacacgcggacgatgaagctcctcgacgattccatggcggccaggaccacgtacgagcgttcgggcggaatgaggagcctcgtcgcccgggacatggacgactacgtcgtctacggcctcaacgcgtgcttgcagaacgtccg

SEQ ID NO: 21632 - DNA, 225 bp, Zea mays
gacccacacaagcgcaacccgacatcggccgtgccaaggagctccttcggtgggagccaaagatccccctccgcgagggccttcccctcatggtcaccgacttccgcaagcgcatcttcggcgaccaagacaccgcggctgccaccaccggacaccagcaaggctaggacggaagaggagcacgggacctggaaatttttggtggcctgcttctagctgcttggt

SEQ ID NO: 21633 - DNA, 241 bp, Zea mays
gtcccactggatgcacttgcaagaagaatcgctgctgtaggaaccgcgtctcgaccactcttgcatcaggaatccggtgatccttatgcaaaggcttatgcaaaacttacgtcactttttgagcaaagaatggactcgtatgctaatgctgatgccagagtttcacttgaacatattgcattaaaacaaggccataatgatgtcactatacttacacctagtaccatcgccattgaggcat

SEQ ID NO: 21634 - DNA, 225 bp, Zea mays
gtctcgtcttgctctgccttgtttcttctctccttcccagtgccgtccttggccacccatggggtggcttgttcccacagttctatgaccattcgtgccccaaggcgaaggagattgtgcagtccattgtggcacaggctgtggccaaggagaccaggatggcggcatctttggtcagactgcatttccatgactgctttgtcaagggctgcgatgcttcggtgc

SEQ ID NO: 21635 - DNA, 220 bp, Zea mays
gtcaccacagaatcacagaaaagctttcccccgatcctctcgcggacaccagcgatgggttcccgctacgaggtggaggtcaccgtcggctccgcccgggacctcaagaacgtcaactggcgcaacggcgacctcaagccctacgccgtggtgtggatcgactccggcagcaagtgctcgacccgcgtcgacctcgacaacggcgagagccggcgtggga

SEQ ID NO: 21636 - DNA, 228 bp, Zea mays
ctttattaaataagtccatggacaatgttaaggtttcaattaatggtcatccaatctctgaaaaagcccttaagaaggcagagaagaaagctggtcctgttgacccaggtacatattggtacgactaccatgctggtttttggggtgtcatgggacgggaatgtattggcattgtccctccatttattagagaatttaattatccgatggccaaaaattgtgccggtg

SEQ ID NO: 21637 - DNA, 228 bp, Zea mays
gccgcgagacgcgtgggcaggacgcgtgggcgccccaaccccatgaccgttttctggtcgaagacggcgcagagcatgaagtctcgcccaatgcaggggatgctgactggcccagtcacaatcctcaactggtccttcgtccggaatgaccagccgaggtttgagacttgctaccagatcgctcttgcgatcaagaaggaagtcgaggatctcgaggctggtggtatt

SEQ ID NO: 21638 - DNA, 235 bp, Zea mays
caacaaactaccatggggaggtagtggatatcaagggtgataatccagatgctgttgttcctggtctaatggctgctggtgaagcagcctgtgcatctgttcatggtgcgaataggctaggcgcaaattcgcttcttgacatagttgtttttggcagagcttgtgcaaacagggtagcagatatttctaaaccaggtgagaagcagaaacctctggaaaaagatgctggagaaaa

SEQ ID NO: 21639 - DNA, 222 bp, Zea mays
ggacgttcacggagaacgtgcgcttcatccacgcgcacaacaagcgcggcgaccggccctaccgcctccgcctgaaccggttcggcgacatggggcgggaggagttccggtccacgttcgccgactcccgcatcaacgacctccggcggcaggattcccccgcggcgcgggccggggccgtgccggggttcatgtacgactccgccgctgacccgccgcggt

SEQ ID NO: 21640 - DNA, 221 bp, Zea mays
atgatggtgagttgaagcttccaagccgttaccttgtttccccaccagagatagatagaacatctggggagtacttggtgaagaatggcatccgcacctttgcttgcagtgagacagttaaatttggccatgtcacatttttctggaacggtaaccgttcgggatactttgatgcaactaaggaggagtatgtagaagtacctagtgacagtggtattaca

SEQ ID NO: 21641 - DNA, 214 bp, Zea mays
cacatcatctgtctcaagaataccaatgatatgaaggacatgaagcctctcaatgaccgtgttctcatcaaggttgcagaagccgaagacaaaactcctgggggccttatcctcactgaaacaactaaagagaagccgtccataggaacggttgtagctgttggcccgggtcctctggacgaggaaggcaagagacagccactgtcagtgtcgg

SEQ ID NO: 21642 - DNA, 242 bp, Zea mays
  unsure (1)..(242): unsure at all n locations
aacgaacttgaggcctcgctggatccactcccacggatcataactcccacgcagatgattagcatgcaactggagttccatcagagaatattctttatcttggcggacctaatattgcttctgaaatttacaacaaagaatatgcaaatgcacgtatttgtggagctgacaaatggagaaagccccttgcanagtttttgaggcagcctcattttattgtgtgggataacagtgatctcatc

SEQ ID NO: 21643 - DNA, 123 bp, Zea mays
ggactgtggtcacgacttccacaccgcatgcatcaaacaatggctggttataaaaaatgtgtgcccaatctgcaagaaaacagcactggacgcctaagacatggctgcattttccctccctag

SEQ ID NO: 21644 - DNA, 215 bp, Zea mays
ctcgacctccaggtgacgatcgcgtcgcggaacccgaacgagcgggtgggcgtgtactacaagacgctggacgcgttcaccacgtaccgcgacgaggcggtgacggtacccgtgtcgatgccggcgatctaccagggccacaaggacgtgtcggtgtggtcgccggtcatgtcgggcgacgcggtccccgtggcgcagtacgtggcggacgcatg

SEQ ID NO: 21645 - DNA, 123 bp, Zea mays
cattggcaaatcaggctgtggagcgggcagctggtactgatggccaaaagataacatacggtgtcataaaacaccgtttgggcgatctattttatcgcctagtatctcaaaagttcgaggatc

SEQ ID NO: 21646 - DNA, 123 bp, Zea mays
gcttcagccttcagctagccccaagtttagtcggccgatcgatcactgaagtagtaatggcctccgccaacagctggaccctcgagatcgcgtcgccggtggccccgcagcgcctgttccgcg

SEQ ID NO: 21647 - DNA, 239 bp, Zea mays
ctcgacctccaggtgacgatcgcgtcgcggaacccgaacgagcgggtgggcgtgtactacaagacgctggacgcgttcaccacgtaccgcgacgaggcggtgacggtacccgtgtcgatgccggcgatctaccagggccacaaggacgtgtcggtgtggtcgccggtcatgtcgggcgacgcggtccccgtggcgcagtacgtggcggacgccatgaagcaggacatcgaggcgggcta

SEQ ID NO: 21648 - DNA, 235 bp, Zea mays
acgaatattcattcctgccgtcaagtccttgttggtggaggtagggcctggcgccacgccagtccaaagaagaaagaagaggaaaaaggtcctgctgatgtaggtccattcccagaatctccccggctggctcggttcccgaacctccccgacatgtctccaaagaaggtttctgctacccataacgtgtacgtctcaccgctacggtcatcgaagatggacactctgctgtccc

SEQ ID NO: 21649 - DNA, 95 bp, Zea mays
ggttgaccacatgaggaagatgaagaacaatgccattgtctgcaacattggccactttgacaatgaaattgatatgctcggccttgagacctacc

SEQ ID NO: 21650 - DNA, 239 bp, Zea mays
ggcatgccggcgttcgcgctcgtcaacaaggccacggggctcggcatcaagcactccctcggccagtcccacccggtcaagctcgcgcctttcaacccggaccaggaggacgcgtcggtgctgtggacggagagcaaggacgtgggcaagggcttccgctgcatccgcatggtcaacaacacccgcctcaacttcgacgccttccacggcgacaaggaccacggcggcgtgcacgacgg

SEQ ID NO: 21651 - DNA, 210 bp, Zea mays
gtgatgcttgttggtgcctatccctttgaggaccccgacgaaccgaagaatttccgcaagacgcttactcggattatcagcgtccagtacgcggttcctgattttgtccgagtttcaatggagtgcaggcatctgctgtctcggatctttgtggcgaaacctgagcaacggataaccatcccagagatcaagaaccacccatggttcttg

SEQ ID NO: 21652 - DNA, 227 bp, Zea mays
gaaccacctcggggcttcaaagtatcctatggtccctgggcacgaggtggtcggcgaggtggtggaggtcgggcccgaggtggccaagtacggcgtcggcgacgtggtaggcgtcggggtgatcgttgggtgctgccgcgagtgcagcccctgcaaggccaacgttgagcagtactgcaacaagaagatctggtcatacaacgacgtctacactgatggacggccca

SEQ ID NO: 21653 - DNA, 233 bp, Zea mays
gtttgtacagaagtacttgggcgagggctctagaatggtgcgtgatgtgttccgtttggctaaggagaatgctccagcaatcattttcattgatgaggttgatgctatagccactgctcgctttgatgctcagactggtgctgaccgagaagttcaacgcattcttatggagctactcaatcagatggatgggtttgatcaaacagtgaatgtgaaggttataatggcaacta

SEQ ID NO: 21654 - DNA, 235 bp, Zea mays
ctccgacgccgttgaggccaagtcggcagacgaggaggaggagaaggccggagagcccgtcgaaatggaagctggggagtttgaggaggtgctagcctcatgcggcgagggtgaggggcagtacgccgcggtggagccgccagaggaggccaaggtctacgttgggaaccttccctacgacgtcgacagcgagggactcgcgcagatcttcgaccaggccggcgtcgtcgaggtc

SEQ ID NO: 21655 - DNA, 196 bp, Zea mays
catggtcgcgctctctggtgctcacaccatcgggcaggcacgctgcaccaacttcagagcccacatctacaacgacaccgacatcgacgctgccttcgcgagaacgaggcagtcaggctgcccaagcacctcaggcgccggcggcgacaacaacctggcgccattggacctccagacccctaccgtcttcgagaac

SEQ ID NO: 21656 - DNA, 243 bp, Zea mays
tttaggaaagagatgaaggatcttatctatcagatagaggccaatgtcgagttcattaagtcaaaacgagtggggattgcattttcacccaatgacccagctgtagagtcatttctgcagaccgaaaaggaagaacgttgcagccctctctcaaaatttgtttcgaagttcattccagaagttattggtaaggagattgagaagtctacctccagcatcttcccacttcaaaacgtcttcatc

SEQ ID NO: 21657 - DNA, 84 bp, Zea mays
cctaaaacgaagaagccaccatcaagaacttgcaactgctggcccaagtggtgcctctcttgctgctgcagcaggaacaagaat

SEQ ID NO: 21658 - DNA, 242 bp, Zea mays
acagaagcggcggcggcggacaaacgcaggcgaaggcgagggtgtgagggaaggagcaccagccatggtgcacgtcaacttctaccgcaactatggtaagacgttcaagaaaccaaggcgtccttatgagaaggagcgtcttgatgctgaactgaagctggtcggtgagtatgggctgaggtgcaagcgtgagctttggagggtccagtatgcactgagcaggatccgtaatgctgcaaggc

SEQ ID NO: 21659 - DNA, 247 bp, Zea mays
caacgaacagaagctctcgatctcaccgacaccgaggaagaagagatcaatggcgtccgagcagggagtcgtgatcgcgtgccacagcaaggctgagttcgacgcccacatgaccaaggcccaggaagccggcaagctggtggtcatcgacttcactgccgcctggtgcggtccatgccgcgccatcgccccactgttcgtcgaacacgcctaagagttcactcaggtcgtcttcctgaaggtggac

SEQ ID NO: 21660 - DNA, 154 bp, Zea mays
ggagagagagatgcgaggaaggagggagagagcacgggggcttgatcgaagatgtgatgccggagcaaaggtggtgaagaaggccgcggcggggcgtcgcggcgggggcggccccaagaagaagccggtctctcgctccgtgaaggccggcctc

SEQ ID NO: 21661 - DNA, 188 bp, Zea mays
cattggtcgaagctgctaaagaggaagccagctccataagtaacattattgctcaggctacaaaatgaagttcttcatgcctgccccccttccctctatcttgttattgttgtacaagcaactgtaatgcactggactgcgagttcatttgctctgctcatgtttatggatttcaagactccaggtta

SEQ ID NO: 21662 - DNA, 226 bp, Zea mays
ctccaccttccaccgcgtcatccccgagttcatgtgccagggcggcgacttcacccgcggcaacggcaccggcggcgagtccatctacggcgagaagttccccgacgagaagttcgtgcgcaacacaccgcccccggtgtgctctccatggccaacgccgggcccaacaccaacggctcccagttcttcatctgcaccgtcgcgactccttggctcgacggcaagc

SEQ ID NO: 21663 - DNA, 240 bp, Zea mays
catttggaatcttaatcatgcacgcttaaataaatgttatgtaacctagtttttgaaagggaaatgtgcctttgggccatttctaagtattttggtgattaagtgccaacacaagtgcttaaatgtaaatcaatgcccatggatgaacaaagtgcaaatcttcaacaaaggtatgtttctaagtcttagtacattggttttgtgtactaatatatttgtctaagtgttagaaacagaaag

SEQ ID NO: 21664 - DNA, 240 bp, Zea mays
tgactacatggatgttgaggctctcaagaaaatgaacaagaacaagaagcttgttaagaggcttgccaagaagtaccatgctttcttggcatcagaggccatcatcaagcagattccccgtctccttggtcctggtctcaacaaggcaggcaagttcccgaccctggttactcaccaggaatccctcgagtccaaggtgaacgagactaaggcaaccgtcaagttccagctcaagaaggt

SEQ ID NO: 21665 - DNA, 104 bp, Zea mays
cccacgcgtccgatgacagccagactcggctgtggaagttcgagggcgaggcgcgggagcaggcgaagaaggacctggtggaggtcctggagaccctggagggg

SEQ ID NO: 21666 - DNA, 138 bp, Zea mays
accctttcaagcctccaaaggtatcttttaagacgaaggtcttccatccaaacatcaatagtaatggaagcatatgtctcgacattcttaaggagcagtggagccctgctttgacaatctctaaggttttgctttcta

SEQ ID NO: 21667 - DNA, 213 bp, Zea mays
cagatgaaggcgttcctggacgccacaggggtctgtggcagggccaggcgctggcggggaagcccgcgggcgtgttcctctgcacaggcacgcatggcggagggcaggagaccaccgcactcaccgccgtcacgcagctcgcgcaccacggcatgctcttcgtgcccgtgggttacaccttcggcgccggcatgttcggcatcgatcaggtca

SEQ ID NO: 21668 - DNA, 231 bp, Zea mays
ctccgttggtgcttctggagctctatttggcctgctgggatccatgctttctgaactactcatgaactggactatatactccaacaaggcagcagctataataacactgttgtttattattgcactcaatttggctattgggatactacctcacgttgacaactttgctcacattggtggattcgcgacgggtttcctcttgggttttgttctgttggcaaggcctcaatt

SEQ ID NO: 21669 - DNA, 203 bp, Zea mays
agttgacaatgaaaagatggaactccttctgtcccagctgagcggtaaggacattaccgagctcattgccgccggcagggagaagtttgcttcagtcccatgtggcggtggcggtgtggctgtcgcggcagctgcccctgctgctggcggcggcggcgctcctgcagctgaggcgaggaaagaggagaagttgaaggagaagg

SEQ ID NO: 21670 - DNA, 113 bp, Zea mays
ggccaaagggtattgactcccgtgtcaggaggaagttcaagggatgcaccttgatgcccaacattggttatggttctgacaagtcgaccaggcactacctccccaacaagttc

SEQ ID NO: 21671 - DNA, 217 bp, Zea mays
acgcggtgcggggctctcgctctcgcgcccccgctcgcgcttccgcagatccgccttcgactcggggctagagacgcgtggggagaagggggagccgtggacggaggtgctgtcgtgggagccccgcgcgttcgtgtaccacaacttgctctccaaggaagaatgtgaccatttgatttcactggcaaagcctcatatgaggaagtcaccagtagtt

SEQ ID NO: 21672 - DNA, 232 bp, Zea mays
caagatgaaggtgtgcatgcttggtgatgcccagcatgttgaggaggccgagaagatgggacttgactacatggatgttgaggctctcaagaaaatgaacaagaacaagaagcttgttaagaggcttgccaagaagtaccatgctttcttggcatcagaggccatcatcaagcagattccccgtctccttggtcctggtctcaacaaggcaggcaagttcccgaccctggtt

SEQ ID NO: 21673 - DNA, 229 bp, Zea mays
  unsure (1)..(229): unsure at all n locations
tccattccatcatcccctttgcaagtatagtctctctgctaagcgaacgnagcttcaagctagtctcggcggctctagaagacgatgggcaaggacgacgtgatcgagagcggcgctggcggcggcgagttcgctgccaaggactacacggaccctcccccggcgccgctgatcgacgcggcggagccggggtcctggtcgctgtaccgcgccgtgatcgccgagttca

SEQ ID NO: 21674 - DNA, 231 bp, Zea mays
aattcctcagtaccccttgtactcggcctccatagctcttcatggtggagctcttgtcccctattaccttgatgaaaaaactgggtggggtttggagatctctgatcttaagaaacaactcgaagatgctcggtcaaaaggcattgatgttagggccttggtggttatcaatccaggaaatccgactgggcaggttcttgctgaagacaaccaatatgatatagtgaaatt

SEQ ID NO: 21675 - DNA, 232 bp, Zea mays
atcgcgacctgccatggtggccctgctgagatcatcgtggacggggtatctggcctgcacattgacccttaccacagcgacaaggccgcggatatcctggtcaacttctttgacaaatgcaaggcagatccgagctactgggacaagatctcacagggcggcctgcagagaatttatgagaagtacacctggaagctctactccgagaggctgatgaccctgaccggcgtgt

SEQ ID NO: 21676 - DNA, 232 bp, Zea mays
acgagggcaatgttgaggccactggtgaggacttctctgttgagccagctgatgagaggaggcctttccgtgctctcttggatgttggccttatcaggactacaacagggaaccgtgtctttggtgccctcaagggagcattggatggaggcctggatattcctcacagcgagaagaggtttgctggattcaagaaggacgacaagcagttggatgctgatacccaccgcag

SEQ ID NO: 21677 - DNA, 234 bp, Zea mays
ctactggagtagggagcacgccgcacgagccctttccgccgccgccaaaatggtgaacgttcctaagaccaagaagacctactgcaagaacaaggagtgcaagaagcacactctccacaaggttactcagtacaagaagggtaaggatagcctgtctgcccagggaaagcgccgttatgaccgcaagcagtcaggatatggtggccagaccaagcctgtcttccacaagaaggc

SEQ ID NO: 21678 - DNA, 234 bp, Zea mays
gcgatggagaggcatggctgctccgaagctcgcgacgctggcgctggccgtgctcctggcggcgaccgtggtggctcccccggccgcggtgcgcgcggcgatgtcgtgctccaccgtgtacagcacgctgatgccgtgcctgccgttcgtccagatggcgcggggccatgccgccccagccgtgctgcggcggcatccgcagcctgctgcagcaggccaacaacacccccgacc

SEQ ID NO: 21679 - DNA, 224 bp, Zea mays
aaacaagactggaccgattaacttggggaacccaggtgaattcaccatgctggaacttgctgagaatgtgaaggagttgatcaacccagatgtgacagtgacgatgaccgagaacactcctgatgatccccgccagaggaagccggacatcacaaaggcgaaggaagttctgggatgggagcccaagatcgtcctgcgggacggcttggtgctcatggaggatg

SEQ ID NO: 21680 - DNA, 227 bp, Zea mays
cccacgcgtccggttcgttcgcttcttttggaaaagggaatcaaaccaaaaggcaaagattttacgaaaagttgattacccactggaattggatgtttatgaattttgctctgatgaactgaaacagaaactccaagcacctcggcagatgctgagagatgcagaaaatgcaaagtttggattgaaagcacaagggaaagctagtggctttaaagaaaatgagggat

SEQ ID NO: 21681 - DNA, 225 bp, Zea mays
gttcttcgtcggtggcaactggaaatgcaatggaaccacagatcaggtcgagaagattgtcaaaaccctgaatgaaggacaggttcccccttcagatgttgtcgaggtcgttgtcagccctccttatgtcttccttcctgtggtcaagagccagctgcgccaagagttccatgttgctgctcagaactgctgggtgaagaagggaggtgctttcactggtgaagt

SEQ ID NO: 21682 - DNA, 226 bp, Zea mays
gcaggaggcgctgcccggcgacaacgtcggcttcaacgtcaagaacgtggcggtcaaggacctgaagcgcggctacgtggcctccaactccaaggacgaccccgccaaggaggctgccagcttcaccgcgcaggtgatcatcatgaaccacccggggcagatcggcaacggctacgccccggtgctggactgccacacgtcccacatcgccgtgaagttctcggag

SEQ ID NO: 21683 - DNA, 225 bp, Zea mays
gcacaccgtgccctgcaaggtcaccggcaagtgcgggtccgtcaccgtgcgcatggtgcctgcgcccaggggttctggcatcgtcgccgcgcgcgtgcacaagaaggtgctgcagttcgctggcattgaggatgtcttcacctcgtcccgtggctccactaagacccttggcaacttcgtcaaggcaaccttcgactgcctcatgaagacctacggcttccttac

SEQ ID NO: 21684 - DNA, 226 bp, Zea mays
gcctgttcttaattattgccaggacaggagaaacaaagatgaggcctcagctgatactcgtcggcactctggctgttctcgccatcctcgcagctctcggcgaaggctcgtcgtcctggccctgctgcaacaactgcggtgcttgcaacaagaagcagccgccggagtgccagtgcaatgacgtgtcggtcaacgggtgccatccggagtgcatgaactgcgtcaa

SEQ ID NO: 21685 - DNA, 226 bp, Zea mays
tctctctgaagaagtgcttggaaagatgggcgcgccccctaagcccgacgtgccagtcatcacaccgcaggaacttgcagaggctgacggtatcctctttgggtttccgacacggttcggaatgatggcagctcagatgaaggcgttcttcgatgccaccggtgggctctggagggagcagagcctcgctggcaagcctgccggcatgttcttcagcactggaacc

SEQ ID NO: 21686 - DNA, 229 bp, Zea mays
acacgatcggcatctcccaatgcaactccttcagcgagcgcctgtacaacttcacggggcgcggcgggcccgacgacgcggacccgtcgctggacccgctgtacgccgcgaagttgcggctcaagtgcaagacgctgacggacaacacgacgatcgtggagatggaccccggcagcttccgcaccttcgacctgagctactaccgcggcgtgctcaagcggcggggcct

SEQ ID NO: 21687 - DNA, 232 bp, Zea mays
cccagaagctggaggtgtacaacagcatcatcgtcgagtcggggcgggcggggctaccggtgcggatgttctcgtcgggccgctctgccggtggccctaagattgcagccacgacgtgggcggaggcagtgagcgtcttcatcatggcggcgggcaacctggcgtgggacgtgttcaccacggagcacgaggtggaggccatcctcaagggcagcctcaacctcctggcggg

SEQ ID NO: 21688 - DNA, 103 bp, Zea mays
acccgctcgcaggcgtcggcgctgacgtcaagcactgccaggccaagggcatcctcgtgctcctctccatcggcgggctgcccatcaccaacaccgtcgccgg

SEQ ID NO: 21689 - DNA, 222 bp, Zea mays
caacaaggcagcagcacaagcaagaaccacacctcctcccttcgcctgtgatcatgtcgtcttgctgcggcggcaagtgcgggtgcggctccagctgctcctgcggcagcggatgcaacggctgcggtatgtaccctgacgtggagaccgccgccaccagcagcgtcaagaccacggtcctcgccgcgccgaccaccaaggccagcgccggcggcttcgagg

SEQ ID NO: 21690 - DNA, 222 bp, Zea mays
ggagaaaattcacatgctctccactattaatagcccccacatatttgcagtatagcatccacaaattaaactcacgcacacacacaattaggtcacatacacacatcccggctgcctccctaggtagcagcttctacaatggaggcatccaacaagctcgcagtcttgctcctgtggctggtcatggcagctaccactgccgtgcacccttcctactccgag

SEQ ID NO: 21691 - DNA, 221 bp, Zea mays
gaggccgtgggcgtcgactacgtggacgagagcgaggtgctgacccccgccgacgacgcgcaccacatcaacaaacacaacttccgcgtccccttcgtctgcggctgccgcgacctcggcgaggcgctccgcagggtgcgcgagggcgccgccatgatccgcaccaagggggaggccggcacgggcaacgtcgtcgaggccgtgcgccacgtgcgctccgt

SEQ ID NO: 21692 - DNA, 222 bp, Zea mays
agcatttgaagaggctcaatgcttcttcaatcctctagccatggtggcaagctcgaggtggggagcttgccaccatggctagaggattgaagaagcatgtgaagaggctcaatgcgcccaagcattggatgctggacaagcttggcggagcttttgctcccaagccatcttctggacctcacaagtctaacgcgtgcctgccactgatcctcatcatcagga

SEQ ID NO: 21693 - DNA, 223 bp, Zea mays
gcggcctgctatttggattgtcctgtacacataggagtcctatgtggatacaccttaaagcttcatttggtaaacaactcttgacaagggatgagtccactaaattcattgcctttccttcattccataagctccatgcctgaaccaatggaatcaatttcatagaacattaataagtacctttttgctgcattgcaaaaaaaaaaaaatgccaccattctta

SEQ ID NO: 21694 - DNA, 226 bp, Zea mays
cccccgagctcagcttagctccactccagctccaatcacagtcgtgaccagagcgcgagagctagctagagggccgtgaaaatgccgatcaataggatcgccctggggagccaccaggaggtgtaccacccgggcgccctcaaggcggcgttcgctgagttcatctccaccctcatcttcgtcttcgccggccagggctccggcatggccttcagcaagctgaccg

SEQ ID NO: 21695 - DNA, 227 bp, Zea mays
gccagtaggtcaccactcaccactcaaaagcttgtgaagcaggtgagatgggcaaggaggtggatgtgtccactctagaggtcggcggcgtccgtgaccgtgactacgcggaccctccgccggcaccgctgatcgacatcgacgagctcggcaagtggtccctgtaccgcgccgtgatcgccgagttcgtggccacgctgctgttcctgtacatcacggtggccacg

SEQ ID NO: 21696 - DNA, 192 bp, Zea mays
ctcgcacatgaacgtgcccttcaccctggccaagggcccggacttcgagaagcagttcatcgccgaggcggccaaggagggcatggtgcagctcaaggggcacaggtctgtcggcggcgtccgcgcctccatctacaatgccatgccgctcgccggcgtcgagaagctcgtcgccttcatgaaggacttcca

SEQ ID NO: 21697 - DNA, 139 bp, Zea mays
cggaaggcctggaaaagatcgagaacctacagagccacgataacaatgaaatctatgaaaaggctgtgaagcttcttgagacatactggatggaggaggaagatgacgcaatggctactgccggggaagctgctcctgc

SEQ ID NO: 21698 - DNA, 79 bp, Zea mays
cttgtaacgagaccttgaattgttcggaaatgagcattcctgtgctcttctttaaaataaactttgccttaggttcctc

SEQ ID NO: 21699 - DNA, 242 bp, Zea mays
tccacttccagttcaacccggtccatgacaagccagcagtcgcgatcgctgcactaagcagccaaaaccctggagttattactattgcgaatgcagtctttggatcaaagccacctatctcagatgatgtcttggccaaggccttccaggtgcaaaaggggacaatcgattggcttcaagctcagttttgggagaacaaccactactaaaacaatctagtctgggttcatcatttgatatta

SEQ ID NO: 21700 - DNA, 242 bp, Zea mays
  unsure (1)..(242): unsure at all n locations
tgctaaccgagctcttacggagatgaatggcaaaatggttggaagcaagcccctttatgtagctcttgcgcacgtnaaagaagacagaaaggcaaagctacaggcacaattttcacaaatgcgtcctgttgcaatggcgccttcagtaggtcctcgcatgcccatgtttccacctggtgtccctggagttggtcagcagctgttctatggtcagccaccaccagccttcatcaaccctcagg

SEQ ID NO: 21701 - DNA, 243 bp, Zea mays
cgtcaaggcaaccttcgactgcctcatgaagacctacggcttccttacgcctgaattctggagtcagaccaagttctccatgactccgttccagcagtacacggacctgctggcgaagccaccaagggtcttgtgcttgaggccccaactgagacagtagaggcttaggatggtttgtgctgtctaaatgcactttctatgttatagttaagaactgttgtcaactttgggttttgttttgcc

SEQ ID NO: 21702 - DNA, 123 bp, Zea mays
gcaccctccacctggtgctccgcctcaggggtggtatgcagatttttgtgaagacattgactggcaagaccatcaccttggaggtggagtcgtctgacacaatcgataatgtcaaagccaaga

SEQ ID NO: 21703 - DNA, 235 bp, Zea mays
gtaagttgcattccgagcttctcaaggattgcatctcccagatagttcaggatgccaagaagaataggaagttcactgagactgttgagcttcagattagtctgaagaattatgatccacaaaaggacaagcgtttcagtggctctgttaagttgcctcacatccctcgtccaaagatgaaggtgtgcatgcttggtgatgcccagcacgttgaggaggctgagaagatgggact

SEQ ID NO: 21704 - DNA, 238 bp, Zea mays
cacgctggccgactacaacattcagaaggagagcaccctccacttggtgctgcgtctcagaggtggcatgcagatcttcgtgaagacacttactggcaagacgatcacccttgaggtggagtcctcagacaccattgacaacgtcaaggccaagatccaggacaaggagggcattccaccggaccagcagcggctgatcttcgccggcaagcagctggaggatggtcgcaccttggct

SEQ ID NO: 21705 - DNA, 226 bp, Zea mays
cacaaagagcggtctggtttcgagggggcctggactacaaaccctttggtctttgacaactcttacttcaaggaacttctgagtggtgataaggagggccttcttcagctcccaagtgacaaagccctgctgagcgaccctgttttccgccctcttgtcgagaaatatgctgcggatgagaaggctttctttgatgactacaaagaggctcacctcaagctctccg

SEQ ID NO: 21706 - DNA, 229 bp, Zea mays
  unsure (1)..(229): unsure at all n locations
cgtagatcggtttgtgagaccccaacttgtgagcttaatcattcatccgcaatattctagattgtgttctttcttgttcttgcttgtgtcttcgattctcaggcaggaattagccctcgtggcgaggtcaatcgcgcagcnacggttgataaccagaggagaagtggtgctgcgattgcggggttctagtcgtgttgattggaagccggatcgtttgtgtgacatctcc

SEQ ID NO: 21707 - DNA, 181 bp, Zea mays
tgctctccgaccccgagctccgaatgccgcagcatcaggcgcggcccccctcgcgtgtgaccgagatggcgctgccgaatcaggggaccgttgattaccccagcttcaagctcgtcatcgtcggcgatggtggaactggtaaaactacatttgtgaagaggcatctcactggagagtttga

SEQ ID NO: 21708 - DNA, 231 bp, Zea mays
cgcctcgccatcaacgacctgcccaacgacctctacgacgtggcctgggacgtggtgctcatcgacgggccgtccggctggaaccccaactcgcccggccggatgccgtccatcttcaccaccgccgtgctggcgcgctccggcgccaccgcggccaagggccccaccgacgttctcgtgcacgacttccagttcgaggtggagcaggtgctgagcagggagttcctgtgc

SEQ ID NO: 21709 - DNA, 229 bp, Zea mays
cctctctcgcatccgcagcctttcgagctctactccaccccctcgatctcgaagcgcacagcagcagtcaggcggccatggacgcgagcgcaccggagccggcgggaaggcgaagaagggcgcggccgggcgcaaggccggctggccgaggaagaagtcggtgacgaggtccgtcaaggccgggctgcagtttcccgtcggccgcatcgggcggtacctgaagaagggc

SEQ ID NO: 21710 - DNA, 229 bp, Zea mays
agcgcgaagatggcggacttgtttacagactatgctgacttctgttttaagacctacggcgatcgcgtaaagcactggtttacattcaatgagccaaggatagtagcgctacttggctatgacacagggtcaaatcctcctcaaaggtgcaccagatgcgctgctggtgggaattcagcaaccgaaccttacatagttgctcataattttctcttggcacatgctactg

SEQ ID NO: 21711 - DNA, 256 bp, Zea mays
  unsure (1)..(256): unsure at all n locations
gggtgttgccatcaactttgtgacccgcgacgacgagcggatgctgttcgacatccagaagttctacaacgtgttgattgaggagctgcctgccaacgtcgctgaccttctgtgatcattttgaagaaaaacagaactaaaagaacggtggtgggggtgatctggtaaggcttggttttgccgaaataatgtgggggnagagtgataaggtcggtggggtttctatgttaaagtcgtggtctcgggcaatatgcga

SEQ ID NO: 21712 - DNA, 252 bp, Zea mays
ctgcaacggcggctacatcgacaacgccttccaatacatcgtcggcaacggcggcctcggcaccgaggatgcctacccgtacaccgccgcgcaggccatgtgccagtccgtgcagccggtggccgccatcagcggctaccaggacgtgccgagcggcgacgaggcagcgctcgccgcggccgacgccaaccagccggtgtcggttgccatcgacgcacataacttccagctctacggtggctgggtgatgac

SEQ ID NO: 21713 - DNA, 265 bp, Zea mays
ggaccagccgccccaccgaggcggagaaccgggaggccaactccgccatgctcagtaacgtcctctccgtcgtcgtcccgaactgccccgcgctcgtccacgtctgcctccagaccggccgcaagcactacgtcggccccttcgaggccatcggcaaggtcgccgccccggacccgcccttcaccgaggacatgccgcgcctcgactgccccaacttctactacgacatggaggacatcctcttccacgaggtctcccgccgaga

SEQ ID NO: 21714 - DNA, 265 bp, Zea mays
atcaatttcctgtagctattaaacggttgcagtttgataagcaactctctatggaaaatgtaaagaagcttataacagaagctgatggataccagcctcacttaatagctccagaacaaggatatcgacgccttatagaatcttgtcttattagtatcagaggtcctgccgaggcagctgttgatgcggtacatgcaattctgaaggacctcgtccgcaaggctatcaatgaaacacatgagctgaagcagtttcccacccttcg

SEQ ID NO: 21715 - DNA, 267 bp, Zea mays
tgtcgaggagctcaaacttgcaagggacatttatgagcatgctgttgttttgagtgtgaaacttgaggaccaagatgcatttgaacgtgatttctgccagctcaagccttattacatggatacatgtggcataattcccccctcaccagaggagtacccaattttgggactcaatcttctgaggctgttggttcagaatagaattgctgagttccatactgagctggagcttttacctgtcaaggcacttgagcatccttgcatcaa

SEQ ID NO: 21716 - DNA, 254 bp, Zea mays
gcggtgagacaaaagcagagatattgcaaaacctagctgagttccagttttcttgtgtcatgtacaatggtgccctagagaatgcatgcagtgagcttggagcccgtatgtctgccatggacagctctagcagaaatgctggcgatatgcttgatcgtctcacgcttacttacaacaggacacgccaagcatccatcaccacagagcttattgagattatatctggtgcatcagcccttgaaggataggtgaag

SEQ ID NO: 21717 - DNA, 255 bp, Zea mays
gtgaaggaagcgctcaggttgcactgcccggtgccgctcctgctcccacgcaaatgccgggaggcgtgccaggtgatgggctacgacatccctaaaggcacatgcgtgttcgtcaatgtctgggcgatctgtagggaccctaggtactgggaagacgccgaggaattcaagccggagcggttcgagaactccaacctagactacaagggaacatactacgagtacctcccgttcgggtctggccgtcgcatgtgc

SEQ ID NO: 21718 - DNA, 255 bp, Zea mays
ggagtctgctctggggaacatcccgaccattgccttctgcgacactgactctccaatgcggtatgtcgatatcggcatcccagccaacaacaaggggaggaacagcattggatgcctgttctggcttttggccaggatggttctgcagatgaggggcactatcctccctgggcacaagtgggaagtcatggttgatctgttcttctacagagacccagaggaagcaaaggagcaggaggaagaagctgctgcggc

SEQ ID NO: 21719 - DNA, 259 bp, Zea mays
cgacgtccaccgcggcaaggcgctgcacggcggcaacttccagggcacccccatcggcgtgtccatggacaacgcccgcctcgccatcgctaacatcggcaagctcatgttcgcgcagttctccgagctcgtcaacgagttctacaacaacgggctcacctccaacctggccggcagccgcaaccccagcctggactacggcttcaagggcaccgagatcgccatggcctcctactgctccgagctccagtacctgggc

SEQ ID NO: 21720 - DNA, 257 bp, Zea mays
cggaccgtgggctcgtcgacctcgacaacaagcccgaatggtttctgaagatcagcccagagggtaaggatccctgtgttcaacggtggtgatggcaaatgcatcgctgattctgatgtaatcacccaaaccattgaggagaagttcccaactccatctctggtcactcctgtagaatatgcatcagtgggatcaaagattttcccagccttcatcacattcttgaagagcaaggatgctagtgatggttccgagaa

SEQ ID NO: 21721 - DNA, 104 bp, Zea mays
cgatgctttctcacatgctctgcaagccatcccaacaatcatagctgacaatgctggtttggatagcgctgatttgatctctcagctacgagctgagcaccaca

SEQ ID NO: 21722 - DNA, 210 bp, Zea mays
gcagattgagtcatgatgcagacgccgatgtgtcgatggctgcaattatctcattgggtttgattggtgctggcactaacaatgccagaatagctggcatgcttcgcaatctttcaagttattactacaaagaagctgctcatctgttttgtgttagaattgcccagggccttgttcacctcggaaagggcttgttgaccctttccccaa

SEQ ID NO: 21723 - DNA, 245 bp, Zea mays
gacccacagaaacatctctcagaatcataagttccaggctgttggtcttggttgggcttttgctgattcagttttgcaccgactggcacctctctggattggggcaagagggcttgaatttacatgggagtacatatttcaaggacttgaagcgaatgctaatcttgtgatgaccctctcccttgctgcattggggtccttgatgtggcttaggaagaacaagcctaggactttggttccaataa

SEQ ID NO: 21724 - DNA, 250 bp, Zea mays
agcacatcgacccgctgctcgagtgcctcaaggagtggaacgacgcgcccctgccgctctgctgagctcagctgcacgcacctgctccgcacaaagaaggaaaaaacaaaagtatagcggctcaagacagtgtttcaagatcgtttatttacaaccagactagcagaagatgctctctatatctaccgtcgccttgtattattagtagctgaagtaagttcatgtgaatgttgtcgtgttcccgcagctg

SEQ ID NO: 21725 - DNA, 251 bp, Zea mays
gcgccttttgctggtaacaatatgctggttttatatcaatgtccaagcaaaatttcggatggcagcacaatctctggaggccgaaacaactcttacttagttcaagttctacacaacgaagtcccagtttcaatgcctgggtgcggcaacaaagatttctgtccgttcgaggagttcaaggagaaaattgtgaaaccgcacctgaagcacgactacaacatgatatgcaaggtcaaatccccagcggcaag

SEQ ID NO: 21726 - DNA, 251 bp, Zea mays
gtacaaggagaggctcgcaggggtcgtcggagacgaggccgccgccgcaggagtcgtggccgaaagcctgttccttgtctgcgccgggtcggacgacatcgccaacaactactacctcgcccccgtcagacctctgcagtacgacatctccgcgtacgtggatttccttgtggagcaggcctgcgacttcatgaggcaactgtaccagcaaggggccaggaggatcgcggtcctggggatgccgccggtcg

SEQ ID NO: 21727 - DNA, 252 bp, Zea mays
accactctagctatagcaagctagagctatacacacgactttgtgcaacaatcaccgacacacacagctagagctagagatggcggcgggaaagctggggcagcagctgatgacgaggctgcacctcgcgaggacccgatcgtcggcgacggcggacgtgccgcggggccacctggcggtgtacgtgggcgaggggcggaagcggctggtcatcccgacggcgtgcctcagccacccggccttcgtcacgct

SEQ ID NO: 21728 - DNA, 254 bp, Zea mays
ggtagttcctggcgtagtcgagagtctcaaggtgataacaaagttctgctctgaaagaattgccaagtatgcttttgagtatgcataccttaacaatcgaaagaaagtgacagcagtgcataaagccaacatcatgaagcttgctgatggtttgttcttggagtcttgccgtgaggttgcaaagaagtaccctggaattcaatataatgaaatcattgtggacaactgttgcatgcagcttgttgcaaagcctg

SEQ ID NO: 21729 - DNA, 238 bp, Zea mays
ccagaagccacccattggcgtacgcgaggcgatcggagcatcccgtcccaagaggagaaactccggccggcgacgcgggggaaaatggggaagacgccggtgcggatgaaggcggtggtgtacgcgctgtcgcccttccagcagaaggtgatgccggggctgtggaaggacatcaccaccaagatccaccacaaggtcaccgagaactggatctccgccacgctcctcctcacccccg

SEQ ID NO: 21730 - DNA, 238 bp, Zea mays
aatggagcatgattatgacattgggaccaccataagggataagattatccctcatgcagtttcctggtttactggtgaggctgtgcaaggtgaggattttggtgagttgggcgatgatgatgaagatgatgatgatgaagacgatgacgaagatgatgaggatgaagaagaggatgatgatgaggaagaggatgatgaggaagaaagcaagccagcaaggaagtcaggatctggtcgc

SEQ ID NO: 21731 - DNA, 237 bp, Zea mays
agggcacgcccccgtggcgaaccggatcgcggacagccggtcgttcccgctgtaccgcttcgtgcgcgaggagctcggctgcgtgttcctgaccggcgagaggctcaagtcccccggcgaggagtgcaacaaggtgttcgtcggcatcagccagggcaagctcgtggaccccatgctcgagtgcctcaaggagtgggacggcaagccgctgcccatcaacgtcaagtaaagaacgcc

SEQ ID NO: 21732 - DNA, 237 bp, Zea mays
gctgcaggacatgatcaacgaggttgatgctgatggcaatgggaccattgacttcccagagttcctgaacctgatggcaaggaagatgaaggacaccgactccgaggaggagcttaaggaggcctttcgcgtcttcgacaaggaccagaatggtttcatctcggctgctgagctccgccatgtcatgaccaacctcggcgagaagctgactgacgaggaggtcgacgagatgatccg

SEQ ID NO: 21733 - DNA, 235 bp, Zea mays
ggtcgtttgggatccggcgcaatgagaagatcgcatgctatgtgacggtgcggggtgagaaggcaatgcagctgctggggagtggcttgaaggtgaaggaggacgagctgctgaggaggaacttcagtgacactggttgctttggatttggtatccaagagcacattgatcttggcatcaatgacacgaccttgacagtcaagatgctctttcaggagatggtcccagttacttt

SEQ ID NO: 21734 - DNA, 237 bp, Zea mays
ggaagcgagaagaccagaaggtgagaagagagagagagagtgtgtgtgatcggtacaaggatcaccgctgtgcctgcgcgtgctgcttcaccgaatcgagtcagatcctgtccgaatccgagctaagggatggcaaccggtagtgaagcctcgaaggcagctgaggctgtggttgactggcataaacacgacagcaagaggatgctccatgcggtttaccgtgttggggatctggac

SEQ ID NO: 21735 - DNA, 238 bp, Zea mays
atccatttgatccgtatttctctctccttaaggttggtggtgtgatgacattggtaggttttccaagtgagatcaaaatgcatcctgcaagccttatacttggtgcgcggaccttgtctggcagtgttgttggaggtataaaagacatccaagaaatggttaacttctgtgcagccaacaatatctatccggagattgagatcattaagatagattatatcaacgaggctctcgcgag

SEQ ID NO: 21736 - DNA, 241 bp, Zea mays
aaataactcggccggggagggaaagaccgccctcccggtattatattaagaagagaccgaaacatggtcccggccgagaaaatccccgaaccctggccccccatcactagcgggccgtcaccgcccactctgcaacggcccagccggagggtggcgcgcaggacgtaacccgggagcgggtggggcacagcgaggggatttttttaaccaagccagaaattcgcccccgaggggaatcgaa

SEQ ID NO: 21737 - DNA, 245 bp, Zea mays
accgtcgacctgatccgggtgcgccgctacaacgccgagtgggcgctgaccgagcagctcgacgtgatcagcggccacttcgacgacatcgaggacgagtacctgcgcgagcgcaaggccgacatcgagcaggtggtcgagcgcgtgctgaaggcgctggccggcgcgccctcggcctcgcaggcgctgggcggcgcggccggcggcaaggacgacatgatcgtggtcgcgcacgacatcgcgcc

SEQ ID NO: 21738 - DNA, 234 bp, Zea mays
gaagcacattgacttttcactgtcaagcccattcggtggaggccccgcaggaagggtgaagagaaagaatcagaagaaggcaagcggtggcggggatgctggtgatgaggatgaggagtgaggatggacaagtagtgttacaccaatataataatattatctagttttcttgaacttgttcgaatgatgagtgcttagctgtgtgatctgacgcagattcccctgtgctgactc

SEQ ID NO: 21739 - DNA, 231 bp, Zea mays
agatcgataggcggtctggcaaggagcttgagaaggagcccaagttcctgaagaatggtgatgccggtatggtgaagatgattcccactaagcccatggtggttgagaccttctctcagtatcctcctctgggtcgttttgctgtccgtgacatgaggcagacggttgctgttggagtcatcaagagcgtggagaagaaggacccaactggtgccaaggtgaccaaggctg

SEQ ID NO: 21740 - DNA, 229 bp, Zea mays
gttacctgctgatccgtccactcctattatcatgattggtcctgggacagggctggctccttttagaggcttcttgcaggaaaggttagcattgaaacaatctggggcagaattgggcacttcaatccttttctttggatgcaggaaccgtaatatggactacatatatgaagatgagttgcaaactttccttgacgagggggcgctttctgagctaattgttgcattc

SEQ ID NO: 21741 - DNA, 228 bp, Zea mays
gtcacatatcacaaccagggtgatgggaacgtatggctatgcagctccagagtacgtagcaaccggccatttgtacgtgaagagcgacgtgtacggcttcggcgtggtgatgctggagatgctgtccgggcagcgcgcgctggacccgaaccggccgaacgggcaactgagcctggccgactgggcgaaccgttcctggccgaccgccggaggtggcccggctcatgg

SEQ ID NO: 21742 - DNA, 231 bp, Zea mays
ccaacttctcctcgctcctcgccaccgtggaggcggactggccaagggcggcaaggccgagttcaacaagctcaacgacgtcacctccttcgacttcatcggcgaggcctacttcggcgtgcgcccctcggcgaccgagctcggcaagggcgggccgagcaaggcggccaagtggctcatctggcagctccacccgctggtcacgctcggcctccccatggtcctggagga

SEQ ID NO: 21743 - DNA, 235 bp, Zea mays
cttgttcgccgccgccgcctctgatctccgcgaggttgtcaggattcaatatgtcgaccagcacattcgctacttcctgcacgctgttgggcaatgttagaacaacgcaggcctcccagacagcggtgaagagcccttcgtctctaagcttcttcagccaagttacgaaggttccaagcctgaagacctccaagaaactggatgtctccgccatggctgtatacaaggtgaagct

SEQ ID NO: 21744 - DNA, 237 bp, Zea mays
cccggacgcgccgctcttcatcccggcggcgctgctgcaggtggaggacttctcgccgcagtggtgggacctcatcaccaccactgcctggttccgcgaccactggtcccgcgagcgcgcccacctggacgagatggccgagcagatcgacgcggccggcctcctccccgacgacgaggacctcttctacgacgaccagctcgagcagggccccgtcgccgccgcccttaagacaga

SEQ ID NO: 21745 - DNA, 239 bp, Zea mays
agcagctacatacgtcctcctccattaatattggcagcaagctagctaggatcatcagcatctgagcttattattactaaatcgatcggttgccatggcgatgagagtcggcaagctggcgctggctgcggtgctgctgtgcgcggcggcggccatggccacggcgcacaggcctccggcgtgcgcgccacctacaacttctacaacccgcagcagaacaactgggacctcaacgccgt

SEQ ID NO: 21746 - DNA, 229 bp, Zea mays
aaggctaagaccaagagcagcgagacccgctacaggtgcatctggggcaaggtcacccgcccgcacggcaactcgggcgtcgtccgcgccaagttcaagtccaacctcccgcctgagtccatggggcgcaaggtcagagtgttcatgtacccgagcagcatctaaggttaggtttttgttggagtataggtggactctaaatggccatgcttagttcttctctctgagc

SEQ ID NO: 21747 - DNA, 228 bp, Zea mays
ctagcaacagcccagccgctgtcgccctcgttccgtagtacggcgccgccagatcgtcagtcaccatgatcatctccaagaagaaccgccgcgagatctgcaaatacctcttccatgagggggtcttgtacgccaagaaggactacaacctggccaagcaccccaagcttgatgtgcccaacttggaggtgattaagctcatgcagagcttcaagtcgaaggagtatg

SEQ ID NO: 21748 - DNA, 196 bp, Zea mays
cttaacttcggagttctgatgggatccggtgctttagtgctggtatgatcgcatccgtcatattatgcgtcctccttcctcttatgcccacatctttgtgctcggttcgcccacagcactgaaaatccttcctccgcacaaagtacccaaaaaatgcccaaaacgccctttttttgaaaaacaaacaaaaaaacaa

SEQ ID NO: 21749 - DNA, 224 bp, Zea mays
ctgcaactcctgtttggtggcaagaaaccagtggcacctgtgaaacctgcagctgaggcgaagaagcccaaggccgcggagacggacggtgctggaagcagtggtgacaaggatgagaaagaggatgaaaaggaggagacaggcccacgtcggaggacccgataggagacatagacctgtttttgacgtgttttagctcttctggcgtctgcttattttgagaa

SEQ ID NO: 21750 - DNA, 223 bp, Zea mays
cgtacccgtaccacgcctccaacggcacctgcgacggcgcgcgggcccggcgcgggcgggtcgtggcgatcgacggccaccaggctgtgcacgccggcagcgaggacgcgctggccaaggcggtggcgcaccaaccggtgtccgtggccatcgacgcggggggccaggcgctgcagttctgctcggagggcgtgttcacgggcgactgcggcacggacctgga

SEQ ID NO: 21751 - DNA, 264 bp, Zea mays
caagatcgggatcaatgggttcggcaggatcggaaggctggtggccagggtggccctgcagagtgacgatgtcgagctcgtcgccgtgaacgaccccttcatcagcaccgactacatgacctacatgttcaagtacgacactgtgcacggacagtggaagcaccatgaagtcaaggtgaaggactccaaaacccttctctttggtgagaaggaggttgctgtgtttggctgcaggaaccctgaggagatcccgtggggttcggt

SEQ ID NO: 21752 - DNA, 268 bp, Zea mays
ggggaaagtgccgtcggctctgactcttgggcacttggctgacgacccgttcactctctgcaactgcaactgcaacgcaccaagaaactgccggcgatcgatcggggaaggagataaacatggtgcacgggaagctggaggtcctcctcgtctccgccaagggactcgaggacaccgatttcctcaataacatggaccccttcgtgatccttacctgccgcacccaagagcagaaaagcagcgtcgcaaatggagcaggaagcgagcc

SEQ ID NO: 21753 - DNA, 268 bp, Zea mays
gatgcccagcatgttgaggaggccgagaagatgggacttgactacatggatgttgaggctctcaagaaaatgaacaagaacaagaagcttgttaagaggcttgccaagaagtaccatgctttcttggcatcagaggccatcatcaagcagattccccgtctccttggtcctggtctcaacaaggcaggcaagttcccgaccctggttactcaccaggaatccctcgagtccaaggtgaacgagactaaggcaaccgtcaagttccagc

SEQ ID NO: 21754 - DNA, 175 bp, Zea mays
agaagctacaatcctaaaaccatctgcttcagccttcagctagccccaagtttagtcggccgatcgatcactgaagtagtaatggcctccgccaacagctggaccctcgagatcgcgtcgccggtggccccgcagcgcctgttccgcgccgccgtgatggactggcacaccctgg

SEQ ID NO: 21755 - DNA, 136 bp, Zea mays
cagcctcctgtggtgaagaacatggagaaagctctatggttccagttcaccattggctccttgcctctctatgctgtagtttttgtgggttactgggcttatgggtcctcaacatcaggctacctcctcaacagtg

SEQ ID NO: 21756 - DNA, 262 bp, Zea mays
gcaataatggccgagaagggcgtgaaggtgttggggatgtgggcgagccccatggtgatcagggtggagtgggcgctgaggctgaagggcgtcgagtacgagtacgtcgacgaggacctcgccaacaagagcgccgacctgctccgccacaacccggtgaccaagaaggtgcccgtgctcgtccacgacggcaagccggtcgcggagtccaccatcatcgtggagtacatcgacgaggtctggaagggcggctaccccatca

SEQ ID NO: 21757 - DNA, 160 bp, Zea mays
cggaccttggcggactccacgacgcctgcagagactggggcttcttctgggtggagaaccacggcgtggacgcgccgctgatggacgaggtcaagcgcttcgtctacggccactacgaggagcacctggaggccaagttctacgcctccgccctcgagtt

SEQ ID NO: 21758 - DNA, 262 bp, Zea mays
gagaaagaaatacagaacaattgtaagcactgtcagtgtgctagagaaagtaatacttcggtggcgccggaaaggtcatggcctacgtggcttccgagctgagcagcaaccaatggtcgaagcaatagaggaagatgatgaggaagacgacgatttcgatgatgatgaagcagtcaaggtcttccgtcggcagaaggtcgatcaagctgtaaaagaggctgtgtcaagggtgctgtccatggtagactctaccgaagcgagg

SEQ ID NO: 21759 - DNA, 263 bp, Zea mays
gagaagctgcacagtctaccgaccagaagtttgaacacatagacatgtcagaaaagcgaaaggtcattaatgagtgttcggaagcagagacttggctaatagagaaaaagcagcagcaggatgctctgccaaagcatgctaatccggtactccttgctgctgaccttaagaagaaagctgaaacacttgacaggttctgcaagccgatcatgacgaaaccgaagccagctcctaagccacagactccgcctgtggcagaaaac

SEQ ID NO: 21760 - DNA, 204 bp, Zea mays
gagaaggccaggcgcaactccgagccctcatcgccgagaagagctgcgccccgctcatgctccgcctcgcgtggcactccgcggggacgttcgacgtgtcgtcgaggaccggcggtccattcggcacgatgaagcatcagtcggaattggctcacggcgctaacgcggggctggacatcgcggtgcggctgctcgagcccatca

SEQ ID NO: 21761 - DNA, 256 bp, Zea mays
cacacaattaggtcacatacacacttcccggctgcctccctaggtagcagcttctacaatggaggcatccaacaagctcgcagtcttgctcctgtggctggtcatggcagctgccactgccgtgcacccttcctactctgagaattcgcctcaagactacctcactccccaaaacagcgcccgtgccgccgtcggtgttggcccggtgacctggagcacgaagctgcagcagttcgcagagaagtacgccgcacag

SEQ ID NO: 21762 - DNA, 253 bp, Zea mays
cggatctcgggcagacgacgacgacgacgacaagacgtgcagggagacgtatgtgttggatctccacatactgagcttcgtgaacggggcggacgggaggagcacgagtggaggaggatcttcctggcggctgggttccgtgactacaagatcacgcacacccgaggcatcccgtccatcatcgaggtcttcccgtgatgatcatggatcgagagtcgatcatatatgcatgtttgtacgtgtttgtgtcata

SEQ ID NO: 21763 - DNA, 256 bp, Zea mays
atcaaggcgttcgtcatcgacgtggtgacgtctggttcagacacgtcggcggccatggcagagtggatgctggcggactgatgaaccacccggagacgctgcgcaaggtggtagaggagatcgacgctgtggtcggcggcggcaggatcgcgagcgaggcggacctgccgcagctgccgtacctgatggcggtatacaaggagacgctgcgtctgcacccggcggggcccatcgcgcaccggcagtcgacggagga

SEQ ID NO: 21764 - DNA, 154 bp, Zea mays
gtgttagcagagctgccgaactgaataagttactttgtgaatgcaacttcccatcaatctgcattcattctggaatgactcaggaagaaaggctaacaagatataagaacttcaaggaaggccacaagagaattcttgtggctacagatttagt

SEQ ID NO: 21765 - DNA, 252 bp, Zea mays
ggatggcgcctctgaagctgtacgggatgccgctgtcccccaacgtggtgcgcatggccaccgtgctcaacgagaagggcctcgacttcgagatcgtccccgtcgacctcaccaccggcgcccacaagcagcccgacttcctcgccctcaaccctttcggccagatcacggctctcgtcgacggagacgaagtcctcttcgagtcccgtgcgatcaaccggtacatcgccagcaagtacgcgtcggagggca

SEQ ID NO: 21766 - DNA, 252 bp, Zea mays
cttcattcatatcactgatttgtctgggagggaaactctggttcggatcaccggtggcatgaaggtgaaggctgaccgtgacgagtcgtcaccttacgctgctatgcttgctgctcaagacgtcgcacagcgctgcaaggagcttggcattactgcactgcacattaagcttcgcgccaccggaggcaacaagaccaagacccctggacctggtgcacagtctgccctcagggcgcttgctcgttccgggat

SEQ ID NO: 21767 - DNA, 249 bp, Zea mays
gcgacctcatgctcgtcggagagtgccgttcgagatgttcgctagcacctgcaagaagctgaggatcatgaagagatctgaagccacaggcctggggtcgtcgtcagcgaggcagcaatgaagatgatcccatctgatcgagaggacctgcatgcccggcaacgttgaacaacatgtcgatcgaacgtcatggtggccttattaattgtttctttcttttcttttcttccttttgtttaattatttttg

SEQ ID NO: 21768 - DNA, 248 bp, Zea mays
cagagctggaagatcctgccctggggcgacgaagcctacgccgcgggaggcagcagcgccgccaacgcgccccgcttcggcggcggcggcgagcccaccgtccgcatctactgcaaggccgacgaggggttcagcgccacggtccgcaacggcgccgtgtgcctcgcgcccaccaacccgcgcgacgagtaccagcactggatcaaggacatgcgccacagcaacagcgtcaaggacgaggaagggta

SEQ ID NO: 21769 - DNA, 252 bp, Zea mays
gtgatccgaaccttcactttgttgaagctgttgctcttaagcctccggaagttaccatcgacatggctatgcagcagcagcatgaagctgagcttgctgcagcagctgcacaacctcttcctgatgacgatgatgatctgattgagtagaaaggatcatgagtcttgaacttgagcaggagttgtgccttgcgtgttttaagttgttctagggtgaactcttgagttctcattgtctggatcatctttttct

SEQ ID NO: 21770 - DNA, 245 bp, Zea mays
gcgggcaacctggcgtgggacgtgttcaccacggagcacgaggtggaggccatcctcaagggcagcctcaacctcctggcggggctaggcggctttgccgtggaggccgtcgtcggcgcggctgtcaccaaggcggtcgcaaacgtcggcgccggcgtctttgcttgctctctcgcaggcttcgtcgtgggcgccatagccgggctgattttcgtcggcgtcacggcctcctcataacctcatca

SEQ ID NO: 21771 - DNA, 115 bp, Zea mays
agcttatggagcacatcaaacttttctccacccggctcaacattcctaagcttattcgagcttgtgacgaacagcagcactggaaagaacttacctacctgtacatacagtatga

SEQ ID NO: 21772 - DNA, 246 bp, Zea mays
agctggtcaagcccaatgagaggaatgagaggtatgttgatgctgtcatgacaatccccaagggaaccttgttccccatgtgtggcatgaaccttgccttcgacagggatctcattggccctgctatgtactttggtctcatgggtgatggccagcccatcggtcgctacgacgacatgtgggcaggatggtgtgtgaaggtcatctgcgaccacctgagcctgggagtcaagactggcctgccat

SEQ ID NO: 21773 - DNA, 247 bp, Zea mays
ctccaacgcccttgatatgaagctcagggacgaccttgagaggctcaagaagatcaggaaccaccgtggtctgcgtcactactggggcctccgcgtccgtggccagcacaccaagactactggcaggcgtggaaagaccgttggtgtctccaagaagcgatgagctctatatcaccccgacaaatcttggcctcactaccgtgtcggtttgtgtccaaacagtcctgatgaagggtttctgtttagg

SEQ ID NO: 21774 - DNA, 247 bp, Zea mays
ctgcgacaccgaggggaacaacggctgcaacggcggctacatcgacaacgccttccaatacatcgtcggcaacggcggcctcggcaccgaggatgcctacccgtacaccgccgcgcaggccatgtgccagtccgtgcagccggtggccgccatcagcggctaccaggacgtgccgagcggcgacgaggcagcgctcgccgcggccgtcgccaaccagccggtgtcggttgccatcgacgctaataac

SEQ ID NO: 21775 - DNA, 247 bp, Zea mays
gcgatggccttgttggcctccctcctctcctccgctagctggcgccggagatccgtcctctcggcctccaggacggccaccttctccgacagcctgcggtttttgctttccgcagccgacttctcccgcacagcatccacatgctgcgcccggagactctcgacctcggcagcaaagtccgcagtcaaggcacccgacgcaacgtggtcggcgaagtcggccgcctgacacataaacccatgagacc

SEQ ID NO: 21776 - DNA, 249 bp, Zea mays
ccccctcccaaccaaagaccgatggcgcccaaggccgagaagaagcccgcggcgaagaagccggcggaggaggagcccgcggccgagaagacgaccgccgggaagaagcccaaggcggagaagcgggtccccgcgggcaagtccgccggcaaggagggcggcgagggcaagcgtggcaagaagaagggcaagaagagcgtggagacgtacaagatctacatcttcaaggtgctgaagcaggtgcacccg

SEQ ID NO: 21777 - DNA, 240 bp, Zea mays
aggcgtgcgccacgtcgctggaatccatggtggactttgccaccgccagcctcgggaccagccacgtgagggccgcgtcgacggtcgtggggagggagggctcgccgaggcaggagtacaccgtgacaggcgtgaagcgggcgggcagcgggcgcctggtggcctgccacgcggagccgtacgcgtacgccgtgttcgcgtgccacttgacgcagcagacgcgggcgtactcggtgtcga

SEQ ID NO: 21778 - DNA, 238 bp, Zea mays
gggtgagaatggacgcatagggcttgcatttgacgtaatgggtcgtgtcccatacgaaaagtcggcgtttacggatcaacaggccgaacaaaggtcctgggacattaacctaggatggttcttggagccggttgttcgtggtgactatcccttctccatgagatcattggcaagggaacgactacccttcttcactgacaaagagcaagagaagctagtgggttcctatgacatgttg

SEQ ID NO: 21779 - DNA, 238 bp, Zea mays
gtcaggatttttccagacaagcttctactttggttacaccttgatgttctgtcttggattgggaatactttgcggtgctgttggatatttgggctccaccctatttgtgaggaggatctacagaaatatcaaatgcgactaaacttggtctaggctgctagcatgtcttgtcacaatatggtgcagagtaataccttgagcttctgattgacttcggaaattacacaggaggttgctc

SEQ ID NO: 21780 - DNA, 182 bp, Zea mays
gattgatcccctggcatctcttccaaagctacagttccttagcttactggataatactgtaactaagcagccagattacaggctgtatgtgatccataaattgaagcatttgcgtttgctggatttcaagaaagtgaaacaacaggtttgttcatttcctttggaatggctccaaaatatgt

SEQ ID NO: 21781 - DNA, 125 bp, Zea mays
ctttgggtgacagaacatataaaccaaatcctcgacttgctcgagctctagatattctttttattctgcatgctgaacatgaaatgaactgctccactgctgctgttaggcaccttgcttcaagt

SEQ ID NO: 21782 - DNA, 241 bp, Zea mays
agccagcatattcaacaagacgcaggaacacttccctactctgaaagactacaacgattatctggaagaagttgaggatatgactttcaacctgatcgaagggatagatgtcgaggagattgaagcaaaaattgcaagataccaacaggaaaatgcggacagatatacttgtccagagctaaaagggcggaagatcttgcggcacacttaaagcaagcaggatgaaccctgtaaaggccga

SEQ ID NO: 21783 - DNA, 96 bp, Zea mays
cattttaattccataaattaacattataatgatgacgtatgaataattaaccatagaaattgttgggaccatgcttcgtcgccgaaggtactgcag

SEQ ID NO: 21784 - DNA, 240 bp, Zea mays
gaaggagggtgcactggctgaagagaacatgcgcgggatttgcttcgaggtctgtgatgtcgttcttcatgctgatgctatccacaggggtggtggccaggtcattccaactgccaggagggtcatttatgcttctcagctcacagccaagccgaggctgctggaaccagtttacctggtggagatccaggccccagaaaatgcactgggtggcatatacggtgttctgaaccaaaagag

SEQ ID NO: 21785 - DNA, 218 bp, Zea mays
cggacgcgtggcttgcatcagctagctaactaagcaagtaagctaagctagccctaggcaacgagccgaccgtcaagctcatcgcagaccacgagccatggcctccaccaacagctggactgttgagatcgcctcgcctgtcgccgcgccgcgcctcttccgcgccgccgtgatggactggcacaccctggcccccaaggtcgcctcccacgtcgtcg

SEQ ID NO: 21786 - DNA, 235 bp, Zea mays
ctacaatcctaaaaccatctgcttcagccttcagctagccccaagtttagtcggccgatcgatcactgaagtagtaatggcctccgccaacagctggaccctcgagatcgcgtcgccggtggccccgcagcgcctgttccgcgccgccgtgatggactggcacaccctggcgcccaaggtcgcctcccacgtcgtcgccagcgcgcacccgtggagggcgacggcggcgttggca

SEQ ID NO: 21787 - DNA, 237 bp, Zea mays
attaccatcgagcttgaatttgtacaatcaacttcagggacttggtttccatgttatcctattgactggccggagtgaattccaacgtaatgccacagaattgaatcttttgtttgctggctacaactcatgggaaaaactcatactgaggcaaccttatgatattggcaagaacgctgtgcagtacaaatcagagagacgagcagcaatggaagcggaaggtttcaagatacttgg

SEQ ID NO: 21788 - DNA, 236 bp, Zea mays
ctgccactgatcctcatcatcaggaacaggctcaagtatgctcttacataccgtgaggtcatttccatcctgatgcaacgccatgtacttgttgatggcaaggtcaggacagacaagacctaccctgctgggttcatggatgtcatttccatccccaagaccaatgagaactacaggctgctgtacgataccaagggccgcttccgccttcacccaatcagggatgaggatgctaa

SEQ ID NO: 21789 - DNA, 159 bp, Zea mays
gcgacaacgacgccgagaaggacgcgcccgacaacgtgtccctcgctggcgacggcttcgacaccgtggtgcgcgccaaggccgaggtcgagaagaagtgccccggcgtggtctcctgcgccgatatcctcgccatcgccgccagggacgtcgtcacca

SEQ ID NO: 21790 - DNA, 241 bp, Zea mays
cgccgaaatcccgttgcgtctctcgcgcgttaccaagctctcaagttttctcgcgccgacggcaatggatgaggtcaccgaggccgtgaacaacctcaacatctcgggcgtaggggccgcgggcgttgccggggcggaagggcacaagaagaatcgcatccaggtctccaacactaagaagcccctcttcttctatgtcaacctcgccaagaggtacatgcagctgcacaacgaggtagag

SEQ ID NO: 21791 - DNA, 240 bp, Zea mays
cacaaggctaggcacaagcgaaccaaagccatggcgtccgacggcagcggcgtggtgacggtgtacggcagcaacggcgcggactgctggagccgtccaagcagcccaagtcggcgactttctccgtcaaggtggggctggcgcagatgctccgtggcggggtcatcatggacgtggtgaccccggagcaggcgcgcctcgcggaggaggccggcgcgtgcgccgtgatggcgctggagc

SEQ ID NO: 21792 - DNA, 231 bp, Zea mays
cctacagtcgcgacgccattccgtgaacctcgttattcattgggtggtgaaacaccaatgcacccgtctcgaacaccgcatcatgcttatcagactccaatgcgggaccctggagcaacaccaatacatgatggaatgcggactcccatgcgaagtcgagcctgggctcctatgagtcctccaagggacaattgggaagatggaaatcctgctacttggggtagcagtcca

SEQ ID NO: 21793 - DNA, 231 bp, Zea mays
cgtccggggagaacgccgagaagttcctgccggaggtgcctgggctggaggcgttccccggccaggtgatgcacgcatggagtaccggtcggccgaggggatgcgcgggaaggccgtgctcgtcgtggggtcgggcaactccggcatggagatcgcctacgacctcgccgccgccggcgccgtcacctccatcgtcgtccgaggcgagctccacctggtgaccaaggagat

SEQ ID NO: 21794 - DNA, 215 bp, Zea mays
ggagcagcatccacaaccacaagccatggcggggaggaccaacatccccactaacaactccgccctcatcgcaatcatcgccgacgaggacaccgtcactggcttcttgatggccggcgttggcaatgttgatctgcgcaagaaaaccaattacctcctcgtcgacaacaagacgacagttaaacaaatcgaggacgcgttcaaagatttactac

SEQ ID NO: 21795 - DNA, 117 bp, Zea mays
gctgagattacatcatcgctactgaaatcagttgaaagtggcgatctcattgcgtatggactaatcccagagtttgttggtagatttccaattcttgttggtctatcctccctcagc

SEQ ID NO: 21796 - DNA, 227 bp, Zea mays
ggcattgaggatgtcttcacctcgtcccgtggctccactaagacccttggcaacttcgtcaaggcaaccttcgactgcctcatgaagacctacggcttccttactcctgaattctggagtcagaccaagttctccatgactccgttccagcagtacacggacctgctggcgaagccaccaagggtcttgtgcttgaggcccaactgagacagtagagcttaggatgt

SEQ ID NO: 21797 - DNA, 251 bp, Zea mays
ggacgctggtttcttctctctctgctcctccgcctccgcctgatccatccaagacagggatcgccaagtcggactcggaggagcaccacttcgaatcgaaggccgacgctggggcgtccaagacctacccgcagcaggctggcaccgtccgtaagaacggcttcatcgtcatcaagaaccgtccctgcaaggctgtggaggtttctacctccaagactggtaagcatggccacgccaaatgccactttgtc

SEQ ID NO: 21798 - DNA, 257 bp, Zea mays
agtagttggcacagaaaacagaggtctctctgctgatacacttggttctttaccttcagtaacatacaagctgcaacatgttcaggatggcaacacagagcaatgcgtaatttgccgtgtggaattggaggagggtgaatctttgattgcactcccctgcaagcacttataccatcctgaatgcataaaccagtggctgcaaataaataaggtatgccctatgtgcagcgcagaagtatcaacctcgggtaacaagg

SEQ ID NO: 21799 - DNA, 256 bp, Zea mays
gggaggtgaagagctacttcaacaagtccgccggacgggcggcgagcaacaacagccacgggcacgccggcggcgcaagaagggcggcggcggcgggaagcacggcaagaacgagggcaacggcggcgcggtggcggccacggacaagcggttcaagacgctgccggcgtcggaggcgctgccgcggggcgaggccatcggcggctacatcttcgtctgcaacaacgacaccatggacgagaacctcaggagggag

SEQ ID NO: 21800 - DNA, 257 bp, Zea mays
gcgcgcgctgtcccagaaggagcaggacatacagatgatgctcgcggccgacgtccacctcggcaccaagaactgcgatttccagatggagcggtatgtctttaagcgtcgcaccgacggcatctacatcatcaacctgggcaagacatgggataagctccagctcgcggcgagggttattgttgccattgagaacccacaagacatcatcgtccagtcggcccgcccctacggccagcgtgctgtcctcaagttcg

SEQ ID NO: 21801 - DNA, 260 bp, Zea mays
ggtgggctcgtccgagtctgccctgctcgccaagctgggtatccgccccttctcgtacggcctccaggtcaccagtgtctacgaggatgggtccgtgttcagccctgaggtgcttgacctttccgaggaggacctgattgagaagtttgccactggtgtctccatggttgcctccctgtcactggcgatctcgtacccgacccttgctgctgtgccccacatgttcatcaatgggtacaagaatgtgcttgctgttgctg

SEQ ID NO: 21802 - DNA, 120 bp, Zea mays
acaattagcagatgaggagagagagacaggcaatgagttcttcaaggagcaaaatacccagaagcaataaaacactacacggaggctctcaagagaaacccaaaggatcctagggtttac

SEQ ID NO: 21803 - DNA, 244 bp, Zea mays
gcggcgagctcgcgctgccgcacgatgggcaggagcgggcggtcggcgatgtcctcctgcagggtggcgagccgatccgaaagggcgttctcctggtgcaccgtccggctgtggaggtcgttgatgagcaccagctgcgcggacgtgatccccagggccccggtcgggatgacgccgttgctgaggccgccgagcagctcctccacctgcgcctccaggcactccccggagaagttgtagagca

SEQ ID NO: 21804 - DNA, 251 bp, Zea mays
ggacttcaggtacctgccgttcgggtctgggcgccggatctgccccggggccaacttcgcgctcgcgaccatggagatcatgctcgccaacctcatgtaccatttcgactgggaggtccccaatgagaaggaagacggtggcgggaaggtgagcatggatgagacgttcgggctgatgcttcgcaggaacgagccgctctaccttgttcctagggccgtctagctagctagttactgtgccgccgccgcct

SEQ ID NO: 21805 - DNA, 251 bp, Zea mays
gacgcatcgaggttagcacgcgaagaagcgaccatgagggccaagtggaagaagaagcgcatgaggaggctcaagaggaagcgcagaaagatgaggcagagatccaagtaggcagatcgagatggattgtggacctgatgacatgcgtgggtacatacatttcttcggatgcgttggtgtgcctgtggagagatgtcaacctgccatggtgtcacggtccgccatcagttgaacgtcttgcctgcacttca

SEQ ID NO: 21806 - DNA, 236 bp, Zea mays
atgtgactcagagcatgattggggggaaaattctggaaagccaacttcaacgtataggagttcttagtgctggtgatacaataagcaaacatccagcctttgatacaaactacaaaattttgtgggccaatcatggagatgcaataagcattcagtactctggaactcctgctctgaagggagattttgttcggtacgggaagcgaactactcagggaattctaaacgatttgagg

SEQ ID NO: 21807 - DNA, 240 bp, Zea mays
gcctacctgcttgctgtcctcgctgggaacgccagcccctccgctgacgatttgactgccattctggagtcagttggctgtgaagttgacaatgaaaagatggaactcctgctgtcccaactgagcggtaaggacatcaccgagctcattgccgcgggcagggagaagtttgcttcagtcccatgtggtggcggcggtgtcgctgttgcggcagctgcacctgctgctggcggactgctc

SEQ ID NO: 21808 - DNA, 243 bp, Zea mays
ggggaactccgccggcaccgtctcgtgcttctacctctcttccggcgacggcgacgggcgcgacgagatcgacatggagttcatgggcaactcgagcgggcagccggtggtgctgaacaccaacgtgtgggccagcggcgacggcaagaaggagcaccagttcgacctctggttcgacccctccgccgactaccacacctacaccatcatctggaacccgaccaacatcctgttcaaggtcga

SEQ ID NO: 21809 - DNA, 245 bp, Zea mays
gcccaatgcgacagtgatcttgcgcaatgccaaaatagacatgttcaaaggatcaatgaggcttgcagtggacaagtgggggcggattgaggctgtagagccagccagtttcacggtgaaggaagacaacaacctgtctctaatagagtatgaattggttaatgtggctgagtaactgtccaatccaagcgtttctgccccctttatttcgtgccataagaaggaagtaccatgaatgaacatta

SEQ ID NO: 21810 - DNA, 242 bp, Zea mays
aagtctctggactttagcaactatccttacatatatatgagatggaaagaacagtattttgtcaatgttggagttgactgtgggttaaccatcgctggtttctactacgtctgcttttcttgtagtgatggctccattagtggattttattatgatccaaatagcagtccgtttcagaagctcgaattgcagtgtaccaatgagaaaaattctggattcaccttttcatcctatgagctgca

SEQ ID NO: 21811 - DNA, 245 bp, Zea mays
ctgatgaaccttgggtgtgctactggccatcctagctttgtcatgtcctgctcattcactaaccaggtcattgcccaacttgaactgtggaaggagaagagctctggcaagtatgagaagaaggtgtatgtgctccccaagcaccttgatgagaaggttgctgctctccacttgggcaagcttggtgccaagctgaccaagctcaccaagtctcaggccgactacatcagcgtgccgatcgaggg

SEQ ID NO: 21812 - DNA, 246 bp, Zea mays
ctgcaaacaacgaaagctggtgagcaactttgtcaagcctcaagagctcatggaagatggcagtgctccaagacggtctactccacccacccgcagaagcagatctgccgagttccacaatttttcagaaaggaggagaagggataagatcaacgagaagctgaaagcattacaggagcttcttccaaactgcaacaagaccgacaaagtttcgatgctagacgaagcaatcgactacctaaaatc

SEQ ID NO: 21813 - DNA, 246 bp, Zea mays
agctgatgctgagagcaagattgtccctgccactgctatccctgatgactggatgggtcttgatgttggccctgatgccaccaaaacattcaacgaagcattggacaccaccaagactgttatttggaacggccccatgggagtgtttgagttcgagaagtttgcagctggcactgaggcgattgccaagaagctagctgagcttacaaccacgaagggtgtcactaccatcatcggcggcggcga

SEQ ID NO: 21814 - DNA, 252 bp, Zea mays
gcggcgtggctggttgccaagaacaccctcaagatcatgcccttcaagctcccgcccgtcggcccttatgatgtccgcgtgcgcatgaaagcagtggggatttgcggcacgatgtgcactacctcacggagatgcgcatcgcgcacgtcgtggtgaaggagccgatggtgatcgggcacgagtgcgcgggcgtggtcgaggaggtgggcgccggcgtgacgcacctgtccgtaggcgaccgcgtggcgctgg

SEQ ID NO: 21815 - DNA, 245 bp, Zea mays
ggacgcgtggcggccacattggcatgccaactaatatctgctgtgtcgttgtggagtaccttcctggaggtgcactaaaatcatttctgataaagaacaggagaaagaagctagcttttaaggtcgttgttcaaatcgctcttgacctcgccaggggattaagctatctccattccaagaagattgtgcaccgtgatgtgaagactgaaaatatgcttcttgacaaaacgagaaccgtgaagatc

SEQ ID NO: 21816 - DNA, 235 bp, Zea mays
gactcggaggagcaccacttcgaatcgaaggccgacgctggggcgtccaagacctacccgcagcaggctggcaccgtccgtaagaacggcttcatcgtcatcaagaaccgtccctgcaaggttgtggaggtttctacctccaagactggtaagcatggccacgccaaatgccactttgtcgccatagacatattcaatgggaaaaagcttgaagatattgttccttcatcacaca

SEQ ID NO: 21817 - DNA, 249 bp, Zea mays
ccaagcaacaaacttggcattcttgcctgttcttaattattgccaggacaggagaaacaaagatgaggcctcagctgatactcgtcggcactctggctgttctcgccatcctcgcagctctcggcgaaggctcgtcgtcctggccctgctgcaacaactgcggtgcttgcaacaagaagcagccgccggagtgccagtgcaatgacgtgtcggtcaacgggtgccatccggagtgcatgaactgcgtca

SEQ ID NO: 21818 - DNA, 251 bp, Zea mays
gcacctctctccatctccctgctcctccgcctccttcttgatccagccaagccagggatcgccatgtcggactcggaggagcaccacttcgaatcgaaggccgacgccggagcgtccaagacctacccgcagcaggctggcaccgtccgtaagaacggcttcatcgtcatcaagaaccgcccctgcacagttgtggaggtttctacctcaaagactggtaagcatggccatgccaaatgccactttgttgc

SEQ ID NO: 21819 - DNA, 252 bp, Zea mays
ctctttgccaggtcatgcttcgtgttggtgaccttgagcgttctatcaagttttatgagaaggccctagggatgaagctcctaaggaagaaggatgtacctgattacaagtataccattgccatgttgggctatgctgatgaggacaagacaactgttctggagctgacgtacaactatggagtcacagaatacagcaagggcaatgcatatgctcaggttgccattggcaccaatgatgtgtacaagagcg

SEQ ID NO: 21820 - DNA, 252 bp, Zea mays
cgcgaccgaagtcaacggtgggcacgccggcgtacatcgcgcccgaggtgctgtcgcggcgagagtacgacgggaagcacgccgacgtctggtcgtgcggagtcacgctctacgtcatgctggtgggggcgtacccgttcgaggatccaaaggacccaaagaacttcaggaagacaatacagcgcatcatgtcggttcagtacaagatccccgagtacgtgcacgtctcccacaactgccgccacctcctct

SEQ ID NO: 21821 - DNA, 235 bp, Zea mays
ctgaagcgcgcgagagacagacgcgtatacccaggcggcggttgaggaggaggagaagaagaagaagaagatggcttcctccgcgtacgcctcatggtccaagcggtggatccgtcccgaggtgtacccgctgttcgtgccgatggccgtggccctgggtatctgctcgtaccagcttgtgcgcaacatcacgggcaacaccgaggtgcgggtgaccaaggagaagagggcggcc

SEQ ID NO: 21822 - DNA, 240 bp, Zea mays
ggaatatgttgagggccttatagagattcccagaatcaatgaagaatcattgcctagaacagttaaagggcttgcttggccaaactgcaggagctctacaacaacttcctagccctataagggatgctgtttcagaggggcttaaattgccacttagtggatcatttcaacgcttattcatgatctcttacttggatgaagaaatattgattatcagagatgctgctggagcacctgacg

SEQ ID NO: 21823 - DNA, 223 bp, Zea mays
cccacaccccccgagctcagcttagctccactccagctccaatcacagtcgtgaccagagcgcgagagctagctagagggccgtgaaaatgccgatcaataggatcgccctggggagccaccaggaggtgtaccacccgggcgccctcaaggcggcgttcgctgagttcatctccaccctcatcttcgtcttcgccggccagggctccggcatggccttcagc

SEQ ID NO: 21824 - DNA, 187 bp, Zea mays
gttggtgattatttgtctgtgaagggacctaagggccgattcaagtaccacgttggccaagtgagggcatttggaatgctggctggtggatcaggcattactccaatgtttcaagttgccagagcaattcttgagaaccctaatgacaacaccaaggttcacttaatttatgctaatgtcacatatg

SEQ ID NO: 21825 - DNA, 237 bp, Zea mays
gacatgggcgtctacacctttgtgtgccgcaacaacggcggcgagtggaccgccaagcagcactccggcgagatcgaggcttccgccgctaccccatacgagctgcagcgccgcctcgtcgctgccgcctccgcggccgactctgcctacggcgtccagtcgtccttctccatggtcacccccagctccgccgtgttccaggtgatcgtcggtgctgtcggtggtggtgcaatgatg

SEQ ID NO: 21826 - DNA, 245 bp, Zea mays
aggtgatcaagctcatgcagagcttcaagtccaaggagtatgtcagagagaccttctcctggcagtactactactggtacctcaccaacgatggcattgagcacctacgcaactacctgaacctcccgtctgagatcgtgcctgccacgctcaagaagtctgccaggccactgggccgtccatttggctctggccctcctggtgaccgcccaaggggccctggtcgttttgaagacagaccaagg

SEQ ID NO: 21827 - DNA, 242 bp, Zea mays
gctgtatgccaagaaggactacaacctggcgaacacccgcagatcgatgtgcccaacctccaggtgatcaagctcatgcagagctttaagtccaaggagtatgttagggagaccttctcctggcagtactactactggtatctcaccaacgatggcattgagcacctacgcaactacctgaacctcccgtctgagatcgtgcctgccacgctcaagaagtctgccaagctactggccgccat

SEQ ID NO: 21828 - DNA, 234 bp, Zea mays
ctcacaccactgatcgttgggattctatttggggttgagaccctctctggagtccttgctggtgcccttgtctctggtgttcagattgccatttctgcatccaacactggtggtgcctgggacaacgccaagaagtacattgaggctggagtttcagagcatgccaggacccttggcccaaaaggttctgaccctcacaaggcggctgtcattggtgacaccattggagatcct

SEQ ID NO: 21829 - DNA, 238 bp, Zea mays
ctcaattagtttgatgtttggcaaagatcatgcaaccggtgaagtcgcaaagaccctagctgatggcgcgagagacatgagtaaggaagaggtgatgcgcgcaagtacgattccttgttggcacttctggtgatccttaggaagagatggctgctgaagcaactgaaaaagtgaaccgagttgtggtttggtgaattgaactactgttggatgtgttgccgagtgaaaaattgttggt

SEQ ID NO: 21830 - DNA, 216 bp, Zea mays
gcttcgtcgatttgaatttgatgtactaatggagtctaagggtggcaaaaagtctagcagtagtcgttccatgatgtatgaagctccccttggctacagcattgaggacgttcgacctgccggaggcgtgaagaagttccagtctgctgcttactccaactgcgcgaagaagccatcctgatatcccttttggcttccgcatgtcaggagttaggg

SEQ ID NO: 21831 - DNA, 256 bp, Zea mays
ggtgaagaactccttcaagctgccggccaccgacgccaagcccaaggccgccaagcccaaggcacccaaggccgcgcccaagcccaagccctcgccgaaggcaaggccaagaccgctgcgaacccaaggcggcgtcgcccaagcccaaggccaaggccaaggccaaggccaaggccaagcctgtcgctcctgccgccgcgtcgcccaagccccgcaggcgccctcccaaggtcgccaagacctccgccaaggcctc

SEQ ID NO: 21832 - DNA, 258 bp, Zea mays
gcgcggcaccggcaacggcggcctctgcggcatcgccatggaggcgtcctttcccatcaagacctcgcccaacccgtcgcgcaagccccgccgcgcgctcatcaccagggacgcctcttcccagtgacaggctgatccatctcggcgtcgaactcgtactactggcacgtaagtaggagtacgttgacaggatgacatcctgctgctgctgtttgcttgtactattttcgattgtgtttgtaggtttgattgtgccag

SEQ ID NO: 21833 - DNA, 254 bp, Zea mays
caccaatggcggcgctcggaggacggcggaggagggcgtcgtcagcggccctccagctagccttgtttgcggtggccctggtctccctggccggcccagccacggccgcggggaacaagaccgggcaggtgaccgtgttctggggccggaacaaggccgagggcacgctgcgcgaggcctgcgactcgggcctctacaccatggtgatcatgtccttcctcgacgtctacggcccgcagcgcggcggctaccag

SEQ ID NO: 21834 - DNA, 252 bp, Zea mays
ggcactttcatctgtgccctctgcgttcgagatcgatctcagctggcaccgtcccagttcgccatggcggaggaccggagccccaagcccatccactgcaaagcggcggtgtgccgagccgccggcgagccactcaccatcgaggagatcgtcgtcgacccgccgaaagcgtacgagatccgcatccgggtcatctgcacctcactctgccacaccgatatcaccttctggaaagctaaggtggcaccggtg

SEQ ID NO: 21835 - DNA, 198 bp, Zea mays
ggcatggcgaagtccattcatcacgctcgtgtgctcatcaggcaacgccacattagagttgggaggcaacttgtcaacattccctcattcatggtgagagttgactcagagaagcacatcgacttctcgcttaccagcccacttggtggtggagaacctggaagggtgaagagaaagaaccaaaagaaggcttctggg

SEQ ID NO: 21836 - DNA, 259 bp, Zea mays
cccacgcgtccgcagacactctacatatatcctctgcgcgtgtatctcgtcgtacagagccgaaagctggagcttccaatggcgggagacaacgacctgaaggtgctcggcgtgtggacgagcccgttcgtgatccgggtccgcatcgtgctcaacctgaagggcctggcgtacgagtacgtggaggaggacctcagcaacaagagcgcgctcctcctggggtccaacccggtgcacaagagcgtgccggtgctcctcc

SEQ ID NO: 21837 - DNA, 261 bp, Zea mays
cataagtacatataaccaactaggcttgatcgatctctcgacagcaaatagctagcaataatggagaagtacaccaaagccctagcgtcattgctcaccatgctggtgctggcacctctcctcgccatggccaccgacccagaccccctgcaggacttctgcgtcgacgacctcaacggcatgccatcagtgaacgggtagccatgccagccgccgtcgtcggccggcgaccagttcctcttctcgaccaagatcgccacg

SEQ ID NO: 21838 - DNA, 250 bp, Zea mays
agcagctcaccgtgcagctgaagaagctcgctgccgccggcaagctgacgagggtgaagaactccttcaagctgccggccaccgacgccaagcccaaggccgccaagcccaaggcacccaaggccgcgcccaagcccaagccctcgccgaaggcaaggccaagaccgctgcgaacccaaggcggcgtcgcccaagcccaaggccaaggccaaggccaaggccaaggccaagcctgtcgctcctgccgccg

SEQ ID NO: 21839 - DNA, 252 bp, Zea mays
ctggactgcaatgaagaaatctacgtctgggttggcctacactcagatattacatccaaggagcaagctctcaatgttggcaagatgttccttaaggatgctgttcacggtggaaggtcaatggaaacgacagtgtatgctgtcacagaaggggacgagcctggatttttcaccagcttcttcgactgggacaattcgaagcaatcatatatggttggcaactcatttgagaggaagctcgccgtcctgaaa

SEQ ID NO: 21840 - DNA, 228 bp, Zea mays
gtcgctggacgcgcggcaagacgtggtggtggtggaagtgccgaagctggggaaagcggcggcgcagaaggcgatcaaggagtgggggcagccaaagtcgcggatcacgcacctggtgttctgcaccacgtccggggtggacatgccgggcgccgactaccagctgaccaaggcgctgggcctgcggcctccgtgaaccgcctcatgatgtaccagcaggggtgcttc

SEQ ID NO: 21841 - DNA, 254 bp, Zea mays
ggccttctcgacggtggtggccgtggagggcatcaacgccatccggacgggcagcctggcgtcgctgtcggagcaggagctgatcgactgcgacacggacgagaacgggtgccagggcgggctgatggagaacgccttcgagttcatcaagtccttcggcggcatcaccaccgaggccgcgtacccgtaccgcgcgtccaacggcacctgcgacggcgatcgggcccggcgcgggggaggcgtcgtcgtggtga

SEQ ID NO: 21842 - DNA, 244 bp, Zea mays
catgtctttgaggagatgcagaggccgggtaccccgctctacaacatcaaggctttcctccctgtcatcgagtcctttggtttctccagccaactgagggccgcaacctctggtcaggcgttcccccagtgtgtctttgaccattgggacatgatgggctcagatcctttggaggccggctcccaggctgctcagctggtgctggatatccgcaagaggaagggtctcaaggaacagatgaccc

SEQ ID NO: 21843 - DNA, 244 bp, Zea mays
caaaaatatttcatgtggaaagccttgagaagacagctcaagatgatttccaaaagcttgcatctgctgtttacctgcaagttagcaccatcagccaggccctcatcttcgtgacaaggtcccggagctggtcatttgtcgagcgcccagggtttctattggtctttgctttcttggttgcgcactgattgccacactgattgctgtgtacgccgactgggcgttcacttcgatcaaaggcatt

SEQ ID NO: 21844 - DNA, 247 bp, Zea mays
accgagctaggaggcatcaccttcgccgatccaacatgggtaagacacgtggtatgggagctgggcgcaagctcaagacccacagaaggaaccagaggtgggctgacaaagcctacaagaagagccatctcggcaacgagtggaagaaaccctttgctgggtcatctcacgcaaagggaatcgtccttgagaagatcggcattgaggctaagcagcctaactctgctatccgtaagtgcgctcgtgt

SEQ ID NO: 21845 - DNA, 248 bp, Zea mays
cttgcaatcacaacgaacagaagctctcgatctcaccgacaccgaggaagaagagatcaatggcgtccgagcagggagtcgtgatcgcgtgccacagcaaggctgagttcgacgcccacatgaccaaggcccaggaagccggcaagctggtggtcatcgacttcactgccgcctggtgcggtccatgccgcgccatcgccccactgttcgtcgaacacgccaagaagttcactcaggtcgtcttcctg

SEQ ID NO: 21846 - DNA, 247 bp, Zea mays
ctgagaaggaaaagcagcggcttctcgcgcggcgcttcgatctaccggggagtcaccaggcatcaccagcacgggcggtggcaggcgcgcatcggccgcgtctcgggcaacaaggacctctacctgggaacgttcagcacgcaggaggaggccgcggaggcgtacgacgtggccgcgatcaagttccgcggcctcagcgcggtcaccaacttcgacatcacgcggtacgacgtggacaagatcatgg

SEQ ID NO: 21847 - DNA, 248 bp, Zea mays
ggagagcaccctccacttggtgctgcgtctcaggggcggcatgcagatcttcgtgaagactctgaccggcaagactatcacccttgaggtcgagtcttctgataccattgataatgtcaaggccaagatccaggacaaggagggcatccctccggaccagcagcggctcatttttgccggcaagcagctcgaggacgggcgcacgctggccgactacaacattcagaaggagagcaccctccacttgg

SEQ ID NO: 21848 - DNA, 250 bp, Zea mays
gggggtgtgagatggacactcccatggatggctccagaattactcaatggaagcaataataaggtgtcagagaaggttgatgtattttcttttggtattgttatgtgggaaatcctcactggcgaagaaccatatgccaatatgcactatggcgcaattatagggggcatcgtaaacaacacactgaggccacatgtgccagcttcatgtgatccggagtggagaaggctcatggagcagtgctgggctc

SEQ ID NO: 21849 - DNA, 269 bp, Zea mays
gcgacgtcggccacggcttccgctgcgtccgcatggtcaacaacatctacctcaacttcgacgccttccacggcgacaaggaccacggcggcgtgcgcgacggcaccaacatcgtgctctggaagtggtgcgagggcgacaaccagcgctggaagatcgtcccctggtaaatgtgctgttctgtggctgcactggtcatcaccatgatctggagctttgaaggcatagcacctgtggtcagcaactgctgccgtgttgctagaataaag

SEQ ID NO: 21850 - DNA, 260 bp, Zea mays
ctatgtctttaagcgccgttccgacggcatctacatcatcaatcttggcaagacatgggataaactccagcttgcagcgagggttatcgttgccatcgagaacccgcagacatcatcgtccagtctgcccgcccatatggccagcgtgctgtcctcaagttcgctcagtacactggcgcccatgccatcgctgggaggcacacccctggtacattcactaatcagctcaagacctccttcagcgagcctcgactgctcat

SEQ ID NO: 21851 - DNA, 266 bp, Zea mays
gggaaatctttcacttgcatcgttcgctttgacactgaggtggagctggcgtacttcaaccatggaggcatcctcccttatgtcatccgcaacttggcagctgcgcataactgaggcaagatcacacaccgtttgacccacaatggcagtggcaggctccatgttcccagggctagcgacctggttctcaatgtagtgacatttgtgatggatctaggggtctctttgtcgattcagcccataaataaagtgtgaaataaaagccg

SEQ ID NO: 21852 - DNA, 266 bp, Zea mays
tgcactgagcaggatccgtaatgctgcaaggcacttgctcacccttgacgagaagaacccccgtcgtatctttgagggtgaggcgcttcttcgccgcatgaaccgctatgggctgcttgctgagggtcagaacaagcttgattatgttcttgccctcaccgctgagaacttcctcgcaaggcggcttcaaacacttgtcttcaaggctggcatggccaagtccattcaccatgctcgtgtcttgatcaagcagcgtcacatcaggg

SEQ ID NO: 21853 - DNA, 256 bp, Zea mays
agacgaagtcctcttcgagtcccgtgcgatcaaccggtacatcgccagcaagtacgcgtcggagggcacggacctgctccccgcgacggcgtcggcggcgaactggaggtgtggctagaggtggagtcgcaccacttctacccgaacgcgtcgccgctggtgttccagctgctcgtgaggccgctcctgggcggcgcccccgacgcggcggtggtggacaagcacgcggagcagctcgccaaggtgctcgacgtgt

SEQ ID NO: 21854 - DNA, 261 bp, Zea mays
ccagattctaacctcgcatacccttcagccggtgccggttgccattggaggccctggtcttcaccccggagtgaaattccggaacgacattcaaatccctgggctcgccaatgtagccgcaactgtgatgaacctccatggatttgaggcccctgctgactacgagcaaaccctaattgaagtggctgacaactaaatactggccagctatgtccaattttggttctatagttttgagaagggatatggccatgccattca

SEQ ID NO: 21855 - DNA, 258 bp, Zea mays
gcgtgacgcgagcaacgtggaggcgttcccggggctcaacacgctgggcctgtccatcaaccgcgtcgacctcgcccccggcggcgtcaacccgctgcacacccacccgcggtccgccgagctggtgcacgtggaggccggcgagatgctggtcggcttcgtcagcacggagggcaggttctactccaaggtggtgcgcgccggggagagcttcgtcatcccgcgcgggatggtgcacttccagtacaacgtcggcaa

SEQ ID NO: 21856 - DNA, 263 bp, Zea mays
agcggctgttcttcttcgagatggcctgcaagaactccgaggtcgcgtacgagcagaaccccaacgacgccgacaacctgacgcggtggggcggcgcgctgctggagctgtcgcaggtccgaaccggccccgacagcctcaagcttcttgaagatgcggaagccaaactggaggaggcacttcaaattgatcccaacaagtccgatgcactctggtgcttgggaaatgctcagacctctcatggattcttcactccagacaat

SEQ ID NO: 21857 - DNA, 259 bp, Zea mays
cgttctctccttcctatcggctccacacctccacgcaactggaagcttcgcttcaatctgccctactcctccgccgcctccaacaccgcagacgcagctgccgcgggcgggagcttggacgtgctactctgctctcatctcgtttccgcgcaggaattgttcacaatggcccgcgtgtatgttggcaacttggattcacgggtgacttctggggaactcgaagatgagttccgtgtgtttggagttctgcgaagtgttt

SEQ ID NO: 21858 - DNA, 257 bp, Zea mays
cccacgcgtccgctccaccggcaccggagcagggggtaatgggaagaagggagcggccgggcgcaaggtcggcgggccaaggaagaagtcggtgtcgaggtccgtgaaggccgggctccagttccccgtcggccgcatcgggcgctacttgaagaagggccgctacgcgcagtgcttcggcaccggcgcccccgtctacctcgccgctgtcctcgaatacctcgccgctgaggttctggagctcgccggtaatgctg

SEQ ID NO: 21859 - DNA, 257 bp, Zea mays
ggaagacttccttgatgaaccaatatgtgaacaagaagttcagcaatcactacaaggctacgatcggcgcggatttcctcaccaaggaggtgcagttcgaggacaggctcttcactctgcaaatatgggacactgctggccaggaaaggtttcagagtctcggcgttgcattctaccggggagcagattgttgtgtcctagtctaagatgttaattctatgaaattcattgacaacctgaacaactggcgagaagag

SEQ ID NO: 21860 - DNA, 254 bp, Zea mays
ctgtgatattccgcatgtgaaccgtactgagtaccagctgattgatatatcagaggatggatttgtgagccttcttacttcagatggcaacactaaggatgatcttagactcccaactgatgagactcttgtggcccagatcaaggaagggtttgaaagcggcaaggatcttgttgtgactgtccagtctgctatgggggaggagcagatctgcgcgctgaaggatgttggccccaagtaacttacctgccttg

SEQ ID NO: 21861 - DNA, 258 bp, Zea mays
caaccaggcttctacatgtgaccttaaagaacttgtttctaagttcattccggaagttattggcaaagagattgagaagtctacctccagcatcttcccacttcaaaacgtcttcatccgcaaggtgaagatactcaaggcccccaagtttgatctcgggaagttgatggaggttcatggcgactacaaagaggacgttggtgtgaagcttgagaggcctgtcgagggtgatgaggctatgcaggaggttgctgctgc

SEQ ID NO: 21862 - DNA, 199 bp, Zea mays
ggttcacttctccaggtaaggaaagggttcgtactcatggcgccgccgcagccaaagtcgggcctcttcgttggcatcaacaagggtcatgtcgtcaccaagcgcgagtgcctccccgcccgtgccaccgcaaggggaaatcaacgaagagggtgtctatggtcaggggcctgatcagagaggttgctgggtttgctcc

SEQ ID NO: 21863 - DNA, 258 bp, Zea mays
cattcaaggaacaatcccttctgagcttggtaatttgaagaatctaataagcttggacttgtacaagaacaacatttcggggacaatacctccttcccttggaaagttgaaatcccttgtattcctgcggctcaatggcaatcatttgactgggccgatcccaagggaactttctggaatatctagtctcaaagttgtcgatgtttcaagcaatgatttatgtgggacgattcccacatctggaccatttgagcacat

SEQ ID NO: 21864 - DNA, 238 bp, Zea mays
gcaccagaaatcctggctgtaattggcaaagtacctcacctctccgagtttctcaactccctgtacaactgccagtataagtcgttcttcgttgcattttctggtctgacagagcaaatcaagttagaccgttatcttcagcctcatttccgctactacatgagggaagtgcgcaccgtggtatactcacagttcttagagtcatacaagagtgtgacaatggaagcaatgccactgc

SEQ ID NO: 21865 - DNA, 253 bp, Zea mays
tgattattatttcttcaattgctggttacaatccagaacaaggattgacaatgtatggtgtcacaaagactgctctctttggtctcacgaaggctcttgctggtgagatgggacccgatactcgtgttaactgtatagcccctggttttgttcctacacggtttgctagtttcctcacagaaaatgagaccattaggaaagagcttaacgagaggaccaagcttaagagattgggtactgtggaagacatggc

SEQ ID NO: 21866 - DNA, 255 bp, Zea mays
cccacgcgtccgaccaagtttctccttagcaagctgaaggacctccaattttttgttggtgagtccatgaaggatgatgcgtctgtggtattcgcctattacaaggatggtgccactaatccgacattcctctatttctctcatggtcttaaggagatcaagtgctaggcgtgcggcgaaattagttacccatgttgggtactatctatgtactattattatatccaaaactatagttgtcctggctgaattgaa

SEQ ID NO: 21867 - DNA, 259 bp, Zea mays
cctcgtcatccaggccccggtgctgatcaaataccccgcgagcttatccctgaccgcctactcctactccttcgcaaccctgttcatggtggtcaccggcgcgttcgccaccagtgggctccacgagtgggcgctgacagcgaccgagatcttagccatcctgtacgctggagtcgttgcgtcctgcctgaactacgcgatcatgacctgggcgaacaagatcctcgggccgtctctggtcgccctctacaacccactc

SEQ ID NO: 21868 - DNA, 258 bp, Zea mays
cttctcctccggcatcgacgaggcgaacccagcgcccgagtccctctccctgcacccacgacccatggcggcggatatggcgtacgcgccgccgatgaaggcgggcaaggccgggttcgaggctggcatgatggatccgcagcacaggatccgcatcacgctctcctccaagagcgtcaagaacctcgagaaagtctgcggggatctggtgaagggcgccaagggtaaggagctcaaggtcaagggccccgtgcggat

SEQ ID NO: 21869 - DNA, 260 bp, Zea mays
ctatgaatgcagctgtggtgatgacaatatgctatacatgagagagcatgacacttgcatcagcaaagagggaactgccactactgttggctggagcttcctctgggttattttctttggacttgtttttgccggggttggagcatacgctgtgtacaaatacaggctgcggagttacatggattcagagatccgtgccatcatggctcagtacatgcctctggataaccaagaaggagcaaaccagcatcaggtcgtgc

SEQ ID NO: 21870 - DNA, 132 bp, Zea mays
catcccgagcgtcgcgcgcctcggctacgtctggcagttcatcacgctcgccgggttccacgccgacgcgctcgtcaccgacacgttcgcgcgggacttcgcacgccgcggcatgctggcctacgtggaaag

SEQ ID NO: 21871 - DNA, 239 bp, Zea mays
aaaggttttcctcagctcaaagaaatctggcaagggtaagaagcctggcaagggcggcaaccgattctggaagagcattggccttggcttcaagactcccagggaagcaatcgaagggacctacattgacaagaaatgcccattcactggaactgtttctatcagaggcagaattattgctgggacatgccacagtgctaagatgaacagaactatcattgttcgcaggaactacctcc

SEQ ID NO: 21872 - DNA, 235 bp, Zea mays
agcgaatgatataaagatagctgtagcatcggcaaacaaaagtggtgcaatgagctttcaagagttgaaccagaagaaataccgcacgcccctaattctaggaatgggcctacttgtgttgcagcagctgagtggaataaacggtataatcttttatgcaggtagcatcttcaaagctgcagggctcaagaacagtaacctggacacatgtatacttggagtgattgcggttctt

SEQ ID NO: 21873 - DNA, 187 bp, Zea mays
ggcggaccaggtaagcagcagcaggaaccctagcaccgccgcatccgcagccatgggtatcgacctcgttgccggtgggagggacaagaagaccaagcgcacagcgccgaagtccgacgatgtttatctcaagctccttgtcaagctctaacgtttcttggtcaggaggacccagaggcaatttcaa

SEQ ID NO: 21874 - DNA, 234 bp, Zea mays
cccggtgcacaagagcgtgccggtgcttctccacgccgggcgcgccataaacgagtcccaggtcatcctgcagtacatcgacgaggtgtgggcggggacggggccggacgtgctgccggccgacccctacgagcgcgcggtggcgcggttctggggcgcgtacatcgacgacaaggtggagtcggcgtggctggggatgctgttcaagtgcgcgaacgaagaagagaaggcggc

SEQ ID NO: 21875 - DNA, 228 bp, Zea mays
gtctccgtgtacgcgttcgagggcatcggcatggtgctgccgctggaggcagaggcggcgaacaagagcaagttcggcgtcacgctcgggctgtccatggcgttcatcgccgtcatgtacgggctgttcggcgtcatgggctacgtcgcgttcggcgacgccacgcgggacatcatcaccaccaacctcggagccgggtggctgtcggccgccgtgcagctggggctc

SEQ ID NO: 21876 - DNA, 234 bp, Zea mays
cttctctctctgctcctccgcctccgcctccgcctgatccatccaagacagggatcgccatgtcggactcggaggagcaccacttcgaatcgaaggccgacgctggggcgtccaagacctacccgcagcaggctggcaccgtccgtaagaacggcttcatcgtcatcaagaaccgtccctgcacagttgtggaggtttctacctccaagactggtaagcatggccacgccaaat

SEQ ID NO: 21877 - DNA, 152 bp, Zea mays
caaaaagcttggccgttgcatttccccccgagaagaagcccggatacttataggttaattagaactaatttatgatatacattcagactaattattctacacatcaaaggtatttatgtaatgcggtacaatatatatatccggttaacaaa

SEQ ID NO: 21878 - DNA, 226 bp, Zea mays
tgcagggcgatgtgaacctcaaggaggttgaaagagtatgcaaggctgcgtgttggtgcattcaggaaaacgagtctgctcgaccgaccatggccgaggtggtgcagtttcttgagggcctctctgatctcggtatgccaccactgccaagactgctcaatgcggtcacaggagggtcaccgacatgactgtgacatttatagtcttgcctcgaattaggtttagc

SEQ ID NO: 21879 - DNA, 233 bp, Zea mays
ccttgatggcccatcgaagaccgatgcatcaataatccagtgtcaatgaccccgattgccattatttctgaaagggaaatgtgccctttggccatttctaagtattttggtgattgagtgccaacacaagtgtttttgtgttgatctatgcaatgtggtggacaaagtacaaatcatgtcaaaaggtatgtttctagacttagtacattattttatggactaatgtgttgtgt

SEQ ID NO: 21880 - DNA, 231 bp, Zea mays
cttcaccgagcagggcctccccgccgacctcgtcaagaggggcgtggcggtggcggacccgtccagcccgtacaaggtgcggctgctgatcgaggactacccgtacgcgagcgacgggctggccatctggcacgccatcgagcagtgggtgggcgagtacctggccatctactaccccgacgacggcgcgctgcggggcgacgaggagctgcaggcgtggtggaaggaggt

SEQ ID NO: 21881 - DNA, 218 bp, Zea mays
gcctctgaagctgtacgggatgccgctgtcccccaacgtggtgcgcgtggccaccgtgctcaacgagaagggcctcgacttcgagatcgtcaccgtcgacctcaccaccggcgcccacaagcagcccgacttcctcgccctcaaccctttcggccagatcccggctctcgtcgacggagcagaatccctcttcgagtcccgtgcgatcaacgggtaca

SEQ ID NO: 21882 - DNA, 231 bp, Zea mays
gaaagttacagttgtatttgttctaggtggtcctggaagtggataaggcacacagtgtgccaacatcgtggagcactttggattcacccatcttagtgctggagatcttctgcgtgcagagattaaatctggctctgagaacggaaccatgattgagaacatgataaaggagggaaagattgttccatcggaggtgactataaagcttttgcaggaggcaatgataaaaag

SEQ ID NO: 21883 - DNA, 225 bp, Zea mays
atgagccacgctgccattccgatccatcaggcgacacattgcaggcatggatagaagagatggcgtcttatgtgaaggatatagaccctgtgcaccttttagagatcggtgttgaagggttttatggtccgtcgactccagaacttctgcacgtgaacccagatgcttattctggaactattggaacagattttatcaggaaccatcatgcactgggaattgatt

SEQ ID NO: 21884 - DNA, 227 bp, Zea mays
ctccagcgctcctccgacggctacgacaccacacgaaccgggtgccaaaacctctccggctgccacgacggcatgtacttagggcactagctcttctctgctagacacgttagcacactgctacacctcccattgtacacctggatcctctccttacgcctataaaaggaaggtccagggccctcttacagagggttggccgcgcggggaaggacgagacggcgctc

SEQ ID NO: 21885 - DNA, 226 bp, Zea mays
cagtataagaagggcaaggatagcctgtctgcccagggaaagcgccgttatgaccgcaagcagtcaggatatggtggtcagaccaagcctgtcttccacaagaaggccaagaccaccaagaagattgttctgaagctgcagtgccagagctgcaagcactactcacagcacgccatcaagagatgcaagcattttgagattggtggagacaagaagggcaagggca

SEQ ID NO: 21886 - DNA, 226 bp, Zea mays
gcgcaccctccctacgctgagatgattgtagaggcgatcgctgccctcagggagaggaaggggtcgagctcggtggccatcagcaagtacgtcgaggggaagcacggcggcaagctccccaccaacttccgcaagcagctcaccgtgcagctgaagaagctcgctgccgccggcaagctgacgagggtgaagaactccttcaagctgccggccaccgacgccaagc

SEQ ID NO: 21887 - DNA, 244 bp, Zea mays
gagggtcacatgctggaaacaagcttgccatgcaggagttcatgatcctcccaactggtgcctcctcgttcaaggaggccatgaagatgggagttgaggtgtaccacaacctgaagagcataatcaagaagaagtacggtcaggatgcgacaaacgttggggatgaaggtggttttgcacctaacattcaggaaaacaaagaaggccttgaactattgaaggcagccatagaaaaggctggcta

SEQ ID NO: 21888 - DNA, 256 bp, Zea mays
ggaccgtggtcacattaaggtcttcgccgcggtgccgtcgaagcctggcgctgagtttcctaaagccgcccgctggtacgagaccgtctctgcggctgtagcctcaagattccctggtaaggctgttggtgtaaatctgcctgcgggatcagctcctgcggcagctgctcctgcggatgaggctgaggatgatgatgaccttgatctttttggtgatgaaactgaggaggacaagaaggcagctgatgagcgtgcc

SEQ ID NO: 21889 - DNA, 257 bp, Zea mays
gagttcagagactgcactgtcatcactgtcgctcaccgtatacccactgtcatggactgcagtatggtacttgcactgagcgacgggaaactggtggagtatgacaagcctacgaagctcatggaaaccgaaggtctctcttccgtgacctcgtcaaagagtactggtcgtacgcatcgaatgggaatatctagaagccacctccaaactacgaccgtttgcatgtttccactcgctgcatcctcttgaaaggagat

SEQ ID NO: 21890 - DNA, 202 bp, Zea mays
gcggccacagcctcgcgtcgtcgccccacagccacgcgagccttcgccgatccgcgagcgcagatcgccgaagccaggcggcggagagggagctcgaggcggcggaggaaggcgttcgccacagtcgctgatttccctggggaagagatgggtctctcctttgggaagctgtacagccgcctcttccgccaagaaggagatg

SEQ ID NO: 21891 - DNA, 228 bp, Zea mays
catccgctctccccaaatttcgaaagctctatggtgtgattgaagacgacctgcatgccgatgagaccatatctgttttagtaggaaacaattacaacacctacacttttggtggaaagaagagcatagtactgtcgactgcgtcctggctaggcggcaagaacgacttccttggacacgcttatattgtcactggttcgttgagcatcatcatatcgattctctttg

SEQ ID NO: 21892 - DNA, 253 bp, Zea mays
gtggacatgagtcatttgttgctggttcttctgcctttgttttatgttactgcattgctatttctctaaactagcttgtctaaatcaaagggtatttcctaagtctgtttaccgcagaagatattgtaaaatcatatcctttacagcaaaggtctgcaacaaaagtgacatttccacttgtctggacaaacacctgctgtagccatcctctctaccgcgagtcagagttgattgagtgaaattgtgcaggggt

SEQ ID NO: 21893 - DNA, 255 bp, Zea mays
agctgggctccgatatttgtgaggcaatcaaacttcaaactacccgctgatccttcagtaccgattatcatgattggccctgggaccggtcttgcacccttccgtggcttcttgcaggaaagacttgctcaaaaagaatctggagctgagcttggtcgatctgtgttcttctttggatgcagaaacagcaagatggacttcatctatgagggcgagctgaacaatttcgttgagcaaggagcactgtctgagctg

SEQ ID NO: 21894 - DNA, 256 bp, Zea mays
caaccaaaaggccaatgctcttctggggttcgagaagcttgtgaaggccaagacacaagtggttgctggcacgatgtactatctcactattgaagtgaaggatggcgaagtcaataagctctatgaagctaaggtctgggagaagccatgggagaacttcaagcagctgcaggaattcaagcctgttgaagagggtgctagcgcctaaggttgtggccacagcccggctctcgcaggatctgtcgtctccctgtgc

SEQ ID NO: 21895 - DNA, 251 bp, Zea mays
agcagctccaggaagggccaaagatcaggcgcgtgggcatggtcacgcaggggccgcccgcgcggagccacagcgagctggtgagcggctcgggagagaggatcggcgaggtgaccagcggagggttcagcccgtgcctgaagaagaacatcgctatgggctacgtgaagtcgggaatgcacaaggctgggacggagttgaaagtggtcgttcgcgggaagtcctacgacgccgtggtcaccaagatgccg

SEQ ID NO: 21896 - DNA, 252 bp, Zea mays
gcaacagccaagtgcaagtgatcgagctcccccctcctcatcagtcgctaggcacagcgcacttgcaggatggcgcaggtctctaagacgcttctccttgtggccctggtgttcgtgtcgtcggcggcggtggagctgtgccgcgcgatcgacttcgacgagcgggacctggcgtcggacgaggcgctgtgggacctgtacgagcggtggcagacgcaccaccgggtgcaccggcaccacggcgagaagggc

SEQ ID NO: 21897 - DNA, 253 bp, Zea mays
tgcacgccgacccggccgacctcagcctggtggtcaaggacgggtaccagtggcgcaagtacgggcagaaggtcaccaaggacaacccctgcccgcgggcctacttccgctgctccttcgccccggcctgcccagtcaagaagaaggtgcagcgcacgcacgacgaccccaccatcctggtcgccacgtacgagggcgaccataaccacggccagcccccgccacaggcgcaggcgccgcacgacggctccag

SEQ ID NO: 21898 - DNA, 254 bp, Zea mays
ggcacaggcatgaggcctggtgacattgtaactgcttccaatgggaagacaattgaggtaaataacactgacgcagaaggaaggctaacacttgctgatgctttggtctatgcttgcaaccaaggtgttgaaaagattattgatttggcaacgctgaccggcgcttgcgttgtcgcactcgggcctagcattgccgggattttcacgccgagcgacgagcttgccaaggaggttgccgctgcttccgaggtatc

SEQ ID NO: 21899 - DNA, 224 bp, Zea mays
ggcgaacgtcgcggcggacgaccccggggccgtcctcagggtgttccggcagatgaggagcgacggcgtggaccccgacctcgtcacctacaacacgctcatcttcgggctcgcgcgcgccgggatggtcgccaaggccagggctttcctggacgccatggccgcggagggccacctccccgagtcggtcacctacacgtcgctcatgaacgggatgtgcgtca

SEQ ID NO: 21900 - DNA, 247 bp, Zea mays
gtttgatgaagagacacttgtgaatgtgaacagcatcaagaggaataaaggaggcagccaaagatcaagtggttttagcaacgagtacattgtgataaccatattggttgctgctgagggagtacataaggtgccggttataaatagcagcaatgacttaaagacagctctacaaaagatgggtgccataccatcgcgcaaaatactggcagtcgaggtcctatggactccacaaaatgagaatgac

SEQ ID NO: 21901 - DNA, 247 bp, Zea mays
gtgaagaagtggcagacattaatcgaagcccatgttgatgtcaagacaaccgacaactacatgttgcgtttgttctgcatcggcttcaccaagaggcgcccaaaccaagtcaagagaacctgctatgctcaggcatcccagatccgtcagatccgccgtaagatggttgagattatgatcaaccaggcttctacatgtgacctgaaagaaccttgttcgaaggtcaatccagaagttaatggtaagg

SEQ ID NO: 21902 - DNA, 247 bp, Zea mays
gttcatcaagtcccacggcggcatcaccaccgagtccgcgtacccgtaccacgcctccaacggcacctgcgacggcgcgcgggcccggcgcgggcgggtcgtggcgatcgacggccaccaggctgtgccggccggcagcgaggacgcgctggccaaggcggtggcgcaccaaccggtgtccgtggccatcgacgcggggggccaggcgctgcagttctactcggagggcgtgttcacgggcgactgc

SEQ ID NO: 21903 - DNA, 249 bp, Zea mays
aagtagactcatttcgtcatgagtatagctcaatggcatgcacagtcgaatttgttgatgatgtgcagtcagctatcgatcacataaatcgttatggaagtgcacacacagactgcatcatcacaactgatagaagtgctgcagaggcctttctgcagcaagttgatagtgccgctgtgtttcataatgcaagcacaaggttttgtgatgggacgcgttttgggctaggtgctgaggttggcataagta

SEQ ID NO: 21904 - DNA, 223 bp, Zea mays
cccacgcgtccgtgccgttcagcttcatgaaggagcgtctcgagttcctcgacgcggacaagtgcgagtgcaagaacacgctcatcgagggaggcggcatcggcgtcgccatcgaaacggcgacgtcgcacatcaaggtggagcccgcggccggcggcgggagcgtggtgaaagtcgaatccacttacaagctgctgccgggcgtggaggtgaaggacgagat

SEQ ID NO: 21905 - DNA, 225 bp, Zea mays
gctacctactactcaagtatccatccttattgagtacagtgttgatccatggactcggaaggagttgtagcagcaaaggtggcagatgagactactaaaccggcaatccaagaagacggcgccgagagcaaggccgggatgactgatctgctgatgctgaccgacaagtcgcagctgcaggcgctggcgatgctgctgcggaacaacgaggagctcatgatgagc

SEQ ID NO: 21906 - DNA, 225 bp, Zea mays
gctcacactccggcagccgagcgatcgagctccccggtcgctagcacagccggccactgcacacgacggtgctggtaggttgcaagcacttgcaggatggcgcaggtcgctaagacgcttctccttgtggccctggtggtcgtgtcggcggtggagctgtgccgcgccatcgagttcgacgagcgggacctggcatcggacgaggcgctgtgggacctgtacgag

SEQ ID NO: 21907 - DNA, 228 bp, Zea mays
gactccagaggcgcacgtgttcaaggccgacgtaccggggctgaagaaggaggaggtcaaggtggaggtcgaggacggcaacgccgtcagatcagcggcgaacgcaacaaggagcaggaggagaagacggacacctggcaccgcgtggagcggagcagcgggaggttcctgcgcaggttccgactgcccgagaacgctaagacggaacagatcacggccgccatggaa

SEQ ID NO: 21908 - DNA, 229 bp, Zea mays
ggaggaacggcggacgcaacaagcacgggcgcggccacgtcaagtaagtacgctgctccaactgcgccaagtgctgtccaaaggataaggctatcaagcggttcttggtgaggaacattgttgagcaggctgctgtgagggacgtgcaggaggcttgtgtgcatgatggatatgttcttcccaaattgtacgcaaaggttcatcactgtgtctcatgcgcaatccatgc

SEQ ID NO: 21909 - DNA, 225 bp, Zea mays
ggcaacaacgccacgctcttcaactccggcgtcatggtcgtcgagccctccaactgcacgttccgcctgctcatggaccacatcgacgagatcacctcgtacaacggcggggaccaggggtacctcaacgagatattcacgtggtggcaccgcgtccccaggcacatgaacttcctcaagcacttctgggagggcgacacgaggccatgaaggcgaagaagaccc

SEQ ID NO: 21910 - DNA, 229 bp, Zea mays
gccatccctcactctcctccgaagccatcgtccccgtcccagcctccccggactccaggggcaaaagctgcagcgtcgagatggtgaaggggcgcacggggcagcgcgtgaggctctacgtccggggcaccgtccttggatacaagcggtccaagtcgaaccagtacgagactacgtcgctggtgcagatcgagggggtgaacaccaaggaggacgtcgcgtggtactg

SEQ ID NO: 21911 - DNA, 219 bp, Zea mays
aataaagcagctcctccgggggcggcgaactactcctcgtcgccaaaaccctagccctgcttctttgccatggcgagcagcgctagccaggcgagcctcctgctccagaagcagctcaaggatcttgcgaagaaccccgtggatgggttctccgccgggcttgtagacgacagcgacatcttcgagtggcaggtcaccatcatcggaccgcctgacacc

SEQ ID NO: 21912 - DNA, 221 bp, Zea mays
ggacgcggcgccaccgccacgctcttcgaggtggcgcacggcatgtccccgtggagcttgacgaagaacgacgcgctgtacaacaagaccttgaacgacgggtgcgcggcggacagcaacttcgccatggacacgctcctgagagagccccgggccgcgggtatattccgcgggctcggctcgctcgtggacgtcggcggcggccacggcgccgctgcgat

SEQ ID NO: 21913 - DNA, 221 bp, Zea mays
cttggccagtacgggtgaaaatatcgtattcttttataagatgaaaggtgactactaccgttacttggctgaatttagcactggaactgaaaagaaagctgcctctgatcagtcacttatggcctatcagcatgccatggttgtcgcctccagtgagctctcacctgctcaccaaatccggcttggccttgccctcaatttgtcggtcttcttttatgaga

SEQ ID NO: 21914 - DNA, 225 bp, Zea mays
gcttgttaagaagcttgccaagaagtaccatgcttttttggcatcagagaccatcatcaagcaaattccccgtctccttggtcctggtctcaacaaggcaggcaagttccccactctggtcactcaccaggaatccctggaatccaaggtgaatgagacgaaggctacagtcaagtttcaactgaagaaagtcctttgcatgggtgtcgcggtcggtcacctgtc

SEQ ID NO: 21915 - DNA, 216 bp, Zea mays
gaccagggaagccatgacttacactatgtcacaccactattctattttggggcttgacaggtcaaggtcagagccattttcagatgctgaaatcaagaatgctttcaggagaaaagcaatggagtatcatccagaccaaaaccaaaataataaagaggttgctgaggcaaaattcaaagaggttatggattcttacgaagcaataaaacgagaacg

SEQ ID NO: 21916 - DNA, 216 bp, Zea mays
cacactgcaacagccaagtgcaagtgatcgagctcccccctcctcatcagtcgctaggcacagcgcacttgcaggatggcgcaggtctctaagacgcttctccttgtggccctggtgttcgtgtcgtcggcggcggtggagctgtgccgcgcgatcgacttcgacgagcgggacctggcgtcggacgaggcgctgtgggacctgtacgagcggtgg

SEQ ID NO: 21917 - DNA, 217 bp, Zea mays
aaagactgtgacaacgaaaaggttagcaaaaaattggagtgtatattataagaccataaaactttgttgttccatattatagatcgggccacaaaaagttgtgtagctcattgaaattgttacagtggaaggcaacaaatggtatcactgacaaaagttttaatgagatcttaaaactcataaagaagttcttttcagaggagaacaaattgtcagc

SEQ ID NO: 21918 - DNA, 219 bp, Zea mays
aagaagctagcgcctccctagctctcgttgtcagcaatggccaccaccgccgcgtccagcctcctcaagtcctccttcgcgggctcccggctcccttcggccacgcgcaccaccgccccgtcgtccgtggccgtggccaccccgcgcgccggcgggcgccccatccgcgcgtccatctcctcctcccccaccccgccctacgacctgacgtccttccgg

SEQ ID NO: 21919 - DNA, 219 bp, Zea mays
cccagccgtcgtctgctgcgtactccgcctccagtttggtctgtttcttgcaagttgctcttgcggtagttcccccaactgtcaccatgcagaacgaggagggtaagactgtggacctctatgttcccaggaagtgctcggccacaaacaggatcatcactgccaaggaccatgcctctgtccagatcaacattggccacttggatgcgaatggcctgt

SEQ ID NO: 21920 - DNA, 219 bp, Zea mays
ggtgctggtcctggaacgaaggattatgtgcatgtgcgcatccagcagcgagacggcagaaagagtctgactacagtccagggtctgaagaaggagttcagctataacaagatcctcaaggatctgaagaaggaattctgctgcaatggtactgtagttcaggacccagagctaggccaggtcattcagctccaaggtgaccagcgcaagaatgttgct

SEQ ID NO: 21921 - DNA, 217 bp, Zea mays
tgcagggcaagcgcgagatcgccgccttcttcgcgcacgccacgcacgagaccgggcatttctgctacatcagcgagatcaacaagagcaacgcctactgcgacccgaccaagaggcagtggccgtgcgccgcggggcagaagtactacgggcgcggcccgctgcagatctcgtggaactacaactacgggcccgcggggagggccatcggcttcga

SEQ ID NO: 21922 - DNA, 219 bp, Zea mays
ggcggtcctgcgctacgccaactccgccggcacggcgccgggtcccctccacggcggccccaccatccagatcgactggtcgctcaaccaggcccgctcggtccggtggaacctgacggccagcgggccgcggcccaacccgccagggtcgtaccactacggcctggtgccggtgacccggaccatccgcctggccaactcggcggcgaccatcggcgg

SEQ ID NO: 21923 - DNA, 219 bp, Zea mays
ggctactttggttatgtcaagtgtagttaagaatggtggacttgcacctggtggtttcaactttgatgccaaattgcggagggaaagtactgatgttgaggacatgtttcttgtccatatctccggaatggacaccctggcacgtggcctccgcaacgttgccaagctgattgaggatggttccctagatgatcttgtccgcaagcggtaccagagctt

SEQ ID NO: 21924 - DNA, 285 bp, Zea mays
accgtactgagtatcagctgattgatatttctgaggatggatttgtgagccttcttacttcagatggcaacactaaggatgatcttagactcccaactgatgagactcttgtggcccagattaaggaagggttcgatagcgggaaggatcttgttgtgactgtccagtctgcgatgggggaggagcagatctgcgcgttgaaggatgttggccccaagtaacttccttggctttggagacggaaccctactgtatctcaacttaaatcggaaaagaagtgtatca

SEQ ID NO: 21925 - DNA, 297 bp, Zea mays
  unsure (1)..(297): unsure at all n locations
acgagcccgaggtgatcgccgtgaactccgtgttcgagctgcaccggcttcttgcgcagccggtgccctcgagaaggtcctgggcacggtgcgcgcggtgcggccgaggatcgtgaccgtggtcgagcaggaggccaaccacaactccggcacgttcctcgaccgcttcaccgagtcgctgcactactactccaccatgttcgattctctcgagggcgccggcgacggcatcggccagtacaccgacgcctcnccggcagcggccggcggcacggactacgtcatgtcggaagtgta

SEQ ID NO: 21926 - DNA, 279 bp, Zea mays
gtgaagaacaccgtgacccaggtggccaagaaggtgctgaccatgaacccctcgggcgagctctccagcgcccgcttcagcgagaaggagctgatcagcgccatcgaccgcgaggccgtgttcacgtacgcggaggacgcggccagcgccagcctgccgctgatgcagaagctgcgcgccgtgctggtggaccacgccctcagcagcggcgacgcggagcgggagccctccgtgttctccaagatcaccaggttcgaggaggagctcgcgcggtgctgc

SEQ ID NO: 21927 - DNA, 132 bp, Zea mays
gctgcattagttttggtgagtgggcagaaggctcaagagcttggccttcaagtccttgcaaggatcaaaggttatgctgatgcagctcaagctccggagctttttacaaccactccagcacttgcaatacca

SEQ ID NO: 21928 - DNA, 293 bp, Zea mays
ggattatctaccgattcttgccgcctgactctgaatggtcataccaacgagatgaattttgtagggctatctgttcatgatggatacataacttgtggctctgaaaccaatgaagagttttcttactacaaaactttccccatgccaataacttctcataggtttggttctattgacccgataactggacaagtgacaaatgaagacaaccagcaatttgtgtccagtgtttgctggagagggaagtcaaacatggtagtggctgccaactccagtggtagcatcaaagtgct

SEQ ID NO: 21929 - DNA, 107 bp, Zea mays
agtaaacgtggtgttgctctttcctttggcgcagatgtgactaagaagtttttacaggaaaataacctggatcttattgtccggtctcatgaagtacaggatgaagg

SEQ ID NO: 21930 - DNA, 289 bp, Zea mays
caaatccggcctccttcactcgtgccaagaaatgggttcaagaacttcaagctcaaggaaatccgaatacaatagtggctcttgctggtaacaaggttgatatgctagatgcgaggcacgtggcagtagaggaagcaaagacgtatgcccaggagaacggtctcttcttcatggagacatctgctaaagctgcaatcaatgtgaatgacatattttatgagcttgcagagtgcttgcttgaggggcaagacgctctaagtccacaggctggaattgttctgaatcagag

SEQ ID NO: 21931 - DNA, 74 bp, Zea mays
agttgccagagcaattcttgagaaccctaatgacaacaccaaggttcacttaatttatgctaatgtcacatatg

SEQ ID NO: 21932 - DNA, 272 bp, Zea mays
gttacaaatacagtaccggcagtgagagaaactgttgagcaatattgctacaactccaaccaaccaggtgacaaatatgtgtgacagttctccaactgtgtttgatttgaaactatgtcaatgttgatgtcaaagaccatttacatgtcgaattacgacgatattatgtgaatgtcgaactatgaaaatactatgtgtaacggatgttggaactatttgttgatgttaaagacttgttgtaatgtgtttgtgaatgtgagttcatgtttgag

SEQ ID NO: 21933 - DNA, 289 bp, Zea mays
ctagcacagctagcgcctgctccccttcgcctgtgatcatgtcttgcagcagcggcaagtgcgactgtggctccagctgctcctgcggcagctcatgcaactgcatgtcccctaacggtggagaccgccgccgccagcagcatcaagaccacggtcctcgccgcgccgaccaccaaggccagcgccggctgcttcgaggcggccaccgagggcgtcggctgcgactgcaacacctgcaactgcggcaccagctgcggctgctcctgctgcagctgcaactgagccggtc

SEQ ID NO: 21934 - DNA, 291 bp, Zea mays
cttcttcagccagactggtgctgggaagcacgttccccgtgcaatcttcgttgatctagaacccactgtgatcgatgaggtgcgcactggcacgtaccgccagctcttccaccctgagcagctcatcagtggcaaggaggatgccgctaacaatttcgcccgtggccactacacaattggcaaggagattgttgatctgtgccttgaccgtatccgcaagcttgctgacaactgcatcggcctccagcgcttcctggtcttcaatgccgttggtggtggcactggctctgg

SEQ ID NO: 21935 - DNA, 280 bp, Zea mays
ggaggtcaccggtgggcctgagattcccttccaccccggtagggaggacaagcctcagcccccacctgagggccgccttcctgatgccactaagggttctgaccacctgaggcaagtttttggcaagcagatgggcttgagcgatcaggacattgttgccctctctggtggccacaccttgggaaggtgccacaaagagcggtctggtttcgagggggcctggactacaaaccctttggtctttgacaactcttacttcaaggaacttctgagtggtgat

SEQ ID NO: 21936 - DNA, 129 bp, Zea mays
gtgaaggccgggctccagttccccgtcggccgcatcgggcgctacttgaagaagggccgctacgcgcagctagtcggcaccggagcccccgtctaaatcgccgctgtcctcgaatacctcgccgctgag

SEQ ID NO: 21937 - DNA, 244 bp, Zea mays
gcaagacccccaaggccgggctcgtcgccgcccgcccccacgtcaaggcctggtgggaggccatcgtcgcccgccccgcgttccagaagaccgtcgccgccatccccttgcccccgccgccctcctcctcggcttgacctcgccttgcgttgcgccgttgcctgggtcgcggatgcgtcggagccccgagtcgaataaaagaggcagcatcctgtcttgcatttgctgctgcgccatgtgttaa

SEQ ID NO: 21938 - DNA, 177 bp, Zea mays
ctgatacaactgctgaggcacttaaggcaatactgttgctgtctaacattccttcagaacttgtcggggatccaataaaacaagaacgactatatgatgccgttgattgcctcctttctttcgtgaacaaagatggtacattatcatcagctgaatgtagacgagcaacttcatggg

SEQ ID NO: 21939 - DNA, 175 bp, Zea mays
caggaaaagacaccttggcttatcgttctcatgcattctcccatgtacaacagcaacgaggcaacgagagtatgagggctgctttcgagaaatggtttgtgaagtacaaggtcgacttggtgtttgcagggcacgttcatgcttatgagagatcataccgcatttctaatgtcaa

SEQ ID NO: 21940 - DNA, 239 bp, Zea mays
catcgacaagctgcgggcgcactacgacgtcctcgccgacgccgtcgccgacccggccgccaacgtcgagggcctcgccgcggaggcgtccgagtacaaggccgccatgtggcagtactgctacaaccagcggacgcctccgcgcgggcgcactcccgcgcctactcccaggcgctcaagctggagggcatcgacttcgccgagctagtgcggaggcaccagctccggctccggtacgg

SEQ ID NO: 21941 - DNA, 140 bp, Zea mays
ggaggaggctggctccgactacgagatcgtgcccatcaacttcgccaccgccgagcacaagagccccgagcacctcgtccgcaacccgtttggtcaggttccagctctgcaggatggtgacttgtacctcttcgaatcac

SEQ ID NO: 21942 - DNA, 230 bp, Zea mays
gatggcatcttggaggatgttgtctacccagctgagattgtggggaagcgtgtcagataccgtctggatggttccaagattatcaagattttcttggacccaaaggagaggaacaacactgaatacaagctggagacctgcactgcggtctaccgcaggctgtgtgggaaagatgtggtctttgagtaccctatgaccgaaaatgcataaatatgatgccctctggatat

SEQ ID NO: 21943 - DNA, 229 bp, Zea mays
ccacaccgggcacaccccccgagctcagcttagctccactccagctccaatcacagtcgtgaccagagcgcgagagctagctagagggccgtgaaaatgccgatcaataggatcgccctggggagccaccaggaggtgtaccacccgggcgccctcaaggcggcgttcgctgagttcatctccaccctcatcttcgtcttcggcgaccagggctccggcatggccttca

SEQ ID NO: 21944 - DNA, 255 bp, Zea mays
gagaagtacctcgacgagaagaccatcttccacctcaacccgtccgggcgcttcgtcatcggcgggccccacggtgacgccggcctcaccggccgcaagatcatcatcgacacgtacggcggctggggagcccacggcggtggcgccttctccggcaaggaccccaccaaggtggaccgcagcggcgcctacgtggccaggcaggccgccaagagcatcgtggccagcgagctcgcccgccgctgcctcgtgcag

SEQ ID NO: 21945 - DNA, 238 bp, Zea mays
ttcacctccgacgacgtgggcctcgacgccgaccgctgcaaggtgctggtgaacatcgagcagcagtcccccgacatcgcgcagggcgtgcacgggcacttcacgaagcggcccgaggagatcggcgcgggcgaccagggccacatgttcgggtacgccaccgacgagacccccgagctgatgccgctgagccacgtgctggccaccaagctgggcgcgcgcctcaccgaggtgcgca

SEQ ID NO: 21946 - DNA, 249 bp, Zea mays
gtgacggttgctctagatccgttcatcctggtggttttgtgaggtcgaaagcggcgagcgaattagaagatgctggacaagctgtgggacgacgtggtggccgggcctcgcccggagacgggcctcgagaagctccgcaaggccaccaccgcccgcccgctcgtcatcaacaaagacgcggacggcggcagctacaagcgggcgcagtcgacgccgtcgaccccgacgacgccggtgacgccgtcgtcg

SEQ ID NO: 21947 - DNA, 249 bp, Zea mays
atctgcttcagccttcagctagccccaagtttagtcggccgatcgatcactgaagtagtaatggcctccgccaacagctggaccctcgagatcgcgtcgccggtggccccgcagcgcctgttccgcgccgccgtgatggactggcacaccctggcgcccaaggtcgcctcccacgtcgtcgccagcgcgcagcccgtggagggcgacggcggcgttggcagcgtcaggcagttcaacttcacctcagtc

SEQ ID NO: 21948 - DNA, 246 bp, Zea mays
gcggcacggacctggaccacggcgtggcggcggtcggctacggcgtcacgacgacggcacgccctactggatcgtcaagaactcgtggggcccttcctggggagagggcggctacatccggatgcagcgcggcaccggcaacggcggcctctgcggcatcgccatggaggcgtcctttcccatcaagacctcgcccaacccgtcgcgcaagcccgccgcgcgctcatcaccagggacgcctcttcc

SEQ ID NO: 21949 - DNA, 246 bp, Zea mays
ctcacacactgcaacagccaagtgcaagtgatcgaactcccccctcctcatcagtcgctaggcacagcgcacttgcaggatggcgcaggtctctaagacgcttctccttgtggccctggtgttcgtgtcgtcggcggcggtggagctgtgccgcgcgatcgacttcgacgagcgggaactggcgtcggacgaagcgctgtgggacctgtacgagcagtggcagacgcaccaccgggtgcaccggca

SEQ ID NO: 21950 - DNA, 263 bp, Zea mays
aacgcatcgtcgtctcccacaacacgctccactaaccctagcgacagcctcgggtcgtcgtttgatccccgcggggagctctagttccgccaagcgtgcgtaccggcgtccggatccgggaccgaagatgacggagtccctggtgcggaacaagccggggatggccagcatcaaggagatgccggtggtgcaggacgggccgccgccgggcggtttcgcgcccgtgcgcttcgcccgccggatccccacctcggggcccagcg

SEQ ID NO: 21951 - DNA, 248 bp, Zea mays
aaatcttccgttctcaaaccaacctaggcaattcgccgcagcctctcaccctcgcgagtcccgacctcccgcagccgccgcacagatggcacccaaggcggagaagaagccggcggccaagaagcccgcggaggaggagcccgcgacagagaaggtggagaaggctccggcggggaagaagcccaaggccgagaagcgcctcccggcgggcaagtccaaggagggcggcgagggcaagaaggggaaaa

SEQ ID NO: 21952 - DNA, 248 bp, Zea mays
gtctccctggtgcgcgcgctgctctacatcgtggcgcagtgcctcggcgccatctgcggcgtcggcctcgtcaaggcgttccagagcgcctacttcgacaggtacggcggcggcgccaactcgctcgcctccggctactcccgcggcaccggcctcggcgccgagatcatcggcaccttcgtgctcgtctacaccgtcttctccgccaccgaccccaagcgcaacgcccgcgactcccacgtcccggt

SEQ ID NO: 21953 - DNA, 248 bp, Zea mays
atgaactggatgagaagacaagtgcttctctgaaattcacggtactgaacccaaaaggacgcatctggacaatggttgcaggtggtggtgctagtgtcatatacgcagacactgttggtgatttgggatatgcttcggagctaggaaattatgcagagtacagtggagctcccaaggaggaggaggttctgcagtatgctagagtgcttttggattgcgctacctctgatcctgatggccgtaagaga

SEQ ID NO: 21954 - DNA, 246 bp, Zea mays
atccgacctgatgaaggatattacatgggaggcgctttcgttttcacctttcaagtgtccccatcttatcctcatgatcctccgaaggtcaaatgcaagaccaaggtgtaccatccaaatattgatttggaaggcaatgtctgtctgaacattctgcgtgaagattggaagcctgttctcaacatcaacaccgttatttatggcctgaatcttctttttacgcaaccaaacgacgaggatcctttg

SEQ ID NO: 21955 - DNA, 249 bp, Zea mays
gtagtgtagttccggagagggttggggagagtagtagtgatccgcaatgtcgacggaggaggctgttgtggctgaggtcccggtgaccgaggtgccagcggaggtcccggcggcccaggtggccgaggcgcccaaggcgaagaaggcgcccaaggagaagaaggcgcctaaggagaagaagccgtccgcggcgaagaagccggcggcgcaccctccctacgctgagatgattgtagaggcgatcgctgc

SEQ ID NO: 21956 - DNA, 243 bp, Zea mays
gaccactggatcttctgggtgggccctctcgtgggcgctgccatcgcggccttctaccaccagtacatcctccgggctggcgccatcaaggccctcggctccttcaggagcaacgcgtgatgagcggggcttggctgtggagcaatggcgggcgacctacgggcgggggaagtcgtgagcgaggagaatgacatcatcgatcgacttgggtgccggtggttggttcgggtcgcattttttgtt

SEQ ID NO: 21957 - DNA, 242 bp, Zea mays
gaaaattcttgatgtgcttgctttcaagactttgaagcataaaggtcaagcttgggttgtcttcgaagatgtcgcatcagctactgaggctctgaagaggatgcagggctttcccttctatgacaaaactatgagaattcaatatgccaagaccaaatcagatattatagcaaaggctgatggcacctttgtacctcgagaaagaagaaagaggactgatgaaaaatctgaaaagaagcaga

SEQ ID NO: 21958 - DNA, 239 bp, Zea mays
ctcaagatatccgcacaatgattattggccgattgcttgctggaattggtatcggggtctcatctgctcttgtacccctttacatatctgagatctcaccaactgaaattcgtggaacacttggtaccgttaatcaactttttatttgcattggaattcttgcagctttgttagctggattgcctctggcaggaaatcctgcctggtggaggacaatgtttggaattgctgtagttcca

SEQ ID NO: 21959 - DNA, 241 bp, Zea mays
caaaatcttattttatgtgggattgatcaagcgtggagagaacccataactacagctcttgcacaagctggcctgctggaaccgaaggatgtcgaccccctgaatttaactgccatggcatgccctgccttgccactgtgccctttggcacaaacagaagctgaacgggggatcttacccattcttaaacgaattagagcagtcttcaataaggttggtatcaaggattcggagtctgtgg

SEQ ID NO: 21960 - DNA, 242 bp, Zea mays
atggacttctattgccacatactacaaccgaccaagagcttcagcatctgaggaattgcttgcctgatcaagtggtggttcagcgcattgatgagaggttatctgcccttggcaattgcatagcctgcaatgaccatgttgcacttacgcaccctgaccttgacaaggagactgaggagttcattgcagatgtgcttggggtcgaggtgtttaggcagactattgctggaaatatccttgtg

SEQ ID NO: 21961 - DNA, 229 bp, Zea mays
aatctatgaagagaacaaggatgaggatggattcctctacatgacctacagtggtgagaacaccttcgggctcctctagatggctcaccacaatcgggtctgccttgcccttgcttccctactgatgccctgcctcgtgtaaataagacctgccaagcaattgtgtatattctggtttcctcgctcaactgctggaagtctaaaacctaccttatcatggacaccgttt

SEQ ID NO: 21962 - DNA, 237 bp, Zea mays
cttcatctgtgagtttttctatgatgcccaagagaaggtcctcacgtatgctgacttcatcttcggcaatgaaaccgaggcaaaaatcttcgccaaagttcgaggatgggagactgagaatgtcgaggagattgctttgaagatctctcagcttcctttggcttcaggcaagcaaaagaggattgctgtgattactcaaggtgctgatccagtggttgttgctgaggacgggaaggt

SEQ ID NO: 21963 - DNA, 237 bp, Zea mays
ctgcaacagccaagtgcaagtgatcgagctcccccctcctcatcagtcgctaggcacagcgcacttgcaggatggcgcaggtctctaagacgcttctccttgtggccctggtgttcgtgtcgtcggcggcggtggagctgtgccgcgcgatcgacttcgacgagcgggacctggcgtcggacgaggcgctgtgggacctgtacgagcggtggcagacgcaccaccgggtgcaccggc

SEQ ID NO: 21964 - DNA, 164 bp, Zea mays
aaaaaacatgtcgttgttgaaggggagcttactaaggaggccatcatggaattggcacggaatgaacagttaaaggagcgccacgaaatggagaaaaaactgcagaagtttgcaaaaacaatggattatctggaaagggaaaaaaggccggaagaggcaccact

SEQ ID NO: 21965 - DNA, 236 bp, Zea mays
tgattttttggcctctctcccagagaatgactgccgatatgcgctgtatgattttgattttgttactggggagaatgtgcagaaaagcaagattttcttcattgcctggtccccatcgacatcccgcatacgtgctaagatgctgtactccacgtcgaaggaccgcatcaagtacgagcttgacgggttccactacgaaatccaggccaccgacccatcggaggttgacatcgagg

SEQ ID NO: 21966 - DNA, 239 bp, Zea mays
catggtgaagggacgcacgggacagcgcgtcaggctctacgtccggggcaccatccttggatacaagaggtccaagtcgaaccagtacgagaccacgtctctcgtgcagatcgagggggtgaacaccaaggaggatgtcgcgtggtacgctggcaagcgcatggcgtacatctacaaggccaagaccaagagcaatgagacccgctacaggtgcatctggggcaaggtcacccgtccgc

SEQ ID NO: 21967 - DNA, 236 bp, Zea mays
ggaagacggcacggagtggatagtggaccagcttccggccgtgggacgcgtacacgtcggacacgtccatcgacatagggaagcaccacgcgccgacgacgctgcccgacaaggcggcgtacctgatcgtcaagtcgctgcgcgtgcccatggacctcttcttccagcgccggcacgccagccacgcgctgctgctcgagacggtggcggccgtgccgggcatggtgggcggcatg

SEQ ID NO: 21968 - DNA, 160 bp, Zea mays
acaaaagcaattgctgagaagatcaaggactggagcaacgtattgttgcctatgaaccagtttgggctattggaactggtaaagttgccaccccagctcaggctcaggaagtgcacgcctccctgagggattggctaaagaccaatgccagccctgaggt

SEQ ID NO: 21969 - DNA, 234 bp, Zea mays
ctagtgacggttgctctagatccgttcatcctggtggttttgtgaggtcgaaagcggcgagcgaattagaagatgctggacaagctgtgggacgacgtggtggccgggcctcgcccggagacgggcctcgagaagctccgcaaggccaccaccgcccgcccgctcgtcatcaacaaagacgcggacggcggcagctacaagcgggcgcagtcgacgccgtcgaccccgacgacg

SEQ ID NO: 21970 - DNA, 223 bp, Zea mays
agcagaagcagtagaggcgaccttttttttctgttctctgatcgagctctgaagaccggggatggcgtcctgggcggctctcctggcgctgctgctctcggcgttctcggcggcggcgcagctggacgagaggttctacggccagtcgtgccccagcgtggaggacgtcgtgcggaaggagatggtgcgcgcgctctccgtcgcgcccagcctcgccgggccg

SEQ ID NO: 21971 - DNA, 223 bp, Zea mays
ggcgatcgtgtacgccctggtcgcgcggggcacggtggtgctggccgagttcgccgccgtctcgggcaacgccggcgccgtggcccgtcggatcctcgagaagctgccgcccgacgccgagtccaggctgtgcttcgcgcaggaccggtacatcttccacgtcctccgatccgacgcggccgccatcaccttcctctgaatggcaacgacaccttccgaagaa

SEQ ID NO: 21972 - DNA, 206 bp, Zea mays
ggcgcctcgacttcgccaagggctactcccccgaggtcgccaaggtctacgtcgacgccacggccccgaccttcgccgtcgccgaggtatggaacagcatggcgtacgacggggacaacaagcccgagtacgaccaggacccgcaccggcaggcgctggtggactgggtggacaggataggcgggccgcatcgcggccaccgtctt

SEQ ID NO: 21973 - DNA, 159 bp, Zea mays
gagaaatatgaaccccactacgactacttccatgacaaaaataatcaggccctgggcggccatcgcattgccactgtgctgatgtacctatcaaatgtcgagaagggtggagagaccatcttccccaatgcagaggggaagctattgcaacccaaggac

SEQ ID NO: 21974 - DNA, 230 bp, Zea mays
gatcttgtgaccctccctcagccgcgtcgcgtcgcatcctacgatccaaagctctctctgctcgcagccatggcgaagaactacccgaccgtgagcgccgagtacagcgaggctgtggagaaggccaggcgcaagctccgagccctcatcgccgagaagagctgcgccccgctcatgctccgcctcgcgtggcactccgcggggacgttcgacgtgtcgtcaaggaccgc

SEQ ID NO: 21975 - DNA, 229 bp, Zea mays
gtggctctcaaaggatttgccaagttcttcaaggaatccagcgacgaggagagggagcacgctgaaaagctcatggagtaccagaacaaacgtggaggcagggtgaggctccaatcgattgtgacgcctttaaccgagtttgaccaccctgagaaaggagatgctctgtacgctatggagctggctctggccctggaaaagctggtcaatgagaagctgcacaacctgc

SEQ ID NO: 21976 - DNA, 226 bp, Zea mays
actacttccccccgaatatggccatggcggacgtgctcctccggctggtgtccgtcaaggcccggcggctcaaccagaggtggaacgacgtgttcgacgagctcatccaggaacacgtgcagagcaggccctccggcgagagcgaggagagcgaggcggacttcatacacgttctgctctccatacagcaagagtacggcctcactacggacaatctcaaggccat

SEQ ID NO: 21977 - DNA, 94 bp, Zea mays
gtagattgtcatcaagacctgtggcactaccaagctcctgctcaccattccaagaatccttgagcttgctgaagagctgtctatgccacttgct

SEQ ID NO: 21978 - DNA, 231 bp, Zea mays
gtttcaaccaagctattgaattatctgctgagattctagcaaatgtgaaattcattcaagaaaagaagttaattggcaagtattttgaagagatcagtcaggatactgggaaatatgtctttggtgttgatgacactctgaaggctcttgaaatgggtgctgtcgagaccctgaatgtgtgggaaaatctggatatcacagatatgggatcaagaacagtactactgggga

SEQ ID NO: 21979 - DNA, 92 bp, Zea mays
aagttaggagccatgcctgaaggtcttaaagatgcagagaagtgtcttgaactagaccccaccttcactaaagggtacacaaggaaaggtgc

SEQ ID NO: 21980 - DNA, 249 bp, Zea mays
gagacagacggttgctgttggagttatcaagagtgtggagaagaaggacccgaccggcgccaaggtgaccaaggcggctgccaggaagaaatgatgcgatcctgcgcctgctttagcaatacctagttttcatcatcacaagttttgtgtgtgatcggttgctgttatcgtgtgaactgttgagatctgttagcatgtgcacttttagctatttatttggtaccatcttgcgattgcaccttttgcaat

SEQ ID NO: 21981 - DNA, 240 bp, Zea mays
cagagcgaggcgacgccgaggcacctcatctccggcgaagggaaatggcgaccgttccaggggatctgatctggcagattgtgaggaagaacaactccttcctggtgaagcagtttggcaacggcaatgccaaggtgcagttcaccaaggagcccaacaacctctacaatgtacactcctacaagtactctggcttagcaaacaagaaaactgtaacgatccagccagctgctggaaagg

SEQ ID NO: 21982 - DNA, 239 bp, Zea mays
ctatcatcatgtttgatgtaacctcaaggcttacttacaagaatgttcctacgtggcatagggatctgtgcagggtctgtgaaaacatccccattgtcctctgcggtaataaggttgatgtgaagaacaggcaggtcaaagccaagcaggttactttccacaggaagaagaatctgcagtactatgaaatttctgccaagagcaactacaactttgagaaacctttctggactttcaag

SEQ ID NO: 21983 - DNA, 234 bp, Zea mays
ggcattgttgaagttgcaaagataatttatggagtgcatgacgaagcgaaggacaaagcttttgagttggagttgagctggatctgtgatgaatcgaaccgtcagcatcagaaggttccaaatgaactgttggagcaggccaaagctgctgctcaggcagctcttgaggagatggatgctgactaagaaacaggacgatttgcccagacttggtgtttttggtgctgttgaaat

SEQ ID NO: 21984 - DNA, 71 bp, Zea mays
cgcatggaacgaccactggatcttctgggttggccccttcatcggtgctgctcttgccgccatctaccacg

SEQ ID NO: 21985 - DNA, 224 bp, Zea mays
gaagaacaatgccattgtctgcaacattggccactttgacaatgaaattgatatgctcggccttgagacctaccctggcgtcaagcgcatcaccatcaagccccagactgaccgctgggtgttccccgagaccaacactggcatcattgtccttgctgagggtcgcctgatgaaccttgggtgtgctactggccatcctagctttgtcatgtcctgctcattca

SEQ ID NO: 21986 - DNA, 231 bp, Zea mays
aagttaggagccatgcctgaaggtcttaaagatgcagagaagtgtcttgaactagaccccaccttcactaaagggtacacaaggaaaggtgcaattcaattcttcatgaaagaatatgacaaggccatggaaacctatcaggctggcctgaagcatgacccgaaaaaccaggaactgcttgatggtgttaggaggtgcattgaacaaattaacaaggctaacagaggtgaa

SEQ ID NO: 21987 - DNA, 237 bp, Zea mays
cgtctggtcgttcttggacgtgtttgagttgttggctggctactactcgcgatacggcctctaccatgtcgatttccaggacccggagctgccgaggacgccaaaactctctgcgctgtggtacggcaagttcttgaagagtgaaatcgacgacataatagagaacgttgtcgtcagcgctactgacgacgcgcgctcgcatgctgctgaacaatgagttagattgctagcgagcag

SEQ ID NO: 21988 - DNA, 189 bp, Zea mays
tccaggacaaggagggcattccaccggaccagcagcgcctgatctttgctggcaagcagctggaggatggccgtaccctcgccgactacaacatccagaaggagagcaccctccacctggtgctccgcttgcgaagtggtatgcagatctttgtgaagaccttgactggcaagaccataaccctggagg

SEQ ID NO: 21989 - DNA, 235 bp, Zea mays
cagtggcgtggtcgttagctactttgaatgggtgcagaacattcaaggtttcatgtgggatgaggagaaagttaatgatgaactagaaaagtacatgagcagtgcttttcaacacttgaaggccatgtgcaagtctctggattgcgaccttaggatgggggccttcaccttaggagttaacagagttgctcgtgccaccctcttgagaggctgggaggcatgagaccattgacca

SEQ ID NO: 21990 - DNA, 240 bp, Zea mays
gcaagcggccaccatggacacgcgcgtgggcagcctcaccgtgccgccggcgtcgctccccgtcttccctgtcacgttcatcatcatcctcacgcccgtctacgatcacgtcatcgtcccgttcgcgcgccgcgtcacggggaccgagatgggcatcacacacctccagcgtatcggcaccgggctggtgctgtccatcgtcgcgatggccgtggccgccgtcgtcgaggtcaagcgcaa

SEQ ID NO: 21991 - DNA, 239 bp, Zea mays
aaaaggatcagcgttataaggaacttggtttaagagacaaaatcacacttagtagtggccgttttgtccttggtaacaaatacgcacggacgtttatattcttctacagcatcggattgcatctccttgtatttacattactgtacagaatgtccgctttgagctatctcaacacaactcagcaagatgaaatcattctggatgctggtaatcagaggctaacgcacatgctttaggcc

SEQ ID NO: 21992 - DNA, 146 bp, Zea mays
cccttcaggatgtgtacaagattggtggtattggaactgtccctgttggacgtgttgagactggtgtcattaagcctggtatggttgttacttttgggcctactggtcttactactgaggttaagtccgttgagatgcaccatgag

SEQ ID NO: 21993 - DNA, 231 bp, Zea mays
caaatgttcgagggcatgggtctaggcggctgcatcgttcaggccaagttcaagctgcggtcgatcgtgaccatggtgctcttcttctgcctgacgacgccggtgggcatcgtggtgggcgtcgggatctcgtcggtgtacgacgaggacagcccgacggcgctggtcgtggatggcgtgctcaactcggtggcggcggggatcctcgtgtacatggcgctggtggacctg

SEQ ID NO: 21994 - DNA, 66 bp, Zea mays
gtcaagaagaggcgccgcgccaccaagaagccatactcgaggtccattgtgggtgcttccctagag

SEQ ID NO: 21995 - DNA, 114 bp, Zea mays
caaaatacttcatgagaagatccataagaaggcttacagtgatgaggagatcattagaattctcaccacacggagcaaagctcagctacttgcaacattcaatagctacaaggg

SEQ ID NO: 21996 - DNA, 223 bp, Zea mays
gaaagacgccggcgggaaaagcagtggcggcggcacaacaacaacagcggcggcggaggcaacggcaatgggaccgccaacggcagttccgcggtcgacaagcgcttcaagacgttgccgacgagcgagatgctgccgaagaacgaagtccttggtgggtacatctttgtctgcaacaacgataccatgcaggaggacctcaagaggcagctttttggattgc

SEQ ID NO: 21997 - DNA, 222 bp, Zea mays
acgacggggagatgtttctgcgacggatcctgaccggcggaggtggcctggcggcgctgagggcggcgcgcgccgtgaaggagacgacggggatcgtcggccttgaggtggcgcccaacgcgcgggaggttctcatcgggctctacacgcgtacgctcaaggagatcgaggccgtccccaaagacgagggctaccgcaaggccgttgagtccttcaccaatc

SEQ ID NO: 21998 - DNA, 224 bp, Zea mays
ggtggactgagggttcttaactcctactgggtgaatgaggatagtacctacaagtacttcgagatcatccttgtggacgttgcccacaaagccatcaaaaccgacccgaggatcaactggctatgcaaccctgtgcacaagcaccgcgagctccgtggcctcacctcagcaggcaagaagtaccgtggcctgcggggcaagggccacactcaccacaagaacag

SEQ ID NO: 21999 - DNA, 225 bp, Zea mays
tccgtcttcacccaatcagggatgaggatgccaagttcaagctctgcaaggtgaggtccgttcagtttggccagaagggcatcccctacctgaacacctacgacggccgtaccatccgctaccccgacccgctcatcaaggccaacgacaccatcaagatcgatctggagaccaacaagatcatggacttcatcaagtttgacgtcggcaacgtggtcatggtga

SEQ ID NO: 22000 - DNA, 227 bp, Zea mays
ggcaaggagcttgagaaagagcccaagttcttgaagaacggtgatgctggtatggtgaagatgattcccaccaagcccatggtggtggagacattctcgcagtatcctcccctgggtaggtttgctgtccgtgacatgagacagacggttgctgttggagtcatcaagagtgtggagaagaaggacccgaccggtgccaaggtgaccaaggctgctgccaagaagaa

SEQ ID NO: 22001 - DNA, 58 bp, Zea mays
aatcaagaagaagtacggtcaggatgcgacaaacgttggggatgaaggtggttttgca

SEQ ID NO: 22002 - DNA, 169 bp, Zea mays
ggacaatttgtgattttttctcctttatgccatgttttggaatttttgtagctgcctaggccttgtggtaatgtgctgctgtgggggttcattagtatgaagaggaagacgctgctggcgcggagtctttttctctttattagtattttgtttaaaactatgtatgacc

SEQ ID NO: 22003 - DNA, 222 bp, Zea mays
gtcaaatggcaagacgtctggaggctcaagtgagaaaagtgaaccaagtgcatcagtaggattagattcacgcaactttgacgagcttgttgtcaaaagcaaggacctttggattgtggaattctttgcgccatggtgtgggcactgcaagaaattggcagctgaatggaaaaaggctgcaaagaacttgaagggccaagtgaagctaaggcatgttgattg

SEQ ID NO: 22004 - DNA, 236 bp, Zea mays
ctgaggcgaggccaggtcgtgaagatcatcaggcccagcgagacggcgggcagatacggtacataccgctacgttgtatgacagaacgtcagaacactgaagaagaagaagagaaccacagatatgtcaaaagaaattcaagctacacataccccacgtgcttgcagacatcagtatcgcttttgtagcagcagccactggtaacgatctgtggctgatgtgtaagtggattgagt

SEQ ID NO: 22005 - DNA, 128 bp, Zea mays
catgtacgatgctgaaaacatagggaaacgtcaggtcatgatcaggccgtcatccaaggtgatcatcgagttcctgacggtcatgcagcgccatggctacattggcgagttcgagtacgtggatgacc

SEQ ID NO: 22006 - DNA, 236 bp, Zea mays
atggatatttggttatgatgaagaaaaaggatggggatgcagttgatgatgatgaggaggaggatggacctcgtgatccaggccctgatgggagaatagaagaagtatatcggtgtgaaagtcaaggtatcatttactggcaagggagaaactcagtctatggaacaattgtcaggcggacagaagacggtggtcgcactaacactgattttcgctatccagcgatgtgacccagc

SEQ ID NO: 22007 - DNA, 234 bp, Zea mays
aaaatattccagatttcattgtaggagtgaagaacaggaagatgaagatgtccggttttgggcaccgtgtgtataaaaactatgaccctcgtgctaaagtcataaggaaattggcatatgaggtgttctcaattgttggacgggatccacttattgaggtggccattgccctagaaaaggcagcgctgtcagacgagtattttatcaagaggaagctgtatccaaatgtgggat

SEQ ID NO: 22008 - DNA, 222 bp, Zea mays
cccaagacctcctcagacccgagaagcgcactgcggccatggacgccaccggcactggagctggagggaaggcgaagaagggagcggccggtcgcaaggccggcgggccgaggaagaagtcggtgacgaggtccgtgaaggccgggctccagttccccgtcggccgcatcgggcgctacctcaagaagggccgctacgctcacgcgtgcggcagcgttgccc

SEQ ID NO: 22009 - DNA, 126 bp, Zea mays
ggcgcctcgacttcgccaagggctactcccccgaggtcgccaaggtctacgtcgacaccacggccccgaccttcgccgtcgccgaggtatggaacagcatggcgtacgacggggacaacaagcccg

SEQ ID NO: 22010 - DNA, 226 bp, Zea mays
aaatcaacggagaagtctccaaaatctggtgggtcagtcccttgcaaatcatgcagcaagacattcaatagtgagatggctctgcaggctcactccaaggcgaacatgtgggccaaatgagttgcaggtccaactgagtccatgaaggagaagcatggtggccaagtgagtcgcaggtccattcgagtccatgaaggtgaagcatgggagatccaagcgagtctgg

SEQ ID NO: 22011 - DNA, 233 bp, Zea mays
gccaaggatgaggggtcgcaaaagggcctccaagatcaggaagctgttcaatcttgcaaaggatgacgacgtgcgcaagtacgtgaacacgtaccggcagacattcactaccaagaatggcaagaaggtgagcaaggcacctaggatccagcggcttgtgacccccttgaccctccagaggaagcgtgctatagttgctgacaataagaagaggatcgctaggaagaaaactg

SEQ ID NO: 22012 - DNA, 247 bp, Zea mays
ccctctcgctccagccgcttcacagcgccgccgctcgcctctccgaccgccgcgagaatgccgttcaagaggttcgtggagatcgggcgcgtggccctggtgaactacggcaaagactatggccgcctcgtcgtcatcgtcgatgtggtcgaccagaacagggcacttgtggacgcccctgatatggtcatgtgccagattaacttcaaacggctctcacttactgacatcaagattgacatcaaac

SEQ ID NO: 22013 - DNA, 240 bp, Zea mays
atttcagttttacagagaggtttgccgtgaagtatgctggtgctgcggccatgtacatggtatctaagaaactaaagaagaaatacaacataactgacgagcgtgcttcattgtatgatgctgccaatacatggatcgacgcactgaacggaagagatttcctgggtggctccaagcctaacttggcagatcttgccgtcttcggtgttctgagacctatccgatacttgagagcaggaa

SEQ ID NO: 22014 - DNA, 238 bp, Zea mays
ggcctgagtatgcccaaaagtacaagactctaatctacctcgcaggatctgcatctgctgaggtaattgctgatgtggctctctgcccttttgaagctgtgaaggtacgtgtgcagacacaacctggatttgctcgtggattgagtgatgggctccccaaatttgtccgatctgagggtgttcttgggctctacaagggaattgttcctctctggggtcgtcagattccttataccat

SEQ ID NO: 22015 - DNA, 183 bp, Zea mays
cttatctatctatagtatcgtgttaccgttcgcttctgtcaccgtgttagtgtccgttctacctttggattaggtgttggtaccccttttgttcgctttggttgctcccgctatgaaacgagacgagagaagaatgagcaaggtttttgttcgcaaaaaaaaaaaaaaaagaaaagaaagagg

SEQ ID NO: 22016 - DNA, 235 bp, Zea mays
caaaatcttattttatgtgggattgatcaagcgtggagagaacccataactacagctcttgcacaagctggcctgctggaaccgaagatgtcgaccccctgaatttaactgccatggcatgccctgccttgccactgtgccctttggcacaaacagaagctgaacgggggatcttacccattcttaaacgaattagagcagtcttcaataaggttggtatcaaggattcggagtc

SEQ ID NO: 22017 - DNA, 234 bp, Zea mays
ctcaaaagcttgtgaagcaggtgagatgggcaaggaggtggatgtgtccactctagaggtcggcggcgtccgtgaccgtgactacgcggaccctccgccggcaccgctgatcgacatcgacgagctcggcaagtggtccctgtaccgcgccgtgatcgccgagttcgtggccacgctgctgttcctgtacatcacggtggccacggtgatcgggtacaagcaccagacggacgc

SEQ ID NO: 22018 - DNA, 236 bp, Zea mays
ctcaaggacacgtctggcccttccctcaacatcctcatcaagcttatggcggttgaatcccttgtcttcgcccccttcttcgccgcccatggtggcattctcttcaaatggctctaagccagcgagagacgcaggataaaggccgtagttttgcaaggcgagtagagcagtatgtcagtaatacagcatctatggcatgtgcttttgctcgtccagttcatgagccccgttgtgta

SEQ ID NO: 22019 - DNA, 235 bp, Zea mays
gacgttgggaaggacgcatacgaagaggtagatttagtcaccaagggtggaaactacggatggcgtgtatacgaggggccatacatctttcacccgcaaaagtcgcctggagggaatacttcgcctgagtccataaacgcaatcttccccgtcatgggctacgaccattctgctgtgaacaaggaaatcgggtcagcatcgatcacaggcggatatgtgtaccgaggttccgctg

SEQ ID NO: 22020 - DNA, 237 bp, Zea mays
gaaagccatggcgattggttctctgatcgcctctactttcgccagatctagccatgccctccccgctgccgccgcttcggccatctctcaggctcccagatcccagcacaccgcatctcctctactctccggccttggagcagcggctcgtgctttcagctcaagggctctatggaagggagcattcgttgacgctttcctgtctagaattaagaagaacagagaaaatatgaatgg

SEQ ID NO: 22021 - DNA, 237 bp, Zea mays
gaaacctcagacactctacatatatcctctgcgcgtgtatctcgtcgtacagagccgaaagctggagcttccaatggcgggagacaacgacctgaaggtgctcggcgtgtggacgagcccgttcgtgatccgggtccgcatcgtgctcaacctgaagggcctggcgtacgagtacgtggaggaggacctcagcaacaagagcgcgctcctcctggggtccaacccggtgcacaagag

SEQ ID NO: 22022 - DNA, 240 bp, Zea mays
cgaggagaccctgtaccagaagaccaaggatggcaagccttttgttgatgtcctcaaggagggaggcgtcctccctggcatcaaggttgacaagggcaccattgaggttgttggcactgataaggagaccaccacccaaggccatgacgaccttggcaagcgttgcgccaagtactacgaggcaggtgcctgctttgccaagtggcgcgctgttctcaagattggccctaatgagccatc

SEQ ID NO: 22023 - DNA, 237 bp, Zea mays
ggtcgtttgggatccggcgcaatgagaagatcgcatgctatgtgacggtgcggggtgagaaggcaatgcagctgctggggagtggcttgaaggtgaaggaggacgagctgctgaggaggaacttcagtgacactggttgctttggatttggtatccaagagcacattgatcttggcatcaatgacacgaccttgacagtcaagatgctctttcaggagatggtcccagttactttac

SEQ ID NO: 22024 - DNA, 235 bp, Zea mays
ccatttctttagcaatgtttgtgagctcgatttagtgtttaattttcacaaggtttacctgatactagatgaatttattcttgctggggagctgcaagaaacaagcaaaaaggcaataattgagcgaatgggtgaactggagaagctggaatgacgaagaccaggaagatgctgccgcgtgtgttgtattccaatttgtattattcgtttcaggtgttttacatttgctctcctg

SEQ ID NO: 22025 - DNA, 234 bp, Zea mays
caactgatgaaggccttgaacaggacactgtggatgctgttaatcctgaggagactactgccgtggtggaggatgagaagaaacctgaagatgcaccacagtctgaggttgagaaggacaaggagggcgcggagaatgaagaagaagaaaaggaacctgaggataaggagatgactttggaggaatatgaaaaggtactggaggaaaaacgaaaagctttactctcccttaagg

SEQ ID NO: 22026 - DNA, 231 bp, Zea mays
ggaaacctcgaggaggcagcaatggtggatgtttggatcgaggtggaggctaaccagtacaccgctgcactgaatcccatcctcttccaggtcctcatcagtccgatgcttgggggaaccaccgaccagaaagttgtggatgagaaccttgagaagctgaagaaggtgctagaggtgtacgaggcacgcctgaccaagtgcaagtaccttgctggagacttcctcagcctc

SEQ ID NO: 22027 - DNA, 230 bp, Zea mays
ggacgggcagcctggcgtcgctgtcggagcatgagctgatcgactgcgacacggacgataacgggtgccatggcgggctgatggagaacgccttcgagttcatcaagtccttcggcggcatcaccaccgaggccgcgtacccgtaccgcgcgtccaacggcacctgcgacggcgatcgggctcggcgcgggggaggcgtcgtcgtggtgatcgacggccaccagatggtg

SEQ ID NO: 22028 - DNA, 230 bp, Zea mays
ggagcagaagtaactcacgtcaatctcaacgacaatagttgtgctggccttcagtacgccaagatgaagcttgtgtctctccagtaccatcctgagtcttccccaggtccgcatgattccgacacagccttcggtgagtttatagagctcatgaagagcaacagattgtgagggaggggagtactggcaaaggtcaacaattgtcttggtgctctctcgcagcaagctca

SEQ ID NO: 22029 - DNA, 231 bp, Zea mays
agctgaagctttgcagttacaggaatgggcttcagagcactgttcttctcattaccgtgcccccgaactatgggagtgtccaagtcatgctgacattgatgagaggacagatatatggtctttgggatgcactttgtatgctatgatgtatggaaagtctccatttgattatgagcttgatgagtcttctggtgaaagcttgcacagtgttattaaaaatgtacagattaa

SEQ ID NO: 22030 - DNA, 231 bp, Zea mays
tgagactaaccgtatgcttgagtctcaaaggtggattgaaagggaaaggtgaacttggtccaatgaaagagtaatttattccaagttcatctccatactcttattgcctttttactcttagttgacgatttttgtgaggcaatggggttttagggccaataatgatcccgttttggtgcttaatgccaaagggggagaaattaaaggccaaagcaaatggatcaactacca

SEQ ID NO: 22031 - DNA, 234 bp, Zea mays
agttcttccccaacaccaccaccgacatggacctcatcacgcccgcgctgctcgacaacaggtactacgtcggcctcgccaacaacctcggcctcttcacgtccgaccaggctctgctcaccaacgccacgctcaagaagtccgtcgacgccttcgtcaagagcgaaagcgcgtggaagaccaagttcgccaagtccatggtcaagatgggcaatatcgacgtgctcacgggca

SEQ ID NO: 22032 - DNA, 233 bp, Zea mays
ggactatttactgcacaaacattgacaagaaggtcactcaggcagatctgaaattgttctttgagtctatatgtggagaggtctttcggctgaggttgcttggtgactaccatcattctactcgcatcgcttttgtggaatttgtgatggcagaaagtgctaccgctgccctgaactgcagtggcgtgatactgggatccttgccaataagggtgagcccctcgaagactccc

SEQ ID NO: 22033 - DNA, 234 bp, Zea mays
agaaatacaacaattaacacatcttcagttgctccggaagattggtctgggagcttcccatgggatctggaggctgacgataccaggttcaatatatttggcatttcctcctaccgatcaaatcaacgagaaataattaatgcagtcatgagtggaagagatgttctggtcataatggcagctggtggagggaagagtctatgttaccagctcccagctgtacttcgtgatgga

SEQ ID NO: 22034 - DNA, 231 bp, Zea mays
gggcctcacgcaggcgtggatcagcaactgctacatggactacaccagcatcgtcgccgaggaccccgtgctgctccacgtctccggatccttcttcctcggcgacgccaacgtcgtcctcaaggccgtcagcggcgtcgccaggggcgtccaggtcgtcggcaacatcttcagcggcagggacaagggcgtcgacatcgtgcagctggacggcgccttcgccaccgtgga

SEQ ID NO: 22035 - DNA, 228 bp, Zea mays
cttagaggagcgaacatagaggtcaccgggacgtcattcctggagcttcatgaaggacagctcgtcagaactcgacaagatgtctgcatgcatcgaaagggtcgacacccttgtgcagcttctgaaagccagatatccgaacctgcctccaacttttatagatgttctaaaggtccagtacaatgtggatgtggggaatgcaatcgtggaggcatactctagggttct

SEQ ID NO: 22036 - DNA, 225 bp, Zea mays
cccaccagcaaatccccaattcctccgagttcgagcgaccatgtcggggcgtggcaagggcgggaagggtctgggcaaaggcggcgccaagcgtcaccgcaaggttctccgcgacaacatccagggcatcacgaagccggcgatccggaggctggcgaggaggggcggcgtgaagcgcatctcggggctcatctacgaggagacccgcggcgtgctcaagatctt

SEQ ID NO: 22037 - DNA, 227 bp, Zea mays
actgtgcccatttacgaaggatatgcccttcctcatgccattcttcgtttggatcttgctggtcgggacctcacagactccctcatgaaaattctcactgagaggggttactccttcacaacctcagccgagcgagaaattgtaagggacatcaaggagaagctagcatatatagcccttgactatgagcaagagttggaaactgccaagaacagctcttcagttga

SEQ ID NO: 22038 - DNA, 226 bp, Zea mays
ctcgaaagaaaacctcaatcaacaccagaagctctcgatcccaccgaggaagaagaagagagaggaatggagtccgaagagggagtcgtgatcgcctgccacaccaaggccgacttcgacgcccacatggccaaggccaaggaggccggcaagctggtgatcattgacttcacggcctcctggtgcggcccctgcagcttcatcgcgccactgttcgtcgagcacg

SEQ ID NO: 22039 - DNA, 228 bp, Zea mays
tgtctcaactgtacaagccaataattatccaatcacttgcacgcaatggcatcctgagaaagccatttttgagtggaggaaaccaatgatcccacacagcgaagatgcagtacaggttactcaacattttgccaatcattttatcagccaagcacgcaagtctccaaacaggcctcctgccgacaaagtgctggataacttaatttacaactacagtccgacatttac

SEQ ID NO: 22040 - DNA, 227 bp, Zea mays
aacgcgtccgtggccagcatcgtgacgccggccttcttcgacgcgctcctcgcgcaggccgccgcctcgtgctatgccaacggcttctacacccgcgacgccttcctcgccgccgccggctactacccggcgttcggccgcaccggcaccgtcgacgactccaagcgcgagatcgccgccttcttcggcaacgccaaccacgagaccataaagttctgctacatcaa

SEQ ID NO: 22041 - DNA, 227 bp, Zea mays
aaggagatcatgaaccacaggtcactgaggcatccaaacatagttaaatttaaggaggttgtgctaactcccacacatttggccatagttatggaatatgctgctggtggtgagctatttgaaaggatctgtaatgctggaagaattagtgaggatgaggcgagatttttcttccaacaactgatttcaggagttagttattgccactcaatgcaaatatgccatag

SEQ ID NO: 22042 - DNA, 272 bp, Zea mays
gcagaaattgctgctcagttggaacagtacccaaaagcaactgagatatttgaagcgatcgctcgtcagtcaatcaacaacaatcttcttaagtatagtgtcagaggaattcttcttaatgctggcatctgtcaactatgtagaggtgatcctattgccatcacaaattcattggagcgataccaggaaattgacccgactttctctgggacacgtgaatacaagcttttagctgatcttgctgcatctatggatgaaggggatgttgccaa

SEQ ID NO: 22043 - DNA, 87 bp, Zea mays
cacactacccggcgctcgcgcggctttctttcccaactccgacgaaggctagctacaccaccttgtgcgggctcgtctccatcgccc

SEQ ID NO: 22044 - DNA, 260 bp, Zea mays
acaagcccctgcgtctgcccctccaggatgtgtacaagattggtggtattggaactgttccggttggtcgtgtggagactggtgtcatcaagcctggaatggttgtcaccttcggtccaactggcctgaccactgaggtgaagtctgttgagatgcaccacgaggctctccaggaggcccttcctggtgacaacgttggcttcaatgtgaagaacgttgctgtgaaggatctcaaacgtgggtacgtggcctccaactct

SEQ ID NO: 22045 - DNA, 261 bp, Zea mays
ctactgaaagctatgatgactttttggcctctctcccagagaatgactgccgatatgcgctgtatgattttgattttgttactggggagaatgtgcagaaaagcaagattttcttcattgcctggtccccatcgacatcccgcatacgtgctaagatgctgtactccacgtcgaaggaccgcatcaagtacgagcttgacgggttccactacgaaatccaggcgaccgacccatcggaggtggacatcgaggttctccggg

SEQ ID NO: 22046 - DNA, 268 bp, Zea mays
attctatttgtggcagtcattccgtagctattcctcttgttctcgtgtttccctacttgtggcgtttcttccaatgtctccgtcagtacaaggatacaaaggagaagacatgtcttttcaatgctctcaagtactcgacagcaattcctgtgattttcctttccgctctcaagtatcatgtatatcctgatcaatgggttggcttctaccgccccctctggcttatctctagtgttgtaaattcactgtattccttctactgggatat

SEQ ID NO: 22047 - DNA, 216 bp, Zea mays
tttccaacgccttcgccctaccagccacgtcgtttcgaggccgatcgaccgagcagcagcagctggtggcaatggcggcggcggcggaggtcgtgctgctggacttctgggtgagccccttcgggcagcgctgccggatcgcgctggcggataagggcgtggcctacgagtaccgcgagcaggacctcctagacaatggcgagcttctcctccagt

SEQ ID NO: 22048 - DNA, 79 bp, Zea mays
cacgacttccgtccgagtctgagctcatctccacgcgccgccgccgccgctcgacgcccaccgtgtagcatggcggaat

SEQ ID NO: 22049 - DNA, 261 bp, Zea mays
agggaacctggaatcaagaaaaccttcagctctcctgtgtaggaggaaagttaacgaacagtgtagtaactgttcagctttgtgtttattcagttgttttgctgcttgaggttattcgtttctaggtgggggttggaatccttttcgccataaacctctcagtggcataaataagatggtttgcataagagtacttcatggataccgtaagggctactactgaaagagaaatgtttaagcagcatggtatgtgagccacta

SEQ ID NO: 22050 - DNA, 250 bp, Zea mays
caaatacgccaccaacagctgcgccgccggcaaggtgtgtggccactacacgcaggtggtgtggcgcgccactacaagcatcggctgcgcgcgcgtcgtgtgccgcgacaaccgtggcgtctttatcatctgcaactacgagccccgcggcaacatcgccgggatgaagccctactgatatattgtgcctgcgatcaatggcaactgatatattatatctagacacgagcttgttgcagcgcatgacttt

SEQ ID NO: 22051 - DNA, 263 bp, Zea mays
tgtactcagagatgatggccaatcacgttattcctgatgataaaactttcacagcactaacccacggtctttgccgaagtggagatattgatggtgctaagaggttattggatgatatgagaagattagatgtgtctccaaatattgttacttataacatgctgataaatgcatgcgtccgtgatggtaagctgcaagaggcattccaactgcatgatgagatgctcagcagtggagtcgtgcctgatgatactacatatgac

SEQ ID NO: 22052 - DNA, 268 bp, Zea mays
gtggattgtactggaccgcatcttcacactgtttatccacacggctccactgatactcttccttttgccacgatgggttctggatcccttgctgcaatgtcagtgtttgaatcgaagtataaagagggcctcactagggaagagggaatacaactggtgtcagaagcaatatgtgcaggtatcttcaatgacttgggtagtggaagcaatgtggatgtctgcgtgataaccaaggggaagacagaatacttgagaaaccaccagttgg

SEQ ID NO: 22053 - DNA, 259 bp, Zea mays
cttttcttggaaattggtaggttgaacatggctgcaagatacagcaaggacattggtgagatatatcagcaagaacaagatttagagaaggctacagattacctggaaagggcagctgacctttttgacagtgagggacagtcgtctcaatcaaacaccatcaaacagaaagttgcagaaattgctgctcagttggaacagtacccaaaagcaactgagatatttgaagcgatcgctcgtcagtcaatcaacaacaatc

SEQ ID NO: 22054 - DNA, 247 bp, Zea mays
gaagcagctgagtttcgtttcaaatggggctatgagatgccagttgatgtgttagcaaaatggattgctgacaaagctcaagtttacacgcaacatgcatacatgagaccccttggagtagttgctatggtcttgggctacgacgaagagaaaaatgcacaactattcaaatgcgaccctgcgggtcacttctttggacataaggcaactagtgccgggctcaaggagcaggaagcaataaattttt

SEQ ID NO: 22055 - DNA, 244 bp, Zea mays
cgcggccagcggcagcctgccgctgatgcagtagcttcacgccgtgctggtggaccacgctctcagcagcggtctacgcggatcgggagccctccgggttctccaagatcaccaggttcgaggaggagctccgcgcggtgctgccccaggaggtggaggccgcccgcgtggcggtcgccgatggctactccccgtggcgatccggatcgcggacagccggtctttcccgctgtaccgcttcgtg

SEQ ID NO: 22056 - DNA, 243 bp, Zea mays
cagtgattgatctttctgggacagtaggtgctcaaggagttgcatttggtgcagaagctgggtatgacactgctacgggaaaatttaccaagtacactgctgcaattggtgtaaccaagccagactaccatgctgcattcattctggcggacaaaggtgacaccattaaagtgtcaggtgtttatcacctggatgagaaacagaaggcctcagctgtggctgagctaacccggaggctttcaa

SEQ ID NO: 22057 - DNA, 244 bp, Zea mays
ggaagggcaagacggcggaggagctcctagcggacgccgccttctgggccgcgctggtcgcggcccccgtcgagaagctgttccgcgtcgtggtcatcaaggagatcaagggctcgcagtacggcgtgcagcttgagagctccgtccgcgaccgcctcgccgccgccgacctctacgaggacgacgaagaggatgcgctcgagaaggtcgccgacttcttccagtccaagtacttcaagccggg

SEQ ID NO: 22058 - DNA, 254 bp, Zea mays
agcatgtggtcggaggcgggaggtaggtggttggaggaggatggagaatcgtcaaaattagataaaacaagcaacatcccacaaagcagtgattgtcttggtgccgagaatctaatcaaattgcttaagaattattccagaagccatgagctcaaactggcaattacggtgggtattgttggacttcctaatgttggcaagagcagtctgatcaacagcctgaagaggtcccgagtggtcaatgtcggttctac

SEQ ID NO: 22059 - DNA, 240 bp, Zea mays
ccagcattgcagtaagcttctctgtgtatgaaactttacgttcccattggcaaatagagaggccatgtgattcccctgttctgatcagtttggcttgtggaagtctttcaggaattgcatcgtctacttttacattcccattggatcttgtgagacgtcgcatgcaattggaaggagcagccgggagggctcgcgtctaccagacaggactttttggaaccttcggacatattgtccgta

SEQ ID NO: 22060 - DNA, 243 bp, Zea mays
gggatggagttccctttcttatgaaagctgggaaagctttgcacacaaaacgagctgagattagggtacagttccgacatgttcctggaaatctctacaaggggagttttggcacagatcttgatagggccactaatgagcttgtgatacgtgtgcaaccggatgaagcaatttacctaaagattaacaacaagattcctggtctcggtatgcgactagataggagtaacttgaatctccatt

SEQ ID NO: 22061 - DNA, 244 bp, Zea mays
gaaatgcccattcactggaactgtttctatcagaagcagaattattgctgggacatgccacagtgctaagatgaacagaactatcattgttcgcaggaactacctccactttgtaaagaaataccagaggtatgagaagaggcactccaacattcctgctcacatctctccatgcttccgtgtgaaggaaggtgaccatgtcatcattggccagtgcaggcccctgtcaaaaactgtgaggttc

SEQ ID NO: 22062 - DNA, 237 bp, Zea mays
tgccgaccgtggtggtctcgtcgccgcgcgtggccgaggccgtgctccgcacctacgaccacgtcttctcctcccgcccgcgctccctggtgtccgacatcatcatgtacggcgccaccgactcgtgcttcgcgccctacggcgaccacttccgcacagcgcggaagctggtcaccgtgcacctgctcaacgccagcatagtgcggtcgcagcggcccgcgcgggaggaggaggtgc

SEQ ID NO: 22063 - DNA, 233 bp, Zea mays
ggagaaggaagtgaaggagggcacagcgaggaaggtcgacagctgcgcaagggcgatcctgtggcttgctagatccatggatttcacagctgcgctgttacagaggctggaggaggactctacgcagcagcagcagcagagcctcgcgcactcgtggatgccgcgtacgaggccaccctgaagccgtggcacggctggatctcctcggcggcgtgcaagatagcgtggaagct

SEQ ID NO: 22064 - DNA, 234 bp, Zea mays
ccaaacccaacctcatctctgttctcggcctctaccgccccctcgatcggtcggccggtcagctatgacgccgggaagctcggccgccggatccggcgtcgtcgttcctcggaacttcaggctcctagaagagcttgaacgtggagagaagggcattggagatgggacagtgagctatggaatggatgacgcagatgacatctacatgcgatcatggactggcactattattgg

SEQ ID NO: 22065 - DNA, 232 bp, Zea mays
cctcaagaaagttgggtacaaccctgataagattgcctttgttcccatttctggttttgagggcgacaacatgattgagaggtccaccaaccttgactggtacaaaggcccaaccctgcttgaggctcttgaccagatcaccgagcccaagaggccttcggacaagcccctgcgtctgcccctccaggatgtgtacaagattggtggtattggaactgtaccggttggtcgt

SEQ ID NO: 22066 - DNA, 229 bp, Zea mays
aaccgtgcttcgcttggttggtagcctatatcctgtacagcacgctccaggtagaggatagcgcggtgcggaaggacaggggcaaccactggtgggagaagttcaggagcttcaatagagacgcgaggagccaagagttctactcgctgccgttcaatctgaacaagttcttcgcgtcggtctgatctcgaatggccgtgcgctgaatcaattctggaagcaacccttg

SEQ ID NO: 22067 - DNA, 232 bp, Zea mays
atttaacacgagaacggtcacccatttttacgatggtttggtgttcgaaaaacaaacaaaaataaaaccaaaaaaaaaggaatgcaacacgaggacttcccaggaggtcacccatcctagtactactctcgcccaagcacgcttaacttcggagttctgatgggatccggtgctttagtgctggtatgatcgcatccgtcatatcctgcgtcctccttcctcttatgcccac

SEQ ID NO: 22068 - DNA, 231 bp, Zea mays
caagaagggactcggtgcaattgctgaggaggtgaagcagttggctcaaaaagcaagagataatagcctaaaaccagcagattacgagggcggcaccttcactgtatcaaatttgggaggtcccttcggaattaaacaattctgcgccatcataaatcccccccagtcagcaattttggccattggttctgctgagaagagggtgatacctggttccgctgatggtcagtt

SEQ ID NO: 22069 - DNA, 228 bp, Zea mays
gattggtgcagacaagggtttattcagaactctagagacaaagcattctactcctaagtatggcctcatctaccatgcatccttaattggtaaggcttctcaaaagcacaagggaaaaatctctcgttctcttgctgcaaaaactgctcttgccatccgatatgatgcgcttggcgatggtgaggacaactccattggtactgagagccgacttaagcttgagacacg

SEQ ID NO: 22070 - DNA, 229 bp, Zea mays
gagcgtgggtcttcgtcgtccgcaaggttccggttgccgatgatgatgtcgtacgcgccgcagaacgagcacttgctgcaggaacagacactgaacaacgctcgtccggctcctgagaagaggcagcgggttccgtcggcgtataacagattcatcaaggaagagattcgcaggatcaaggcgaacaaccccgacattagccacagggaagccttcagcacagcagcca

SEQ ID NO: 22071 - DNA, 229 bp, Zea mays
agaacgcgctggagcggtacgacgatgcggcgttctcgcaggtggtgtcgacggcgcgcggcgcaggcctggccgcgttcacgtatctgcgcatgaacaagacgctcttcgacggcgacaactgggggcggttcgtgtccttcgtcagggctatggccgacggtggcgcgaggccagcgctgccgcggtgtgacacggggcactcggacctgtacgtcgggtttgtcga

SEQ ID NO: 22072 - DNA, 133 bp, Zea mays
ggagatgtctgggcgcggcaagggcgggaagggcctgtgcaagggcggacgaatcgccaccggaaggtgctccgcgacaacatccaggggatcacgaagccggcgatccggcggctggcgcgcaggggcggcg

SEQ ID NO: 22073 - DNA, 270 bp, Zea mays
cagagcattcgagaagccgaagaaaattcgaagacgaggagcagctacactgcggacggacttcgggcatggagggccagttccaggttggcaaggaggaggtcatccaagcatggtacatggacgacagtgaagaggaccagaggcttcctcatcatcgcgagcccaaagaattcatccctctcgacaaactttccgaactaggaatattaagctggcgcctaaatgctgatgattgggagaatgatgagaacctcaagaaaattcgtg

SEQ ID NO: 22074 - DNA, 278 bp, Zea mays
caagtacccgatgagcatgtgaatgaatttaaatcaatcgagaagtttaagatattcaacactaacaacttgtgggtgaaccttaaagctatcaagagactcgtagaggctgaggcacttaagatggaaattattccaaaccccaaggaagttgatggtgtgaaagtccttcaactcgaaaccgcagctggtgcagctattcggttcttcgacaaagcgattggaattaatgttccgcgctcaaggtttctcccagtgaaggctacatctgatctgtt

SEQ ID NO: 22075 - DNA, 132 bp, Zea mays
caatgcttcaagagagtatctcaacagtgttggcttggcacacagagaggaaggtgatttaggtccaatttatggatttcagtggcgtcactttggtgctgaatacactgacatgcatgctgactatacggg

SEQ ID NO: 22076 - DNA, 131 bp, Zea mays
gccgacctcaaggagcacgtcatcaagcccgtgatccctgagaagtacctcgacgagaagaccatcttccacctcaacccgtccgggcgcttcgtcatcggcgggccccacggttactccggcctcaccgg

SEQ ID NO: 22077 - DNA, 270 bp, Zea mays
catatacaagctagacaaagttacatacaacaagtaccatccctacacgtcatggatccctataactgtttatatctgcctgcgcaattgctcccagcagttgaggagtgcctctttggtccttttcgcatggcttggcaagattacactagagacttatatctctcagatccagatttggcttaggtctagcatgccaaatggacagccaaaatggcttcttggtttcataccggattatcctatgcttaacttcaggcttactacggg

SEQ ID NO: 22078 - DNA, 271 bp, Zea mays
gtctgtccatcagttggttgagaacgctgatgaatgcatggttcttgacaacgaagcactttatgacatttgcttccgaactctgaagctgacgacccctagctttggagacttgaaccacttgatcagtgcaacgatgagtggtgtcacttgctgcctccgcttcccaggacagcttaactctgacctgcgcaacttgcagtcaacctgatcccgttccctcggctccacttcttcatggttggctttgcgccactcacctcgcgtggct

SEQ ID NO: 22079 - DNA, 270 bp, Zea mays
  unsure (1)..(270): unsure at all n locations
gaagaacttagaggagaacattgatgatgagaaattgcgtgaactctttgctgagtatggcaatattacttcctgcaaggttatgcgggattcgaatggtgtcagcagaggttctggatttgttgctttcaaatctgctgaagatgctaaccgagctcttacggagatgaatggcaaaatggttggaagcaagcccctttatgtagctcttgcgcacgtnaaagaagacagaaaggcaaagctacaggcacaattttcacaaatgcgtcc

SEQ ID NO: 22080 - DNA, 187 bp, Zea mays
acttgaatactcttcaacagctcagaataaagagtggtcttatagatcatattggaatcgaacctttgatgatggaagctcttgagaagattgagaaggatattaagaaaccacttttaaggagtgacaagaagaacatggccacccttatggcagagtttgacaagattaacgcaaagcttggcat

SEQ ID NO: 22081 - DNA, 262 bp, Zea mays
tgacgttctcaccaagaagatgaggagagccatcgaggagctaagcaccggcatcgtgaacaagctcctccacggcccgctgcagcacctgaggtgcgacggtagtaacagccgcacccttgatgagacgctcgagaacatgcatgctctcaaccggatgttcagcctcgacacggagaaggcgatcatcgagcagaagatcaaggccaaggtggagaagacccagaattgaggcctggagtcaatttttctacccgtgtat

SEQ ID NO: 22082 - DNA, 151 bp, Zea mays
gtacctcaaggacctcgaggccggcatcatcgacaacaccccggcgccggccatcgccatcgactactggcgcctccccgccgacgccaagctcaaggacgtcgtcaccgtcgtgcgcgccgacgaggcgcaccacggcgaggtcaacaat

SEQ ID NO: 22083 - DNA, 139 bp, Zea mays
tgcttactcatgcctcgagtaaattataccacacacccagagagcaattgctaccccctgtgttttgaatagaagagactccagctccgtccatagattctcactcagaactgctgcacgtcgctgggcaggcgtgtgg

SEQ ID NO: 22084 - DNA, 261 bp, Zea mays
gaccgaagaccgagccgtgcggcggctcgggacgggaacgggacaggaccccaaaatctcagatccttcctgcccgcccgcccgtgcccgtcgacgcgtcgttcttgccggccgcgcctcacctccgccctctcctcctccagggggatcggatacgccacaggctgcgcgatggtgctgtgggtcttcggctacggctccctcatctggaaccccggcttcgacttcgacgacaaaatcctcggcttcatcaagggctac

SEQ ID NO: 22085 - DNA, 264 bp, Zea mays
cccactcgtccgcctcgccccagcgacgcggcctcccgtagaccgagcaaggcaacccaccactgagaggcacgcagatgatcatgaagccggagaccaagatgtcgtcggtgttcagcggcgatgagacggcccccttcttcggtttcctcgtcgcggcggccgccctcgtcttctcatgcatgggcgcaggtacgggaccgcgaatagcggcgtcggcgtggcgtcgatgggtgtgatgcggccggagctcgtcatgaagtc

SEQ ID NO: 22086 - DNA, 246 bp, Zea mays
gcgtcaaagaggattcagaaggagctcaaggatctgcagaaggaccctcccacctcgtgcagtgcaggtcctgttggtgaagacatgttccactggcaggcaacaataatgggtccatctgatagcccatattctggtggagttttcctagttacaatccattttcctcctgattatcctttcaaaccaccaaaggtggcatttcgcactaaggtgttccatccaaacatcaacagcaacgggagc

SEQ ID NO: 22087 - DNA, 244 bp, Zea mays
acaggaggcatgtcaagggatttgattgataggatcccaaagacgaggttcagtgctgcgagcaactgtgatcaggaaactgatagcagctgctgcccagtctgcctccaggatttcggagcacggcaattcgtgagggccctgcctcagtgccaacacatattccacgtgcggtgcatcgacagttggctcctccggcacgcgtcctgcccgctatgccgggcaggtgttcacatagaccata

SEQ ID NO: 22088 - DNA, 203 bp, Zea mays
ggcagggacgctggcctgtcaaatctgctagattcattctagaccttctcaagaatgctgagagcaatgctgaggtaaaaggtcttgatgtcgataccctctatgtgtcacacattcaagtgaaccaggctcagaagcagcggcgcaggacctaccgcgctcatgggcgcatcaacccttacatgtcctcaccgtgccacatc

SEQ ID NO: 22089 - DNA, 245 bp, Zea mays
cacatgaccaaggcccaggaagccggcaagctggtggtcatcgacttcactgccgcctggtgcggtccatgccgcgccatcgccccactgttcgtcgaacacgccaagaagttcactcaggtcgtcttcctgaaggtggacgtggacgaagtgaaggaagtcaccgcggcctacgaggtcgaggcgatgccgaccttccacttcgtcaagaacggcaagacggtcgcgaccatcgtgggtgccaa

SEQ ID NO: 22090 - DNA, 243 bp, Zea mays
gtcaatctgcttcctcctctatacctcatctatgccgataaccccagtgactctggcaaggtccacagcactgttagacaaagatggctgtcaggtgatgattttataacatcacgtatgaaggaagtagcgcactagcgctcgatggccacaaggctttgctgcagaaggattatactgagctagcgagatttatgaataagaattttgatctgcgaagggagatgtttggagatgatgtac

SEQ ID NO: 22091 - DNA, 239 bp, Zea mays
gtcctaactacctccacccccgcacgcacaactggccgcgccaaggcaaagctagaagaagacaacgcaaagggagaggacagaggaggagcagaggacgatgggcagcggcggcgctaacactgcccccctcctcaccccctacaagatgggaaaattcgatgtttcccacagggtagttctcgcaccactgacgagacagcggtcctacggcaatgttcctcagcctcatgccatac

SEQ ID NO: 22092 - DNA, 233 bp, Zea mays
ctcctgttcaccccgcgtcgtcttcgctctcacgatccctcggcagtcggcgacggctgggcgaccgccacttccgccttctcttcctactgagcgtctccaggcacgcttctgaattcggagttgccagcattcgctcgaggtgccggaccagatctcaccatcatgcaggctagcgatagattcaacataaactctcagcttgagcatcttcaagccaaatatgttggtac

SEQ ID NO: 22093 - DNA, 239 bp, Zea mays
catatgataagttctgcccattctacaaatccgtttggatgatgcgcaatattattcacttcaacacattggcaaatcaggctgtggagcgggcagctggtactgatggccaaaagataacatacggtgtcataaaacaccgtttgggcgatctattttatcgcctagtatctcaaaagttcgaggatcctgccgaaggtgaagaagctttggtcggcaaatttaagaaactgtatgat

SEQ ID NO: 22094 - DNA, 236 bp, Zea mays
cccacatgaccaaggcccaggaagccggcaagctggtggtcatcgacttcactgccgcctggtgcggtccatgccgcgccatcgccccactgttcgtcgaacacgccaagaagttcactcaggtcgtcttcctgaaggtggacgtggacgaagtgaaggaagtcaccgcggcctacgaggtcgaggcgatgccgaccttccacttcgtcaagaacggcaagacggtcgcgaccatc

SEQ ID NO: 22095 - DNA, 78 bp, Zea mays
gggacaacgccaagaagtacattgaggctggagtttcagagcatgccaggacccttggcccaaaaggttctgaccctc

SEQ ID NO: 22096 - DNA, 238 bp, Zea mays
aaaggacacaaccataagcacacttgctacagaggtcactagcaagcttgcagccttgaagggactagatgcaaggctcagggagatccgaagctatttggatcttgtaattgaagggaagctcccactgaatcatgagattttgtatcatttgcaggatgtctttaatctccttccaaatctgaacgtaaatgagctaattaaagcctttgcagtgaaaacaaacgacatgatgttg

SEQ ID NO: 22097 - DNA, 239 bp, Zea mays
tgcagggcaagcgcgatatagccgccttcttcgcgcacgccacgcacgagaccgggcatttctgctacatcatcgagatcaacaagagcaacgcctactgcgacccgaccaagaggcagtggccgtgcgccgcggggcagaagtactacgggcgcggcccgctgcagatctcgtggaactacaactacggtcccgcggggagggccatcggcttctactggctctgggaccccggcagg

SEQ ID NO: 22098 - DNA, 240 bp, Zea mays
gctgaggctattacggttgcaaaattggatattagagtgggacttatcagaaaagcagagaagcatccagatgctgattccctttacgtggaggagattgatgttggagaggacacaccaagaacagtggtcagtggcctcgtcaagttcatacctctcgaagaaatgcagaaccggaaagtttgcgtactctgcaatctgaaacctgtggcaatgcgtggtataaaatcacatgcaatg

SEQ ID NO: 22099 - DNA, 231 bp, Zea mays
cctgtatcctcttgttgaacagctggaacgtgagcaggctgccaaggtcactggcatgcttttggagatggatcagacggaggttcttcacctgctggagtcgccagatgctctgaaagccaaggttgctgaagccatggaggtcctccgctctgcccagcatctccagcagagcaatgtttctactgagcagcagctggctaatctatcattgaatgatggcgtcgtctc

SEQ ID NO: 22100 - DNA, 204 bp, Zea mays
ggacccggggcggaagaagagagagaagacgtctctctcctctcggcgtccccgatccccaacctctcgtctgctgcctgcctgcctgcctgcctgcaaaaaggagtttgtcatggcgtctaagcgcatcctcaaggagctgaaggacctgcagaaggacccccccacatcatgcagtgcaggtcctgctggtgaggacatgtt

SEQ ID NO: 22101 - DNA, 235 bp, Zea mays
gtcggagggcggcttcgagaagctgtacaagcagacgttctcgtccagccccgacgagcacttgaagaagacgttcgcatgctacctctccacggccacggggcccgtcgccggcacgctgtacctgaccaacctgaacgtcgccttctgcagcgaccgcccgctctccttcgccgcgccgtctggccagaccgcctggagctactacaagtttatgatcccccttggcaagatg

SEQ ID NO: 22102 - DNA, 235 bp, Zea mays
caaatagtcaccagggtcaagctccacccgtccaagacaccatgcctgcagcgcctcatgcgcgtgctcaccctcaccggcgtcttcggcgcgcaggagccgcacgatgacgacggcggctgtgacgacgagctcgtctacacgctcacgccggcgtcccgtctcctcgtcggctcaccggggcagaacgtgggccctttcctgaccctgatgctcggccccatcttcgtgtcgt

SEQ ID NO: 22103 - DNA, 236 bp, Zea mays
gggggattcctgcattgcactttctagaaactgtagcgggtttgaaagggaaatgtgtctttgggccatttctaagtattttggtgattaagtgccaacacaagtgcttaaatgtgaatctatgcccatggatgaacaaagtgcaaatcacaagtaaaggtatgtttctaagccttagtacattggttttgtgtactaatatatttgtctaagtgttagaaacagagagaagaaga

SEQ ID NO: 22104 - DNA, 265 bp, Zea mays
attggtggtattggaactgttccgggtggtcgtgtggagactggtgtcatcaagcctggaatggttgtcaccttcggtccaactggcctgaccactgaggtgaagtctgttgagatgcaccacgaggctctccaggaggcccttcctggtgacaacgttggcttcaatgtgaagaacgttgctgtgaaggatctcaaacgtgggtacgtggcctccaactctaaggatgaccctgccaaggaggctgctagcttcacctcccaag

SEQ ID NO: 22105 - DNA, 264 bp, Zea mays
gcaggagctgtacatgttggtgttcgtggcgaggtacctcgacctcttcacggactacgtctcgctctacaactcagtgatgaagatggtgttcatcaccagctcggcggcgattgtgtggtgcatgcgccgccacccgcagtacggaggacttacgacaaggagcaggacaccttccgccacgcggtgctcgtcgccgccgcgttcctgctcgcgctgatgttccacgaccggttcaccttccgagagatatgctgggcattt

SEQ ID NO: 22106 - DNA, 270 bp, Zea mays
catataacagttgctggtgcgctcaatcatgggatgaaggaggtggaagtgtggcttcagacaataagtccaggtcaaaggacgccaatccacaggcattcctgtgaagaagttttcactgtcctcaaagggaagggtacgctcttgatgggatcaagctcactaaagtacccagggcagccacaggaaattcctttctttcagaataccacattttcaatccctgtaaatgatccacaccaggtttggaattctgacgagcacgaagat

SEQ ID NO: 22107 - DNA, 268 bp, Zea mays
ccgacccatcactctctgctcgcgcactctcacctgcccgcgccgtattcgaccgccgccaagatgaacaaggagatgctcatgaagatggccggcgccgtccgcaccggcggcaagggcaccatgcgcaggaagaagaaggctgtacacaagacggtcaccacggacgacaagaggctgcagggcactctcaagagagtaggggtcaacaccatccctgcaatcgaggatgtgaacatattcaaggacgatctcgtcatccagttct

SEQ ID NO: 22108 - DNA, 264 bp, Zea mays
gaaggatcccaactgcatcttcgtcttcaagttccgcacccacttcggaggcggcaagtctaccggattcggtctcatctacgacaacgtcgactctgccaagaagttcgagcccaagtacaggcttatcaggaacggtcttgctaccaaggtggagaagtcgcgcaagcagattaaggagaggaataacatggcgaagaagatccgcggtgtgaagaggacaaaggctggggacgccaagaagatatgagcaaggtttcagtg

SEQ ID NO: 22109 - DNA, 262 bp, Zea mays
cacgactagttctgcgaggctaagagcagaaaaaactccacctgcctggctgatttcatcaactccggcggcttggagaagacgaagctgctccagaatccgatatgaagtttggtgctcgcgtgttgacgggttgatttcggtgcgccgatggggcaggcgttccgcaagctgttcgatgccttcctcggcaccagcgagatgagggttgtgatgcttggtctggatgccgccggtaaaaccaccatcttgtacaagctgc

SEQ ID NO: 22110 - DNA, 262 bp, Zea mays
ctaatctttatcgtcaaggatatcagaatgtatgatcaagataagagaatagcaagccacattatcaaggtgcatgccagtggtgctgcagcttcatccacaaacacagacgggagtgaaggagagaattggctgaaaaggtacattgagtactgccgcgccacatgcaaaccacggctttcagaaaaagcagctgagatgctgcagaacaaatatatcgagattagacagaaaatgaggcagcaagctcacgagacaggga

SEQ ID NO: 22111 - DNA, 262 bp, Zea mays
ctgatatttgaactgagaagttcatggacatcaaatgtaggtatagtggattggtgccgcagtgtgctattatcgtggccacaattagagctcttaaaatgcatggaggggggcctgaagtggtggctggaaagcctctggatcatgcatatgtgagcgaaaatgtggcccttgttgaagctggatgtattaatcttgctaaacatatatcaaacacgaggagttatggagttaatgttgtagttgcaatcaacaaatttgc

SEQ ID NO: 22112 - DNA, 263 bp, Zea mays
gaggagcccgcggcggagaagacgaccgccgtgaagaagcgcaaggctgagaagcggatccgcgctggcgagtccgccggcaaggacggcggcgagggcaagcgtggcaagaagaagggcaagaagagcgtggagacgtacaagatctacatcttcaaggtgctgaagcaggtgcacccggacatcggcatctcctccaaggccatgtccatcatgaactccttcatcagcgacatcttcgagaagctggccggcgatgcgcc

SEQ ID NO: 22113 - DNA, 259 bp, Zea mays
caaaccctagctcccgatctcgatggcgaaccctcgcgtcttcttcgacatgaccgtcggcgtcgccccggcgggccggatcgttatggagctgtacgccaacgaggtgcccaagacctcggagaacttccgcgcgctgtgcacgggcgagaatggcgtgggcaagtccgggaagccgctccactacaagggctccaccttcaacggcggaatcccctagttcatgtcaccaggcggagatttcacccgcggaaacggc

SEQ ID NO: 22114 - DNA, 261 bp, Zea mays
ggcaagcccctggccaacccgaagcgctccagcgtgacggatctggacgtgtccgagtggcccggcgtgaacacgctgggcgtgtccatgaaccgcgtcgacttcgcgggcggcggcaccaacccgccgcacgtccacccgcgctgcgccgaggtcgggctcgtcacccgcggcgagctcctcgtgggcatcgtcggcagcctcgactccgggaacatgtactactccaaggtggtccgctccggggagacgtgcgtcatc

SEQ ID NO: 22115 - DNA, 264 bp, Zea mays
cccttgacccacacattgaggagcaatttggcagtggacggttgctggcatgcatttcttcccgccctggacagtgtggccgagctgatgggtacatccttgagggtaaagagcttgagttctacatgaagaagctacagaggaagaagggcaagagcgctgtagcttagagcattctcatggattgtcttgcaccgaaatgtgtgtcctgatgagtacacttttttttggttagtcgtctcaagttcagagcgttatgccatg

SEQ ID NO: 22116 - DNA, 258 bp, Zea mays
gtaacaaagaagatcatggaatgggttatgagtgatgctgaacttgttaagtcttttggtatatttgtacggctctccaatgatattgtatcaaccaagcgtgaacaaagagagaagcattgtgtctccactgttcagtgttacatgaagcagcatgaactaacaatggatgaagcatgtgagcagataagagaacttacagaagattcatggaagttcatgattgaacaaggccttgcactaaaagaatactcgata

SEQ ID NO: 22117 - DNA, 259 bp, Zea mays
caagtgtgttgctcgattcgatcaccattgtggatggatgaataattgcattggggagaaaaatattcggtattttgtggcctttttagtttggcatttccttatatgtctgtacggggctttaatccttggcttcattcttgctggtgaaataaaagagcggaaaattatatacattctgacagtttattatggcatcgataattcattctcgggcttgtttccacatgttgcacagtggttgcttgctgtgcataac

SEQ ID NO: 22118 - DNA, 258 bp, Zea mays
acgccatgaccgtcgtccaggccgtgatgagcaagaaggaagaggaacctgagaagcagcaacagcccgctgctgccaacgccttcgtgaaggtcagcatggacggcgcgccctacctgcgcaaggtggacctgaagacgtacggcagctacaaggacctctccgctgcactcaagaatatgttcggcaccttcaccgcatctgggaacagcatgaacgaggggagattggttgatccggccggcgatgctgatgatg

SEQ ID NO: 22119 - DNA, 258 bp, Zea mays
gcacagtgttggtgctgtgatgccaccttcatatgagatgggagggatgccaatgagaggagctgccccccaacctgttccaattggcgcgctaccactgcacttgctaacgccccaccagatcagcagagacttatgcttggtgagaacctgtatcctcttgttgaacagctggaacgtgagcaggctgccaaggtcactggcatgcttttggagatggatcagacggaggttcttcacctgctggagtcgccagat

SEQ ID NO: 22120 - DNA, 261 bp, Zea mays
ggacgctggcgagacgcgtgggctccattaatattggcagcaagctagctaggatcatcagcatctgagcttattattactagatcgatcggttgccatggcgatgagagtcggcaagctggcgctggctgcggtgctgctgtgcgcggcggcggccatggccacggcgcacaggcctccggcgtgcgcgccacctacaacttctacaacccgcagcagaacaactgggacctcaacgccgtgagcgcgtactgcgcgacg

SEQ ID NO: 22121 - DNA, 236 bp, Zea mays
agccagtcaaggtcagcaagaagaactcggctgcagtcaccaagttcctcgatgagctggctaagattgacttccctggagccaaggtggtgagcgaggcggtggccaagtccggcacctcgcccctgcttccggcgatcaccttcatcttggacaaggtcgcaccgtttatccccaaggaggagcccaaggcggagcggtcggcgtaggccacctcccgggaagtcgccgtggag

SEQ ID NO: 22122 - DNA, 235 bp, Zea mays
cattttacagtttgcggtgatgtgcatggccagtactttgatttgctcaacatatttgacctcaatggccttccatcagaagaaaatccttacctcttcaatggcgattttgtggaccgaggatctttctccgttgaagtcatactcaccctttttgctttcaagtgcctctacccaaaagctatgtaccttgcaagaggaaatcatgaaagcaagagcatgaacaaaatatatg

SEQ ID NO: 22123 - DNA, 147 bp, Zea mays
ggagaacctatttccatgtcagtggctgcaaatctgcaaagctgtatgccaatgccagctctgtagatgaaagacatcgccacagatacgaggtgaaccctgatatggtcccagacttcgagagggccgggcttcaattcgtgggca

SEQ ID NO: 22124 - DNA, 239 bp, Zea mays
gcttctcaaccggataggtagcaccggagcaggtagaacgctgcacaatccccttcgccgccgccaagatggtgaacgttcctaagaccaagaagacgtactgcaagaacaaagagtgcaagaagcacacactccacaaggtgactcagtataagaagggcaaggatagcctgtctgcccagggaaagcgccgttatgaccgcaagcagtcaggatatggtggtcagaccaagcctgtc

SEQ ID NO: 22125 - DNA, 238 bp, Zea mays
caacaaggcagcagcacaagcaagaaccacacctcctcccttcgcctgtgatcatgtcgtcttgctgcggcggcaagtgcgggtgcggctccagctgctcctgcggcagcggatgcaacggctgcggtatgtaccctgacgtggagaccgccgccaccagcagcgtcaagaccacggtcctcgccgcgccgaccaccaaggccagcgccggcggcttcgaggcggccaccgagggcgg

SEQ ID NO: 22126 - DNA, 241 bp, Zea mays
agagcgaggggtacctgtgggggaacaggactgcagctgtggactccgacaagaagcagcagcttcttgccgtcattggagtttacactgggtttggctcccgtctcaagaggaacgtcttccgtggctcctggatgccaagaggtgatgctctgaagaagcttgaggaaaagggtgtagctattcgttttgttattggtcggagtgcaaatcgaggtgatagcttggaccgtaatattga

SEQ ID NO: 22127 - DNA, 231 bp, Zea mays
ggcgccgccgcagccccccgcatcgtcgccaaagatgcagatctttgtgaaacactctgacggggaagaccatcactttggaggtggagtcctcggacaccatcgacaatgtgaaggccaagatccaggacaaggagggcatccccccggaccagcagcggctcatcttcgccggcaagcagctcgaggacggtcgcacccttgccgactacaacatccagaaggagtcca

SEQ ID NO: 22128 - DNA, 76 bp, Zea mays
catgtttgagcttatccagagggctgacacacctgagcctctttgccaggtcatgcttcgtgttggtgaccttgag

SEQ ID NO: 22129 - DNA, 163 bp, Zea mays
agaatagcacttttcagacactcataaatcctgagaaagatgtgaaaaatacatatgttcatggtattaacaacagtatgctctgcaggcctgatgttccaagatttggagagattattcccattctgctacaatatgtgtggagtcgtcaaatggacggtaa

SEQ ID NO: 22130 - DNA, 141 bp, Zea mays
gagcttagtgtttgatccatggactcggaaggagtagcagcaaaggtggcagatgagactactaaaccggcaagccaagaagacggcgagagcaaggccgggatgactgatctgctgatgctgaccgacaagtcgcagctg

SEQ ID NO: 22131 - DNA, 236 bp, Zea mays
gaaagacaagacttatgatcttaatttcaaggaggagaacaacgatggctcaaacaaaatttcaggcgacacctgaaagacctgtacaagtcctttgtttctgagtaccctatcgagtcgatcgaagacccatttgatcaggatgactggagcacttatgccaaactcactgatgagattggacagaaagtgcagattgtaggagatgatcttctcgttaccaaccccaccagggt

SEQ ID NO: 22132 - DNA, 64 bp, Zea mays
gcaattgccaccccaatgttttgaataaaaaaagaaactccaactcgattcataggttctcact

SEQ ID NO: 22133 - DNA, 146 bp, Zea mays
ctccaagcccgacaagcgcctcatcctcatcggtccacctggctctggaaagggaactcagtctcctattatcaaggatgaatattgcttgtgccatttagccactggtgacatgctgagggctgctgtggcggccaagacacctc

SEQ ID NO: 22134 - DNA, 222 bp, Zea mays
cttgggataatgaaggcatcaagacgttgataaattcattgtccaggcatggcccctctgtcaggcgccaaagttttgaaatagtttaaaatgggacctgacgttgagcaggaacggtcgcccgtctttgtcgattaaggaccgtaccgattgttggcctgatgatctaggaccttttaactggccacatacctcgtcatgggtaagcctgaacccggctat

SEQ ID NO: 22135 - DNA, 203 bp, Zea mays
caaagtgattagctggattgttacggtatttctgatgcttatcaacgggtatcttatactatctttctacattactgatgtccggggtgcattgcttcgctcaagcttgtgtgttgtgttggttgtttaccttgcattcatcgtctatcttattgtgcgaaatacttcgctgtattcgcgcctttggtgatcaatgtcaaaga

SEQ ID NO: 22136 - DNA, 236 bp, Zea mays
gcgcgccgcgcccgcgccatcgtccaggcagtcacccactacagcgaccccaccatcctggccgacgtcagcacggggctcggggaggccatggtcggcatcaacctcaacgacccaaaggtggaacgatacgccgccagatccgagtgaaccctttctttccgtagtcgtctccatccatccatctgccttggattgcatttccgtcggttcatgtctctcaatcagtaataatg

SEQ ID NO: 22137 - DNA, 234 bp, Zea mays
agcgtctagcaaagtccgatcctatggttctctgtacaatggaagaatctggtgagcatatcattgctggagctggtgagcttcatcttgagatttgcctgaaggatctgcaggaggacttcatgggtggtgctgaaattattgtttcccctcccgtcgtctccttccgtgaaacgttcttgagaagtcctgccgtactgtcatgagcaagtctcccaacaagcacaaccgtct

SEQ ID NO: 22138 - DNA, 237 bp, Zea mays
cccacgcgtccgccggcgcggcggcggcggctaccatggcagtcgggaagaacaagaggatctccaagggaaagaagggtggtaagaaaaagaccgtcgatcccttctctaagaaggactggtatgacatcaaggccccatcggtcttcagtgtgcgcaacattgggaagactctcgtgtccaggacacagggtaccaggattgcctctgatggtctgaagcacagagtctttgagg

SEQ ID NO: 22139 - DNA, 208 bp, Zea mays
ccatccgcacagccaaaccacctagccgccgccgagccccccatcgccgccaagatgcagatctttgtgaagactctgacggggaagaccatcactttggaggtggagtcctccgacaccattgacaatgtgaaggccaagatccaggacaaggagggcatccccccggaccagcagcggctcatcttctcgggcaagcagctctagg

SEQ ID NO: 22140 - DNA, 239 bp, Zea mays
gctgcgggcattccaaaaaggcttgctccaaccattggcatttctgtggatcaccgccgcaagaacaaatcccttgaggggctgcaggccaatgtccagaggcttaagacatacaaggccaagctggttatcttcccaaggcgtgctcgcaaggtcaaggctggtgactctactctggaggagcttaccactgctacccaggtacagggtgactacatgccaattactcgcggtgagaa

SEQ ID NO: 22141 - DNA, 201 bp, Zea mays
ctatggagcagcgttggactgctcgcagcaagagcccgatgagcccgagatgaagctctaaagaagatgatgtattttcatgggttggtattataatgtatctgccaacatctgatgctcgccaaaggaaggaaatcacagaggagttcttcagttacaggagcctggcgcgaagtctctgggatgattattccgcctatg

SEQ ID NO: 22142 - DNA, 231 bp, Zea mays
gaaccaggccgggagcgggtgcgagggcaagaacttctacacccggagcgcgttcctgagcgccgtcaacaagtacccgggcttcgcccatggcgggacggaggtggagggcaagcgcgagatcgccgccttcttcgcgcacgtcacgcacgagaccggacatttctgctacatcagcgagatcaacaagagcaacgcctactgcgacgcaagcaacaggcagtggccgtg

SEQ ID NO: 22143 - DNA, 224 bp, Zea mays
gcagctaataaggtaataaggggcgacgaaaatggctccaacgaccgctaccaaggacgacagtggctacggcgacgagcgccggcgcgagctgcaggcgttcgacgacacgaagctgggggtgaaaggcctggtggactccggcgtcaagtccatcccgtccatcttccaccacccgccggaagccctgagcgacataatttctccggcgcctctgccgccgt

SEQ ID NO: 22144 - DNA, 224 bp, Zea mays
tgggagacagtcccttcacgtcatcttgttggcccgaaagcagccatggcttgtgcagtccttggctgtttgatgtaaaccatagctggggagcttggttggggtcacgtgctgggctgttctatatgcatggtacttgagttaagttatgtttggttcgctacctaacttgccacactttgcctcacttttctgcctaaggttagttcttcaattcgaacgac

SEQ ID NO: 22145 - DNA, 197 bp, Zea mays
gtgagagcaaatacgtttgtgggagaggttcttggacttgaccccagagaggtaaatgttccagtcattggtgggcatgcaggaattacgatactaccactcctttcacaggtgaatccttcctgctcattcacctcggaagaggttaaatacctcacttctcgcatacagaatgttgggacaaaggtagtcggggt

SEQ ID NO: 22146 - DNA, 233 bp, Zea mays
gtggagggcaagcgcgagatcgccgccttcttcgcgcacgtcacgcacgagaccggacatttctgctacatcagcgagatcaacaagagcaacgcctactgcgacgcgagcaacaggcagtggccgtgcgcggcggggcagaagtactacgggcgcggcccgctgcagatctcgtggaactacaactacgggcccgccgggagggacatcggcttcaacgggctcgccgaccc

SEQ ID NO: 22147 - DNA, 237 bp, Zea mays
gaggaatggctcccgcccaccacacttctgcaagagcagtggtgctgttgcacgcaacatcctgcagcagctgcagattatgggcatcatcgatgtcgatcccaagggtggacgcctcatcaccaaccagggaaggcgtgatctggaccaagtggctggaagggtcgctgttgaagcgtgagcagtgtcatctttggtttcaatggtgtcatgtttgatggttgagaagactgcgct

SEQ ID NO: 22148 - DNA, 194 bp, Zea mays
aagagccaggtcttctctaccgctgcagataaccagacacaggttggagttaaggtgcttcagggtgagagggagatggctacagataacaagctccttggcgaattccagcttgaaggcattccaccagccccaagaggcatgccccagatcgaggttacctttgacattgatgccaatggcattgtaaaggg

SEQ ID NO: 22149 - DNA, 221 bp, Zea mays
cagtccccaattatttggcctccgtcagagaggggagaaagacccgttcgaggcggcggcgatgtcggggcgcggcaagggcggcaagggtctgggcaagggtggagccaagcgccaccggaaggtgctccgcgacaacatccagggcatcaccaagccggcgatccggaggctggctcggaggggctgcgtgaagcgaatcttcggggctcatctacgag

SEQ ID NO: 22150 - DNA, 238 bp, Zea mays
gaaggcctaccacgagcagctgtccgtggccgaaatcaccaacagcgccttcgagccatcctccatgatggccaagtgcgacccccgccatggcaagtacatggcatgctgcctcatgtaccgtggtgatgtggttcccaaggacgtgaacgctgctgtggccacaatcaagaccaagcgcaccatccagttcgtggactggtgcccgactggcttcaagtgcggaatcaactaccag

SEQ ID NO: 22151 - DNA, 210 bp, Zea mays
gctgtccagatcgcgtgattccgcatcccgttcgcgagcgcgacacacgctgacagctcacggctgaccttcccgagtcccgacggcctccagctccatcttgattcttgaggcgaagcccggtgcgtaagagtctgccatggccagcgagaataaggtctttgggttcgaggaagtcgccaagcacaacgtcaccaaggactgctggat

SEQ ID NO: 22152 - DNA, 94 bp, Zea mays
gtgaaggatctgaagcgtgggtatgtggcctccaactccaaggatgaccctgccaaggaggctgctagcttcacctcccaggtcatcatcatga

SEQ ID NO: 22153 - DNA, 72 bp, Zea mays
agacgacttgtttcattgattcttgaagagatcgagcttcttttgcaccacaaggtcgaggatgtcttgcga

SEQ ID NO: 22154 - DNA, 223 bp, Zea mays
ctcaagttctcgcgcccacagccaaatttttctccactcaatcgcggcataagctgcactgcagccatggacgccagcggaccggtagcaaggcgaagaagggggcggctgggcgcaaggctggcggccccaggaagaagtcggtgtcgcggtccgtcaaggccgggctgcagttccccgtcggccggatcgggcgctacctcaagaaggggcggtaccgcag

SEQ ID NO: 22155 - DNA, 184 bp, Zea mays
ttttaaaggggcttggactgagaagtttgatgcatctaaaacaaaagatagcgagttccaccttcttgatgggagctcagtccaagcacctttcatgtccagtacagacaagcaatatattgtggcttacaacaacttgaaggtgcttaagcttccataccagcaaggtgcggacaagaggcag

SEQ ID NO: 22156 - DNA, 251 bp, Zea mays
ccgccacccactacaggtaaggaagaggaggagggcaggatgtcgcaccgtaagttcgagcacccgaggcacggctccctcggcttccttcccaggaagcgctcctcccgccaccgcggcaaggtgaagtcatttcccagggatgaccccaagaagccttgccatctcactgccttccttggctacaaggctggcatgactcacattgtccgtgaggttgagaagccaggatccaaactccataagaagga

SEQ ID NO: 22157 - DNA, 250 bp, Zea mays
acggcacacgtctcggcagccacaagaaaccacccccttccggcacacgggctcgaccacctgactccatcaccgtgcctgtctgtgttctagggacaagaagagcagagatatacaggagcgagcagaggcggggagaagaggatgagcaccacaagggcgtcgtcgctgaaccccaacgcgccgctcttcatcccggcggcgtaccggcaggtggaggacttctcgcccgagtggtgggagctcgtca

SEQ ID NO: 22158 - DNA, 244 bp, Zea mays
ggacgcgtgccgcggacgtacctggaccacggtgtgacggtggtggggaacggcagcgagggcggcaaggactactggatcgtgaagaactcgtggggcacccagtggggcgatgccgggtacgtccggatggcgcgcaacgtcagggtgagggccggcaagtgcggcatcgccatggagccgctgtacccggtgaaggagggcccgaacccgccgccgggcccgacgccgccgtcgcccgtga

SEQ ID NO: 22159 - DNA, 162 bp, Zea mays
cgacgcgtgtgtcgtgcacaaacagtgagcgaaatgtgagtgccctctgagcaaagctagcagcagaaatcctaatgcagaactgggacctagctttggaggaactcaaccgcttgaaggaaataattgattcaaagaacttctcatcacctctgaatcagc

SEQ ID NO: 22160 - DNA, 122 bp, Zea mays
cccacgcgtccgccctattgtgtatgacttctacaaccatgaaatggagtcaacactgtttgtcgatctttttttcaagttcatacagaacttggcgtttatgggtgccctgcttttcttcc

SEQ ID NO: 22161 - DNA, 153 bp, Zea mays
cccacgcgtccggctttgatgtgccaagtatcaggaatggattttgcacttgaacctgtgctgccccctgtctatgcgaggcctgaacatgttgaaagagcactaaagagactttatcaagatgccatgagcatactcaggcctcagggccga

SEQ ID NO: 22162 - DNA, 119 bp, Zea mays
ctccctgaatgtccctctagatgatgggattgatgatgaaagctaccagtccctttttaagccaatcatgggcaaagttatggaggttttccgccctggtgcagttgtgcttcagtgtg

SEQ ID NO: 22163 - DNA, 239 bp, Zea mays
ctccttattgtcactgcgttcatcactgttgcactgacatacttccagcttgctgctgaagaccatgagtggtggtggaggtcattcctttgcggaggatcaactggttttttcgtgtacggctactgcctgtactactactatgcgcgatccgacatgtctggcttcatgcagacatctttcttctttggctacatggcctgcatctgctatgcattcttcttgatgctcgggatggt

SEQ ID NO: 22164 - DNA, 156 bp, Zea mays
caatccccacaaagaaaagtcaggtgttctcaactgctgctgacaaccagacccaggtaggtatccgggtgttgcaaggtgagcgtgaaatggctacagacaacaagctccttggtgaatttgacctcgtgggcattccacctgccccaagaggct

SEQ ID NO: 22165 - DNA, 156 bp, Zea mays
gttcgtgagcttgttgctgatgatgagtggctcaatggcgaattcatcacaactgtccaacagcgtggtgctgcaatcatcaaagcgagaaagttctccagcgctctctcagctgctagctctgcttgtgaccatattcgtgattgggttcttgga

SEQ ID NO: 22166 - DNA, 113 bp, Zea mays
gacatttgatcagcgtcccgattatagtttcttgaggcatgtctttcgagaattgtttgagcgcgaaggctatcaatttgattatgtgtatgactggactttgttgaagtgta

SEQ ID NO: 22167 - DNA, 115 bp, Zea mays
ccttcttccagccctaccacctcatcatcgtgcaggacggcgacccgaccaagaccatcaaggtgcccgagggcttcgactacgagctctacaaccgcaacgacatcaaccgcat

SEQ ID NO: 22168 - DNA, 154 bp, Zea mays
ctcttcccagagctcattgctgagccaactgacgctcgctcgatgtcctttgttggcactcatgagtacctggccccagaaataataaaaggggagggccatggaagtgctgtggattggtggacctttggcatattcttgtacgagctgttgt

SEQ ID NO: 22169 - DNA, 116 bp, Zea mays
ctcaaaataatatctgctaatgattacatgctacttgttctctacctgtagatacatcaaggaaggtagcactgtaagtgtgatgggggttgtccaaaggaacgacaacgttctga

SEQ ID NO: 22170 - DNA, 238 bp, Zea mays
gaccaagtccgaccttgtcaacaacctcggtaccatcgccaggtccgggaccaaggagttcatggaagcccttgctgccggcgctgatgtgtccatgattggccagttcggcgtcggtttctactctgcctacctcgtcgccgatagagttgtcgtgaccaccaagcacaacgatgacgagcagtacgtgtgggagtcgcaagcgggcgggtcgttcactgttactcgtgacacgtca

SEQ ID NO: 22171 - DNA, 192 bp, Zea mays
tctatctatagtatcgtgttaccgttcgcttctgtcaccgtgttagtgtccgttctacctttggattaggtgttggtacccctgttgttccctttgtttgctcccgctatgaaacgagacgagagaagaatgagcaaggtttttgttcgcagctatttttgtccaatgatattgatatgttgttcccctgtc

SEQ ID NO: 22172 - DNA, 232 bp, Zea mays
ctccactcatcttttctcgtttagaacctctaaaatttcccccactcgccagtcgcagcagcacctgtagcagccatggacgccagcggagccggtagcaaggggaagaagggggcggccgggcgcaaggcaggcggccccaggaagaagtcggtgacgcggtccgtcaaggccgggctgcagttccccgtcggccggatcgggcgctacctcaagaagggccggtacgcgc

SEQ ID NO: 22173 - DNA, 240 bp, Zea mays
cccacgcgtccgctccacagcagtagcaagagggatagagcaaggccacacacacacacacaccactaggctaggttagccttttaatcgtcgtcgagaagcaagaagggcgcgcacgcaagcaggcaagcaagaagagagccgatcgaccgagagctagcacgcgatggcgaggtcttccaagatgatggtggcggcagctctgctggccttggccctggccgtgtcgaccgccgaggc

SEQ ID NO: 22174 - DNA, 238 bp, Zea mays
cagatacgaggaatttgagaagttgaacactgaggttcttggtgtttccattgacagtgtgttctcccaccttgcatgggtgcagacagacaggaagtcgggtgggctcggcgatcttaaatacccacttgtttctgatgtgaccaaatcaatttcaaaggcctttggtgttctgatccctgaccagggtattgctttgagaggactgttcatcattgacaaggagggagtgattcag

SEQ ID NO: 22175 - DNA, 230 bp, Zea mays
cccacgcgtccgctttgtcatcacaagattggctgaagttttcatcatacaaggagcgcctacttggcctttcatttggtttgctgtcaacaaggaaccatgacttgtcatacaaccttgcgtggcgtaccttaactgatccatcacgtgtctcatcaaaggccataaggaggcagttagggcataaccttctttctgcattgaagtacacatacaagattgataagagg

SEQ ID NO: 22176 - DNA, 76 bp, Zea mays
ggtgggctggcttctcctcaccctcttatcaagtcctcctcgggttagggttccttagggttttgtggaggggcga

SEQ ID NO: 22177 - DNA, 230 bp, Zea mays
cctgaacagtgcatttctggtggccgtggtgttcctggttctgtgcctgacggtaaccctgatcttcgccaaggaggtgccatacagagcgaacgagaacctcccgacgacgaaggcaggcggcgaggtccagactgagcctaccgggccacttgccgtgctcaagggcttcaaggacctgccccccgggatgccgtccgtgctcctcgtgactgccatcacctggctct

SEQ ID NO: 22178 - DNA, 215 bp, Zea mays
cgctggacgagctgttcgacaagtgccgcgtccggcccaaggacgtgggcgtgctggtggtcaactgcagcctcttcaacccgacgccctccctgtccgccatgatcgtcaaccactacaagatgcgcggcaacatcctgagctacaacctgggcggcatgggctgcagcgcgggcgtcatcgccatcgatctggcccgcgacatgctccaggcc

SEQ ID NO: 22179 - DNA, 233 bp, Zea mays
cagcatggaaactctcacaaatgaagctggtgaagtcactagtcatttgcaaggaatgttcaaccggacaataagattactggaagcgggaatcaagccagtttatgtttttgatggcaagcctcctgatatgaagaaacaagaacttgctaaaagatactcaaaaagagatgatgcaaccaaagatctgactgaggcagtagaggtaggagataaagatgcgattgaaaaat

SEQ ID NO: 22180 - DNA, 232 bp, Zea mays
gtcaactgttcctggaggtcctagtgtggcctgcagcactgccaaagctgttgaatgggacgcatcctggtccaagaaccttgatccttctgggcgtgctgctttgggtgttcacgatgctgcgtatgaagacactgcagggaaaactcctgcctctgctgatcctgtctcagacaagggccttcgtccagctattggcgaaacctagggacacccgttgcttcagccacag

SEQ ID NO: 22181 - DNA, 233 bp, Zea mays
tgctgagagaagaagggctggcctccttctatggaggcttgggtccatctcttgtagcaattgcaccttacattgctgtgaacttctgtgtttttgacctgatgaagaaatctgtaccagagaagtacaagaatagaccagaaacatctctggcaaccgctcttctttcagcaacatttgcaactttgatgtgttatccgctggacactgttaggagacagatgcagatgaaa

SEQ ID NO: 22182 - DNA, 229 bp, Zea mays
gtagggaaggaggtcatcacacggctgacagcaaatatggtcacaaacagtacgttttatacagactccaatggaagggatttcctcaaaagggtgagaaactacagggaggactggaatcttcaagtaactcaaccagttgcaggaaattactatccggtgaacctaggagtgtatgtagcagatgaaaaatatgagctatctgtgcttgtggaccgtgctgtcggag

SEQ ID NO: 22183 - DNA, 229 bp, Zea mays
caccacattgacccagtctccctcccacgcgtcatacgccaacacctccccgtcccgcacctcatacgccaatacctccccatcccacgcctcatacgccacagtctccccaacccatgcatcatacgccacaccctcccctccccacgcatcatacgccacaccctccccttacccttacgacaggccggttggacacggcgtgtactgcacccggagcccgccggtg

SEQ ID NO: 22184 - DNA, 225 bp, Zea mays
gggcgaaacccacaaaccctctccctcccgtactccggcctacacatccaggggcgatgacgctgggtagctccggcgccggatcgagcgtcgtcgttccccgaaacttcaggctattagaggagctcgagcgtggagagaagggcattggtgatggaacagtgagctatggaatggatgatgccgatgacatctacatgcggtcatggactggtaccatcattg

SEQ ID NO: 22185 - DNA, 223 bp, Zea mays
gacaagagaggtttacaaggaatgcctgaggttgattcctcacaagaaattcacgtttgcaaagatgtggctcatggcggcccagtttgagatacggcagagaaatctaaaggctgcaagacaaattcttggaaatgcaattggaatggccccaaagggcaagatattcaagaaatatattgaaattgagctttatctgggcaactttgaccgttgtaggact

SEQ ID NO: 22186 - DNA, 226 bp, Zea mays
gacccacgcgtccgctcaggaaccagtaccagttcgaatacgccacaatatacatttgtggaacaatggctttactgtggatgatggtccactgagatactacgatgatcctgaaaatgaagagttccttgagagccttaagatgtcaaagtgccccaaggagctggtgcctactgatggagaacatgttgatgtgtctgttattaaaaggatggaagattaccgg

SEQ ID NO: 22187 - DNA, 227 bp, Zea mays
cccacgcgtccgtaaggttcttagactaggtgatggaggatcagactattcagcattcgtccaacatgttggtattccttcgatgaatataatttttggagaaggaccaggatatccggtttaccactccttatatgatgactacgtatggatggcgaaattcggagatcctgcgttccgtaggcatgtggcagctgctagcatatggggaatgatggctttgaggt

SEQ ID NO: 22188 - DNA, 226 bp, Zea mays
gggaaaaatcctgttaaccttgatcaccttagtgtgaggggaaacaacatccgctattatatccttcctgacagcctagacctggagactttgctggttgaggaaacaccaagggtcaagcctaagaaagctacttctgggaagcccttgggccgtgggcgtggccgtggtcgtgggcgcggtcggggtcggggacgttgagcatgctagctgcttttggaaattg

SEQ ID NO: 22189 - DNA, 227 bp, Zea mays
tctgcttccagagccccccgccgccgctgcgccctcctctcggtcctgccgtccgtcgaggtaaaaggacagcatggtgagggtcagcgtgctcaatgatgctctcaagtccatgtacaatgctgaaaagatagggaaacgtcaggtcatgatcaggccgtcatccaaggtgatcatcaagttcctgacggtcatgcagcgccatggttacattggcgagttcgagt

SEQ ID NO: 22190 - DNA, 227 bp, Zea mays
ctcctagctgaagatctcgagtgcaacgcaacgttggcgcttggcggccagtagtagcagctaatttagcgtcgctccttcctactagacgagagatcgagaaaccatggccaagctccaagtcactcctggcgccgcgttcaccgagtgcaatgaactcaacttccagggcctgtacatgtaccacacgcccctgggtcccaaggccaaccaagctgcgatcctag

SEQ ID NO: 22191 - DNA, 257 bp, Zea mays
ggactgtgagggagcacctgtacaacaccaagagggcggcgctgtcctggaagaagcggctggagatatgcatcggcgcggcgcgggggctgcactacctgcacacaggcgcgaacacaccatcatacacagggacgtgaagaccaccaacatcctgctggacgacaagctggtcgccaaggtttccgacttcgggctgtccaagacgggtcccaacaacgtcgacaacacccacgtgagcacggtcgtgaagggca

SEQ ID NO: 22192 - DNA, 255 bp, Zea mays
cactccctccctccgtcgccatggcgcgcaagaagatccgggagtacgactccaagcgcctcctcagggagcacctcaagcgcctcgcgggcatcgacctcaccatcctctccgcccagatcacgcaatcaacggacttcgcagagcttgtgagccagcagccatggctgtcaaccatgaagctagtggtgaagcccgatatgctgttcgggaagcgtgggaagagcggcctcgtggctctcaacttggatttcg

SEQ ID NO: 22193 - DNA, 214 bp, Zea mays
gttgcagtgcggcaagggaacatcctcgcaactgctttccacccagaattgacatcagactccagatggcatcgtttcttcttggacatggataaagaatccccagcaaaggcgttttctgcgctctccctgtcgtcatcgtcaagagacactgaaggcctgccaaagaataagccgtttgatctgcccatttttgagtaacgctacacccaag

SEQ ID NO: 22194 - DNA, 248 bp, Zea mays
agtagctctagtttagttctagtttagtatttcaatccccaaattctccgcttctcttcggctctacgtcgattagaggagtctaggtcggcctgccgagcctagacaacatctcggatctctcctccccgacggggtccctcccgggagcgagatccaagcgccgccggctgatgactggagtccaataaccagaacgaaatctgatgtaggatgaggtagaaactccattcccttcccataatggg

SEQ ID NO: 22195 - DNA, 255 bp, Zea mays
ggcgaggagggcaggaagaccgaagaccgagccgtgcgggggctcgggacgggaacgggacaggacctcaaaatctcagatccttcctgcccgcccgcccgtgcccgtcgacgcgtcgttcttgccggccgcgccccacctccgccctctcctcctccagggggatcggatacgccacaggctgcgcgatggtgctgtgggtcttcggctacggctccctcatctggaaccccggcttcgacttcgacgacaaaa

SEQ ID NO: 22196 - DNA, 251 bp, Zea mays
gatgcgccactgctaccctcaggcttccgtgtcattccactggatgcaaagacggatccaccatcaggcacacgcacacttgaccttgcatctaccctcgaggttggatctggtgggacaacgcgtgcttcgagtgacgcctccagcacctgcaacacaagatcagtgctgaccattgctttccagttctcatatgaaaatcacctacgagagagcgtcgcagccatggccaggcaatacgtcaggaccgt

SEQ ID NO: 22197 - DNA, 248 bp, Zea mays
acgattctcctcctccgtccgcgtactctcggtttcggcgatgtcggggcgcggcaagggcggcaaggggctgggcaagggcggcgccaagcgccaccgcacagtgctgcgcgacaacatccagggcatcacgaagccggcgatccgtaggctggccaggacgggcggcgtcaagcgcatttctgggctcatctacgaggagacccgcggcgtgctcaagatcttcctcgagaacgtcatccgcgacg

SEQ ID NO: 22198 - DNA, 220 bp, Zea mays
ggccaagaccgacgccctcaagaacgcgcacctctccgacatctgcatcagcacgtcggcggcgcccacctacttcccggcgcacttcttcaagaccgaggccaccgacggccggcccccccgcgagtaccacctcgtggacggcggcgtcgcggccaacaaccccaccatggtcgccatgtccatgctcaccaaggaggtgcaccgccgcaaccccaac

SEQ ID NO: 22199 - DNA, 248 bp, Zea mays
cccacgcgtacgcccacgcgtccgcccacgcgtccgccgatccccaattcctccttcggatctcgcattcccgcagcaggtgtgaaggaagggggacgcggaggaagatggggctcgcgttcgggaagctcttcagccggctcttcgccaagaaggagatgcggatcctcatggtcggcctcgacgccgccggtaaaaccaccatcctctacaagctcaagctcggcgatatcgtcaccacaatcccc

SEQ ID NO: 22200 - DNA, 241 bp, Zea mays
gctgctgtgaagtactcccgtgggacgttcatctttcctggcgcacagccagccccccacaggagcttctctgaggaagttgctgcacttaaccgctactttggcggcctgaaatctggtggtaatgcttatgtgattggagatccagcaagacctggacagaagtggcacgtcttctacgccactgagtacccagagcaaccaatggttaaccttgagatgtgcatgactggtctggaca

SEQ ID NO: 22201 - DNA, 233 bp, Zea mays
gttcttgcgcgtaccgtacacagccccgatccgaatcgtcctcctcgcgagcctcgccgatcccccactcccctcccctcgcttcaagatgcagatctttgtgaagaccctcaccggcaagactatcaccctcgaggtggagtcttctgacaccattgacaatgtcaaggctaagatccaggacaaggagggcatccctcctgaccagcagcgccttatcttcgccggcaagc

SEQ ID NO: 22202 - DNA, 188 bp, Zea mays
cggagcctctccttcccggtctcctccgcccgttgccttcgtcccctccatctccggctgcgtcgccggcgagcccgacaccgcgaatcggatccgccgacaaggcgagagggaaaagatggggcttacgttcaccaagctgttcagccggctgttcgccaaaaaggagatgcggatcctgatggtgg

SEQ ID NO: 22203 - DNA, 239 bp, Zea mays
caaccctgacaagattgcctttgtccctatctctggttttgagggtgacaacatgattgagaggtgcaccaaccttgactggtacaagggtccaaccctgcttgaggctcttgaccagatcaccgagcccaagaggccttcagacaagcccctgcgtctgcccctccaggacgtgtacaagattggtggtattggaactgttccagttggtcgtgtggagactggtgtcatcaagcctg

SEQ ID NO: 22204 - DNA, 238 bp, Zea mays
gtcaactggcaccattggcaagcgcctttccagcatcaatgtcgagaacgtggaggagaaccggcgggctctccgtgagctcctgttctgctgccctggtgccctccagtacatcagcggtgtgatcctcttcgaggagaccctctaccagaagaccaaggatggcaagccttttgtcgatgtcctcaaggagggaggcgtcctccctggcatcaaggtcgacaagggcaccattgag

SEQ ID NO: 22205 - DNA, 239 bp, Zea mays
cccacgcgtccgcaacggcaatttgcgccattttattagaaattgcggtggcgcaattaaatatatcgcggctgcccctgtcgcccccgcccgtccgcctccttcgtcagctggcagctgctataataaggaaggcagaagataacggagggcaaggaaactcgctcccactctactcctatccactgcggcctggacgcgtgcgagagacttgaccaagcagcagcagcagggatggc

SEQ ID NO: 22206 - DNA, 239 bp, Zea mays
gccacgcgtccggctttcactctccagggccccactcccacctcgccgccgcatccatggcgatcacagcgccaactcccgacatcctcggcgagggccagtccggccaggacgtccgcacgcagaacgtgatggcgtggcggggcggtggccaacatcatcaaatcctcgctcggcgccgttggtctcgacaagatgctagtggacgatattggtgatgttacaatcagtaatgatgg

SEQ ID NO: 22207 - DNA, 240 bp, Zea mays
cgcacgcgtccggcccaagagaaggtcctcccgtatgctgactacatcttcggcaacgaaactgaggcaaagatctttgccaaagtcagaggatgggagactgagaatattgaggagattgctttgaagatctcgcaacttcctttggcttcaggcaagcaaaagaggattgctgtgattacgcaaggtgctgatccagtggttgttgctgaggatgggaaggtgaaaacgttccctgtg

SEQ ID NO: 22208 - DNA, 234 bp, Zea mays
gaagaggaccagaagatattcaagtacttagactccattgatgtggatgattctgatgttaaggcaggatactccattcagcttaacttctctgagaacccgtactttgaggacacaaagcttgcaaagacctatatctttgctgatgatggaacaaccacaataaaagcttccgaaattaagtggaaggaaggaatgggacctgcaaatggaaatggtattaacaagaagggg

SEQ ID NO: 22209 - DNA, 231 bp, Zea mays
ctaatccacatattaaatttctccgcatcatgcgtgggacacaaggtgcgttgattgtggcgtcaggcgtacagggtatagatggcgtcagtggcctgtggcggaatgttgccaggtatctgagtccactttcagctgcgcctttggtggcactagttggatttggactgtatgagctaggatttccatcggttgccaaatgtgttgagattggtctacctcaactcatcc

SEQ ID NO: 22210 - DNA, 232 bp, Zea mays
cgaacgccggagctcgacaaggacgaccgacgacgcacgcggagatccggcgtactgcaaattttgaaaactgaactgtaagatggcatcagcagagctttcccgtgaggaaaatgtgtacatggcgaactcgctgagcaggcggagaggtacgaggagatggttgagttcatggagaaggtagccaagactgttgactcggaggagctcactgtggaggagcgaaacctct

SEQ ID NO: 22211 - DNA, 235 bp, Zea mays
cggacggtgggttgtggaggcccaatcaaatgacaaaatggagtgtcaccatggttcgtgccagttatcgactcctcatattcatagccataaggtcattctgagcgtgagtgcgaatacctccgtgctttgttccagtctggatgcatgagagctttgcggagactatcagagttccggtcggatgggaagcactgagaaaactagttcagtggttctactcaggcgagctgcc

SEQ ID NO: 22212 - DNA, 251 bp, Zea mays
cccacgcgtccgggatgctaagttcaagctttgcaaggttaggtctgttcagtttgggcagaagggcatcccttatctgaacacgtatgacggccgcaccatccgctaccctgaccccctcatcaaggccaacgacaccatcaagatcgatctggagaccaacaagattgtggacttcatcaagtttgatgttggcaacgtcgtcatggtgactggcggaaggaacactggccgcgtgggtgttatcaaga

SEQ ID NO: 22213 - DNA, 254 bp, Zea mays
ggaaaatgagaggaagaaactcgccatattcacagcccttgcattttcgcagaagctatcagggcttcctcctgagactgtgttccagccattgctcaaggataatcttgttgccaaagggatagtactttcattcattactgagtttttcaaggagtaccttgaggaaaacagcttggatgatttgattgcacttttgaagaaaggcaaaatggaggacaatctgttggacttcttcccatcagctaagagat

SEQ ID NO: 22214 - DNA, 258 bp, Zea mays
gaggtttctacctcaaagactggtaagcatggccatgccaaatgccactttgttgccatagacatattcaacgggaaaaagcttgaagatattgttccttcatcacacaactgtgatattccgcatgtgaaccgtactgagtaccagctgattgatatatcagaggatggatttgtgagccttcttacttcagatggcaacactaaggatgatcttagactcccaactgatgagactcttgtggcccagatcaaggaa

SEQ ID NO: 22215 - DNA, 253 bp, Zea mays
agcctaaaccggaaccaaaacctgcaccacaaccagaccccaaaccagaccctaaacccgcaccacagccagacccaaaacctgcaccacaaccggacccaaaaccagaacccaaacctacaccacagccagacccaaaaccttcaccacaaccaggcccagagccaaaacccaagccagcgccacagcctgaaccaaaaccagaacccaaacctacaccacaaccagacccaaaacctggaccacaaccaga

SEQ ID NO: 22216 - DNA, 251 bp, Zea mays
ccacgtcctcctccggctactcgctcgttccgccccggcgtcccgccctcagccgccgccgtcgccccctccctcggttcgcctcgtcgtcgtcatgggcaaggcctccaaggacaagagggacatctactaccggaaggccaaagaggaaggctggagagctcgcagcgccttcaagctcctccagatagaccaggagttcaacatcttccatggagtgaagcatgtggttgacctgtgtgctgctcccg

SEQ ID NO: 22217 - DNA, 248 bp, Zea mays
ggacctggggcttcgcggacatgagctgggaggagttccgtgcgacccggctcggcgcagctcagaactgctccgccacgcttaccggcaaccaccggatgcgcgccgccgccgttgcgctgccggagacgaaagactggagggaggatgggattgtgagcccagtgaaaaaccagggccactgtggatcatgctggaccttcagcactactggtgcacttgaggctgcatatacccaggcaactggc

SEQ ID NO: 22218 - DNA, 252 bp, Zea mays
cccacgcgtccggattggtctccggaaaggatccaaatcttttgaggaagcacgtgccgctggattcaccgaagagagcggaaccttgggcgatatttgggaaaccgtctccggcagcgatcttgtgttgctgctgatatccgatgctgcacaggctgacaactatgagaagatcttctctcacatgaaaccaaccagaatccttggttaacccaaggaattcctccggggcatttggcaatcactcggact

SEQ ID NO: 22219 - DNA, 253 bp, Zea mays
cagttacagaaagcaactgctcaaatggtctggtaacgaagaatctgcaaactttgagagatttattgctggtgcttttgctggtgttacagcaacgattatgtgcatacctatggatacaatcaggacaaagatggtagctcctggtggtgaagctttaggcggggtcattggtgttgcccgccacatgatccaaactgaaggattcttctcgctgtataagggattggtgccttctcttatcagcatggca

SEQ ID NO: 22220 - DNA, 236 bp, Zea mays
acccaactcgccgccgccgctgccaacgccgcctgctgccgcagccgccatgggggcgtacaagtatgtgtcggaactatggaggaggaagcagtcggacgtgatgcgcttcgtgcagcgcgtgcgctgctgcggagtacaggcagcagccgtccatcgtccgcctcaccaggcccacccgccccgacaaggcccgtcgtctcggctacaaggccaagcagggatatgttgtctac

SEQ ID NO: 22221 - DNA, 248 bp, Zea mays
gaagctcaagctcgacagcttccaagggcaccgggaatggctggcggaggtcaattacctggggcagttatcccaccctaatctcgtcaaactcatcggctactgcttggaggacgagcagcggcttcttgtgtacgagtacatgccgagagggagcttggagcatcatcttttcaggaggggctccaacttccagcggctcccatggaacttacgcatgaaggttgctctcgaggctgccagaggtc

SEQ ID NO: 22222 - DNA, 240 bp, Zea mays
  unsure (1)..(240): unsure at all n locations
ggacgctggtagaagatgctggacaagctgtgggacgacgtggtggccgggcctcgccggagacgggcctcgagaagctccgcaaggccaccaccgcccgcccgctcgtcatcaacaaagacgcggacggcggcagctacaagcgggcgcagtcgacgccgtcgatcccgacgacgccggtgacgccgtcgtcgtcgacgacgccgcgcggcgncggcaacgtgtggcgcacgtcttcca

SEQ ID NO: 22223 - DNA, 246 bp, Zea mays
tgtcgcgctcgactacgaacaagaactcgagaccgccaagagcagctcatcagttgagaagagctatgaactgcctgatggacaagtgatcacaataggcgcagagcgcttcagatgcccggaggttctcttccagccatccttcattggtatggaagctccaggaatccacgagacgacctacaactccatcatgaagtgtgacgttgatatcaggaaggacctgtatggcaacattgtcctcag

SEQ ID NO: 22224 - DNA, 243 bp, Zea mays
cccacgcgtccggttcggaacgccaagcccccctccggcgaaatggcccccaagcgaggtggcagggcgccggtgccggccaagaagaagacggataaagtgacgaaccctctgtttgagaagaggccgaagcagttcggcatcggcggcgcgttgccgcccaagaaggccctgcaccggttcgtacaagtggcccaaggtcgtgcgtatccagcgcgacgccgcatcctcaagcagcgcctc

SEQ ID NO: 22225 - DNA, 248 bp, Zea mays
gctaaaggtgtgattaagaaagttgtagactgggaagaatcacgctcgttcttctataaaaggctacggaggaggatcgcagaagatgttcttgcaaaagaaataaggcagatagtcggtgataaatttacgcaccaattagcaatggagctcatcaaggaatggtaccttgcttctcaggccacaacaggaagcactggatgggatgacgatgatgcttttgttgcctggaaggacagtcctaaaaa

SEQ ID NO: 22226 - DNA, 245 bp, Zea mays
gacactggcggcgggtgcggcgcggcgttgggatgcggacgatctgcgatgtgtgcgagagcgcaccggcggtgctcttctgtgcggccgacgaggctgcgctttgccggccttgcgacgagaaggtacacatgtgcaacaagcttgctagtcggcatgtgagagttgggcttgcagaccctaataaactggcacgttgtgatatatgcgagaattcacctgctttcttctactgtgagatagat

SEQ ID NO: 22227 - DNA, 236 bp, Zea mays
ggaccgtggtgcgactcccagaagatcttcaggtgattctggctcctcgactcctggtcatacagatggtgattcttctaacagaacggtatatgttggtgggcttgaccccaatgtcagtgaagatgaactgagaaaagcctttgccaaatatgatcttgcctctgtgaaaattcctctaggaaagcaatgtggctttgttcaattgttaacagactgatgctgaagagcataca

SEQ ID NO: 22228 - DNA, 235 bp, Zea mays
ctctcaactcccaaggtcccttttttttctcgatctggaagcgccgcagtagcagccatggacgtgagcggagcaggcggtaaggcgaagaagggcgcggcggggcgcaaggccggcgggccgacgaagaagtcggtgtcgcggtcctccagggccgggctgcagttccccgtcagccgcgtcgggcggtacctcaaaaagggccggtacgcgcacgtgtaggcacgggtgcccc

SEQ ID NO: 22229 - DNA, 234 bp, Zea mays
gccaagaagcgcaagaagaagacgtacaccaagcccaagaagatcaagcacaagcacaagaaggtgaagctcgcagtgctgcagttctacaaggtggacgacgccaccggcaaggtgacccgcctccgcaaggagtgccccaacaccgagtgcggtgcgggtgtcttcatggccaaccacttcgaccgccactactgcggcaagtgcggcctcacctacgtctacaatcagaag

SEQ ID NO: 22230 - DNA, 235 bp, Zea mays
cccacgcgtccgcccacgcgtccgccacgcgtccgcccacgcgtccgggaaaatgtttaacctgaacaaagttaagctgcactttactgatggtgcacttagattgttagctaagaaggcgatagctaaaagcactggtgctcgtggtttaagagccatcttggaaactgttcttttggaggccatgtatgaggttccagacgaaaaaacaggaaatgagcgagttgacgctgtt

SEQ ID NO: 22231 - DNA, 232 bp, Zea mays
ctcttctggagatgggataccaggtccggtttggaattctagaagcaggggcttttggtgttgcccagtccaggaaaagggcgtttatttgggctgctgcacctggagagatgcttcctgattggccagagccgatgcatgtgtttgctagccctgagctgaagataacactgcctgatggccaatactatgcagctgcaagaagcactgctggtggagcgcctttccgagc

SEQ ID NO: 22232 - DNA, 232 bp, Zea mays
gggacgcagaggatgcaatccgtgacctagatggcaagaatggatggagagttgagttatctcgtaatgccagcggtggtcgtggaggtcgtgaccggcatggtgggtctgagtccaagtgttacgagtgtggtgagactggccactttgctcgtgagtgccgtttgaggattggttctggaggtctaggcagcggaaggcgccgaagccgtagccgtagccgcagtcgcag

SEQ ID NO: 22233 - DNA, 233 bp, Zea mays
cccacgcgtccggatctcgcattcagcgcagcgcaggtgtgaaggaagggggacgcggaggaagatggggctcgcgttcgggaagctcttcagccggctcttcgccaagaaggagatgcggatcctcatagtcggcctcgacgccgccggtaaaaccaccatcctctacaagctcaagctcggcgagatcgtcaccaccatccccaccatcggtttcaatgttgaaactgttg

SEQ ID NO: 22234 - DNA, 229 bp, Zea mays
gattgagactgtcaagcagcaagttaaggatgctaaatttcctgatttagaggttattcgcatgttgtgggatgtgctcatggaggctgttcagtggtctgggaagaaccagcagcaaaattccaatgcagcacttaggcaggtgaaagcttggactgagcttttgaatgctttttgcacgagtggcagactcgaactggaacttatacacaaagttcagacacagtgc

SEQ ID NO: 22235 - DNA, 229 bp, Zea mays
cccacgcgtccgcccacgcgtccgcagttatttaatagtcttcttcttcgccgggagtgttgttcatttagcaatggggaatatgtgaaagctggattggcagaattagagcagtggtgcatttatgcaactgaagaggacgcagggttcttcctggaagaattaaaacatattaggcaggctgttggattccttgtacgtattctatgctgattggatgttctatttt

SEQ ID NO: 22236 - DNA, 232 bp, Zea mays
cttggtcagactagttggacaacatcaacgctgaatcacattaagcagtgtgagcatgatatgcttttactccctggtgatctctcttatgctgattatatgcaacacttgtgggattccttcggcacattggtggagccacttgctagcaaccggccttggatggtgacagaaggcaaccatgagaaggagcacattccattttttgagtcaggatttcaatcttataatg

SEQ ID NO: 22237 - DNA, 232 bp, Zea mays
caagaagttcagcaaccagtacaaggctacgattggggcggatttcctcaccaaggaggtgcagttcgaggacaggctcttcactctgcaagtaagattggttaccctagccgtatgccgtgccgtgatctgggagtagttatgtttctttacgccaacttcagccccgattagtactttcttaattagttcgcgaactcattcatcagctgggatatttagaaagtatagg

SEQ ID NO: 22238 - DNA, 229 bp, Zea mays
  unsure (1)..(229): unsure at all n locations
ncccttcgccaaagcctccgacacccaagccgaccccgccgacgtacaccccttctcccaagcctccgacgcccaagccgaccccgccgacgtacactccaagccccaagcctcccacacacccgacgcccaagccgaccccaccgacgtacaccccttccccaaagcctccgacgcccaagccgaccccaccgacgtacaccccttccccaaagcctccgacacccaa

SEQ ID NO: 22239 - DNA, 231 bp, Zea mays
gttccttacccgaggatccacttcatgctctcctcctacgcaccggtgatctcttctgcgaaggccttccacgagcagctgtctgtggcggagatcaccagcagcgcgttcgagccggcttccatgatggtcaagtgcgacccacggcacggcaagtacatggcttgctgcctgatgtaccgcggcgacgtggtgcccaaggacgtgaacgccgcggtggccaccatcaag

SEQ ID NO: 22240 - DNA, 229 bp, Zea mays
cccacgcgtccggagcagcaacccgaacatcgtatacacggacaggtccggacgccggaatcccgagtacatctccctcggctgcgacacacttccagtgctcaggggccggacccccatccaggtctacaccgactacatgcgcacttccgccagaggttccgtgactacctcggcaatgtcatcgcggagatccaagtgggtatgggtccttgtggagagctgaggt

SEQ ID NO: 22241 - DNA, 226 bp, Zea mays
cccacgcgtccgctcgcctcctctccctagtctccacgacgcaagggagagtgacggaaagcgacgcgcgcgagcgaggagggccaaggcgaagaggggaagcaccgcaccaggacccttgttcgccgccgccgcctctgatctccgcgaggttgtcaggattcaatatgtcgaccagcacattcgctacttcctgcacgctgttgggcaatgttagaacaacgca

SEQ ID NO: 22242 - DNA, 225 bp, Zea mays
cggacgcgtggtcctccagagtatgcctacacgatgcaggtgacggtgcccggcaatgtgtacagctacggcgtggtcctgctggagatcctgacatccaagctacccgtggacgacgtgttcggcgagggcgtggacctcgtcaagtgggtgcacaccgcaccagcaaggggtgagacgccagagcagatcatggacccccggctgagcaccgtgtcgttcgcg

SEQ ID NO: 22243 - DNA, 225 bp, Zea mays
atcaggaataacaaaagaagggaagaattgaagagttgcagctgacattaagaaaagaacttgtggatgtggacagtggcagatttctggaaaaccttgcactcatgcaatagctctatttgggaaacgtagaaacctgtaacatgaggactttgtggatgactactattcaattgagaggttcaaaatggcttatcagtttgtggtcgctccgatgggtgacaa

SEQ ID NO: 22244 - DNA, 227 bp, Zea mays
aggcttgaaagcagccttcctatatatccacaacgaccggggcaaaaggactgtgccttctatatgagcactggaacctgtaagtatggagagacctgcaaatttgaccatccacaacgggttccagagggtggggttccaaactggaaagaggccccgaatgttgaagattcttatcctgagcgaccaggggaaccagattgtccttatttattgaataatagatg

SEQ ID NO: 22245 - DNA, 226 bp, Zea mays
gcgagatgctgttcggctaccagccgtgcgccaccaaggacccccgcgtgttcggcgccacggccaaggagttcgtgcccggccggttcctcggcgaggagggcagcaagctgctgcagtacgtctactggtccaacggccgcgagaccgagaaccccaccgtcgacaacaagcagtgccccggcaagaactttgtggtgctcgttggcaggctcttcctcgtcga

SEQ ID NO: 22246 - DNA, 225 bp, Zea mays
gataatgctaacgacataaaggcaaagtacatcatcgaggctgccaatcaccccacagatccagaggcagacgagatcctgtcaaagaaaggcgtcctcatcctccccgacatactggccaactctggtggcgtcacagtgagctacttcgagtgggtacaaaacatccaggggttcatgtgggacgaagagaaggtaaacgcggagctgcggacgtacatgacg

SEQ ID NO: 22247 - DNA, 224 bp, Zea mays
gcactcgaagcccaagtcgacggtcggcacgccggcgtacatcgcccccgaggtgctctcccgccgggaatacgacggcaagacagccgacgtgtggtcctgtggagtcactctttatgtgatgctggtcggtggttacccttttgaggacccagacgacccaaagaatttcagaaagacgatcgggaggatcatgtcaatccaatacaaaataccagagtatg

SEQ ID NO: 22248 - DNA, 92 bp, Zea mays
ctcacgcgtccgtcttgagtcagcaccagcagcgttactcggctgttctccgttgaatggtacagaaacatgatcagcggcaagcatgaagt

SEQ ID NO: 22249 - DNA, 293 bp, Zea mays
cgttggccaagatacccgcttgaactacagagctattgatctacgaacaccctcgaaccaagccatattccggatccagtgtcaagttgaaaacaaatttagagattttttgttgtcgaagaactttgtcgggatccacaccccaaaattgatttctggatctagtgaagggggtgcggctgtattcaagcttctgtacaatggtcaacctgcttgtttggcacaatcccctcagttatacaagcaaatggctatctctggtggttttgagcgagtatttgaggtcggccctg

SEQ ID NO: 22250 - DNA, 234 bp, Zea mays
ctcatacactgtgactttaatgagttcaatatcatgattgacgatgatgaaaaaattacagtgattgactttccgcagatggtgtctgtttctcaccgtaatgcccaaatgttttttgaccgagacattgaatgcatctacaagttctttaacaaaaggttcaatctgaggtcagtgaaaaatgaagaacaagctggatctgaaaatgatgatgaggggaacagccttcttttt

SEQ ID NO: 22251 - DNA, 189 bp, Zea mays
attccccacccgacactcctctgaggttggcagatctgtacgacaagaaggatgtctacacactcgacttccctacaatgccaattgatggaccgccagtgatcagaacatctgtcattaactccacatacaagaactttttggaaattgtatttcagaacaatgactcaactgtccagacctaccaca

SEQ ID NO: 22252 - DNA, 258 bp, Zea mays
gcttatgaagataaatcagcgtttgctatgtgcatcttctctcttgctcttggacctggagaggaaccaatcacatttgttggcaaaactgcgggaaagatcgtgcctgctagaggccctaattattttgggtgggatcctgtgttccagccagatggttttgaacaaacatatgctgagatgcccaagtcagtgaagaacaacatatctcacagagggaaagctcttgctctggtgaaagaacacttcgcatctgct

SEQ ID NO: 22253 - DNA, 272 bp, Zea mays
cgtttcttgaaaagagatacacagaagatatggagcttgatgatgccatccacactgcaattttgactttgaaagaaggatatgaggggcaaatttcctccaacaacattgaaatcggaattattcgagctgatcgtgagttcaaagttttaagcccagcagagatcaaggatttcttggaagaggtggagtaagctgtctgttgatgatactagttcagacaacaatagcagtgtcacttatgagcagccagcctgaagattgtcttggtt

SEQ ID NO: 22254 - DNA, 239 bp, Zea mays
cgatgatcccttcaaatttggactgttttgggtggtgcacatcggatgcattttacaaagctgctgaaccatgtgggattgaggaggaccttcaacgtcggcgtgaaggtggtgtgccaccaaggtttctgattatagatgatggttggcaagagatagttgactattatccagagacgttgcatcagatgtttgttgcgaatgcaggttccagtttcaagctaccagggattctgtga

SEQ ID NO: 22255 - DNA, 290 bp, Zea mays
caagaagactagaaccgaacctgaccatgtcgctgatccgccgcagcaacgtgttcgatcccttctccctcgacctctgggacccctttgagggcttccccttcggctccggcagcagcagcagtctcttcccctcgttcccgcggaccagctcggagaccgcggccttcgctggcgcgcggatcgactggaaggagactccagaggcgcacgtgttcaaggcagacgtaccggggctgaagaaggaggaggtcaaggtggaggtcgaggacggcaacgtccttcagatc

SEQ ID NO: 22256 - DNA, 229 bp, Zea mays
  unsure (1)..(229): unsure at all n locations
cataactactctgccaccaatccggggaggaatcaacctagcggtaagcggacatggcggcggcgaagatagcgccgtcgatgctctcgtcggactttgccaacctcgcttcggaggctgagcgcatggtccgcctaggcgccgactggctacatatggacatcatggatgggcacttcgttcctaacctgactattggggctccggtgatccagangcttgagaaata

SEQ ID NO: 22257 - DNA, 282 bp, Zea mays
caagaagttcctcatgaaggtccaatgtgtgatcttctgtggtctgatccagatgatcgatgtggttggggtatttctccacgtggtgctgggtatacctttggacaggatatatcagagcagttcaaccataccaatagcctaaggcttattgctagagctcaccaattggttatggagggtttcaattgggctcatgagcaaaaggtcgtgactatatttagtgcacctaattattgctaccgctgtgggaacatggcatcaatcctagaagtggatgat

SEQ ID NO: 22258 - DNA, 152 bp, Zea mays
acgttggggtgcagcagtttgtgctcagacacagcaaaccagtaacccaagtgtttggcttacataatgggctccagaacctcgtgatgtgtactgggataatttgtctattccatttgtctccttaatagttcgaaggctgataattgcag

SEQ ID NO: 22259 - DNA, 224 bp, Zea mays
ttcagattcttatgctggagagactgccacatcaaagaaaaagaggagaaccccagcctggtgtgaaagaatactatggcatggagatggtattgcacagttgtcctacttccgggggggatctcaattctctgaccatcgtcgtgtttgtcggacatttactgttgaggttaaaaggctagatggccgatcaatgcggcgcccatcaaacaccaacattagaa

SEQ ID NO: 22260 - DNA, 141 bp, Zea mays
cgaacctatcactaaaaccgaggactgtgagagtttcttcaactttttcaatcccccgcaggtccctgaagatgatgatgacatcgatgaagacactgctgatgagctgcagagtcaaatggagcatgattatgacatggg

SEQ ID NO: 22261 - DNA, 157 bp, Zea mays
agatcctagatcttctgctagctgagacgcaaccagcgaagatctgttctcaggttggcctgtgcacttttgatggcactcacggtgttagcactggaattcgtagcgtagtggatgacaaagctgggaaatcaaatggtggtctcaagagtgatcc

SEQ ID NO: 22262 - DNA, 256 bp, Zea mays
gcttcctgctccgcttctcgacgggcgggcaggccacgggcaccttcgggctgacgggcgtgtcggtgtgggaggcgctggtgctggagatcgtgatgaccttcgggctggtgtacacggtgtacgcgacggcggtggacccgaagaagggcagcctgggcaccatcgcccccattgccatcggcttcatcgtgggggccaacatcctggtgggcggcgccttcgacggcgcgtccatgaaccccgccgtgtcctt

SEQ ID NO: 22263 - DNA, 257 bp, Zea mays
gaattacttctgaaaatgttgcccatcgatatggtgtaaccaggcaagagcaagatcaggccgccgctgagtctcataggagagctgctgcagccacggcctctggaaaattcaaggatgagatcgtcccggtcccaacaaagatcgttgatcctaaaactggagaggagaaggaagttgtgatatcagttgatgatgggattaggccagggaccacagcatctggattggcgaaactgaaaccagtttttaaaagg

SEQ ID NO: 22264 - DNA, 255 bp, Zea mays
ctcttggtggctggttgcaacggtcatggcgacgtcgtctcgtcgggtgcccttggtgctgctgtacctgggagtgctggtgtcctggtccttcgcggcgggcagcttggaccaggagctggacatcacgtggggcgacgggcggggcaaggtccttgacaacgggcggctgctgacgctgtcgctggaccgcacgtccggctccgggttccagtcccggcacgagtacctgttcggcaagatcgacatgcagct

SEQ ID NO: 22265 - DNA, 260 bp, Zea mays
cccacgcgtccggttctgagaaggataaggacagaatacctggcattgacatcacgcttaaggagggtgacacatggatgttcgctggccatcaagttcttgtactggaaactcctgggcatacaacaggtcatgtgtgctattatttcgctggttctggagctatatttacaggtgacaccttgttcaatctatcatgcggaaagctttttgaagggactccacagcagatgtatgcctcactccagaaaattacagct

SEQ ID NO: 22266 - DNA, 259 bp, Zea mays
gcagctgcgtaccacaagccatagctgcgaccatcaagagttgctgggtttctgctaggcaacttcctgcttgatgtggacagtccagaaaacagaagtgaatccgcaatacgtccctgccatttcaaatttgacttggttacacctatctgtgacaatgttaatgtaatgagatcccatggcactagtgaagttcccaggtgtccacctgggattgcttgcggttgagagagacgatagtctgatgacccatgtatac

SEQ ID NO: 22267 - DNA, 261 bp, Zea mays
ctatagtcccagtagatttatacaggtcaatacgtgattcacaacttattggcctgtcaggatacacaaaggagttttcaataggaaagttaatatgccgaatgaagatcgcactgaagaggttaaagtgttaacttatattgattgtcaaacttccacggaatgatgtcctactaactgcaacatgggttattaagggtctcccaatttttggcattggtgttggacatagcacatatgacaaagcttcggtccactact

SEQ ID NO: 22268 - DNA, 250 bp, Zea mays
actagttctagatcgcgagcggccgcccgcgatctagaactagggctgaatggaagctatggataccgttttgccttcagtgtgctccaagaagcaacaaacaatttcgacgagaactgggtcattggagttggaggctttggaaaggtctacaagggggtgatgagggatgagagcaaggttgcagtgaagcgtggaaacccaaagtctcagcaaggtctcaacgagttccgtacagagattgagctcc

SEQ ID NO: 22269 - DNA, 253 bp, Zea mays
ctgcccgtctcctcggctgacccgtccacctcctttactctttccccctcgtgtccgccgctacacgcgccgccggaaccctagcctccgccgccacaggcagccgggatggagaaaggagcctcggaggcgtcgcccccttgcgctcgctgcggcaagcccgctcagcttcaatgccccaagtgtgtcgaacttaagttaccgcgtgagaacgcagctttctgcacacaggattgttttagggcagcatgga

SEQ ID NO: 22270 - DNA, 253 bp, Zea mays
cccacgcgtccgcccacgcgtccggtcaaggaatgtgctaagcaagaaacttatggtgaagaaagaggaatctctcgacaacattaacctattctcgatcattacagtcatgtcattcttcctgttggccccagtaaccttacttacagaaggtgttaaagttagtccagcagtgttgcagtctgctggtttgaacttgaaacaggtatacacaaggtcattgattgctgcattctgcttccatgcataccaa

SEQ ID NO: 22271 - DNA, 254 bp, Zea mays
cggcgacgtcctcgctgcgggactcgtccccgaactggagcaatcgcccgcccaaggagacgatcctcctcgacggctgcgacttcgagcactggctcgtcatcatggagccgccgcctggtgacgcctccaaccccgacatcacacgcgacgagatcatcgatagctatatcaagactctcgcccaagtcgtcgggagtgaggaagaagctaggcaaaagatatactctgtatcgactcgtcattactttggc

SEQ ID NO: 22272 - DNA, 243 bp, Zea mays
gaagcttgttaagaggcttgccaagaagtaccatgctttcttggcatcagaggccatcatcaagcagattccccgtctccttggtcctggtctcaacaaggcaggcaagttcccgaccctggttactcaccaggaatccctcgagtccaaggtgaacgagactaaggcaaccgtcaagttccagctcaagaaggtcctttgcatgggtgtcgccgtcggcaacttggcgatggaggagaagca

SEQ ID NO: 22273 - DNA, 244 bp, Zea mays
attggcacccttcctcagatcttcccgcagctcaagtggtactacattttagtagcctacgtcgtggcacctgtgctggccttctgcaatgcttatggaagtggcctcactgactggtctctcgcctccacctacggcaagctcgctatcttcgtgttcggtgcatgggctggcctctcacacggtggcgtgctcgttgggctcgcagcttgtggtgtcatgatgagcatcgtgtcgaccgcct

SEQ ID NO: 22274 - DNA, 245 bp, Zea mays
ggttgctctagatccgttcatcctggtggttttgtgaggtcgaaagcggcgagcgaattagaagatgctggacaagctgtgggacgacgtggtggccgggcctcgcccggagacgggcctcgagaagctccgcaaggccaccaccgcccgtccgctcgtcatcaacaaagacgcggacggcggcagctacaagcgggcgcagtcgatgccgtcgaccccgacgacgccggtgacgccgtcgtcgt

SEQ ID NO: 22275 - DNA, 247 bp, Zea mays
cccacgcgtccggagcactgcagctaagaaggctcctgccaaggaggaagaggaggaagatgaagaggagtctgacaagtccaagtcggaggtcaatgacgaggatgatgaagagggtagtgaggaggatgaagatgatgacgagtgatggagctcctcgagacaatggaccgtgcttcatccaacaatggagcggctacacaaggccccgtggcgatcacaaaaaaggagcctatatccatgtact

SEQ ID NO: 22276 - DNA, 261 bp, Zea mays
caaggccagctcgaacgtcaagataggaggttacaacatccccaagggcgccaacgtgatggtgaacgtgtgggcggtggcgcgtgatcccaaggtctggagcaacccgctggagtacagaccggagcgcttcctggaggagaacatcgacatcaagggcagcgacttcagggtgctgccgttcggtgctggccggcgtgtgtgcccgggcgcgcactcggcatcaacctcgtggcctccatgatcggacacttctgcatc

SEQ ID NO: 22277 - DNA, 285 bp, Zea mays
gttgatagagttgcgaaatggcggggaacaggcaagtcttatggtgctcaaatggtagtggatttattgatcgaattgtccttttaacataatgtgctggtacctgcagatggctggagtggctaaggcaggagatgttgtcggagaaattggggttctttgctataggccccaactattcacagttcgaacaaaatcattatgccagcttctgcgtatgaatcgcactgcctttctcagccttgttcaatccaatgttgcagatggaacaataataatgacaac

SEQ ID NO: 22278 - DNA, 282 bp, Zea mays
ctccgcgtacgtggatttccttgtggagcaggcctgcgacttcatgaggcaactgtaccagcaaggggccaggaggatcgcggtcctggggatgccgccggtcgggtgcgtgccctcgcagcggaccctcgccggcggcctggccagggactgcgaccccgctcgcaaccacgcggcgcgctgtacaactccaggctgaaggaggaggtcgtgctgctccagaaggagctggcgtgccagacgatcggctacgtggatatctacgacgtcctgcaggatatg

SEQ ID NO: 22279 - DNA, 282 bp, Zea mays
  unsure (1)..(282): unsure at all n locations
ctcaaaataatatctgctaatgattacatgctacttgttctctacctgtagatacatcaaggaaggtagcactgtaagtgtgatgggggttgtccaaaggaacgacaacgttctgatgattgttcctccatcagagcccatctcaactggttgtcagtgggccaagtgcgttctcccgaccaaccttgacgggcttgttttaagatgcgaagatacttcgaacattgatgtggtgccagtttaattagcggtgaagagtcgttgccanagaaagtgtctgtt

SEQ ID NO: 22280 - DNA, 285 bp, Zea mays
ggaggatgaagatgatgacgagtgatggagctcctcgagacaatggaccgtgcttcatccaacaatggagcggctacacaaggccccgtggcgatcacaaaaaaggagcctatatccatgtactagaattattcagtttcactccacatcgtgatgttttatttttacttttgtcgtgctataacggatagcgctcctcgttggcgccactggcgggtggttctgcctctggtctggtgtgtttgtgtgtggtcacacttgccagccagcagaggcgcctgcttg

SEQ ID NO: 22281 - DNA, 286 bp, Zea mays
atagaatgaagtcctctggttgtaagcctgataccttgttctacaacgccctgatcaaccttctcggtagagcaggtcacttgtttgaagccaaccaagtgtttcgcgtggagatgccaaggaatggcgtgctccgcaacgtggccacctataacacgatgatatcaattctctgccaatatgggcgagatgatgacgctctcggtgtactgaaagagatggaagcacaatcctgcaaacctgatcttaagacatatcagcgacttcttagactgctgcttggtag

SEQ ID NO: 22282 - DNA, 279 bp, Zea mays
ccgcctcccgtctttcctcaagaagtcgattcccttccccaagaacccaagcccccaccatgacaagctcctcctctccttcccgaaaggcgctgagcaagatcgcttgcaatcggctgcagaaggaactcgccgagtggcaactcagcccccctgctggattcaagcacaaggtctccgataacctacaaaggtgggtaattgaggtcactggagcggcgggcacctttacgccggcgagactaccagttgcaggttgactccctgagcatatcctat

SEQ ID NO: 22283 - DNA, 284 bp, Zea mays
ggagctcaagtcgatcatacgtatgctgccgatctgtgctgccggcatcatcctggtgacatcggcgtcgcacaatcacagcttcgccatccagcaggctcgtaccatggaccgtgacatcacgccacacttcaagatcccgccggcctccatgctcatcttcaccaacttcggtatgctgctgaccctggccttctacgatcgcgtgctcgtccgcgtgctgcgccgcttcactggccgcccgaacggcatcactcacctccagcgcacgggcgtgggactga

SEQ ID NO: 22284 - DNA, 283 bp, Zea mays
gtccgccgacgcctgctacgacaagctcaccccggtcaccacgcccgccaagtgcgacgacagcgtcgaccccgacgccgcctggtacgtgcccatgcgctcctgcgtcacggctcccagccccaagtacaggaagctggggctcaacgccacgcccaagtggccccagaggctcagcgtcgcgccggagcgcatcagcgtcgtcccgggcagcagcgccgccgccttcaagcaggacgacgcccggtggaagctcagggccaagcactacaagacgctgctg

SEQ ID NO: 22285 - DNA, 281 bp, Zea mays
aacgagatgaacattgcaatcaaagaaactgagaagagctacaatgctttcatgttcagagacgccctgaagtctgggttctatgacctccaattggctagagatgagtacaggctctcttgtggtgcagcaggcatgaaccgtgatctgttgtggcgatttatggatgtccagaccaggcttatcacccccatttgcccacactatgctgagcacgtgtggcagaagatcatgaagaaagaaggctttgcaataaaagctggctggccagcgcggacacc

SEQ ID NO: 22286 - DNA, 282 bp, Zea mays
ccgcctgatccatccaagacagggatcgccatgtcggactcggaggagcaccacttcgaatcgaaggccgacgctggggcgtccaagacctacccgcagcaggctggcaccgtccgtaagaacggcttcatcgtcatcaagaaccgtccctgcaaggttgtggaggtttctacctccaagactggtaagcatggccacgccaaatgccactttgtcgccatagacatattcaatgggaaaaagcttgaagatattgttccttcatcacacaactgtgacatt

SEQ ID NO: 22287 - DNA, 282 bp, Zea mays
ggcagcgcgctctccgtccgccatggcgggctcttccgaccccgacaagctcatgagcaaagccgacaaactaacaaaattgagttttacaagatggaatgctgattggaaaagcgctacctccttgtatgagcaagctgcaattgcgtataggttcagaaaggacaatgagaaagcaaaagatgcttttgagaaggcctcaaaaggacaggaaatgatctcctcaccatgggacgctgctaagcatatggaatctgctgctgctttagcaaaggagcttgg

SEQ ID NO: 22288 - DNA, 274 bp, Zea mays
cggacggtgggcggacgcgtgggcgtacgcgtgggttatcactgagaagtcattgcgaaatgcaatggtatctgttatggcacttggtggttcgactaatgctgttctgcatttgattgccattgctcggtccgtagtttgcatttgactcttgatgatttccagaaggtcagtgaccaagttcctttccttgcagacctcaagcccagtggcaaatatgtcatggaggatctacataagattggtgggaccctgcagtcattcagaccttttg

SEQ ID NO: 22289 - DNA, 279 bp, Zea mays
tgagaagtacctcgacgagaagaccatcttccacctcaacccgtccgggcgcttcgtcatcggcgggccccacggtgacgccggcctcaccggccgcaagatcatcatcgacacgtacggcggctggggagcccacggcggtggcgccttctccggcaaggaccccaccaaggtggaccgcagcggcgcctacgtggccaggcaggccgccaagagcatcgtggccagcggctcgcccgccgctgcctcgtgcaggtgtcgtacgccatcggcgtgccg

SEQ ID NO: 22290 - DNA, 275 bp, Zea mays
gggatgcttataaatgataagcctgtttttgttggaccttttgttcgcaagcaagaaagagatcattcttttgacaagacaaaatttaacaatgtctttgtgaaaaatttgtctgagtctaccacaaaggaagatttactcaaaatctttggtgaatatggggatattacaagtgctgttgtgatgattggtatggatggtaaatcaaggtgctttggtttcatcaattttgagaatccagatgcagcttcccgtgctgttcaggaacttaatgg

SEQ ID NO: 22291 - DNA, 269 bp, Zea mays
  unsure (1)..(269): unsure at all n locations
cggacgcgtggcggcttcagctaccgcgagatccccgagctgtgcggcacgctgccggccctcgacctctgatactccatgagccagcgcttcctggacgagcaccaccaccagcagctgggcaaggcggaggaggcgccgccgctcgctccggcctcgccggcgcagcgctcgccaccaccaactggaagatctccagccctggcgacagccggacgaggtgaaggcgggctcaagtactgngcgcagccggtgcgtgcacgtcaggc

SEQ ID NO: 22292 - DNA, 276 bp, Zea mays
gacgccgccgtgtactggggcccctggcagagggcccgggccacctggtacggccagcccaacggcgccggccccgacgacaacggtggcgcgtgcggattcaagcacaccaaccagtaccccttcatgttcatgggctcctgcggcaaccagccattgttcaaggacggcaatggctgcggctcctgctacaagattcggtgcaggaaggacccgtcctgctccgggcggacggagacggtgatcatcaccgacatgaactactacgcggtgtcc

SEQ ID NO: 22293 - DNA, 272 bp, Zea mays
cccacgcgtccgcccacgcgtccgcccacgcgtccgctcagaggtgggttggcttctcctcccccaccggttcgtgttcaggttctggttcgtgggcgagagggaagagatggcggcgtcggacgttgagtaccgttgcttcgttggcggcctcgcctgggccaccgacgaccactccctcaacaacgccttcagcacctacggcgaggtcctcgagtcgaagatcatcctggatcgggagacgcagaggtcccgcggcttcggcttcgtca

SEQ ID NO: 22294 - DNA, 228 bp, Zea mays
catcaacccttacatgtcctccccatgccacatcgagctcatcttgtcggagaaggaagagccagtgaagaaagaggctgagtctcagatcgcaaccaggaaagcttagagaagggtctctattttctgtgattggcttagtacaagttttggctgattatttgttgtctcatactgtttacctgagtattgtttgcaagtgctttctcactgtccgaactgtgcatg

SEQ ID NO: 22295 - DNA, 216 bp, Zea mays
ggcaagaccatcaccttggaggtggagtcgtctgacacaatcgataatgtcaaagccaagatccaggacaaggagggcattccaccggaccagcagcgcctgatctttgctggcaagcagctggaggatggccgtaccctcgccgactacaacatccagaaggagagcaccctccacctggtgctccgcttgcgaggtggtatgcagatctttgtg

SEQ ID NO: 22296 - DNA, 167 bp, Zea mays
gttggagctcgcctaatctctcatgctggcagtctttcaaaccttgccaagtgtgcagcttccacccttcaaatacttggtgctgagaaggccctattcagagcactgaaaactcgagggaatactccaaagtatgggcttatattccactcctcctttattggccg

SEQ ID NO: 22297 - DNA, 158 bp, Zea mays
aggtcctactggttggtggtatgactagagtaccaaaggtccaggaggttgtttctcagatattcaacaagccaccaagcaagggtgtcaatcctgatgaggctgttgccatgggagctgcaatccagggtggcattttgaggggtgatgtgaaggac

SEQ ID NO: 22298 - DNA, 221 bp, Zea mays
ggatcttatcgcgaaaagtttagccacatcagatcaacaagatgcgtctggaaataagctgcttcttgatattggtctttagctgactcacaagataaaggactacttcaaaagcaaaaagatggagatgacgattaaatacatagatcctacatacatggtccgtgctattccaagcaatgcatcagacaatgtctactgtacacttctagcccacagtg

SEQ ID NO: 22299 - DNA, 226 bp, Zea mays
cgcacgcgtccgcggacgcgtgggcgcgaggtagggcaagaaggcgaggaggaagaaggagctgaggccgttggacgtgctggacgacgagaacgacggagacgaggacggaggcggcggcgggtcagactcgacggagtcttccgctggcggctccggcggcggggagaggcagcgggagcaccccttcgtggtcacagagcccggcgaggtggccagggccaag

SEQ ID NO: 22300 - DNA, 214 bp, Zea mays
cacacgcgtccgcggacgctgggcgcgacacgatattctcatggctacaatgcttaatggagctgctatcatggatggagctcttcttttgatcatagcaaatgaaagttgtccacagccccagacatctgagcatcttgctgctgttgaaatcatgcgccttcaacatatcatcattctgcagaacaagattgatcttatccaggaaagtgca

SEQ ID NO: 22301 - DNA, 234 bp, Zea mays
caggtccgcgagcgcacaacctgaagagcataatcaagaagaagtacgagtcaggatgtgacaaacgttggggatgaaggtggttttgcacctaacattcaggaaaacaaagaaggccttgaactattgaaggcagccatagaaaaggctggctacactggaaaggtggtcattggaatggatgttgctgcttctgaattcttcggtgagaaagacaagacttatgatcttaat

SEQ ID NO: 22302 - DNA, 153 bp, Zea mays
cccacggtccgcgacggggatctgaacatagaggactggaacccatggcagaaggcatcggttcctccaagcaagctcctaacgatctttttctcttcatggtgctgggaactgtagcaggcagatgccagtgcaatggccatcgatgaacca

SEQ ID NO: 22303 - DNA, 243 bp, Zea mays
agaagatcaaggctgccgtcaagaagatgtatgacatccaggcaaagaaggtcaacaccttgatcaggcctgatgggaagaagaaggcttacgtgaagctgactcccgactatgatgctcttgatgttgccaacaaaatcggcatcatctaagtgctgcattaggcatcctaattcatctgttgtgtcctagttctatgtgaaaccagagttttctagctatggctctcaatcgctccattac

SEQ ID NO: 22304 - DNA, 241 bp, Zea mays
gtttatagtggcacaatacagactggacagaccgtgaggtccttggagaaggctattctccagatgatgaagaggatatgactgtcaaagaggtgaccaaattgtgggtttatcaggcacgataccgtgttgcaattagtaaagcccctgctggctcttgggttcttattgaaggtgtagatgcatcaataatgaaaactgctactatatgtcctatgaatatggatgaagacgtgtacat

SEQ ID NO: 22305 - DNA, 120 bp, Zea mays
atgaatgctatatttcttcaagcaacaatggagagcatcggaataccgacccgtgtccaaactgccttccgtatgtcagaagttgcagaaccgtacatacgccgaagagctgtaaggcat

SEQ ID NO: 22306 - DNA, 232 bp, Zea mays
cagagagagagagagagagaccgacgcgccggcagatcccaagttcaccggagagggggaagagggcgaccgaagcggcgatgggtttcatcatggacttcgcggagaatctgatcctccgtctgatggaggacccggacaagcgcgaccaggttcggcgggagcatgtctacaagatgaaggagcggtgcgagcgcactaaggcggcgtggagcctccctctgcgccccta

SEQ ID NO: 22307 - DNA, 154 bp, Zea mays
cccacgcgtccgggactggcaagactaaaggttatggatttgtgagcttttcaaaccctactgacttggctgcagcaataaaagagatgaatggaaagtatgttgggaatcgccctattaaattgcgtaagagtaactggaaggagaggacaga

SEQ ID NO: 22308 - DNA, 114 bp, Zea mays
atcctcttcctcgagttctcctcaaccaaattcaaggtcacagcggcgaacctctcggctatcatgtctggccgcggcaagggcgggaagggtctgggcaagggcggcgccaag

SEQ ID NO: 22309 - DNA, 85 bp, Zea mays
ctcctcaacctccagcccaacctccagcccggaatcgagagcaatggcgctcgccaaggccaaggagatcgttgcctccgctccc

SEQ ID NO: 22310 - DNA, 76 bp, Zea mays
ggacggggcattcgcggacatgagctgggaggagttccgtgcgacacgcttcggcgcactcagaactgctccgcca

SEQ ID NO: 22311 - DNA, 116 bp, Zea mays
caagtccgtgatcaaactttgagcagaataaagagcaacattgaactcatggtagcaacaaatggtggaaatagggtggtggtgatcccacactccatgggggtcctctatttttt

SEQ ID NO: 22312 - DNA, 114 bp, Zea mays
aatagactgtcaacttgcataatcatcgacatcaacatcaacatagccttttggttccaagcaagttggggtaggctagaattgaaacccaacaagaagttatgcagcaaaagt

SEQ ID NO: 22313 - DNA, 239 bp, Zea mays
cccacgcgtccggactcccagaagatcttcaggtgattctggctcctcgactcctggtcattcagatggtgattcttctaacagaacggtatatgttggtgggcttgaccccaatgtcagtgaagatgaactgagaaaagcctttgccaaatatgatcttgcctctgtgaaaattcctctaggaaagcaatgtggctttgttcaatttgttagcagaactgatgctgaagaagcactac

SEQ ID NO: 22314 - DNA, 240 bp, Zea mays
gttggaagagagacgacggcggccatggcgacctccttccaggggacgaccaccaagtgcaccgcctgcgacaagacggtgtaccttgtggacaagctcaccgccgacaaccgcatctaccacaaggcctgcttccgctgccaccactgcaagggcaccctcaagctcgccaactacaactccttcgagggagtgctctactgcaggcctcacttcgaccagctgttcaagaggacaggg

SEQ ID NO: 22315 - DNA, 227 bp, Zea mays
cccacgcgtccgccgacgcatcactctctgctcgcgcactctcacctgcccgcgccgtattcgaccgccgccaagatgaacaaggagatgctcatgaagatggccggcgccgtccgcaccggcggcaagggcaccatgcgcaggaagaagaaggctgtacacaagacggtcaccacggacgacgagaggctgcagggcactctcaagagagtaggagtcaacaccat

SEQ ID NO: 22316 - DNA, 239 bp, Zea mays
cccacgcgtccgcaacgagcccgttcaacacctctggaggacccagcccagactacagcccgacctctccaaattacagccctagcggaagctactcccccactgcaccgggctactccccgtcgtccacaggccagggtaatgacaaggatgataagagcgctcgttgaagaggcacaggggaacaaggcgctctagagcactcgatgaaggcactcggtgatggccacatgggaaga

SEQ ID NO: 22317 - DNA, 233 bp, Zea mays
aggaagtctcatcctacctcaagaaagttgggtacaaccctgataagattgcctttgtccccatctctggttttgagggcgacaacatgattgagaggtccaccaaccttgactggtacaaaggcccgaccctgcttgaggctcttgaccagatcaccgagcccaagagaccttcggacaagcccctgcgtctccccctgcaggatgtgtacaagattggtggtattggaact

SEQ ID NO: 22318 - DNA, 235 bp, Zea mays
agacatcgggatatgcggcttgatgtggataatatgtcctatgaggaattgctcgcactaggtgaacgcattgggtacgtaaacacaggacttagtgaggaaaaaatcctaagtaacttaaaacaacggaaatatgtcttaatatcattggaagatcctccaacaggtgttgaaccatgttgtatttgccaggaagactacgcggaaggcgaggacttgggcagactggactgtg

SEQ ID NO: 22319 - DNA, 236 bp, Zea mays
cggacgcgtgggcggacgcgtgggggattctgcccagcagcgcggcgatccgcctcgatccggaatggagacgcgtcttctccatggaggagatccccaacccctactggaccccgtcgagtacaacgcgatgctcaagcagaagctggagaaggacctcgctgccatcgctatgtggagggcttctggtgcagcacctccagatctttctgcgactgctgcttccttgccaagtg

SEQ ID NO: 22320 - DNA, 230 bp, Zea mays
ccatccgcacctctctcgatctcgctgcgcctccgcctccttcttggtccagccaagccagggatcgccatgtcggactcgtaggagcaccacttcgaatcgaaggccgacgccggagcggccaagacctacccgcagcaggctggcgccgtccgtaagaacggcttcatcgtcatcaagaaccgcccctgcaaggttgtgggagtttctacctcgaagactggtaagca

SEQ ID NO: 22321 - DNA, 216 bp, Zea mays
gagaacagataggtccattccctattatgaaggagatgacaatcagaatgttgtagttttacgtgatattctgttaacatattccttctacaatttcgaccttggttattgccaaggaatgagtgactttttggctcccatactttatgtcatggaggatgagtctgaatcattttggtgctttgcttccctgatggaacgtctagggtgcaattt

SEQ ID NO: 22322 - DNA, 230 bp, Zea mays
cccacgcgtccgcttcacttggtcagcttcaggagctatcattacggaagcttttgcatcgacgtttccaacagttgtagcatatgttgttgacactccgagatcaacaaaccctgttacttttatgagcaacatgctttatgcctgtagtattctctacaaaactcgccttcctctagtcctgacattcaacaaggttgatgttgccaagcatgagtttgccattgaat

SEQ ID NO: 22323 - DNA, 231 bp, Zea mays
cccacgcgtccgcttggacaaattcgacagccagtaccacttctcttgccagttcacagctgaccttattgccatgaaccacaccgatttcatcatcaccagcacattccaagaaatcgcgggaagcaaggacaccgtggggcagtacgagtcccacatcgcgttcactcttcctgggctctaccgtgtcgtccatggcatcgatgttttcgatcccaagttcaacattgt

SEQ ID NO: 22324 - DNA, 265 bp, Zea mays
gatggatgttcccatcaccttaccttcgttgaaaccagcttttgacaagcctaaccccaaacaaggcattggtatgctgtcatggagcagcgacaccactatttcttcaccaggaatgacaacatgccaactgttctttggatatgggatatatgccgccttgagcttgccgctgtgctcgtgcagaaagatccaatccgtgctgcagcatgggaccttacctgcacacgccttgttttatgcacagagagccctcacttgtaca

SEQ ID NO: 22325 - DNA, 253 bp, Zea mays
  unsure (1)..(253): unsure at all n locations
ggacgtggtcntacaccaggtccttcgctgggcccttgggtccgtcgaaatttagcttcagcaagcactgcccactttggtacggatacggcggcgggctaaaattcctggaaaggttttcttatatcaactccatcgtttatccctggacgtccattcctctcctggcttactgtaccttgcctgccatctgcctgctcacggggaagtttatcacaccagagcttaccaatgtcgccagtatctggttcat

SEQ ID NO: 22326 - DNA, 149 bp, Zea mays
ctggtgtcattaagcctggtatggttgttacttttgggcctactggtcttactactgaggttaagtccgttgagatgcaccatgaggctctccaggaggcccttcccggtgacaatgttggcttcaacgtgaagaatgttgctgtgaag

SEQ ID NO: 22327 - DNA, 257 bp, Zea mays
ccttcaatgaaggattggagaggaggacgtggtgctggccaaaacataattcctagctccactggtgcagcaaaggctgttggaaaagttctgcctgagctgaatggaaagctcactggcatggccttccgagttccaacaccaaatgtctctgttgtggacttgacatgccggattgagaaaaacgcctcctatgatgatgtgaaagcagccatcaaggcggcatcagagggtgcactcaaaggtattcttggcta

SEQ ID NO: 22328 - DNA, 251 bp, Zea mays
cccacgcgtccgcacagatgctgacattaggcttgctcgacgaatcagacgtgatacagttgaaagaggaagagatatcagctccgtgcttgaccaatatgggaggtttgtgaagccagcgttcgatgattttgttttgccttcaaagaagtatgctgacgtgatcattcctcgaggtggtgataaccatgtagcagttgatctgattgttcaacatatccgtacaaaacttggtcagcatgacttgtgca

SEQ ID NO: 22329 - DNA, 249 bp, Zea mays
cttcctgctcgctcatgcacaccgctgtggatcttgtgaacgagactaagcttgacagcgagattaagtcttggcttgcttttgctgcccagaaggttgttgaggttgatgctcttgctaaggcattggctggtcaaaaggatgaggcttactcgcagcaaatgctgcagctcaggcctcgaggaaatcctcaccccgtgtgaccaatgaagaagtccagaaggctgctgctgctctcaagggctctga

SEQ ID NO: 22330 - DNA, 252 bp, Zea mays
accacgcgtccgcgaccgtgcgcggggagctctagttccgccaagcgtgcgtaccggcgtccggatccgggacagcagatgacggagtccctggtgcggaacaagccggggatggccagcatcaaggagatgccggtggtgcaggacgggccgccgccgggcggtttcgcgcccgtgcgcttcgcccgccggatccccacctcggggcccagcgccaccgccatcttcctcaccaccttcggtgctttcgca

SEQ ID NO: 22331 - DNA, 258 bp, Zea mays
cccacgcgtccgcacccgaacatcaacagcaacggcagcatttgccttgacattcttaaggaacagtggagtcctgctttaactatctcaaaggttctcctgtcaatctgctcactgctcacggacccaaaccctgatgatcctcttgtccctgagattgctcacatgtacaagaccgacagggccaagtatgagtccaccgcacgctcctggacacagaagtatgccatgggctagaagcaaggctaaaagctggcc

SEQ ID NO: 22332 - DNA, 256 bp, Zea mays
tcgaggcccgctcgcgatctagaactagtccggacgcgtgggcgctcgcgatctagaactagtcggagttcaacgcatttgctgatcttcgaaaatgttggaaccatttagaatggctatcttcagctacggcaaagtaaatggtctgttgacgaagcaggatctaaaacgtgccgcatcacatgtttgtggagtggacttgactgataaagtagtagacataattttccatgtgtttgatgctaactgtgatggt

SEQ ID NO: 22333 - DNA, 248 bp, Zea mays
cagatgagttcatgcacatacagaccatatgtgactttgccacactgattggaacttatctgtatcagttatctctaatgtcatcattagggataactgatacagatgagttcatgcacatacagaccatatgtgactttgccacactgattggaacttatacacggggcttttctattataatagagccgtatgatgatagaatgcctgatattcgtgatcctgttattcagctgagttgccatgat

SEQ ID NO: 22334 - DNA, 245 bp, Zea mays
cggacgcgtggcatgaccacccgctaaagatgccacttccaaatgtcatcaaatcagaagtgttgaaaaaggctccggagtttaagtttggctggaggactgacgaagagttcgcgagagagacacttgcaggcgtgaacccagtaatcatcaaacgtctgacggagttccccgctaaaagcaccctggacccaaggcagtacggagaccacaccagcaagatcactgaagctcacatccggcat

SEQ ID NO: 22335 - DNA, 242 bp, Zea mays
ggacgcgtggggcaatattacttcttgcaaggttatgcgggattcttatggtgttagatgagggtctggatttgttgcattcaaatctgctgaagatgctaaccgagctcttaccgagatgaatggcaaaatggttggaagcaagcccctttatgtagctcttgcacagcgtaaagatgacagaaaggcaaagctacaggcacagttttcacaaatgcgtcctgttgcaatggcaccttcag

SEQ ID NO: 22336 - DNA, 250 bp, Zea mays
ggaaacaaagctggtgaagattatgatggtgatagggacttggtttcccgttgggaaaaacttcaaggtaggaaatccactaactccatacttctcagccaaatccctgtgtatgtcagcgtcaaggttagcaataacaactccttcatccagtttgaaaacagaagccaccttctcatacgtcggtgcaagactcttgcagtgaccacaccatggggcatagaactcaacaaggacatctttggtttca

SEQ ID NO: 22337 - DNA, 169 bp, Zea mays
caagaaatcatttgtgtcttacatcaaaaaatacatcaagaatctcactgctgtgttggagccagagaaagcggatgagttcaaaaagggtgtcgagggtgcaaccaagtttctccttagcaagctgaaggacctccaattttttgttggtgagtccatgaaggatgat

SEQ ID NO: 22338 - DNA, 239 bp, Zea mays
gtgacccattcaatggcacaaattttgttgattgccttgaaaaatttgtcgatgaccctcagacagaaggcattgttctcatcggtgaaattggaggtacggctgaggaggatgctgcaacgttcatccaggaaagcaaaacacaaaagcctgttgttgcattcattgctggacttacggcacccccaggccgtcgcatgggtcatgctggagctatcgtggcaggaggaaagggtact

SEQ ID NO: 22339 - DNA, 235 bp, Zea mays
agcagctcgtctcgcacgacaccaagagcagcgtctacaattacaagtacaccttttcagtcgaaatctgccccgtctgccgcgaggacctcatcgcgctcagcccccaggcgtcccgggacatgggtggccttggcccgctcgtgctctgtgtcaaggtcacaaatgccattgctcttcttgatcccctaacgctgcgagtgcaccacctggaggagaaaaaatacagggttta

SEQ ID NO: 22340 - DNA, 242 bp, Zea mays
cggacgcgtggctgtcgctgcggtggggaaagctgctggcgacaggtggaaatccctgagcgagtcggacgtggctccctatgtagccaaggctaacaagctcaagctcgagtacaacaaggccatcgctgcctacaacaagggcgagagcactgcagctaagaaggctcctgccaaagaggaagaggaggaagatgaagaggagtctgacaagtccaagtcggaggtcaatgacgaggatg

SEQ ID NO: 22341 - DNA, 164 bp, Zea mays
aggggtcgagctcggtggccatcagcaagtacgtcgaggggaagcatggcggcaagctccccaccaacttccgcaagcagctcactgtgcagctgaagaagctcgctgccgccggcaagctgacgagggtgaagaactccttcaagctgccgggcaacgacgcc

SEQ ID NO: 22342 - DNA, 191 bp, Zea mays
gaatgtattctacaatggcactattgaggtcgttgaggctggaggcttactcagtgttgagtctgtgttcctcatcacccttggaatcgctcttcttggtctctttggattatgggcatatggccaggttcagcaactctcgaagaaaacgaagaaggccccaaggtggagctcggaactggaacaactga

SEQ ID NO: 22343 - DNA, 238 bp, Zea mays
cgaattgtttgggaaagaccagctgaaagtagagctgaagaaggggcatctgtttgaaggatggaccgaagggtcatcaactttcctccaacgtataagtacaaggttaactcagaaaagtacataagtgatgataacaaatctggaaggagaacacctgcatggtgtgaccgaattctttcccatggtaagggtatgagattactgtcatataagacagttgatctcagactatcag

SEQ ID NO: 22344 - DNA, 236 bp, Zea mays
aaatgatagaagcttgcttggatctagggattctgagattggtataattattgaagataaagaggttgtcagttctataatggatggaagaccttgggaagctggaaagttctccctcagcctacgactttctctatgggcagaacaccttggtcttcttccaggagaggttagttgcattatggatcctgtggatgattcagcgtacaaaaacatctggatggccactgctaagg

SEQ ID NO: 22345 - DNA, 232 bp, Zea mays
aaaagattgaggctcctgtattatttcgtggaattggacacacggctaatccatcaaacagtttggttctgaaagtcctatctgcctctccatcagcatactcagctaacccaaagactaagttatcgttgcctccatcgcttactgggtcagctatatcactggtttcggttatgcaggcaagaaataatgctcgggtgctgctatctggatcacttgatctttttagcaa

SEQ ID NO: 22346 - DNA, 234 bp, Zea mays
cgcttctgggcctcctacgtcgacgacaagttctacagcgcgtggatacccgtgttcaggggcaggacggcggaggagatggcggaggcggcgaggcaggccgtcgcggcgctggagacgctggagcaggcgttcagggagtgctccaaggggaaggccttcttcggaggggacagcgtggggctcgtcgacgtcgtgctcggcggccttgttgggtggctgtacgccaccgag

SEQ ID NO: 22347 - DNA, 235 bp, Zea mays
gggaaaggttatgagggtgtggtcactcgttggggtgtcacccggcttccccgcaagacccacaggggtctccgcaaagttgcttgtatcggtgcatggcatccggctagggtctcctatacggttgctcgtgctggtcagaatgggtaccaccaccgcactgagatgaacaagaaggtttacaagatcggcaaggctggacaagagacccacgatgcctccacagagtttgaca

SEQ ID NO: 22348 - DNA, 237 bp, Zea mays
cccaaacactggactggtttacactaacatgttcgacgcccaggtcgattccatcttctttgcgctcatggctctgaacttcaagactttgaagatcatgatcactgagtcagggtggccaaacaaaggggcggtcaaggagactggagccacaccagacaatgctcagacctacaataccaatttgatacgccatgttgttaatgacagcggcacaccggcgaaaccaggggaaga

SEQ ID NO: 22349 - DNA, 238 bp, Zea mays
ggtgccttttggacctatagcgctgagtccatcttctggagtcctaaattatggacagggattgtttgagggcctaaaggcgtataagaaaactgatggatccatcctattatttcgcccagaggaaaatgctgagaggatgcggacaggtgctgagaggatgtgcatgcctgcaccctctgtcgagcagtttattgatgcagtaaaacaaaccgttcttgcaaataagagatggatt

SEQ ID NO: 22350 - DNA, 227 bp, Zea mays
ccgggaaagagcttacgctgctggggttatgggcgagcccgttcgtgctccgggcgcgcatcgcgctcagcctcaaaggcctcacctacgcttactccgaggagaacctcgacgacaagagcgagtttctcctcagctccaaccccgtgctcaagaaggtgcccgtgctcatccaccacggcaagcccgtctgcgagtcccagatcatcgtgcagtacgtcgacgag

SEQ ID NO: 22351 - DNA, 228 bp, Zea mays
aagataaccctgcaaacggctttcctatttccaggggttgcatttgttattttcttcatcttgaatgctcttatatggggggagaagtcatctggtgctgttcctttcaccacaatgtttgccttggtcctcctttggtttggcatctcagtaccccttgtcttcgttgggagttatcttgggttcaagaaacctgccatggaacctccagtcaagacaaacaagatt

SEQ ID NO: 22352 - DNA, 227 bp, Zea mays
cccagaccttagcggtcaatgatgagactgttaagtttgaaatctgggatactgccgggcaggagaggtatcatagcttggctcccatgtactatacgggtgcagctgctgccattgttgtctatgacatcacaaatccggcctccttcacccgtgccaagaaatgggttcaagaacttcaagctcaaggaaatcagaataccatagtggctcttgctggaaacaag

SEQ ID NO: 22353 - DNA, 265 bp, Zea mays
cggacgctggacggaacgcgtgggcgcgagcggccgccctttttttttttttttgcaagatttcaatatgtataaatgtgctgcaaatcacaggcaaaaaaagaagctgggcgaagccagcaacacgcctgcactgcgacgtgcagcagttctgagtgagaatctatgaatggagttggagtttctttttttattcaaaacattggggtggcaattgctctctggatgtggtagaatttactcgaggcatgagtaagcaagcgtc

SEQ ID NO: 22354 - DNA, 266 bp, Zea mays
cccacgcgtccgcccacgcgtccgcccacgcgtccgacgacgctggacgggcgcacctgacggtgcccatcagctccgtgatccacccgggctacgacgaggtggtgcgaggggagggcatgccgatacccaaggacccgtccaggaagggcaacctccggatcaagttcgacatcaagttcccggcgaggctcacggcggaccagaagtccggcgtcaagaggctgctcgggcagtagaacgcgcttgtgttgttttggagtatt

SEQ ID NO: 22355 - DNA, 265 bp, Zea mays
gacgaggaaatgggcttcagcctgttcgacgactaagccgctcttatcgtcgtgtggagactgactactcgtacccacacgccgacaagatcaaggagtacctcaaggacccgagcaagtttgctgttgctgctcctgtagctgctgcggactctagtgctgctgctgcccccaaggaggaagagaaggctccagagcctgccgaggagtcggacgaggaaatgggcttcagcctgttcgacgactaagccgctcttatcgtcca

SEQ ID NO: 22356 - DNA, 246 bp, Zea mays
  unsure (1)..(246): unsure at all n locations
cacgcccacaaaacacccgaagaaaagaagagactgaccgccgcgagttcacgtgacgatggagaacgccgcctccgncatcgctaagccgtcgctgtccaagacgccctcgccgtcgttccgcctccggaacggcagcctcaacgcactgcgnctgcgccgcgtgttcgacctcttcgaccgcaacggcgacggcgagatcagcctcgacgagatggcctcggcgctcgacgcgctcggcctcgg

SEQ ID NO: 22357 - DNA, 261 bp, Zea mays
cccacgcgtccgcccacgcgtccggcgagggtgaggacgaacatgatgttgtatggttctggttgaaaaaagacgagccgcatgagtgtccagtctgctcgcaatactttgtgcttaaggtaattggtgatggtggagatccagatggccatgacgatgaagatgatggacatcactaaggatgccttgtggttctgaaaataagaatctgatgaggcagatgagtccatcacacttcttttttcttgaaccagactgcac

SEQ ID NO: 22358 - DNA, 258 bp, Zea mays
gtgattttgggagtgccaaaatgttggtcaaaggtgaagcaaacatttcatatatatgctcacgttattaccgtgctccagagctcatatttggggcaaccgagtacacaacatcaattgatatttggtcagctggatgtgttcttgctgagctgcttcttggccagcctctcttccctggcgaaagtgctgtggatcaacttgttgagataataaaggttcttggtactccaacacgtgaggaaatccgttgtatga

SEQ ID NO: 22359 - DNA, 259 bp, Zea mays
cagacccagcagctattgtggtcgtccctcagccgcgtcgcaccgcatcgcattctacgattcgaagctctctctgctcgcagccatggcgaagaattacccaaccgtgagcgccgagtacagcgaggccgtcgagaaggccaggcgcaagctccgcgccctcatcgccgagaagagctgcgcgcccctcatgctccgcctcgcgtggcactccgcggggacgttcgacgtgtcgtcgaggaccggcggtcccttcggt

SEQ ID NO: 22360 - DNA, 262 bp, Zea mays
ctagttctagatcgcgagcggccgcccttttttttttttttttttcatgacacacaaaccacagatgtttattagacgacgacatccatatagaggtacaccagagggcaccagacgacgcagatacccaggtacagcagcagcttaaatgacccatggcttactgaccaccgcggaggcggagcaccaggtggagagtgctctccttctggatgttgtagtctgctagggtgcggccatcctccagctgcttgccagcgaa

SEQ ID NO: 22361 - DNA, 261 bp, Zea mays
cccacgcgtccgcccacgcgtccgcccacgcgtccgcttcaggtctgcagcccccaactacccccagcctcggaaggaaccttccagaagcgcaagactctaaggccgtcgccttcccattcttcctcgccgcgggggtcgcctgagatcacataaacaatggtgaaggctgttgctgtgcttggtagcagcgatggtgtcaagggcaccatctttttcacccaagagggagatggccctaccgctgtcaccggaagtgtc

SEQ ID NO: 22362 - DNA, 256 bp, Zea mays
cgagactccgccgctgcttccaacttccgttgcgcacgagcgaaacatccggagctagcaagggaggaggaggaggaggcgatggcggggggcggggataaggtggactacgtcttcaaggtggtgctcatcggcgactccgctgtcggcaagtcgcagatccttgcgcgcttcgcccgcaacgagtttagcctcgactcgaaggccaccattggggtcgagttccagactcggacgctcgtcatcgaacacaagt

SEQ ID NO: 22363 - DNA, 254 bp, Zea mays
ctgagataccactccaccaagagtggtgatgagctgaccagcctcaaggactacgtgaccaggatgaaggagggacagaatgacatctactatatcactggtgagagcaagaaggcagtggagaactcccccttccttgagaagctgaagaagaggggctatgaggttctgtacatggttgatgccattgacgagtatgctgttggtcagctcaaggagtttgagggcaagaagcttgtctctgccaccaagga

SEQ ID NO: 22364 - DNA, 252 bp, Zea mays
gggaggaagagcaagcagccgcagcttacaatgctcttcaggggcgcttttactctggccgccctataattgttgagtattctcctgtgaccgacttccgtgaagcaacctgtaggcagtttgaggagaacagctgcaaccgtggtggctactgtaatttcatgcatgtgaagcaaattggcagggatctcaggaggaagctgtatgggcgttctgcttccaggaggtaccatgggagaagccgaagccgaa

SEQ ID NO: 22365 - DNA, 253 bp, Zea mays
ctgtttctgagaaggagtggtggcaagccacagacaccaagttccaggcctggcctcgcactgctgggccaccggttgtcatgaaccccatcagccgccagaacttcatcgtcaagtccactgagtaggtttgggctggagaagctggttctgcgacttggtgccgccatgaagccagagttccttttctaaggtcttaatcaattgtaataaaacgaaatacagtcaggatttttttgtgatttttacttga

SEQ ID NO: 22366 - DNA, 254 bp, Zea mays
gccgcgcacccctggcacgacctcgagatcggtcctgaagctccggccgtcttcaacgtcgtcgtggagatcaccaaggggagcaaggtgaagtacgagctggacaagaagacggggctcatcaaggtggaccggatcctctactcgtccgtcgtctaccctcacaactacggcttcgtgccccggacgctctgcgaggacaacgaccccatggacgtcctcgtgctcatgcaggaacccgtccttcccggcgc

SEQ ID NO: 22367 - DNA, 255 bp, Zea mays
gcttcaatcaccaattgcccttccaaaggctgttaagaaccccacagaactggatggattgaggaaggcgcatattcgagatggtgccgctgttgtacagtaccttgcttggctggataatcagatgcaggagaactatggagcttctggttatttcagtgagataaaagggtcgcataaaaatgaacatttagcaaccaaacttactgaggtgtctgtgagtgacaaacttgaaggcttccgtgcaacaaaaga

SEQ ID NO: 22368 - DNA, 252 bp, Zea mays
cggacgcgtggctgtaataggtgactcttacgcgataacactgtatttggaggacaagtacccagagccgcctcttctacctcaagaccttcaaaagaaagctttgaatcaccagattgcaagcattgtagcttctggtattcaacctctccataacctcacagtgttgaggttcattgaccagaaggttggtgcaggggagagtgtgttgtggactcaacaacaaatcgagagaggtttcacagctattga

SEQ ID NO: 22369 - DNA, 252 bp, Zea mays
gcctccgcgtccacgtcctccctttcttcaggttctaccggggagccgagggccgggtcagcagcttcagctgcaccaacgcaacgatcaacaagttcaaggacgcgctcgccaagcacggggctgagaggtgtagcctcgggcctgcgcgggggctggacgagtcggagctcatggccttggctgagaacagggacctgcacttcacctacgacaagccgggcggcctcgtccccctcgcggaagccattg

SEQ ID NO: 22370 - DNA, 251 bp, Zea mays
agggcgacatggtcacggacgcccccggcatcgccttaccgcccgtcttcggggcaccgatccgcccggacgtggtccgcttcacccacaagctgctgtcctgcaacaagcgccagccttacgcagactcccgccgcgctggccaccacacgtcggccgagtcttggggtacgggccgcgctgtgtcccgtatcccccgcgtccccggcggcggcacccatcgcgccggccagggagcattcggcaacatc

SEQ ID NO: 22371 - DNA, 249 bp, Zea mays
agatcaacgactaccagaagagccggttcgtgaaccgcgtcgtgtcgtccatgttcaacaccgttgccggcaagaagatcgccgtcctcggcttcgccttcaagaaggacaccggcgacaccagggagaccccggccatcgatgtctgcaagggcctgctgggtgacaaggcccagatcagcatctacgacccccaggtgacggaggaccagatccagcgggacctagccatgaacaagttcgactggg

SEQ ID NO: 22372 - DNA, 248 bp, Zea mays
ggtgaagccgccgccgctgcagtgtccatagccaccgcagagactgagatggggggttttgtcaagacccacaagaccaatgcgtacttcaagcgtttccaggtgaagttcaagagaaggcgcgctggcaagacagactacagggccaggataaggctgattaaccaagacaaaaacaagtacaatacacccaaatacagatttgttgtgcgatttaccaacaaggacatcacagcacaaatcatctc

SEQ ID NO: 22373 - DNA, 268 bp, Zea mays
cccacgcgtccgcccacgcgtccgcccacgcgtccgctcaacgattagcagtagagagagaagctgcatatgcaccttttattactcaagcgggcctgccacagagctacaactcaagtgaagtgaacaatggtgctgataagttggcagagcagcgcacgcagcttctagaatctagaaggcaggagttggtcttcttggacaatgaaatagtgttcaatgaggccatcattgaggagagggatcagggaatacaagagattcaaca

SEQ ID NO: 22374 - DNA, 267 bp, Zea mays
aagaaggtttcgctctcccgccccaagccgggcgtcgagcgcgtcgccgtctccctcgacctctacaaccagggatccgcgactgcctatgatgtgtcacttaatgacgactcttggccaacacaagcatttgagcttgtcactggagagaaatcgaagacattggaaaggcttgaccctggtgccactgctacacacacatatgtcctggagaccaaaacacagggcaggttccagggttcaccagctactattacgtaccgtgtt

SEQ ID NO: 22375 - DNA, 267 bp, Zea mays
agctgactcgcctattacaattttcaaagagcagcttaatcaagccgtttcagggcagctctctcctgaagcaattgtggagctacgtctgcaagcatacaatgagattacaaaaaatattgttaatgataatattttctcccaatatatgcacaagattctgccaactggcaactacctgtggaccttcaagaaacaatttgcaatccaagtggctctctcctgcttcatgtcgtatatgctgcagattggcggcagggctcctaa

SEQ ID NO: 22376 - DNA, 267 bp, Zea mays
cgctcaccaccacctgctcctccagcggcggcgtccagggtgaacccgaatccccaacaccatggcggggggcaagatccagaagaagcgccacggcgcggcgggaggcgcccggctgcagggcggtatcccgttcgagaagtccaaggggcagcacatcctgcggaacccggcgctggtggactccatcgtcgccaaggccggtctcaagcccaccgacaccgtcctggagatcgggccgggcacaggaaacctcaccaagcgcct

SEQ ID NO: 22377 - DNA, 297 bp, Zea mays
aatagcctgagtacgtcggaattccgggtcacctcggcgggagcggcggacggtgggtgagaagacaagtgcctctctgaagttcacggttttgatcccgaaaggtcgcatctggaccatggtcgctggtggtggtgctagtgtcatttatgctgatacagttggagacttgggatatgcatcagagcttggaaactatgcagagtatagtggtgctcctaatgaggaggaggttctgaattattctagagttgttcttgattgtgcaactgctgatcctgatggccgcaagagagc

SEQ ID NO: 22378 - DNA, 268 bp, Zea mays
gtaggttcaaaagaaaagcatcaagaaagaagcatgctggacaatctcaaacatcacagctggtaacagggaacagattcaggccgtgattaatgcaaacataattgcacctctggtgaacttctgcaaactgctgaatttgacatcaagaaagaagcagcctgggcaatttcaaatgccacttctggtggcacacatgatcagatcaagtaccttgttgcccagggttgcattaagccactctgtgatctgcttgtttgcccggatc

SEQ ID NO: 22379 - DNA, 270 bp, Zea mays
cccacgcgtccgaccccactcgccgccgccgctgccaccgccgcttgctgccgcagccgccatgggggcgtacaagtacgtgtcggaactatggaggaggaagcagtcggacgtgatgcgcttcgtgcagcgcgtgcgctgctcgggagtacaggcagcagccgtccatcgtccgcctcaccaggcccacccgccccgacaaggcccgtcgtctcggctacaaggccaagcagggatatgttgtctaccgtgtccgtgtgaagcgtggtg

SEQ ID NO: 22380 - DNA, 269 bp, Zea mays
  unsure (1)..(269): unsure at all n locations
cggacgctggnncggacgcgtgggcaaaccctaagcagggagttgatttatccgctgcagacatgagtaagttacagtctgagtctgtcaaggatgccatctcccagattgttggggatgccaaggagaagaataggaagttcactgagactgtggaacttcagattggtctgaagaattatgatccacagaaggacaagcgtttcagtggctctgttaagttgccccatatccctcgtcccaagatgaaggtgtgcatgcttggtgat

SEQ ID NO: 22381 - DNA, 271 bp, Zea mays
gtcgctatttcatagtcaccataataattggtagtttggtaccatgttgaatcttacactcctcccaacttcaactcgttgcagggttcctctgccatatcaagtgctgatctatttggccatccagcaaacaattctagcgtggatctcagtgcttcagatttgatcaacagaatatcattccaggccactcaagatctgtcttctctcaagaacatggcaggggaaactgggaaaaggttgacatcgatggcatccaacatcatcactg

SEQ ID NO: 22382 - DNA, 262 bp, Zea mays
cccacgcgtccgcccacgcgtccgcccacgcgtccggccgtgtccaccgacgaggagacggcgcggctcggccgccgggacatcgccgtggcgtggcgcggcaccatcacccgcctcgagtgggtggccgatctgacggccaaccagatccccctgcgcgagacgggcgtcccctgcccggaccccgacgtgaaggtggagcgagggttcgcggcgctgtacacggacaagggcaccagctgccgcttctgccggtactcgg

SEQ ID NO: 22383 - DNA, 258 bp, Zea mays
cccacgcgtccgacacgcgtccgcggacgctggcgtacgactctcattccaagactctccagaggtccgaaccgcagtcgtctcaactgcagtcacatatggatgacggcacttgtgcaaggctaaaggaggaacttgctgaaacaagccttaagctcaggcagatgagaggagaggagctccagaggctgagcgtcgaacagctgcaggagctcgagaagaccctcgaatccggcctcggctctgtactcaaaacca

SEQ ID NO: 22384 - DNA, 261 bp, Zea mays
cccacgcgtccggcttctcctccccctccggttcgggttcgggttcgtgaggttctccggggttcggtttcgtgggtgagcggatcgagatggcggcgtcggatgttgagtaccgctgcttcgtcggcagcctcgcctgggccacggacgaccactccctccacaacgccttcagcacctacggcgaggtcctcgagtccaagatcatcctcgatcgggagacgcagaggtcccgcagcttcgacttcgtcaccttctcca

SEQ ID NO: 22385 - DNA, 263 bp, Zea mays
cccacgcgtccgcccacgcgtccgcccacgcgtccgctcctgcgacgccacaaccacacgttcacggtagcgagagcttatcgtcgtcggcggtgaagatggtgtcgctgaagctgcagaagcggctcgccgctagcgtcctcaagtgtgggaaaggcaaagtctggcttgaccccaatgaagtcagcgagatctccatggctaactcccgccagaacatccggaagttggttaaggatgggtttatcatcaggaagcctcag

SEQ ID NO: 22386 - DNA, 262 bp, Zea mays
gaagacaacccgtcagcccctctcgtttttcatccgccttcgcctccaaccgcgtgcgctccacgcctcctccaggaaagcgagagcttctgcataagaacaacaaatcaaaagcgtgatcagctcggtgccaacaaaacctcaacaaccaagtttcatgtctgatctcgacgtccagcttccatctgcctttgatccgtttgctgaggcaaatgctgaggactctggtgctggtcctggaacgaaggattatgtgcatgtg

SEQ ID NO: 22387 - DNA, 259 bp, Zea mays
ggacctggccgtgctgcacaaggtgaagctggtcggcccggacgggacggagcacgagtagcgaggcccccgacgacacctacatcctcgaggcggccgagaccgccggggtggagctgcccttctcctgccgcgccgggtcctgctccacctgcgccgggaggatgtcggccggcgaggtcgaccagtcggaggggtccttcctcgacgacggccagatggccgaggggtacctcctcacctgcatctcctaccccaa

SEQ ID NO: 22388 - DNA, 263 bp, Zea mays
catagatgccatttttgggcttcatatagctgactctgtgcctattggtgtgctggcatccaggccagggcctattatggctgggagtggattctttgaggccgtaataagtggaaagggagggcatgctgcacttcctcatcacactatagatccgatattggctgcctcaaatgttattgtgagccttcagcaacttgtttctcgagaagctgatcccttggactcacaggttgtgacagttggaaagtttcaaggaggtg

SEQ ID NO: 22389 - DNA, 250 bp, Zea mays
cgacggcagcggcgtggtgacggtgtacggcagcaacggcgcggactgctggagccgtccaagcagcccaagtcggcgactttctccgtcaaggtggggctggcgcagatgctccgtggcggggtcatcatggacgtggtgaccccggagcaggcgcgcctcgcggaggaggccggcgcgtgcgcgtgatggcgctggagcgggtccccgccgacatccgcgcgcaaggcggcgtggcgcgcatgtcgga

SEQ ID NO: 22390 - DNA, 254 bp, Zea mays
caacaagccgtccacagctggatccccagcctctattaaaggcgcggcggggggaggcatcgtcctctccgtgctttctcagaggtgggttggcttctcctcccccaccggttcgtgttcaggttctggttcgtgggcgagagggaagagatggcggcgtcggacgttgagtaccgttgcttcgttggcggcctcgcctgggccaccgacgaccactccctcaacaacgccttcagcacctacggcgaggtcct

SEQ ID NO: 22391 - DNA, 250 bp, Zea mays
cccacgcgtccgggatgttctttccttacgctcaggcagcttcttttcttgttgattatggtctggatgtgtatcacatagatcatgtgatcacacaatttggaatgccaatggggcccttccgattagccgatcttgttggttttggtgttgctattgctacaagaaagcaatattaccaaagttatcctgagcgaagttacaaatcaatgcttcttcagattcttgttgaggataataggacaggtga

SEQ ID NO: 22392 - DNA, 255 bp, Zea mays
cggacgcgtgggtctttccccggcacttcaagagtttgtcggcgcctctgagttagccaggacagatgttgtcaagaagctttgggcatatattcgagaaaataatctgcaagaccaaaacaataggaggaagattttgcctgatgagagattgaagaagatcttcaatgtcaattccattgatatgttccaaatgaataaagctttgaccaagcatatctggccattgaattctgagggtcctgtctctcctga

SEQ ID NO: 22393 - DNA, 257 bp, Zea mays
ggtccaccaaccttgactggtacaagggcccaaccctacttgaggctttggacttgatcaatgagccgaagaggccttcagacaagcccctgcgtctccccctacaggatgtgtacaagattggtggtattggaactgttcctgttgggcgtgttgagactggtatcatcaagcctggtatggttgttacctttggtcctagtggccttactactgaggtgaagtctgttgaaatgcaccatgaggctctccaggag

SEQ ID NO: 22394 - DNA, 232 bp, Zea mays
gaggtgaacaagggcctgaacccaggaatggtggttctgcttgtggttgcaagcttcctgctgatcttctttgtggggaactatgcgctgtatgtgtatgcgcagaagacgctcccgccaaagaagaagaagccggtgtcgaagaagaagctgaagaaggaaaagctgaagcagggggtctctgcgccgggagagtaaacggccatgctgccgatcctcccgtccagagctc

SEQ ID NO: 22395 - DNA, 221 bp, Zea mays
gcccaaggagaggaatgagaggtatgttgatgctgtcatgacaatccccaagggaaccttgttccccatgtgtggcatgaaccttgccttcgacagggatctcattggccctgctatgtactttggtctcatgggtgatggccagcccatcggtcgctacgacgacatgtgggcaggatggtgtgtgaaggtcatctgcgaccacctgagcctgggagtca

SEQ ID NO: 22396 - DNA, 219 bp, Zea mays
agggtttagcgctgaactaatgccaaaaggacatgagaaggaaagccaggctaagattaagcgctacatgacaatgatggattccatgactgatgcagagcttgacagcacaaatcctaagttgatgactgaatcacggatcattcggattgcacgggggtctgggcggcctgtcagggatgtcatggacatgctggaagagtacaagcgacttgctaa

SEQ ID NO: 22397 - DNA, 217 bp, Zea mays
cccacgcgtccgactacgtcccccagttggcaaggaagatcgtcgagtacaacgaggcctcgcctcaccccttcatcaacctcaagggaatccttgtgggcaacgcggtgaccgacaactactacgacaacatcggcacggtcacctactggtggacgcacgccatgatctccgaccgcacctacaaggccatcctcaggtggtgcaacttcagcag

SEQ ID NO: 22398 - DNA, 222 bp, Zea mays
cccacgcgtccggtgagaatttgcaggacggacctttcaattttgttttgcttgatggcacctggagcaattctgctgcactgtacagaaggttgaaggagagatggactgcagtatggggagatgaagctctaccttgtattgcactatctacacttagtgcctcagtgatgcataaactacgaccgcagcctgcctgggatcgtacctgcactgcagcag

SEQ ID NO: 22399 - DNA, 223 bp, Zea mays
attgaacaagaatgctgtcttcggtgacagcagtgcattgtctccgggtggtgtccgcattggcgcgccacaatgacctcgaggggtctactggagaaggatttcgagcagattggggagttcctccaccaggcagtgaccatctgcctgaacatccagaaggagtacggcaagctcctcaaggacttcaacaagggcctggtgaacaacaaggacatcgaga

SEQ ID NO: 22400 - DNA, 226 bp, Zea mays
cggacgctggccacaaaggatgctggggtgattgctggccttaatgtgctgcgtatcatcgacgagccaacagctgcagctatcgcctatggtcttgacaagaaggctaccagtgtcggtgagaagaatgtcctcatctttgatcttggaggtggtacctttgatgtctccctcctcaccattgaggaaggaatctttgaggtcaaggccacagctggtgacaccc

SEQ ID NO: 22401 - DNA, 226 bp, Zea mays
tgttccgcagtgcggcttctcccacaccgtcgtgcagatcctgcgctcgctcgacgtgcccttcgagacgctcgacgtgctcgctaacgaggcgctccggcaggggctcaaggagtactccagctggcccaccttcccgcagctctacatcgacggcgagttcttcggcggatgtgacatcaccgtcgaggcatacaagagtggagaactgcaggaaactctagag

SEQ ID NO: 22402 - DNA, 226 bp, Zea mays
ccttcccctcggcctcaagagctctgcggttgccgcggccaagggcgtccgtggagaagcgggagcaggtggcggcgatggaagagcaaggcggccaggcggcgctcgggtgggcggccagggacgactccggcgttctctccccctacagcttctccagaagggttcctaaagacgacgatgtcacgatcaaggtgctctactgcgggatctgccacaccgacct

SEQ ID NO: 22403 - DNA, 215 bp, Zea mays
gcgagtttagcgccggccaccctgaaggagctgtgaacatcccatacatgaacaaaaccggctcaggttaaaaagaaaaagaaaaaaaagcgttgcttcatctgttctattctgttctgttcttgcgccgcctcggttctgaatgccacgcgcaggaatgacgaaaaacgctcactttctcgagcaagtgtcgagggctttcgggaaggacgacg

SEQ ID NO: 22404 - DNA, 221 bp, Zea mays
ccccgatcaacttccccatcgggaacgcggcgaccgggttcttcgtcatcttcgccgtgatcgccggggtggtcggcgcgggctcggcgctggcggggctcaaccacgtccgcgcctggagcaccgagagcctgccggcggcggcctccgccgggttcattgcgtggacgctcaccctgctcgccatggggtacgtacgttacgtatgtcgggtcccgcgt

SEQ ID NO: 22405 - DNA, 223 bp, Zea mays
cccacgcgtccgagactatgcaaattttgaactccgatgatcatgcgaattatttgaggaagcagaatcacaatcctgcagattataggcctgatatcattcatcaggctctactagcaatatttgatagccctcttactaaggctggaaggttacaggctgtttatgtgagaactgaaaagggcgtattgtttgaaatcaaacctcatgtccgcatgccaag

SEQ ID NO: 22406 - DNA, 215 bp, Zea mays
gcacacacacgcaaccagatctcccccatatccagacgtcggcacctccgattcaagatgcagatctttgtgaaaaccctgactggcaagactatcaccctcgaggtggagtcgtctgacaccattgacaacgttaaggccaagatccaggacaaggagggcatccacctaagacagcagcggctcatcttcgcaggcaaacagcttgaggacgg

SEQ ID NO: 22407 - DNA, 210 bp, Zea mays
gtcaatggaggaatcatggcattctactttgtcttatggggtaaaggacttcttgcttgtggcccactagttgctctactggcagagtatgcaggtgctgttcttggagttctctctgctgctttatatggaaggaaagttaacatctggaaaaagattggtggacttgctgctatgttagtagcatattatctattgtcaattggatgg

SEQ ID NO: 22408 - DNA, 211 bp, Zea mays
cccacgcgtccggtgagaatttgcaggacggacctttcaattttgttttgcttgatggcacctggagcaattctgctgcactgtacagaaggttgaaggagagatggactgcagtatggggagatgaagctctaccttgtattgcactatctacacttagtgcctcagtgatgcataaactacgaccgcagcctgcctgggatcgtacctg

SEQ ID NO: 22409 - DNA, 207 bp, Zea mays
cagatatcaacaagaatgttgacatgattattgctaggcgaaaagagcaggagttcttcgattctagtcctgaatattctcatcttgccagcaggatgggttcagaatatcttgctaaacttctttcacagcatctagaggccgcgatcagatcacgcattccgagcataacctctctgataaacaaaactattgatgagcttgaat

SEQ ID NO: 22410 - DNA, 236 bp, Zea mays
cccacgcgtccgccaagacccaggccttgaaggttgccaaggctgtgaagtctggggcagccaagaagaagaccaagaagatccgcacgtctgtgacatttcaccgccccacgaccctgaagaaggctagggaccccaagtacccacgaatcagcactaccggaaggaacaagcttgatcagtaccaaattctcaagtacccccttaccacagaatcagcgatgaagaagattgaa

SEQ ID NO: 22411 - DNA, 235 bp, Zea mays
caacggcatcgtgggttctactacgggcagcaactactatgtgcggatcctcagcaccatcaaccgcgagctgctcaagccgtcagcatctgtcgcgttgcatcgtcactccaacgctttagtcgacgtgctgccgcccgaggccgactccagcatctccttgctgggatcgtcggagaagcccaacgtcacctacaacgatattggaggatgcgacatccaaaagcaagaaata

SEQ ID NO: 22412 - DNA, 235 bp, Zea mays
cagatatcaacaagaatgttgacatgattattgctaggcgaaaagagcaggagttcttcgattctagtcctgaatattctcatcttgccagcaggatgggttcagaatatcttgctaaacttctttcacagcatctagaggccgcgatcagatcacgcattccgagcataacctctctgataaacaaaactattgatgagcttgaatctgagatggatcacctcggtagacctat

SEQ ID NO: 22413 - DNA, 231 bp, Zea mays
ctttcgtcatctcttctccggcgaagaacccccagtcgcccaccagatcacttgttaaactttgttgaggggtgatggcggtttctttcgcaaacctcagctccgaggcagggcttaaaaagcttgatgagtaccttctcactcgcagctacatcactggctaccaagcttccaaggatgacttggctgtctacacttcgttttcgtctgctccctcgtccaagtatatca

SEQ ID NO: 22414 - DNA, 230 bp, Zea mays
gatcgatcaatgcaattaagcatcacgggtttggaaacattctgccttagcaataaggtccagtggccgttatctcttgtaatttcaaggaaggctttgacaaaataccaattgatctttcgcctattgttccactgcaagcatgttagtcgccagctgtgtgcagcatggcaaatacaacaagcattccggtctgtcaagattctagggacaccaattctgcggtcatc

SEQ ID NO: 22415 - DNA, 226 bp, Zea mays
cgttggccaagatacccgcttgaactacagagctattgatctacgaacaccctcgaaccaagccatattccggatccagtgtcaagttgaaaacaaatttagagattttttgttgtcgaagaactttgtcgggatccacaccccaaaattgatttctggatctagtgaagggggtgcggctgtattcaagcttctgtacaatggtcaacctgcttgtttggcacaa

SEQ ID NO: 22416 - DNA, 212 bp, Zea mays
gttattttggcttgtggagcaacaaaaccgagagatctcaccatccctggacgcgagctatctggagttcattttgcaatggaatttctccatgcaaatacgaaaagtttactcgacagcaacctggaggatggtaaatatatctccgcccgtgggaaaaaggtggtggttattggtggaggtgatacaggcacagattgcattggcacatc

SEQ ID NO: 22417 - DNA, 226 bp, Zea mays
gccgcagcctccaaagccactcccaaacccccgcttccagaaccttctcgaagctccccgccgcctcctccactcgcaccgatggcgaaggaaccaatgcgcgtgctcgtcactggcgccgcaggacaaattggatatgccctggttcccatgattgctaggggtgttatgcttggtgcagaccagcctgttattctgcacatgcttgacattccgccagcagctg

SEQ ID NO: 22418 - DNA, 222 bp, Zea mays
cccacgcgtccgaaacgttatggacacactgagcagattgagtcatgatgcagacgccgatgtgtcgatggctgcaattatctcattgggttgattggtgctggcactaacaatgccagaatagctggcatgcttcgcaatctttcaagttattactacaaagaagctgctcatctgttttgtgttagaattgcccagggccttgttcacctcggaaagggc

SEQ ID NO: 22419 - DNA, 205 bp, Zea mays
cccaaccataccagcggcgccgcaggtgacgaggaggcggagtagagtggccggactacctcgacacctccactgcaaccatgggtatctcacgtgattcgatgcacaagcgccgggccaccggtggaaagcagaagacgtggcgcaagaagcgaaagtatgagcttggccgccagcctgctaacaccaaactgtctagcaataa

SEQ ID NO: 22420 - DNA, 62 bp, Zea mays
ctggtggcatgataaaggacttctcatttctttcaagagagacaactaggacagaaagcccc

SEQ ID NO: 22421 - DNA, 204 bp, Zea mays
ggccgcgcctgcgacacccatccgccgccacgccatggccaagtacaacgtggtgcagaagaacaagcgccagtgcaatcaggaccgcaagcgcgccgcgcatggggagcccgggaccggcaagctcaagcagcggaccgcgcccgtctccatgtccggcaagcggaagaagaagctcgagcgccgcctcaaccggaagcagaa

SEQ ID NO: 22422 - DNA, 214 bp, Zea mays
gactagttctagatcggcgactccggcgtcggcaagtccaacttgctctcacgcttcacgcgcaacgagttcagcctcgagtccaagtccaccatcggcgtcgagttcgccactcgctctctccaggtcgacggcaaggtcgtcaaggcccagatttgggacaccgccggccaggaacgataccgtgcaatcactagtgcgtattaccgaggcg

SEQ ID NO: 22423 - DNA, 142 bp, Zea mays
gtcgctgctcccacctctagcccgacaggtgaagccgccgccgctgcagtgtccatagccaccgcagagactgagatggggggttttgtcaagacccacaagaccaatgcgtacttcaagcgtttccaggtgaagttcaaga

SEQ ID NO: 22424 - DNA, 144 bp, Zea mays
cccacgcgtccgactacccacacccattcgttcaagatgtgttatgggccactctccataaattcgttgaaccagttatgatgcattggcctggcagcaaattgagggagaaagctctggaaacagtcatgcaacatgttcatt

SEQ ID NO: 22425 - DNA, 225 bp, Zea mays
gaagggactataaggtgccatgataatcaaattaacttgtcaccaggacttgcaaacacaacaactaaattgaacaacagcccaagccgtaaagcgttttcagttcaggataagctctggtcaatttatgctgccggcaacactgtaccaataccatttcttaaggcaattgacatttcaccactagctctagtatcagaaaatgaatcaggaaatggcctggct

SEQ ID NO: 22426 - DNA, 155 bp, Zea mays
cccacgcgtccgagcagttgaagcaggcgaagatgcagcatctgggcctggcaagggcgagaagattaacataaaggatgatgtttctgcggtgaagaagggtggctgctgctctagctgagctgccctgctgtattttttgaagttgtggtgat

SEQ ID NO: 22427 - DNA, 269 bp, Zea mays
attccactctatcatatagcctatgctgaggttctgtacactatgggtggcttggaaaatcttcagacagctaagaagtactatgcatcaacaatccaattgactggaggcaagaatacaagagccctctttggtgtatgtctgtgtacttcggcaatcaatcagttgaccaaaggaaggaataaagaggaagatggctcggagctgcagagattggctgcagaagtactgctgaataattacaagcagcaggctccatcaaaggcgcc

SEQ ID NO: 22428 - DNA, 176 bp, Zea mays
gcgcgacgaaggtaagatgttcctgcggaggatcctgaccggcgggggcggcctggcggccctgagggcggcgcgcgccgtgaaggagacgacggggatcgtgggccttgaggtggtgcctaacgcgcgagaggttctggtagggctctacgagcgcacgctcaaagagatcaagg

SEQ ID NO: 22429 - DNA, 243 bp, Zea mays
cccacgcgtccgctaagatatgatatagttgttgatgcaactgacaaccttcctactaggtatatgatcagcgattgctgtgttttgctgaacaagccacttgtatctggtgcggcattaggcttagaagggcagttgactgtttatcatcataatggaagcccatgctatcggtgcctctttccaactccaccacctgtggcagcctgccagagatgctcagacagtggtgtccttggggtt

SEQ ID NO: 22430 - DNA, 258 bp, Zea mays
cgcaaacgccttcgccgtcgcgtcccgctcctccgcccgcccgacgcgacccctaggacctggagagagaggtcggcatggctgccgcagtggtcgacgacgctggtatggacgccgtccagaagcgcctcatgttcgaagacgaatgcattttggtggacgagcaggacaatgttgttggccatgagtcaaagtacaactgccatttgatggacaagattgattctgagaatctgctacatagggcattcagtgtgt

SEQ ID NO: 22431 - DNA, 258 bp, Zea mays
gccatcgagcagtgggtgacggagtacctggccatctactaccccaacgacggcgtgctgcaggccgacgtggagctgcaggcgtggtggaaggaggcgcgcgaggtcgggcatgccgacctcaaggacgagcactggtggcccaagatgcagacggtgccggagctcgtgaaggcctgcaccaccatcatctggatcgcgtcggcgctacacgccgccgtcaacttcgggcagtacccgtactgcgggtaccacccg

SEQ ID NO: 22432 - DNA, 183 bp, Zea mays
cccacgcgtccgcttgagaagattgagaaggacattaagaaaccacttttgaggagcgacaagaagaacatggccaccctcttggcagagtttgacaagattaacaaaaagcttggctttcggaaggaggatcttccaaagatcgaggaagagcttgaattggaaattgccaaaagtgagctg

SEQ ID NO: 22433 - DNA, 182 bp, Zea mays
gagactgtcagatccccaagtggctttcgcctgccgcgcagaccttctcaagaggatcctccaaccgaatccgatgaagaggatcaacgtcgcggggatcagggagcacgagtggttcaagaaggactacgtgcctgctgttccgcacgatgatgacgaagacgtccttcctagtccagctc

SEQ ID NO: 22434 - DNA, 170 bp, Zea mays
ggggatgcatgcagctcttcgtcaagaccctcactggaaagactatcaccctcgaggtggagtcttctgacaccatcgacaacgtcaatgccaagatccaggacaaggagggcatccctccagaccagcagcggctcatttttgccggcaagcagctcgaggacgggcgc

SEQ ID NO: 22435 - DNA, 153 bp, Zea mays
cttgttcagcaagctcgtggagttgtatcaattactggggagccaatccagcggttaggtgcttacctccttgagggtttggttgctagacatgcaaactcaggtacaaacatatatcgtgccctgaagtgccgtgagccagagagtaatgaa

SEQ ID NO: 22436 - DNA, 252 bp, Zea mays
cccacgcgtccgcacacgcgtccgcccacgcgtccgcccacgcgtccgcccacgcgtccgcccacgcgtccgctggaggtaactgagatcttcaacttttcccaagatgatttgttaactgaagacatgatgatacttgacacacatggtgaggttttcatttggattggtcagtgcgtggaatcaaaagagaaacagaaggcatttgatattggccagaaatacgtggagcatgcagattctattgatgat

SEQ ID NO: 22437 - DNA, 235 bp, Zea mays
cagaaagccttcagagatgcagggctgcaattctcgaaacagggtgttgcaattactcaagaaaattctctgttggataacactgctagaatagagggatggttagctcggtttcctatgtttgattgggttggtggtaggacttcagaaatgtcagctgtgggtttacttccagctgcattgcagggtattgatatcaaggaaatgctagctggtgcagctttaatggatgagg

SEQ ID NO: 22438 - DNA, 251 bp, Zea mays
gggtgttcgtgttagaagggtggagcccactgctccagaatctggatgcctacgaccatctgatattattcttagtttcgatggtgttgacattgctaatgatggaacagttcctttcaggcatggtgagcgcattggcttcagttatctggtttctcagaaatatactggagagaaagctcttgttaaagttctgcgtgattcaaaagttcatgaatttaaaataaggttagcaactcacaagcggcttg

SEQ ID NO: 22439 - DNA, 247 bp, Zea mays
ccagagcgcgagagctagctagagggccgtgaaaatgccgatcaataggatcgccctggggagccaccaggaggtgtaccacccgggcgccctcaaggcggcgttcgctgagttcatctccaccctcatcttcgtcttcgccggccagggctccggcatggccttcagcaagctgaccggcggcggcccgacgaccccggcgggcctgatcgcggcggcggtggcgcacgcgttcgcgctgttcgtg

SEQ ID NO: 22440 - DNA, 153 bp, Zea mays
cggacgcgtggcggacgcgtgggcaagccgtccgccttgcccctcgaaggcttggtcctccttgtatcccgccctcctccgcaccagacccgtttccccgctagagttatcgttcctctgcagcgatggcgatcaagcggaccaaggcggaga

SEQ ID NO: 22441 - DNA, 262 bp, Zea mays
gaaacacacagaagcgaggagcactacttgttggttggattctcttcagtctagcagctagtccagttaagtttcagacacacatggggagcattggcagaggcacggccaactgcgccaccgtgccgcagccgccgccgtcgacagggaagctcatcacgatcctgagcatcgatggcggcggcatccgcggccttatcccggcgaccatcattgcgtacctcgaggccaagctccaggagctggacggcccggacgctcg

SEQ ID NO: 22442 - DNA, 261 bp, Zea mays
tttgatcgttcatctggtcaaatcttgtgcacgcttgctggtcactcaaagaagataaccactttgaagtttattccacgggatcaactctttgtaactggatcagcagataagactgttcgcatctggcaagagaatgagaatggaaactataactgtgtccatacactgaaagaccatactgatgaggttgaagctgttacagtacatgtgactcagaagtattttgtgagtgcttccaaggataactcttggtgcttc

SEQ ID NO: 22443 - DNA, 261 bp, Zea mays
cccacgcgtccgaaatgattgctgatgttgacaaagatggcagtggagcgatcgactacgaggagtttgagcacatgatgactgccaaaatcggatagagggatagtaaagaggagctttcaaaagcattccgcattattgatcaagatggaaatggaaagatttctaacattgatatccagaggattgccaaagagctgggtgtaaatctcaccctcgatgagatccaagacatggtgcaagaggctgatagaaatggtt

SEQ ID NO: 22444 - DNA, 261 bp, Zea mays
ctgacttgcgacaaagattggagccactgtcgatggctatctttgctcatgggaaagtgaatggattattgacaaaggaggatctaaaacgtgcaacacaacatgtttgtggtgtcaacttaactgatagagtggtagacatcattttccatgtgttcgacacaaatcaggatgggaacctgagctcggaagagttcttaagagcattagaaagaagagaaactgatattcgtcaaccaacaataccaggtccatggggtt

SEQ ID NO: 22445 - DNA, 261 bp, Zea mays
ggtagttcccccaactgtcaccatgcagaacgaggagggtaagactgtggacctctatgtccccaggaagtgctcggccacaaacaggatcatcactgccaaggaccatgcctctgtccagatcaacattggccacttggatgcgaatggcctgtatgatggtcacttcacaacgtttgctctctctgggtttgtccgtgctcagggtgacgcagacagctccttggacaggctgtggcaaaagaagaaggctgatatcaa

SEQ ID NO: 22446 - DNA, 258 bp, Zea mays
gtcatgcgcgcgcttggtgattaccttggtgttaaggtccatgcatgtgtgggaggaacatccgtccgtgagaccaaaggattcttggcagtggtgtgcatgttgttgttggtacacctggtcgtgtgtttgatatgctgcgcagacagtccctccgccctgataacatcaagatgtttgttctagatgaagctgatgaaatgctttctcgtggtttcaaggatcagatttacgacatcttccagcttctcccagcca

SEQ ID NO: 22447 - DNA, 260 bp, Zea mays
gacagcagcagcagcagcagcatcgagctcgaggccgctccgccaccccgcactcgcctgtcgcctcttctagctttcgccaccggggcagcgctccgccatggctggacctgctgttctcaatgagcgtatcctttcttccatgtcccagaaacatgttgctgctcacccatggcatgatttggagataggtggttgagattcctagaggcagcaaggttaagtacgagttggacaaggcatctggtctgatcaaggtg

SEQ ID NO: 22448 - DNA, 261 bp, Zea mays
cttctgtctgttgcatacaagaatgtgattggggctcgccgcgcttcatggcgcattgtttcttccattgaacaaaaggaggagtcccgtaagaacgaagagcatgtgaaccttatcaaggaatatcgtggcaagatcgaggctgaactgagcaatatctgtgatggaatcttgaagctgcttgactcccacctagtgccttcttctactgctgctgaatcaaaggtcttctacctcaagatgaagggtgactatcacagg

SEQ ID NO: 22449 - DNA, 257 bp, Zea mays
cccacgcgtccggtgggtacaaggattcaggtcatctccaactggaactgatattatggcaatggtacgccccttctggaacattgagtatattgttccagatcaagatgaaccttgcccagagcataagagacagattctggcatactactcccttgctggcaggaggacagattgtcctccatcagtaactctgctttacccggcattttgagtgtagatacttgctttttgccagactgaatctcatggtacta

SEQ ID NO: 22450 - DNA, 257 bp, Zea mays
gggagaagatgtagttcacccacttaaagtttctctggaagatctttacaatggcacctcaaagaagctctctctttcgcgcaatgtcatctgctccaagtgcaagggcaagggctcgaagtctggtgcctcaatgaggtgccctggttgccagggctcaggcatgaaagtcactattcgtcagctgggcccttccatgatacagcagatgcagcagccttgcaatgagtgcacagggactggagagagcatcaatg

SEQ ID NO: 22451 - DNA, 252 bp, Zea mays
cgacggggaacaatctttacaaagcctaacaggggcatctcctgatgaaggcactggagcgaccatgtctgatgatgaagacaaccaggtggatagcgaaccaacatgtttgatggaaatgatggatcagatggtatgggctttggccccttaatgctgacagagggtgaacgatccttagttgagcgtgtacggcaggagctaaagaacgagcttaagcagggttacaaagaaaagcttgttgatatcagg

SEQ ID NO: 22452 - DNA, 220 bp, Zea mays
ctctcctctgtccctctacggtgcttctgctcgccggcccaaaatcgcctcatcgaccacgcccccttccaggctcccgtctccatgggtctcctctcaaacaggattgggagggagagcctcaaggcgggggatcatatctactcctggagggcggcgtgggtctacgcgcatcacggaatatatgtgggcgatgataaggtgatccatttcacaagag

SEQ ID NO: 22453 - DNA, 221 bp, Zea mays
cgacgcgacacgggcaagcgctgaacctgaacctggtgggcgacccgaacctggtggcgagagaccccgtggtagccttcaagacggccatctggttctggatgacgccgcagtcgcccaagccctcgtgccacgccgtgatgaccggcgactgaaggccctccgccaccgaccgcgtcgcggggaggctccccggataacgcctgaccaagaacatcatc

SEQ ID NO: 22454 - DNA, 249 bp, Zea mays
cccacgcgtccgcccacgcgtccgcccacgcgtccgtaaagatttggaggctatggccaatctcagtataccaaaagatctatcaagtgatgaagcgaatcgttatttgatagaagcatgtgtgaagtatgatgtgaaatgtccacctccccaaacgacatcgcggttgcttgacaagttggttggccatttcttggaggagacatgtgtgaatccaacatttatcatcaatcatccagagataatgag

SEQ ID NO: 22455 - DNA, 252 bp, Zea mays
ggaaacctctcaaaccctagccgcctcctgcaagtttcagagctcaggaatctgcgccatggcgagtgagacggagaccttcgcatttcaggctgagatcaaccagctgctctcactcatcatcaacaccttctactccaacaaggagatcttcctccgcgagcttatctccaactcttccgatgcgctggacaagatcaggttcgagagtctcactgacaagagcaagctcgatgcgcacgctgagctttt

SEQ ID NO: 22456 - DNA, 242 bp, Zea mays
ggacgcgacggcacgcgtgggcacgcccggccgccgccgcagcccgcaatggcgtcccttgtcaaggaccccagcaagctctcggcgtacagggatcgtcggttcaaggggacgcaggaggagtatgaggcggcgctgcttgcgtcgacaacgctgtacatcggtaatatgtccttctacaccacggaggagcaggcctacgagctcttctcgcgcgccggcgagatcatgaagatcatcat

SEQ ID NO: 22457 - DNA, 232 bp, Zea mays
aaatcaagtgagcagatacgcctaagaaatgaactttctaggccgatgatgcagcttcaggaggctgcaagaaaaatagctgaggtacaacgagaatgcaaactggaagtaaatgtggaggaatatgttgaatcaacctgcagaccctaccttatggatgtcatatactgttggtcaaggggagccacctttgcggaggtgatggaaatgactgacatatttgaaggaagtg

SEQ ID NO: 22458 - DNA, 227 bp, Zea mays
ccaccgtcactcaacacagcacaggcagctcgagagagagagagagagaaagatgtcgtggttcgggcaccaccaccacaaccagccggctcccccggcgtcgggccccaaccaggtgttcaagatcttctgccgcgccaacgagaactactgcctggccgtccgcgacggcgccgtcgtgctggccccggtcaaccccaaggacgaccaccagcactggtacaagg

SEQ ID NO: 22459 - DNA, 223 bp, Zea mays
cccacgcgtccgcccacgcgtccgcccacgcgtccgatcggattgcatccagatggtcgtgcgaaaagaatggtatattgggaatctgtatcaaacttggttgagcctggtggcattgtggtcataacgtcatgtaatcacacaaaggatgagcttctgcatgaagtagaagatttcaccaagagaaaatttggcaaggagaacgtggatgaaggtgcacgag

SEQ ID NO: 22460 - DNA, 224 bp, Zea mays
gctaaggtgtttttcatcttccaaaattgacccttacctaagaataggtgaagacttgcaactctatgtaaggttgcaatcggatctaggcagctatggttctgaaagtgatcaagagattgccaaatccatgcgttctgactgcaggacacgagtagggattaacgatcatcgagtgcttgatgttattgcctctgcactttctaatttcattgagatgggca

SEQ ID NO: 22461 - DNA, 226 bp, Zea mays
aaaccctagccctcgcgccgccgcctccttcgccacccagcgctcgagctcctcgctccctgcgagcgcgcgccgcaacgccaccatgaagttcaacatcgcgaacccttccaccgggtgccaaaagaagctggaaatcgatgacgaccagaagctacgtgccttttatgaccgaaggatatcccaggaggtcagtggtgatgctctgggtgaggagttcaagggt

SEQ ID NO: 22462 - DNA, 224 bp, Zea mays
tgctacttcaacacgggcgtcatggtgctcgacctcgcgcgctggcgccgcgcgggatacacggcgcagatcgaggagtggatggagctgcagaagcgggtgcgcatctacgagctgggctcgctgccgcccttcctgctcgtcttcgccggcaggatcgcgtccgtcgaccaccgatggaaccagcacggcctcggcggggacaactaccgcggcctctgccg

SEQ ID NO: 22463 - DNA, 221 bp, Zea mays
caacaagagccccgtgtccacgctcaccgcggggaccatgggctacctcgcgccggagtaccttcagtccggcaaggccaccgagcagaccgacgtgttcagctacggcgtggtgctcctcgaggtgtgctgcgggaggcggcccatcgacaaggacgagcgcggcgggggcggcatgtgcggcgggggcaagaacgtgaacctggtggactgggtgtggc

SEQ ID NO: 22464 - DNA, 215 bp, Zea mays
tctccttccagtgtccgccgtcgtgcgctcgctacccctctccctcgaggcctttgccggcgaagagcgcccagtcgcccaccaggatgaagtttgttgctgcctacctgcttgctgtcctcgctgggaactccagcccctctgccgaggacttgacagccattctggagtcagttggctgtgaagttgacaatgacaagatggaactccttctg

SEQ ID NO: 22465 - DNA, 219 bp, Zea mays
  unsure (1)..(219): unsure at all n locations
ggaaaatcaggctccgtgctgaagatgtgcagggcaggaatgtgctcacatacttttggggcatgaattttaccactgataaactcagatccctagtgaagaagtggcagacattaatcgaagcccatgttgatgtcaagacaaccgacaactacatgttgcgtttgttctgcatcggcttcaccaagaggcgcccanaccaagtcaagagaacctgct

SEQ ID NO: 22466 - DNA, 218 bp, Zea mays
ggacctggtcctacatcacctatgcgctcgccctgctccaggacaatgcaacagatgacattgtcatcaaggccatgggaagggcgatcaacaagacagttgccatcgtggagcttcttaagagaaggattgctggtctccatcagaatacctctattgaatccattgatataacagacacttgggagccattggaagaaggccttgtcactcttgag

SEQ ID NO: 22467 - DNA, 220 bp, Zea mays
gctgccccttgctgtcgccgcctctctccgcgcgaccgatctaccgccgccgccaccatgtcgctgatcgccggcgaggacttccaacatattctgcgtctgctgaacaccaacgtggatgggaagcagaagatcatgttcgccatgacctccataaagggtgttgggcgccgcttctccaacatcgtctgcaagaaggccgacatcgacatgaacaaga

SEQ ID NO: 22468 - DNA, 216 bp, Zea mays
actggggtccgagattacatccatgtggttgaccttgctgacggacatattgctgcattgcagaagctttttgagaactctagcatagggtgtgaagcgtacaaccttggaaccggaagaggtacatctgtgctggagattgttaaagcatttgagaaggcttctgggaagaaaatacctctgatttttggtgaaagacgcccaggtgatgcagag

SEQ ID NO: 22469 - DNA, 211 bp, Zea mays
cccacgcgtccgcttcctgcaagatcttgagcggatttgcctcgaccataacaggaggcgttgctggggcatagggtttgggctgaagttcagggttgtggccctcgacccaaacttcaagaagcttgcggtggagcacttggtcttggcctaccggaggacgaagaagcgtgtcattctcttagactacgatgggacgctgatgccgcag

SEQ ID NO: 22470 - DNA, 212 bp, Zea mays
tgacaaatgactgggaggagcatctggctgtgaagcacttctctgtggagggtcaactggagttcaaggctgttctctttgttcctaagagggccccctttgatctctttgacaccaagaagaagcaaaacaacatcaagctctatgtgcgcagggtgttcatcatggacaactgcgaagagctgatccctgagtggctgagcttcgttaag

SEQ ID NO: 22471 - DNA, 212 bp, Zea mays
  unsure (1)..(212): unsure at all n locations
cggacgctggncgtgagccatgctgcaacaagtgcggtttctgctacctgtctgacccgccgaagtgccaatgcctggacttctcgacggtcgggtgccacccagagtgcaagcagtgcatcaggtacaccgccgacggtggcgtcgacatcccgcccgtgcacgcctaccgctgcgccgacatcctcttcaacttctgcgagcgccgctgc

SEQ ID NO: 22472 - DNA, 209 bp, Zea mays
atttcaaagtgttgtacccgacactaacagattatgacattcgatattacatctatgagttactcaaggcattagattactgccattcacaaggtattatgcaccgagatgtgaagccccacaatgttatgatagatcatgagcttcggaaactccggctgatagactggggccttgctgaattctatcatcctggcaaggaatataat

SEQ ID NO: 22473 - DNA, 215 bp, Zea mays
gactccagaggcgcacgtgttcaaggccgacgtaccggggctgaagaaggtggaggtcaaggtggaggtcgaggacggcaacgtccttcagatcagcggcgagcgcaacaaggagcaggaggagaagacggacacctggcaccgcgtggagcggagcagcgggaggttcctgcgcaggttccgactgcccgagaacgccaagacggagcagatca

SEQ ID NO: 22474 - DNA, 218 bp, Zea mays
cccacgcgtccgcccacgcgtccgcccacgcgtccgaaaccaaataccccaactcggacatctacttggacaagttcgacagccagtaccacttctcttgccagttcacagctgaccttattgccatgaaccacactgatttcatcatcaccagcacattccaagaaatcgcgggaagcaaggacaccgtggggcagtacgagtcccacatcgcgttc

SEQ ID NO: 22475 - DNA, 253 bp, Zea mays
cggacgcgtggcagctccccccgcaaaaaccctagctttacctccccacaagcgcctccaagatgaatgctcgtcaggttcttgatgaagctgaacaacgaaacggtgaccatcgagcttaagaacggcaccgtcgtacacggaaccattaccggtgttgacatcagcatgaatactcatctgaagactgtgaagctgacactaaaagggaaaaatcctgttacccttgatcaccttagtgtgaggggaaaca

SEQ ID NO: 22476 - DNA, 251 bp, Zea mays
gcaggtcgagcatcttcgacgccaaggccgggattgccctgaacgaccacttcatcaagctcgtctcttggtacgacaacgagtggggctacagcaaccgcgtcgtcgacctgatccgccacatgttcaagacccagtagagagagatatttctgcctccctatcgagggtcgtccccgatggcctttggtcgcagccatgctttgctgcttgtctatgctgagaataaatgtgaacggtgcccctggacg

SEQ ID NO: 22477 - DNA, 251 bp, Zea mays
ctccggttttgcgttcactgccaatggctgggtgcagtcttatgggtcaaggtgcgtcaagcctccgatcatctacggtgacgtgagccgccccaaccccatgaccgttttctggtcgaagcggcgcagagcatgacgtctcgcccaatgaaggggatgctgactggcccagtcacaatcctcaactggtccttcgtccggaatgaccagccgaggtttgagacttgctaccagatcgctcttgcgatcaa

SEQ ID NO: 22478 - DNA, 251 bp, Zea mays
gcaagattaagatcggaatcaacggcttcggaaggatcggcaggctcgtggccagggtcgccctccagagcgaggatgtcgagctcgtcgccgtcaacgaccccttcatcaccacggactacatgacctacatgttcaagtacgacaccgtccacggccactggaagcacagcgacatcacactcaaggactccaagacccttctcttcggtgacaagccggtcaccgtctttggcatcaggaaccctgag

SEQ ID NO: 22479 - DNA, 248 bp, Zea mays
cccacgcgtccgcgctgagcaggcggagaggtacgaggagatggttgagttcatggagaaggtagccaagactgttgactcggaggagctcactgtggaggagcgaaacctcttgtctgttgcatacaagaacgtcattggagcccgccgcgcctcatggcgcatcatctcctccatcgagcagaaggaggagggccgaggcaatgaggaccgagtaacactcatcaaggattatcgtggcaagattg

SEQ ID NO: 22480 - DNA, 250 bp, Zea mays
gcccgcgggacttcacgctcctccgccgcgtcggggccggggacatcggcaccgtctacctgtgccgtctcgagagccagagccaggcccccgaggggtccgcgtgcgagtacgccatgaaggtggtggaccggcgcgcgctcgccaagaaggggaagctggcgcgcgccgcggccgagaagcgcgtcctgcggcggctggaccacccgttcctgcccaccatgttcgcggacttcgacgccggcacgga

SEQ ID NO: 22481 - DNA, 254 bp, Zea mays
gcctcccacacacccgacgcccaagccgaccccaccgacgtacaccccttccccaaagcctccgacgcccaagtcgaccccaccgacgtacaccccttccccaaagcctccgacacccaagccgaccccaccgacgtacactcccacaccgaagccgccggccaccaagccgcccacctacactccgacgccgccggtgtctcacacccccagcccgccgccaccatactactagaaagcgatgcctaccatac

SEQ ID NO: 22482 - DNA, 236 bp, Zea mays
gtttctgggacatgtacgacccagagggctactctttgtggttctgtgactacaagtacaatgatgagaacaccgtctcctttgtgaccctgaacaaggttggtggattcctgcagcggatggacctgtgccgcaagtacgcctttgggaagatgctcgtgataggctctgagccacccttcaagctgaagggcctttggctcttccgtggccaggatgttcccaagtttgtaatg

SEQ ID NO: 22483 - DNA, 244 bp, Zea mays
ctccatgtagcattatgtatgaaactctttgagcacaaacctttcgatgcaaggaccgtcatgggattcggagtgctcaatggcatatcgattggacttcttaacttgagtttgggtttcaattctgttggtttctatcagtcggaacatcaagctttcccttagtgtgctccttcttggtgttggtgttgcaactataactgatctgcaactcaaccttgtgggatctgtattgtccctactg

SEQ ID NO: 22484 - DNA, 140 bp, Zea mays
agcaaggccacacacacacacacaccactagtaggctagcctagccttttagtcgtcgaggaggagcaagaagggcgcgcacgcaagcaggcaagcaagaagagagccgatcgaccgagagctagcacgcgatggcgagg

SEQ ID NO: 22485 - DNA, 243 bp, Zea mays
actggcagtgaaagagtcatatgtcatttctatcaccgtgaattttaccgttgcaagatcatggataagcatttgaaggcccttgctcctgtctatgtgggaacaaaattcatcaagcttgatgctgaaaatgctccattctttgtagccaaactggcaatcaaaaccttgccatgtgtaatattgttcaagaagggtattgctgttgaccggttagttgggtttcaagatctcggaagtaaa

SEQ ID NO: 22486 - DNA, 241 bp, Zea mays
cccacgcgtccgggctcatttcctattcgaaatactccaaggcccttgagtctttttacgagaaatttgatccagatttcattgatattaggacaaaagcacgtgaggtgttgcagagggaggacgatctgaatgaaattgtgcagcttgttggtaaagatgcgctggcagaatctgacaagattacgctggagacagcaaagcttttgagagaagattatttggcacaaaatgcattcac

SEQ ID NO: 22487 - DNA, 240 bp, Zea mays
cccacgcgtccgcccacgcgtccgggaggtcccttgacatcgaaaggccaacctataccaacttgaacaggctgatctcacagatcatatcatcacttaccacctccctgaggtttgatggggctatcaatgtggatgttactgagttccagaccaaccttgttccatacccacgtattcatttcatgctttcctcatatgcccctgtaatatctgctgagaaggcctaccatgagcagc

SEQ ID NO: 22488 - DNA, 234 bp, Zea mays
gcgccgtctggcacgcactgcgcaacgtcaagccgtcgcccgatagcccctgggaggactgcattgaccgctacccggtggagctcgtcgacggcttccccacgcagcaatagtaccttcttttctctatattcccctcccacccgtccgtcccccagcttgtcgtcgctgcacctgcacctgaacctgaaccagaaccagaacctgcggtaagtttgagtagtcctgatgatg

SEQ ID NO: 22489 - DNA, 231 bp, Zea mays
gcaccgtcaaaggcaccaggctgagcaacccctccctctctccctcttatccccaaggcgaggagcggacggatgaggagggcccttctgcttgtttctccgctttgcaagatgtcgtccccgagcaagcgccgcgagatggaccttatgaagctgatgatgagcgactacaaggtggagatggtgaacgacgggatgcaggaattcttcgtcgaattcaagggcccggcc

SEQ ID NO: 22490 - DNA, 235 bp, Zea mays
gctgatgttacccatccacatcctggagaagattccagtccttccattgcagctgtggttgcttcgcaagactggcctgaggtcaccaaatatgctggactagtgagtgcccaagcccatcgccaggagctgatacaggatcttttcaaagtatggcaagatccacagagaaggacagtaactggtggcatgataaaggaacttctcatttctttcaagagagcaactggacaga

SEQ ID NO: 22491 - DNA, 231 bp, Zea mays
cacatccagctcgccgtccgcaacgacgaggagctctcccgcttgctgggcacggtgaccatcgccagcggtggtgtcatgcccaacatccataacctgctgttgcccaagaagtctggcggcggcagtgccaaggctgcggctggtgatgaggactagaccgatcacgcctagcctttcatccggtggtggcacctcttgtggcatctgccgtatcaacttgtgcctgtg

SEQ ID NO: 22492 - DNA, 230 bp, Zea mays
cccacgcgtccgagctgctctcgtccctagaaataaagcagctcctccgcggggcggcgaactactacccatcgccaaaaccctagccccgatccggtcgaggagcactacttcttggcatggcgggcacccctagccaggcaagcctcctgctccagaagcagctcaaggatcttgcgaagaaccccgtggatgggttctccgcagggcttgtagacgatagcaacgtc

SEQ ID NO: 22493 - DNA, 232 bp, Zea mays
gtgccaggcttcatcacacaggctgagcagctcaaagccaagggtgtagacgagatcctgcttatcagcgttaacgaccccttcgtcatgaaggcgtgggcgaagacctaccccgagaacaagcacgtgaagttcctcgccgacggatctggagcgtacaccaaggcgctcgacctcgagctcgatctcacggacaaagggctgggcgtgcgctcgaagaggttcgctctcc

SEQ ID NO: 22494 - DNA, 232 bp, Zea mays
gactatgcaacaagagatgggactggggtccgagattacatccatgtggttgaccttgctgacggacatattgctgcattgcagaagctttttgagaactctagcatagggtgtgaagcgtacaaccttggaaccggaagaggtacatctgtgctggagattgttaaagcatttgagaaggcttctgggaagaaaatacctctgatttttggtgaaagacgcccaggtgatg

SEQ ID NO: 22495 - DNA, 229 bp, Zea mays
gaagaggaggtggccgaggggtctgtcgctgtggcggaggcggaggaaccgacgccgccgagcaagccgaaggttaagttcggcgaaataattgggattctgaataagcagttcattgaggaggctgagaaggtgaagactgtaccggatctgaggcctggcgatatcattgagcttaggatgcaacggcccaacaaaaggagattgtcgctctttaagggcataatca

SEQ ID NO: 22496 - DNA, 229 bp, Zea mays
cccacgcgtccgcctgagcatgtgatgatgtttttacttgctgaaatgggaacaagcggatcacttgatgggcagcaaaggttggtgatcaaaggaagatttgcccccaaaaattttgaagcaatcctgaggagatacatcaatgagtacgtcatctgcaatggatgcaagagccctgataccattctgtccaaggaaaatcgtctgttcttccttcgctgcgaacagt

SEQ ID NO: 22497 - DNA, 230 bp, Zea mays
ctcggtttcggcgatgtcggggcgcggcaagggcggcaaggggctgggcaagggcggcgctaagcgccaccgcaaggtgctgcgcgacaacatccagggcatcacgaagccggcgatccgtaggctggccaggaggggcggcgtcaagcgcatttctgggctcatctacgaggagacccgcggcgtgctcaagatcttcctcgagaacgtcatccgcgacgccgtcacct

SEQ ID NO: 22498 - DNA, 231 bp, Zea mays
tgacttcaagactgctttccccaggtggcaagctcaggacctggcaacaatagtcccaaatctagaacctgctggcttggaccttctctctaaaatgcttcggtatgagccaagcaaaagaatcacagctcggcaagcacttgagcacgagtacttcaaggaccttgagatggtacagtgacctgctaaatgtgcttcgcgttgctttggcatttgtaattgtctgagctg

SEQ ID NO: 22499 - DNA, 225 bp, Zea mays
cccacgcgtccgctgttatatgtgagatctggtttgctctttcgtggatattggatcagttccctaagtggtttccaatcaaccgggagacgtaccttgataggctggcattaaggtatgaccgggaaggtgagccatctcagttggctgctgttgacattttcgtcagtacagtcgacccaatgaaggagcctcctcttgtcactgccaataccgtgctatcca

SEQ ID NO: 22500 - DNA, 223 bp, Zea mays
ataacttgaccctatggacctctgacatctcggaggaccctgctgaagagattagggaggcgcccaagcgggactcgagtgaggggcagtaaagccggctttatgtgcctagaaactagtagctagtgtttgctgctgtcgaatgacactatgcaatgtgatctggaacctggtttcttgggtgcgacgcttgtagccgtgttatgactgtcgtccgtaaaat

SEQ ID NO: 22501 - DNA, 224 bp, Zea mays
agaagctgaaaagagatcgatggcccagcagaaggtggtgctccggatctctaccatgaccgacgacaggacgaagcagaaggccatggaggccgttgcagacatctacggcatcgactcgatcgcggcggacgtgaaggagaacaagatgacggtgatcggcgacatggacacggtggccgtcgccaagaagctgaagaagctcggcaaggtcgacatcgtct

SEQ ID NO: 22502 - DNA, 225 bp, Zea mays
caacctcagcggcgaaatcccagccgagataggcaaggtgaagagcctgcagatcgcgctgaaccttagctccaaccacttcaccgggccgctgccccgcgagctcgggcggctcgataagctcgtcgtgttggacttgtcgcgcaacgagatatccggccagatcccaggcgacatgagagggatgcttagcttgatcgaggtcaatctgtcgaacaaccggct

SEQ ID NO: 22503 - DNA, 236 bp, Zea mays
aatgctcctcaaggtcatcatcctcggcgacacggggtcggcaagacctcgctgatgaaccagttcaacaaccagtacaaggccaccatcggcgcggatttcctcaccaaggaggtccagatcgacgaccgcctcttcacactgcagatatgggatacggcaggacaggagcggtttcaaagtcttggtgtggcattttataggggagctgactgctgtgttcttgtatatgatgt

SEQ ID NO: 22504 - DNA, 233 bp, Zea mays
cccacgcgtccgacgtcgggttgcttgggtcgacaaggatcgggagccgacgggtcatacagatctcagctggcttcatgatctttttctccatgctggggaaatttggagccttgttcgcttccatcccgttcaccatctttgcggccgtgtactgcgtcctgttcgggctagttgctgcggtggggctgtccttcctacagttcactaacatgaactccatgcgcaacctc

SEQ ID NO: 22505 - DNA, 230 bp, Zea mays
gccaccgtgatcgggtacaagcaccagacggacgcgtcggcgtcgggcgccgacgcgcgtgcggcggcgtgggcgtgctgggcatcgcctgggccttcggcggcatgatcttcgtcctcgtctactgcaccgccggcatctcggggggccacatcaaccccgccgtcaccttcggcctcttcctggcgcgcaaggtctccctggtgcgcgcgctgctctacatcgtggcg

SEQ ID NO: 22506 - DNA, 230 bp, Zea mays
cctggccctcgtgctcctgggcggcggcggcgcggacgccggcacgacaagctcgtacaggcggaagctggaggcgacggtggagatgccgctggacgccgacgtgttccgcgtcccgccgggctacaatgcgccgcagcaggtgcacatcacgctgggcgaccaggagggcacggccatgatcgtgtcgtgggtgacggccaacgagccgggcaacagcaccgtcgcgt

SEQ ID NO: 22507 - DNA, 228 bp, Zea mays
caacttcactaaaggaggactaatacaactcaaccatggaaggcctcagccacttcagtatgctgtcaacgcagctttccttgcttctctatacagcgactatcttgaagctgcagacacgcctgggtggtactgcggacctaacttctacaccacagaagtcctccgcaagtttgccaggtcacagctcgactacattcttggcaagaacccattgaagatgagcta

SEQ ID NO: 22508 - DNA, 228 bp, Zea mays
gattgagacccccttccttgtggtgagcctgagcgagatagagattgttaacctggagagggtgggctttgggacaaagaacttcgacatggctatcgtgttcaaggatttcaagaaagacgttctccgcattgactccatcccttcagcatcgcttgacgcgataaaggaatggctggacacaactgacctcaagtactatgagagcaggctgaatctgaactggcg

SEQ ID NO: 22509 - DNA, 225 bp, Zea mays
actgtctgtgcgaaggcgaccattccttcttcgctccttcgccgccgctatggttaagtactcgcaggaaccgggcaaccctaccaaatcggacaaggccatgggaagggacctgagggtccacttcaagaacacaaaggagacagcttttgcgcttcgcaagctgcctttgaccaaggctaagcgataccttgaggaagttattgctcacaagcaggcaattcc

SEQ ID NO: 22510 - DNA, 230 bp, Zea mays
ccactccacagcagtagcaagagggatagagcaaggccacacacacacacacaccactagtaggctagcctagccttttagtcgtcgaggaggagcaagaagggcgcgcacgcaagcaggcaagcaagaagagagccgatcgaccgagagctagcacgcgatggcgaggtcttccaagatgatggtggcggcagctctgctggccttggccctggccgtgtcgaccgccg

SEQ ID NO: 22511 - DNA, 232 bp, Zea mays
gggcaagacaccagaagagattcgcaagaccttcaacatcaagaatgacttcacccctgatgaggaagaggagatccgcagggagaaccagtgggccttcgagtaaggaggtgctggatctattgatgcctaagtttcgtggtgtctactactatgtctactttatgttgtcctaatggttgtaagtattttgggagtcactttgcttgcgaatgtctcgcgtaagacttat

SEQ ID NO: 22512 - DNA, 125 bp, Zea mays
tgtgtttggtggaatggattctagtcactacaagggtgatcacacctaatgtccaagtcacttcaaaagggttaattgccagtttattatgggtgatgtcctggttaatggaagtccattgggtt

SEQ ID NO: 22513 - DNA, 224 bp, Zea mays
gtactctctccctcctaccacacacagcctccggactgctccggacgcgcgcctcagatctactccaacacctccgcagcggcggcgcccgcgggtggaggagcaggagaggcggcgccatggtcgggaccgggaagagggaacggatagcgatacggaggatcgacaacctggcggccaggcaggtgaccttctccaagaggcggcggggcctgttcaagaag

SEQ ID NO: 22514 - DNA, 226 bp, Zea mays
gatccggcgccgcgtcgtccaggctcttgctcggcctcatcatgctcgccgcgctctgctgcgtcgtcatgctcgcgctcgtcacgcagaccgtcgtctacctcgtgtgcaagagctaccaccacgagagcctcgacaaggccaacatctccgaccacctcgaggtctacctcggcgactacgtcccgctaaaggcgtccgacgtgcagatggagcagttccaggt

SEQ ID NO: 22515 - DNA, 221 bp, Zea mays
ccacgaatcgccgacactccaacccggaagagccaacgaggtgactccgcgccccggtcatgggtgacagccaatactccttctctcttaccactttcagcccgtcgggaaagcttgtgcagatagagcacgcgctcacggctgtcggatccgggcagacctccctagggatcaaagctgccaacggtgtagtgattgccaccgagaagaaactgccttct

SEQ ID NO: 22516 - DNA, 219 bp, Zea mays
cccacgcgtccgagcgttactgggctcctgatggtcggcacatggccgtcgggctcaactcgtctgacgtccagctctgggacaccagctccaaccgactgttgagaacactcagaggtgcgcatgaggcaagggtaggctcgctggcatggaacaacagcgtcttgaccaccggttgcatggacggcaagattgtgaacaatgatgtaaggattagag

SEQ ID NO: 22517 - DNA, 219 bp, Zea mays
ggagcattcgagaagccgaagaaaattcgaagacgaggagcagctacactgcggacggacttcgggcatggagggccagttccaggttggcaaggaggaggtcatccaagcatggtacatggacgacagtgaagaggaccagaggcttcctcatcatcgcgagcccaaagaattcatccctctcgacaaactttccgaactaggaatattaagctggcg

SEQ ID NO: 22518 - DNA, 221 bp, Zea mays
cagatgacaagctttatgaagctcacagggagtggggaaaacgctttatgaaattgtatccacaatatacaagttgggataactcaaaagttgctgaccgcccattgatcatcggttacttgtctcctgattactttactcattccgtgtcctacttcattgaagctccccttacacaccatgattccacagtttgcaaggtggttgtctactccggtgtt

SEQ ID NO: 22519 - DNA, 221 bp, Zea mays
ctgccacaccgacctgcacgtcatcaagaacgactggcgaaacgccatgtacccagtcgtcccggggcacgagatcgtgggcgtggtgaccggcgtcggcggcggcgtcacgcggttcaaggccggcgacacggtcggcgtgggctacttcgtggggacctgccgctcctgcgacagcagcggcaagggggacgacaactactgcgcggggatcgtgctca

SEQ ID NO: 22520 - DNA, 225 bp, Zea mays
ctcgtttagaacctctaaaatttcccccactcgccagtcgcagcagcacctgtagcagccatggacgccagcggaccggtagcaaggggaagaagggggcggccgggcgcaaggcaggcggccccaggaagaagtcggtgacgcggtccgtcaaggccgggctgcagttccccgtcggccggatcgggcgctacctcaagaagggccggtacgcgcagtcgtggg

SEQ ID NO: 22521 - DNA, 250 bp, Zea mays
cgcgatgatgtcggtggcgtacgaattcttccggctccccgctgaggagaaggccaagctgtactccgacgacccggccaagaagatgcggctgtccaccagcttcaacgtgcgcaaggagacggtgcacaactggcgggactacctccgcctgcactgccacccgctggagcagtacgtccccgactggccggacaacccaccatccttcaggaggaccgtgagcgtgtactgcagtgcggtccgggaa

SEQ ID NO: 22522 - DNA, 244 bp, Zea mays
cccacggtccgtggagcttgccctcgtaagacagcaagcaacttgtccatgcagaagccagcaatgtcaggtggtatggacccgctgctgctgaatggtatgtatgaccagggtgttgtgcgtcagagttagtgacaggtgaccaccgggagtgccagcagcgtcgccctgcctgctcctggacagaagactcagatgcttgctctgcccgcaccggatggttcaatgcagactgttggtggtg

SEQ ID NO: 22523 - DNA, 246 bp, Zea mays
gtagaaccggcggcgtggagaactttttccactgtgataaatgtgggtgttgctacagcaatgtcttgaaggattcccaccactgcgtcgaaagagcaatgcatcacaactgccccgtctgcttcgagtatctgttcgactccacgaaggacatcagcgtgctgcaatgtgggcataccatccatttggagtgcatgaacgagatgagagcacaccatcacttctcatgcccagtgtgctcgaggt

SEQ ID NO: 22524 - DNA, 249 bp, Zea mays
cccacgcgtccgcccacgcgtccgcctctcacaactcagtcgctcaaaaccctagagctctcgcctgctcgcctccgccgccggagcgagctccccatcttcatccgtcaaccatggcgacccagatcagcaagaagaagaagttcgtcagcgacggtgttttctacgccgagctcaatgagatgctgacgcgggagctggcggaggatggctactctggcgtggaggtgcgcgtcacgccgatgcgca

SEQ ID NO: 22525 - DNA, 246 bp, Zea mays
gaacgcagagcatggtaaccagcagcctaaccaagatccttatgttcaggagccagacgatgggattgatgaaggtggccaagtcgagctgcacagggatctcagtagggctaatagtggagggcagccgcagctcgtactttcacatatcagagctcctccgtgacgtttggtggtattaatggagcctactacaccacttcaaagtctcggcggactggtagtgacgggatcactgtggaagaa

SEQ ID NO: 22526 - DNA, 239 bp, Zea mays
gccaacgccgcctgctgccgcagccgccatgggggcgtacaagtatgtgtcggaactatggaggaggaagcagtcggacgtgatgcgcttcgtgcagcgcgtgcgctgctgggagtacaggcagcagccgtccatcgtccgcctcaccaggcccacccgccccgacaaggcccgtcgtctcggctacaaggccaacaaggatatgttgtctaccgtgtccgtgtgaagcgtggtggcaa

SEQ ID NO: 22527 - DNA, 192 bp, Zea mays
ccagcctcggaaggaaccttccagaagcgcaagactctaaggccgtcgccttcccattcttcctcgccgcgggggtcgcctgagatcacataaacaatggtgaaggctgttgctgtgcttggtagcagcgatggtgtcaagggcaccatctttttcacccaagagggagatggccctaccgctgtcaccgga

SEQ ID NO: 22528 - DNA, 246 bp, Zea mays
ctaaatatcggaggcacgaaatgcgtgtcagattgagtggtggtgaaccagaaaaaccattggtaatacatgtgggccgttttggacgtgaaaaaaatttggattttctgaaaagggttatggagaggctcccaggagcaaggattgccttcgttggagacgggccatacagggctgagttggaaaaaatgttcatgggcatgcctgcagtttttaccggaatgctccaaggtgaggagctctcac

SEQ ID NO: 22529 - DNA, 243 bp, Zea mays
cccacgcgtccggtgtttccttcgttgaataacagcggaaaacttgacatcttattggctcagggcaaggagtatgtctttgttgcaaactcagacaacttgggtgctatagtcgacatcaagatcctaaaccatctgatcaataaccagaacgagtactgcatggaggttactccaaagacgctggctgacgttaagggtggcactctcatctcttacgaaggaagagttcagcttttggag

SEQ ID NO: 22530 - DNA, 209 bp, Zea mays
cccacgcgtccgtctacctgctggcgacgctgtacgtgttcacgctgacgctgccgtcgtcggcggccatgtactgggcgttcggcgacgagctgctgacccactcgaacgccttctcgctgctgcccaagacccggtggcgcgacgcggcggtgatcctgatgctgatccaccagttcatcaccttcggcttcgggtgcacgccgctc

SEQ ID NO: 22531 - DNA, 242 bp, Zea mays
tccgtcatctacaaggactggaacttcacagagcaggctctccctgacgacctaatcaagagaggcatggcggttgccgacccgtcgagcccgtacaaggtacggctgctggtggaggactacccgtacgcgtcggacgggctggccatctggcacgccatcgagcagtgggtgacggagtacctcgccgtctactaccccaacgacggcgtgctgcgggcggacgtggagctgcaggcgtg

SEQ ID NO: 22532 - DNA, 245 bp, Zea mays
ccccgatctcgtcgagaggaagcccaatcccgaaaccgtcgccgtattccaatggcgcccaaggccgagaagaagcccgccgccaagaagcctgcggaggaggagccggcggcgcagaaggccacggcggggaagaagcccaaggccgagaagcggctccccgcgggcaagtccgcagcaaggagggtggcgagaagaaggggaagaagaaggcaaagaagtcggtggagacgtacaagatctac

SEQ ID NO: 22533 - DNA, 200 bp, Zea mays
cccacggtccggcctaccgtggcctcctcagctccgacgaggtgctcctcaccggcagcggaccaccgctgaccttgtcaagctctacgccgccaaccaggatatcttcttccagcacttcgcgcgctccattgtcaagatgggcaacatctcgccgctcaccggggccaatggcgagatcaggaagaactgcaagaggg

SEQ ID NO: 22534 - DNA, 245 bp, Zea mays
cccacgcgtccgctttaagcacaaaatatgttttgctgaggagatggcattcatgagcaggttggcgaggagaagactttaattacccctgtgcagtgcaaaaatttgtggaggcaattcaaggctgaaactgaatatacagtgactcaagccttagctgctcaggtatctccacatttccattccaccagttaactgatatgtgtgctattgacaccttgtggatttcatctcaaaatccctct

SEQ ID NO: 22535 - DNA, 209 bp, Zea mays
cccacgcgtccgcccacgcgtccgcccacgcgtccgcccacgcgtccggttgggtacaaccctgataagattgccttcgttcccatttctggttttgagggcgacaacatgattgagaggtccaccaaccttgactggtacaaaggcccaaccctgcttgaggctcttgaccagatcaccgagcccaagaggccttcggacaagcccct

SEQ ID NO: 22536 - DNA, 238 bp, Zea mays
acttgtggaagcaagccttcgactcaggcagatgagaggtgaagaacttgagggattgagtgttgaagaactccagcaattggagaagaatctggaatctggtctgcatagggtgcttcaaacaaaggatcaacaattcttggaacagatcagcgacctcgaacaaaagagtacacaactggcagaggagaacaggcaactgaggaatcaagtatcccacatacccccagttggcaag

SEQ ID NO: 22537 - DNA, 223 bp, Zea mays
gttggaaatgttgatgaagcttccaaacaccttgtacgttgtacctatgagtgcttggagaaagctattgcgatagttaaacctggagttcggttccgagaggtcggagaagtcataaatagacatgtttcgatgtcaggtttatctgtggtgaaatcttattgtggccatggcataggggaactgtttcactgtgcccaaaacattcctcattattcaagaa

SEQ ID NO: 22538 - DNA, 210 bp, Zea mays
gatcatagaggaatttggatcgtttgacaaatactgttggagcttcgtgaatcacaaacctatattgagccggttcaggtactcccgtcaagtgcctgtcaaaacatcgaaagcagacgccataagcaaagacctggtccgaaggggtttccgcagcgtcggcccaacggtcgtttataccttcatgcaagtctctggcatgactaacga

SEQ ID NO: 22539 - DNA, 235 bp, Zea mays
gctcatcatacatatttctatggaaatggaactgtatggtagttggttgcagactaattgttgattgtaataaaatccaggtaacaaagctgctggaagaaccccattggactgggagaccagggtgaagatagctctgggcactgcacgcggaatggcttatcttcactccgtgggtagcggcgggaagttcattcacgggaacatcaagtcaagcaacatccttctctcacag

SEQ ID NO: 22540 - DNA, 229 bp, Zea mays
cccacggtccgcccacgcgtccgccacgcgtccgtccaggtccgagacctggggcaatggctcccggacaaccttaaccgagggaagctagacaactactactggctagtcgtggctctggaggtggtcaacctcgtctacttcttcatctgcgttaagtactacacctttaagccattggagatggtgagcggtgaggaggttgagctctaccaccatggcaatggca

SEQ ID NO: 22541 - DNA, 209 bp, Zea mays
gctgcggctggttgtggcgccccagaacttcgtgatcaagatcgtcgacaaggacggggccatggagtacgcgaggcgtgaactcgtcggcgacagtgcacctgctgaagctgcagctacggttgccgcctgaggcatgaaacttgtttgtgttagctgtctgtggctcagcgaggctactatgtaatcaaatggatactggtgggggt

SEQ ID NO: 22542 - DNA, 221 bp, Zea mays
cccacgcgtccggaatcacacaacagcagctcaaaaacccaacacacctcaacaagcagagcaaagacccgggattcgccggcgcggtagcagagcgagagatggacgggaggatgttcggtctcgagacccccctgatggtggcgctgcagcaccttctggacgtgcccgacggcgacgcggcgcgggcggcgacaaggctagtggtgccgcggcgggcg

SEQ ID NO: 22543 - DNA, 226 bp, Zea mays
gagaaatgcaacatgcatcagacaaatctataatcatcagcgaaatacttgattctagaacaagaaaccttgtatctgtctccaaaatcagcgattatgttctatcaaatgagcttgtaagtatggcactagcaatggtagcggaagacaaacaaataaacagagttcttgaagaactttttgctgaggagggaaatgagatgtgcattcggtctgctgaatttta

SEQ ID NO: 22544 - DNA, 221 bp, Zea mays
cgccccttccttcgccgcaccagcgccacccgcgccgtggtcagaaggaggtccttcaccgtgcgcgcctctctccgcaaggccaccggcaccgccgccgtggcaatggctgccagcgccctgcttgccggcggtgccatggcccaggaggtgctgctgggcgcaggcgacggcgggctcgtcttcgagcccagccagttcaccgtcaaggccggcgacac

SEQ ID NO: 22545 - DNA, 80 bp, Zea mays
ggaacttctgagtggtgataaggagggccttcttcagctcccaagtgtacaaggcctgctgagcgacccctgttttcggc

SEQ ID NO: 22546 - DNA, 217 bp, Zea mays
cgatcatcttctcgatggcgcgtctcgaccgcgtgaagaacatgacaggcctggtcgagatgtacggcaagaacgcgcgcctgagggagctggcgaacctcgtgatcgttgccggtgaccacggcaaggagtccaaggacagggaggagcaggcggagttcaagaagatgtacagcctcatcgacgagtacaagttgaagggccatatccggtggat

SEQ ID NO: 22547 - DNA, 223 bp, Zea mays
cccacgcgtccgcttcatccgcaaggtgaagatactcaaggcccccaagttcgatcttgggaagctcatggaggttcacggcgactacaaagaggatgttggtgtgaagcttgagaggcctgtcgagggagatgaggctgggcaggaggttgctgctgccgagtagtttgtttgctagttctatatctaggcgagtctggacatgaggttgcttatgacgtga

SEQ ID NO: 22548 - DNA, 225 bp, Zea mays
cccacgcgtccgcccacgcgtccgcgacgactaagatgcaggagcacgcggggagcgacaagtcgtgcgtgatggcacgcgctggacttcgccgacgggagctcaaagaggagatgtttgctatccgttttggatctgtcgagaattgcaagaagttcaaggacactgttgaagagatagctgaacagcaaggaaagagcgaggagaaagaaaatgatgaagtct

SEQ ID NO: 22549 - DNA, 222 bp, Zea mays
cccacgcgtccgcccacgcgtccgcccacgcgtccgggaaccaaatgtcctgttttccttttcttctcagttaatgcaagtggtcagttctgtggcgtggctgagatggttggtccagtagatttcaacaggaacatgaacttctggcaacaggacaagtggaatggtttcttctcggtaaaatggcacattatcaaggatgttcccaatccacaatttcgc

SEQ ID NO: 22550 - DNA, 219 bp, Zea mays
agcgtgcccgttctttttcgcgtttcacggcggcgcggacagagagccatcggcggcgcaccgaccgccggcgaagggtacagagatgaagacggttagcctcggcgcctctaggccttccactgtcaacttccgcatgccgacgagggacaacctcgtgcctatacgcgtcgacgtcgaggtggacggccagcgctacagggacgccttcacctggaa

SEQ ID NO: 22551 - DNA, 216 bp, Zea mays
ctcgaggtagagtcttcagacaccatcgacaacgtcaaggccaagatccaggacaaggagggcattcccccagaccagcagcggcacatctttgctgggaagcagcttgaggacgggcgcacgcttgccgactacaacatccagaaggagagcaccctccacttggtgctgcgcctcaggggaggcatgcagatcttcgtgaagaccctgaccggc

SEQ ID NO: 22552 - DNA, 225 bp, Zea mays
agacgaaccgtttcttaatggaatcaagtacacagctatgccacctaccaagcggtttagagatatggaacagttatccggtggggagaagactgttgcagcactggctttgctttttgccattcacagttttaggccatcaccgttcttcatattggacgaagtagatgctgctctggacaatttaaatgtggccaaggttgccgggtttatcagttcaaaatc

SEQ ID NO: 22553 - DNA, 243 bp, Zea mays
gcggaggttgaggctccagctgctgcggtcgaggctccagctgctgcggtcgcgccgacgacccctgaggtggcggcgcccgaggccggagccgctacggaggcgaagggtccgcacaagcttcaccggcagtggaccttctggtacgacatccagacgaagaccaagtccggggctgcgtggggcacctccctcaaaaaggcctacaccttcgacaccgttgaggagtctggagcatgtatg

SEQ ID NO: 22554 - DNA, 237 bp, Zea mays
ctcctcacttctgcgccgccacccactacaggtaaggaagaggaggagggcaggatgtcgcaccgtaagttcgagcacccgaggcacggctccctcggcttccttcccaggaagcgctcctcccgccaccgcggcaaggtgaagtcatttcccagggatgaccccaagaagccttgccatctcactgccttccttggatacaaggctggcatgactcacattgtccgtgaggttgag

SEQ ID NO: 22555 - DNA, 242 bp, Zea mays
gctgccaagggtgagctgtataaggaactgacaaggtgtaaacatttttctgagagacgttcagcaacttatattgcatcattggctagagctctgatctacctgcatgggaagcatgttatccatcgggacattaaaccagaaaatcttttggttggagcccagggcgagatcaaaatcgccgactttggctggtctgtgcataccttcaacagaagaaggactatgtgcggaactctgga

SEQ ID NO: 22556 - DNA, 242 bp, Zea mays
cttgcaatcacaacgaacaaaagctctcgatctcaccgacaccgaggaagaagagatcaatggcgtccgagcagggagtcgtgatcgcgtgccacagcaaggctgagttcgacgcccacatgaccaaggcccaggaagccggcaagctggtggtcatcgacttcactgccgcctggtgcggtccatgccgcgccatcgccccactgttcgtcgaacacgccaagaagttcactcaggtcgtc

SEQ ID NO: 22557 - DNA, 248 bp, Zea mays
gaagcatgtgaaggcagagaacggagtcattctcaccaagcccttccttgatgtctgcaagcaaatcttgcctgtcctggataaatttggagctgctatggcaattgtaaagaatgatatcagcggcaatatcacaaggctggaaaacaagtattcttcagatccatcaaagtatggacacttgtacagcatggttcaggaagaagttcaaaacaagaccgcgaaaggttcctcaagctgcacaaatg

SEQ ID NO: 22558 - DNA, 247 bp, Zea mays
ctcctcacttctgcgccgccacccactacaggtaaggaagaggaggagggcaggatgtcgcaccgtaagttcgagcacccgaggcacggctccctcggcttccttcccaggaagcgctcctcccgccaccgcggcaaggtgaagtcatttcccagggatgaccccaagaagccttgccatctcactgccttccttggctacaaggctggcatgactcacattgtccgtgaggttgagaagccaggat

SEQ ID NO: 22559 - DNA, 243 bp, Zea mays
ggcctttccgtgctctcttggatgttggccttattaggactacaactgggaaccgtgtctttggtgccctcaagggagctttggatggtggactggatattcctcacagcgagaagaggtttgctggtttcaagaaggatgacaagcagctggatgctgatatccatcgcaagtacatctatggtggccatgttgctgactacatgaggaacctcgctgaagaggagccagagaagtaccagt

SEQ ID NO: 22560 - DNA, 250 bp, Zea mays
gctatgaagaaagctgaagctgcaggcaatgataattgtcctgtgaagattaaactagttgctcctccactttatgttctgaccacacagacccttgacaaggaccaagggatttcagttctcactgatgcagtcaaggcttgtacagcagagattgaaaaatacaaaggaaagttagtagtgaaggaaccaccaagagctgttagcgagcgggaagacaagctattcctcgaccagattgattccctaa

SEQ ID NO: 22561 - DNA, 237 bp, Zea mays
cccacgcgtccgccgctagcatccgcagttcccccgcgcccgagacgcaaccccgcgccaggagtttgttcttttatcgatattatcgatatggcgagggaggagaatgtctacatggccaagctggctgagcaggccgaaaggtatgaagagatggttgagtatatggagaaggtggctaagactgtagatgtggaagagctcactgttgaggagcgtaacctcttgtcggtcgca

SEQ ID NO: 22562 - DNA, 235 bp, Zea mays
ctctcctgttggaaactactttaaggaaggtttagcaccaataaatttgatagttgaagacaagttccatcgtgctactcctggtggtactgggggtgtgaagaccataggaaattatgcttcggtgttgatggcacagaaaattgcaaaggaaaagggttattctgatgtcctctacttggacgctgttcacaagaagtaccttgaagaagtttcttcatgcaatgtttttgtt

SEQ ID NO: 22563 - DNA, 238 bp, Zea mays
catcaatggataaaaccgtacggttgtggcacatgtcaagcacttattgtttgagaaccttctcacacactgactatgtgacttgcatccagttcaatcctgttgatgatagatacttcattagtggttccctggatgagaaggttcgcatttggagtattccaaagcgtgaaatagttgattgggtcgaccttcatgaaatggttactgctgcctgctatactccagatggaaaggg

SEQ ID NO: 22564 - DNA, 239 bp, Zea mays
attgatcaaacacgtatgtggaaggtgggtgaaagggtccgttcaaccaggccacaaggtgatcttggcccactgcatcccttcactgctggagtgtatgttgcactaatgatggctcagattgaggtccttaggaagaagggccactcttactcagagataattaatgagagcctgatcgagtccgtggactcgttgaacccgttcatgcatgctcgcggtgtggccttcatggtcga

SEQ ID NO: 22565 - DNA, 240 bp, Zea mays
cccacgcgtccggccgctcgaatccgccatgaagggggccaaatccaagggcgccgccaaggccgatgccaagctggcggtgaagagcaaggtggcggagaagcccgccatagcaggaaagggaaggccggcaaggaccccaacaagcctaagagggctcccagcgctttcttcgtgttcatggaggaatttcgcaaggagttcaaggagaagaaccctaagaacaagtctgtcgctgcg

SEQ ID NO: 22566 - DNA, 233 bp, Zea mays
ggatgtcagatgctcatgtcctaacaagagctgaacaggttgcgaacaacaaaagattaagatatgggagaactatgtcgagggtgagaatgcttcaaatggatccgcacctgaatcgaaacaaaaggaaatcctcaaggttgtcgccacggaagttcttggtggtgggaagttttatgttcagacagtgggtgaccagagggtggcttcaattcaacagcagcttgcatctt

SEQ ID NO: 22567 - DNA, 230 bp, Zea mays
cccacgcgtccgagccgacggtgcgccttgtcggcccggaagggaggtgcgtggacgtgccttacggttactactacaacggcaaccaggtgcagctgtggagctgcaagtccaccagcgccgtgaaccagctctggacgctcaagagggacggcaccatccggtccaacggcaaatgcctgaccagcagcggcgacgcggccggcgcccgcgtggtggtcgacgactgc

SEQ ID NO: 22568 - DNA, 229 bp, Zea mays
cacccctctgggccgaatgctttacaaggcaccatctgacgggaaatggggggagcatgagcttgactacctgctgttcatcgtccgggacgtgaaggtgcagccgaacccagatgaagtcgctgacgtgaagtacgtgaaccgcgacgagctcaaggagctcatccggaaggctgacgctggcgaggacggggtgaagatctccccctggttcaggctggtggtggac

SEQ ID NO: 22569 - DNA, 232 bp, Zea mays
ccacaaccatcgagtgaacacccaaggaactgattctgatagcgatccgaacaatactactgtatttgttggcggccttgacccgagtgtgactgacgagcttctgaagcaaactttcagtccatatggagagcttctctatgtcaaaatacctgtaggaaagcgctgcggatttgtccaatattctaacagggcatcagctgaggaggccataagggtgctaaatggaagc

SEQ ID NO: 22570 - DNA, 236 bp, Zea mays
cccacgcgtccgcaaggattcccatggacatgtggttgtccattacacagatgttgatacaaatgttcagctcctttttaggtaccgttgctcatgttgcagcccgaggttgtagctacacaggaacacaaattcagaagataaaagtacaagcgtgaagcacgagccagtacaagtcagcgtgaacagtacgggggtactgttcatctatttataggcacaggacagagcatgtg

SEQ ID NO: 22571 - DNA, 238 bp, Zea mays
cttcaatcgagtcaaaggaaagcgccctagtatggcactatttggacgcggaccatgatttcggttccttccaagcaaaggagctacaaggtcatcttgagagggtgctatcgaatgagcctgttgttgtgaagtgtggccattatattgtagaggtgaaaccacagggagttagcaaggggcttgctgtcaacaagctgattcacacactggtcaagaacgggaaggcaccggattt

SEQ ID NO: 22572 - DNA, 230 bp, Zea mays
ggcagcttgaaggaggccacagaacactagagtagaacaaaataaagaattagtgaagaacatcatcaagcagcagatttcaggaatatatgaggccttggagttgagggatggaggatctgattatcttggcaagggtattcttaagcttttggcttaaaatttgagaggaggagatggcggtcacgatcacgtgggtgaaggcgaggcagatcttcatcagccgcggc

SEQ ID NO: 22573 - DNA, 224 bp, Zea mays
attttatcgcctagtatctcaaaagttcgaggatcctgccgaagtgaagaagctttggtcggcaaatttaagaaactgtatgatgacctcaccactggtttccgcaatctcgaagacgaggcacggtgaactagtgtagattctgtgtaaacaaggactgccaaatgttttataagatacataaattgtagattgagatcatctgtaagaattattcccacggt

SEQ ID NO: 22574 - DNA, 231 bp, Zea mays
agaatatactggctaactcggactgcaaactgaaaatatgtgactttggacttgcccgtgcatcattcaatgatgccccttcagctatattttggacagattatgtggcaacaaggtggtaccgggcacctgaactatgtggttcctttttctccaaatacactcctgcaattgatatttggagcattggctgcatatttgctgaacttctcactggaaggccactatttc

SEQ ID NO: 22575 - DNA, 233 bp, Zea mays
gagagagtcatcggcggaattgagcttcggcgaatacaacgtcccagacggtggaggaggggagaatctgctcggatccctcaagtacagaaacgaggagctttactcggccggcaagcccatggaagaggtcttctggctgcctgtgcattcggcatggttcagaactgcagaacagctcacggtggtgactagatagactaacgggaatcttcgtaacataatactaagta

SEQ ID NO: 22576 - DNA, 229 bp, Zea mays
gcttctcctccccctccggttcgggttcgggttcgtgaggttctccggggttcggtttcgtgggtgagcggatcgagatggcggcgtcggatgttgagtaccgctgcttcgtcggcggcctcgcctgggccacggacgaccactccctccacaacgccttcagcacctacggcgaggtcctcgagtccaagctcatcctcgatcgggcgacgcagaggtcccgcggctt

SEQ ID NO: 22577 - DNA, 229 bp, Zea mays
tctattcagagctgttgctaatcaagtttatggagacgcagaagcttatgacatggctaggcagatgtgtgttgattatatggaaagggaacgggatcatttctctcagttcataactgaaattgaaagttttacattatactgtaagaggaaaaggagagataaggtttatggcaacaatgttgagatccaggcatttgcagagatgtacaatcgtcccattcacata

SEQ ID NO: 22578 - DNA, 230 bp, Zea mays
accgatccaagagcgagccgacgacgacgagccgcgcgcgcgacgcggccgtccatcgtgctgttcggggactccatcacggacgaggcgttcggggagggcggttggggcgcgtcgctcgccaaccactactcccgctccgccgacgtcgtgctgcgcggctacagcggctacaacacgcgctgggcggcgcgggtcgccggccgcgccgtggccagcatcgccggccc

SEQ ID NO: 22579 - DNA, 228 bp, Zea mays
gctgaagttgcaaaagcgccttgccgctagctacctcaagtgtgggaaaggcaaggtgtggcttgacccaaatgaagttagtgagatctccatggcaaactcccgccagaatatccggaagttggttaaggatgggtttatcatcaagaagcctcataagatccactctagatcccgtgcaagaagggcacatgacgccaagcaaaagggacgcactcaggatatggt

SEQ ID NO: 22580 - DNA, 161 bp, Zea mays
agcgactatcttgaagctgcagacacgcctgggtggtactgcggacctaacttctacaccacagaagtcctccgcaagtttgccaggtcacagctcgactacattcttggcaagaacccattgaagatgagctacgttgtgggtttcggaaacaagtaccg

SEQ ID NO: 22581 - DNA, 180 bp, Zea mays
gatccactttgttcccatctctggtttcgaaggtgacaacatgattgagaggtccaccaaccttgactggtacaagggcccaaccctacttgaggctttggacttgatcaatgagccgaagaggccttcagacaagcccctgcgtctacccctacaggatgtgtacaagatggtggtatt

SEQ ID NO: 22582 - DNA, 221 bp, Zea mays
gtgcgcactggcacgtaccgccagctcttccaccctgagcagctcatcagtggcaaggaggatgcagctaacaatttcgcccgtggccattacacaattggcaaggagattgttgatctgtgccttgaccgtatccgcaagcttgctgacaactgcaccggcctccagggcttcctggtcttcaatgccgttggtggtggcacggctctggccttggttct

SEQ ID NO: 22583 - DNA, 214 bp, Zea mays
cccacgcgtccgcacagtccattattgccgtctcccttttgcgtgaggaagaaagagagcgagaagcagtcgccatgtctggcatcatccacaagatcgaggagaagctccacatggggggcgaccacaagaataaggaggaggagcaccacaagaaggccgaggagcaccacaagaaggaggagggggagcaccacaagaaggacggcgggga

SEQ ID NO: 22584 - DNA, 227 bp, Zea mays
cccacgcgtccggttttggtctcgccgcgcacgcctcctgaagcttctagacgttcgaggaggaggaggaggaggggaggctcccgccgccgccgtagccatggcgtccaccaaggtgcagcgtatcatgacgtagcccatcaacctcatcttccgtttcctccagagcaaagcgcgcatccagatctggctcttcgagcagaaggacctccggattgagggtcgca

SEQ ID NO: 22585 - DNA, 224 bp, Zea mays
gcgagcacatccgtcctcttagcatagacgacttcaaatccgcccatgagcaggtttgcgcgacgtttcatccgactcggcaaacatgaacgagcttctccaatggaacgacctgtacggtgaaggcgggtcgaggaagaggaaagcgctgagctacttcatgtgacggcgagagacataaaaccagaaggatcacaaccgcgccataaagccagaaggtatcg

SEQ ID NO: 22586 - DNA, 230 bp, Zea mays
ggctcgcagggtcctgcgcaactcagaacttgagagactcacttgttgaggcaaagtcagatattgttgttaagattggtctccggaaaggttctaaatcttttgaagaagcccgagcagcaggattcaccgaagagagtgggacgctgggtgatatatgggagactgtatcaaacagtgatcttgttttgctactgatatctgattctgctcaggctgataactacgag

SEQ ID NO: 22587 - DNA, 224 bp, Zea mays
agtttgctcaaggacgtgaagtatgtgctcgtatggggaaccagcgcaaggcactatccacagcattgcggcctcggccatggccttaacgacgaggatgtcgtccagatagtaaagaagaaggaaatggaggagggtgggcgaggccggttcaagtcgcacacgaacgcacctgaccggatatctgatagggtgaagaaagccccactgaagacataataata

SEQ ID NO: 22588 - DNA, 223 bp, Zea mays
cgttgagatgaccggcggcggcgtggactacagcttcgagtgcatcggcgtgccgtcggtgatgaccgacgccttcagatgcaccaagatggggaagggcaagacgatcgtgctggggctggggagggacagcgacgaggtgtgcctgccgtcgctggagctgctgttcgggaggtgcgtcatggggtcgctcttcggcgggctgaagcccaagacccacatc

SEQ ID NO: 22589 - DNA, 221 bp, Zea mays
ggaatggacttagagttggtgacctgcgacatatggatatctttggtgcaaaactcaacaccctattaagagatgcagctctacgcttcaaagattttgaatatgataacaagattctgaaagaggaagttgagaagtataaaaagtttgctgaacgattggaacctttcatcaccgataccgtgcatttcgtgaatcagtcgattttgcagaagaagaaa

SEQ ID NO: 22590 - DNA, 224 bp, Zea mays
ggtgccacttacgtggtcgatcagaatgaaaattgcgctcggtgctgcgaaaggacttgcttttctgcatgaagctgagaagcccgtcatctatcgggacttcaagacatcaaatatattactagatgaggaatataatgcaaaactatctgactttgggcttgcaaaagatggaccagttggcgataagtcccatgtttcaactcgtattatgggtacctacg

SEQ ID NO: 22591 - DNA, 162 bp, Zea mays
cccacgcgtccgcccacgcgtccgggcagggatcatgtccgacgccaacatcctcatcaacaccgcccgcctccacgcccagcgctacgcgctctcctaccaggagcccatccccgtcgagcagctcgtccagtccctctgcgacaccaagcagggttacac

SEQ ID NO: 22592 - DNA, 222 bp, Zea mays
cccacgcgtccgcttctctctctgctcctccgcctccgcctccgcctgatccatccaagacagggatcgccatgtcggactcggaggagcaccacttcgaatcgaaggccgacgctggggcgtccaagacctacccgcagcaggctggcaccgtccgtaagaacggcttcatcgtcatcaagaaccgtccctgcaaggttgtggaggtttctacctccaaga

SEQ ID NO: 22593 - DNA, 89 bp, Zea mays
gttttggctttttttatcatctacaagtactgtttcctatattttttagcagacaaattatcgtgtgtaatcgacaatgatatctcctt

SEQ ID NO: 22594 - DNA, 246 bp, Zea mays
gacagtcattgcagccaattttctaaatgagtaccagaagcagtgttatgagtttaaagaagattgcaacacagagaaaaagattattgtaaagattaaaacaagtgctgaaaagtcactgtgggtagagaaagaggacaatatccgccgtggccttttcgatttactacagaatattgtccttatcagagatccagaggactccacaaaattctatccccgtttcaacctggaagacacatcaag

SEQ ID NO: 22595 - DNA, 234 bp, Zea mays
catgttgtgaaagtggctgattttggtgtagctcggttccaggatcaaggaggtgtcatgacagctgaaactggaacatacagatggatggcacctgaggttataaaccatcaaccctatgataacaaagcagatgttttcagctttgctattgtcatctgggagctgataacgtctaagatcccgtatgaaagcatgacccctctccaagcggctgtaggtgtgagacaggga

SEQ ID NO: 22596 - DNA, 240 bp, Zea mays
ctttttcgtcgccttcgatcggcggctgcctccttcctccacttccgtcccttcaccgagccgccgccgccactatgaagggacccggcctcttctccgacatcggcaagaaggccaaggatctactcagtaaggactacacttacgaccagaagctgaccatctccaccgccagcgcctctggactgggcctgacttccacagctgtgaagaaaggagggctttattctcttgatgtca

SEQ ID NO: 22597 - DNA, 237 bp, Zea mays
ccggactggagccccgcgaagatcaagtccgcgctgatgaccaccgcgtacgtccacgacaacacgtaccggtcgctgaaggacgcggccaccggcaaggcgtccacgccgttcgatcacggagctgggcacatacacccgctgcgtgccctcaaccctggcctggtctacgacatcggccaggacgactacctggagttcctctgcgtggagaacctgacgccgttgcagctcagg

SEQ ID NO: 22598 - DNA, 240 bp, Zea mays
aagaagtctcatcctacctcaagaaagttgggtacaaccctgataagattgcctttgttcccatttctggttttgagggtgacaacatgattgagaggtccaccaaccttgactggtacaaaggcccaaccctgcttgaggctcttgaccagatcaccgagcccaagaggccttcagacaagcccctgcgtctgcccctccaggatgtgtacaagattggtggtattggaactgtaccgg

SEQ ID NO: 22599 - DNA, 240 bp, Zea mays
cgagtgaccgataatccgccggcgctaagatgttggtttatcaagatctcctatctggcgacgagctcctgtcggattcattcacctacaaggagctcgagaacggcgtcctgtgggaggtcgagggaaagtgggtcacccaaggtcctgttgatgtagacattggtgccaatccatccgccgagggtggtgaggacgaaagcgttgatgacacagccgtgaaggtggttgatattgttg

SEQ ID NO: 22600 - DNA, 236 bp, Zea mays
  unsure (1)..(236): unsure at all n locations
cggacgctggncgagacgcgtgggccgtggacatcgccaccaaggagaacatggagtctcagctatcgatcggcaaggagctgctcaagaagccagtggcgagagtgaacatcgacacagggctgtacgagtcctgcgacggtgagggcacaaatgcacagtcgctagctgacttcgccaagcaactctctgacgagcgcaactacgcaagagcaatctcaactccaactaataaa

SEQ ID NO: 22601 - DNA, 234 bp, Zea mays
aagtggtgcaggtgtaccgccgtcgctgggtcatccacgttgagcggatcacccgcgagaaggtgaacggctccaccgtgaacgtgggcatccacccttccaaggtcatggttacaaagctgaagcttgacaaggaccgcaaggcgctcctcgaccgcaaggcccggggccgcgccgccgacaaggctaagggcaagtttactgccgacgacgtcgccgccgctgctggtggcg

SEQ ID NO: 22602 - DNA, 236 bp, Zea mays
cgacgcgtacgtagcacagtccattattgccgtctcccttttgcgtgagaaagaaagagagcgagaagcagtcgccatgtctggcatcatccacaagatcgaggagaagctccacatggggggcgaccacaagaataaggaggaggagcaccacaagaaggccgaggagcaccacaagaaggaggagggggagcaccacaagaaggacggcggggagcacaaggaaggcatcgtgg

SEQ ID NO: 22603 - DNA, 232 bp, Zea mays
ctttgcgctggaaatgccactccttccgctgaagcaaatatccacagtgatccggaggcagccgacatggttttcacttctggggcggacatctacgtcgttggcctcaacatcacaacgcaagtcagcttcacagataaggatctcctggagctaagaaactcgcaagggaagtacgcacagttcctatgtgatgtatgcaagttctacttggactggcacaccgagtctt

SEQ ID NO: 22604 - DNA, 232 bp, Zea mays
ctccgcctcctaccgcgggttcaaggccgacgcttgcgcgccgtcgcgggcggccggacccgctgcggcgccaccgtcggcaccgagggcaccggcgcccccgcctccgccgccggcgccggggactggtacaaccaggagctggacctcaccctgcagcagctgatgcgctgggtgcagcgcaagtacatgatctacaactactgcaccgaccccaagcgctacaagcagg

SEQ ID NO: 22605 - DNA, 230 bp, Zea mays
agaaattacgcatatacttggaagtggtatgtccaacaaaatgtgggaaacccttgtggagcatgcaaagacttgtaccttaagtggaaaatattacatatactattctgatgagactagaagtattggtgctattttcaacaacatctatgcattctgtgggttgatttctggcgagcagttttattcatctgagagtcttgatgatagccaaaagctgtttgctgatg

SEQ ID NO: 22606 - DNA, 232 bp, Zea mays
tccaaggtggactcggcgcacttttccttctcatgccaccttccctcattatgccatcccacaaggccttcccttccatgtctatgggtactctccatataccccagactatggttatccaacaaacttctacaatatatatggaggagctcagtacccgttttatggaggagcaacagctggcatggtgacaggaacaagtcccttttatccatatttccaatttgggcag

SEQ ID NO: 22607 - DNA, 232 bp, Zea mays
cccacgcgtccgcccacgcgtccgcccacgcgtccgacccgagctggtcccccgcggcgatcaagtcggcgatcatgacgtcgtcgggcacggcggaccacgcgggcgtgccgatcaaggacgagcagtacaggcgggcgagcttctacagcatgggcgccggctacgtgaacccgtcccgcgccgtcgacccggggctggtgtacgacctcggcgccggcgagtacatcgc

SEQ ID NO: 22608 - DNA, 226 bp, Zea mays
ccagaaacttcaagaaagctgccagcttatttttagactcgatttcgactttcacaacttatgagatattcccatatgatacgttcatcttctatacagtcctcacaagtgtcatcacattggatcgtgtatctctgaaacaaaaggtggtagatgcaccagaaatcctggctgtaattggcaaagtacctcacctctccgagtttctcaactccctgtacaactg

SEQ ID NO: 22609 - DNA, 228 bp, Zea mays
gtccccaacgacgcaggaagcaggatcgagccgaatcctccggaactcgccgccggggccaaccgacctcacactattgatcgaggatgtcgtacgcctacctcttcaagtacatcatcatcggcgacacaggcgtggggaagtcatgcctgctgctgcagttcacggataagcgcttccagcccgtgcacgatctcaccatcggcgttgaatttggcgcccgcatga

SEQ ID NO: 22610 - DNA, 227 bp, Zea mays
tccacagcatgttgaggaattattgaagtgctactggcctggaaattcatcgaattcacgggaggagcttccatccatccatgagattaggactcggtgtattcaccatctggaccgaatgaggccagaccatatgaggcggctgaacccgacgccttacaaggtaagcgtgagtgctaagctgtatgacttcatccatttcttgtggctcaacgaagcgcctgtcg

SEQ ID NO: 22611 - DNA, 221 bp, Zea mays
  unsure (1)..(221): unsure at all n locations
gtcccctgatgctctcaagtccaaggttgctgaggcgatggatgttctccgcaatgtggcccaccagcaaaatccaaacctcccgaacagtcaacatgctgcattatcactgaccgaagcattatggcctaacttgtaggtcataatgaactatgttcagtttctgagtcagtgcgtgtgtgtcgagaggttgtctgggagatgacagtattgntccttcg

SEQ ID NO: 22612 - DNA, 221 bp, Zea mays
cccaccccctgctcacccacccgtcccctcctgctcgcccatggctcccatcgctgtcggcgacgccctccccgacggccagctcgggtggttcgacgagaacgaccagctgcagcaggtctccgtccacgcgctcgccgccggcaagaaggtcatcctcttcggcgtccccggcgccttcaccccgacctgcagcaaccagcatgtgccaggcttcatca

SEQ ID NO: 22613 - DNA, 221 bp, Zea mays
gatatggtcttgaagttggtctgaccaactatgcagctgcctactgcactggccttctgttggctcgccgtgtgctcaagatccgtggtttggatcaggagtacgagggcaatgttgaggccactggtgaggacttctctgttgagccagctgatgagaggaggcctttccgtgctctcttggatgttggccttatcaggactacaacagggaaccgtgtc

SEQ ID NO: 22614 - DNA, 223 bp, Zea mays
ggtgtgcctcgctgggctctacggcctcgccaaggaccacgccggcccgctccgccccagcgttgacgccgtcgagtctgccgtcaagggcgtcgttagccccgtctacgaccgcttcggcggcctgccgctcgacgtcctcgccttcgtcgaccgcaaggtggacgacacggtgcacgaagtggacaagcacctcccgggcgcgctgaaggcggcgtcggcg

SEQ ID NO: 22615 - DNA, 222 bp, Zea mays
gaaacacaaactgatgaaaaattctgagatatgcattctgcattaggtccttcaacacacatctttgtgttctgtgctcaggtagttgctgctggagacttgtgtgcgatatgccaagaaaagatgcatgttcccatccttttgcgctgcaaacatatcttctgtgaagattgtgtatccgaatggttcgagagggagcgaacgtgcccgctgtgtagggca

SEQ ID NO: 22616 - DNA, 223 bp, Zea mays
gcgtccatggagcctgtcctcgaccgctacagccgctgcttcccgaccgccggccacgcggccctgaacaggcccttctgtgtcgactacgcctggcgcaaggacgggcctggggagctgctcatgctcgcccacccgctccacctccgcctgctcgccgaggactgccccgtgcgggtgctcgacgacttccggtaccggagcatcgacggcgatatggtcg

SEQ ID NO: 22617 - DNA, 223 bp, Zea mays
cgcgttgttcgaacagccattcatcaagaacgacaaggtcacaataagtgagtggctgaagcaaactatagctacaactggagagaatatgaaggtcaggagatttgcccggtacaacctaggtgaagggctggagaagaaaagccaggattttgctgctgaagttgcagcccagacagcagcgaagcgccaccagctcctcccaaggatgacaagcctgctg

SEQ ID NO: 22618 - DNA, 227 bp, Zea mays
aacaatgcaacccacaaaaggatcaaggatgaaattgagcttggcaatggcctgccagatatcagaagcactcggcaatgtctccaggcagtaaaagacgccgggtttgaggttgtttgggataaggatcttgctgaagattctcccttgccttggtacttgcccttggatccaagccgattctccctgagtagcttccgtttgacttctgtgggacgcatgattac

SEQ ID NO: 22619 - DNA, 222 bp, Zea mays
ccttcaccctggagtgaaattccggaacgacatccaaacccctgggctcgccaacgtagccgcaaccgtgatgaacctccacggatttgaggctcctgctgactacgagcaaaccctcattgaagtggctgacaactaaacactggccacctgtgtccaattttggttatatgtagttctgagaatggacattcaataatttatgtttgcaagcacgttgct

SEQ ID NO: 22620 - DNA, 220 bp, Zea mays
gggtttttgattttagccgccgccgctgctcatctcacatccctcgagaagacgcctgctcctcgccgatcgatacgatggccgtcttctccgacctccacaccgccgacggcctcaagtccctcgaggctcacctcgccggcaaaacctatgtgtctggtgactccattactaaggatgacattaaggtcttcgccgcggtgccgtcgaagcctggcgc

SEQ ID NO: 22621 - DNA, 220 bp, Zea mays
gtatggtgaagatgcccttaaggaaggaatgggcggtggaggatcccatgttgatccatttgacatcttctcatcattttttggaccctcttttggaggaggtggtggaagcagcaggggaagaaggcaaaggaggggagaagatgtagttcacccacttaaagtttctctggaagatctttacaatggcacctcaaagaagctctctctttcgcgcaat

SEQ ID NO: 22622 - DNA, 218 bp, Zea mays
cttatattcaacacatttgtattgtgccaggtgtttaatgaggtcaattctcgtaaaccagaagaactgaacatcttttccggagtttcaagaaatcatcttttcttggcagtagtgagcataactgttgtgatgcaggtgataattattgagttcctcgggaaatttacatcaacagtgagactcaactggaagctttggcttgtttctgtagttat

SEQ ID NO: 22623 - DNA, 218 bp, Zea mays
gctaatatatcatatatatgctcacgctattatcgtgctcctgagctcatatttggtgcaactgaatacacaacatctattgatatatggtcagctggatgtgttcttgctgagcttcttcttagtcaaccattatttcctggggaaagtgctgtggaccagctggttgagattatcaaggttttgggcaccccaacacgagaggaaattcgttgtat

SEQ ID NO: 22624 - DNA, 238 bp, Zea mays
cccacgcgtccgcccacgcgtccgtgaccggtccgtcaaggccgggctgcagttccccgtcggccggatcgggcgctacctcaagaagggccggtacgcgcagcgctgggcactggcgcccccgtctacctcgccgccgtcctggagtacctcgccgccgaggttctggagttggcagggaacgcgggcgaaagacaacaagaagacgcgcatcatcccgcgccacgtgctcctggcg

SEQ ID NO: 22625 - DNA, 239 bp, Zea mays
ctcctttttcgtcgccttcgatcggcggctgcctccttcctccacttccgtcccttcaccgagccgccgccgccactatgaagggacccggcctcttctccgacatcggcaagaaggccaaggatctactcagtaaggactacacttacgaccagaagctgacaatctcaacggcaacggctcctgaattgggcctgacttccacagctgtgaagaaaggagggctttattctcttgat

SEQ ID NO: 22626 - DNA, 125 bp, Zea mays
cactgtcctatctggtatggttacaatggaaggctaaagcttctggagagactggcatacatcaacaccattgtttatccaattacatctatcccactagtagcatactgcgtccttcctgctat

SEQ ID NO: 22627 - DNA, 193 bp, Zea mays
cggacgctggcgagtacctgtccacagggaagtcttccgagaggacagatgtttttggatatggagtcatgcttcttgaacttgtgactggtcaacgggctattgacttctcacggctggaagacgaagatgatgtgctattgctcgatcatgtaaagaagctacagagagaaggggagctggactccatcgt

SEQ ID NO: 22628 - DNA, 156 bp, Zea mays
cccacgcgtccgcccacgcgtccggcgaggacctccgctgcgatggtacagttggtccaggtggaagtccagatgagaatggggaaaccactttagatgctcttgtcatgaatggggcaacaatggaaattggagctgtggcggccatgagatatg

SEQ ID NO: 22629 - DNA, 235 bp, Zea mays
cccacgcgtccgacatgggtgatcccaatgctagcattccaacacctgaacctgttgtgatgcgacctatgtttggtgcatttggaaaggctggaagttccaattcaattgcatttgtgagcaaggctgctaaagaagctggtgtcgcaacggagtacagactagaaaagagggtggaagctgtaggccgtgttcgaggcctgacaaagcttgacatgaagctcaacgacgccct

SEQ ID NO: 22630 - DNA, 174 bp, Zea mays
cccacgcgtccggacccagcagctattgtggtcgtccctcagccgcgtcgcaccgcatcgcattctacgattcgaagctctctctgctcgcagccatggcgaagaattacccaaccgtgagcgccgagtacagcgaggccgtcgagaaggccaggcgcaagctccgcgccctca

SEQ ID NO: 22631 - DNA, 200 bp, Zea mays
atgcgaactgtctattgtacaaatatagataagatggttactcaattagatgtaaagaaattctttgaagaactttgcggtgaggtctctcggttgagacttctaggagacaatgtacattccacaaggattgcttttgttgagtttgttcatgctgagggtgccatcatggctctgaattgcagcgggatgattttggg

SEQ ID NO: 22632 - DNA, 229 bp, Zea mays
cggacgcgtggcggacgcgtgggcgagaactccatttcgatcccatttgaaatcaacccatcctcgttacctccgtctagaggcctctcaccctcatggccaagatcaagatcgggatcaatgggtttggcaggatcggaaggctggtggccagggtggccctgcagagcgacgacgtcgagctcgtcgccgtgaacgaccccttcatcagcaccgattacatgaccta

SEQ ID NO: 22633 - DNA, 126 bp, Zea mays
atatccctcgtcccaagatgaaggtgtgcatgcttggtgatgcccagcatgttgaggaggccgagaagatgggacttgactacatggatgttgaggctctcaagaaaatgaacaagaacaagaagc

SEQ ID NO: 22634 - DNA, 150 bp, Zea mays
cccacgcgtccgcaccaagccatcccatggacccatccacttccgcgccccgtccaagatcctgtggcgcaccatccgcgggatgattccgcacaagaccaagaggggggaggcggctctggcgaggctcaagacgtacgagggcgtacc

SEQ ID NO: 22635 - DNA, 228 bp, Zea mays
  unsure (1)..(228): unsure at all n locations
cggacggtggngcggacgcgtgggcgaggtggaggggaggtacccgccgccgcagccatggcgtcgactagggtccagcgtagtatgacccagcccatcaacctcatcttccggttcctacagagcaaagcgcgcatccagatctggctcttcgagcagaaggacctccggattgagggtcgcattatcggattcgatgagtacatgaacttggtcctcgaagacgct

SEQ ID NO: 22636 - DNA, 263 bp, Zea mays
gaacacagagaatcaggcaacgcaggggcagaatattcgcgcttcccgaggagccggaggttgctcgtgtttggcttccaaagtacaactctcctggactggccatggctagggcatttggagacttctgtctgaaggaccatggtgtaatttctacgcctgacgtctcctatcaccacatcacggagaaagacgaatttgtggtgctggctactgacggggtctgggacgtgctatcaaacgatgaggttgttagcactgtc

SEQ ID NO: 22637 - DNA, 268 bp, Zea mays
ggcaagactatcacccttgaggtcgagtcttctgataccatcgacaatgtcaaggccaagatccaggacaaggagggcatccctccggaccagcagcggctcatttttgccggcaagcagctcgacgacgggcgcacgctggccgactacaacattcagaaggagagcaccctccacttggtgctgcgtctcaggggtggcatgcagatcttcgtgaagacacttactggcaagacgatcacccttgaggtggagtcctcggacacca

SEQ ID NO: 22638 - DNA, 266 bp, Zea mays
gccttttctattttagttctctcaaaaggtttttcccctcccctttctctctcttttctctttttgtgacttcttgttgggtttcaactctagcctacccaacttgtttggtactaaaaggctatgttgatgatagtttataatagtgatttcatatggtatgtggtttgatgtgtgccttgcctggtgcccaatttaagctgacaccattatttgcagcaatcaaggaagaagaaggacaatgacttctggtacgatgtttgtgg

SEQ ID NO: 22639 - DNA, 258 bp, Zea mays
aaaaagaattttaccatgcttcagacatggcctgtgcgttcaccaaggcctgttgcgtcgaagcttgctgcggatacacctcttctgacagggcagcgtgtactggatgcactattcccctcagttctgggaggcacttgtgctattccaggggcatttggttgtggtaaaactgtcattagtcaggcactttccaagtactccaattctgaagctgtggtttatgtgggctgtggtgaacgaggaaatgatatggct

SEQ ID NO: 22640 - DNA, 269 bp, Zea mays
aagattatgtgcatgtgcgcatccagcagcgcaacggcagaaagagtctgactacagtccagggtctgaagaaggagttcagctataacaagatcctcaaggatctgaagaaggaattctgctgcaatggtactgtagttcaggacccagagctaggccaggtcattcagctccaaggtgaccagcgcaagaatgttgctactttcctagttcaggctgggattgcgaagaaagagaacatcaagattcacgggttctaagggacctgt

SEQ ID NO: 22641 - DNA, 268 bp, Zea mays
acctgataagattgcctttgttcccatttctggttttgagggcgacaacatgattgagaggtccaccaaccttgactggtacaaaggcacaaccctgcttgaggctcttgaccagatcaccgagcccaagaggccttcagacaagcccctgcgtctgcccctccaggatgtgtacaagattggtggtattggaactgtaccggttggtcgtgtggagactggtgtcatcaagcctggtatggttgtcacctttggtccaactggcctg

SEQ ID NO: 22642 - DNA, 149 bp, Zea mays
gtttgagggtctacttgagaagactcccactgaagtaaatgcttcctgtcgaaccctggtggatatgcaaccacagcaagaactgctggtgatgcacaggctagagaccaacttgagcgagttattgaatgccttgagacagacaagtg

SEQ ID NO: 22643 - DNA, 255 bp, Zea mays
cacaccccccgagctcagcttagctccactccagctccaatcacagtcgtgaccagagcgcgagagctagctagagggccgtgaaaatgccgatcaataggatcgccctggggagccatcaggaggtgtaccacccgggcgccctcaaggcggcgtgcgctgagttcatctccaccctcatcttcgtcttcgccggccatggctccggcatggccttcagcaagctgaccgtcggcggcccgacgaccctggcgg

SEQ ID NO: 22644 - DNA, 148 bp, Zea mays
cccacgcgtccgtcttcgtcaagaccctcactggaaagactatcaccctcgaggtggagtcttctgacaccatcgacaacgtcaaggccaagatccaggacaaggagggcatccctccggaccagcagcggctcatttttgctggcaa

SEQ ID NO: 22645 - DNA, 260 bp, Zea mays
caagaatcttgttaagctcattggttattgctcagatggtgacaaccggcttctggtgtatgaatttatgcccaagggaagtttggagaaccatctgtttagaagaggtgctgatcctttgtcatgggcaataaggctcaaagttgccattggagctgctaggggcttgtcatttttacatgatgctgaaaaccaagtcatatatcgtgatttcaaggcatcaaacattcttctcgactcagaattcaacgcaaaacttt

SEQ ID NO: 22646 - DNA, 262 bp, Zea mays
cggggtctctccacatgaccatccagaccgccgtcctcatcgagaccctcaccgcgctcggcgccgaggtccgctggtgctcctgcaacatcttctccacgcaggaccacgccgccgccgccatcgcgcgcgactcggccgccgtgttcgcctggaagggggagacccttgaggagtactggtggtgcaccgagcgctgccttgactggggcgaggcgggcggccccgacctcatcgtcgacgacggcggcgacgcacgctg

SEQ ID NO: 22647 - DNA, 251 bp, Zea mays
gggtttttgattttagccgccgccgctgctcatctcacatccctcgagaagacgcctgctcctcgccgatcgatacgatggccgtcttctccgacctccacaccgccgacggcctcaagtccctcgaggctcacctcgccggcaaaacctatgtgtctggtgactccattactaaggatgacattaaggtcttcgccgcggtgccgtcgaagcctggcgctgagtttcctaatgccgcccgctggtacgag

SEQ ID NO: 22648 - DNA, 260 bp, Zea mays
cccacgcgtccgacacaactcaagttctgtttttcatcgtgctgtcgtgcctgatttcagtctcggtgaacttcagcacttttctcgtgatcgggaagacgtctcccgtaacctaccaagtccttggccatctgaaaacatgcttggtcctcacctttggctatgtcctgcttcacgacccgtttagctggagaaacatacttgggatcctaatcgcggtaatcgggatggttctgtactcgtacttctgcactagagag

SEQ ID NO: 22649 - DNA, 236 bp, Zea mays
cccacgcgtccgattaggaggagctcctacatcagaagaatttcaagaagtagatagggagagcgaagaaagaagacgcgctaggatggaacggcatcaaagaactcgtgaacgagcggcaaaggctttggctgagaagaatgaacgcgacatgcagcaacaaagagagcaggctgaaagacataggcttgcggaaacactggactttgagattaagcgctgggctgctgaaaaag

SEQ ID NO: 22650 - DNA, 252 bp, Zea mays
gtgaatacggctaccaccgtcgccgcgatgagatgcatggctgccacatgcatgcttgcttgcttggtcctcgtatcgtacgtcgccgtcgtcgtcttcttctggttgcgctgctaccttgctgctctcgccctcgcgtatgcatgtacttttgcttaattttctttcttcatatcatgcactctggctggcctagactgcccccgatctatgctggccggtacgtcttgtcgagctcttgcatgtcgtgga

SEQ ID NO: 22651 - DNA, 256 bp, Zea mays
ctacatttctgccagagcagcagggaagcttcaaaaaattcacagaattggttggcaggatgaatattactgaattcaaatacagatacgattctaatgcaaaagatgcccttgttctttacagtgttggcatctacactgacaatgagcttggagcaatgatggatcgcatggaatctgcgaaactgaggactgttaaccttactgacaatgatttggcaaaggaccaccttagatactttattggaggaagatc

SEQ ID NO: 22652 - DNA, 259 bp, Zea mays
cccacgcgtccgcccacgcgtccgcccacgcgtccgggcggcaccgcgcgacttttggactctccgatacactagtggtcttgaggatggcagtcttgtgatctgtgagagatcactgacacaatcgactggaggcccatcaggacccaacactccaaattttgtaagagccgaagtgcttcctagtggctatctaattcgaccctgtgagggaggtggctccatgattcacattgtggatcatgttgatttagatgct

SEQ ID NO: 22653 - DNA, 222 bp, Zea mays
cacaactgtgatattccgcatgtgaaccgtactgagtatcagctgattgatatatcagaggatggacttgtgagccttcttacttcagatggcaacactaaggatgatcttagactcccaactgatgagactcttgtggcccagatcaaggaagggtttgaaagtggcaaggatcttgttgtgactgtccagtctgctataagggaggagcagatctgcgcg

SEQ ID NO: 22654 - DNA, 223 bp, Zea mays
caccgttcttcttcagcaccctgtacggcccctaccgtgagggtgctgactttgtgcgtggataccccttcagcctcagggagggtgcccacactgctgtctcccacggcctgtggctgaacatccctgactatgatgcacccacccagctggtcaagcctaaggagaggaacgaaaggtacgttgatgctgtcatgacaatccccaagggaaccttgttccc

SEQ ID NO: 22655 - DNA, 221 bp, Zea mays
attcgcagtcgaccgtgtcctcggagcacgatgaaggttgttgctgcctacctgcttgctgtcctcgctgggaatgccagcccctccgctgaggatttgactggcattctggagtcagttggctgtgaagttgacaatgaaaggatggaactgctgctgtcccaactgagcggtaaggacatcaccgagctcattgccgcgggcagagagaagtttgcttc

SEQ ID NO: 22656 - DNA, 218 bp, Zea mays
gtgcccccgtctgcctcgccgccgtcctgggagtacctcgcagccgaggtgctcgagctcgccggcaacgcggcaagggacaacaagaagacgcgcatcatcccgcgccacgtgctcctcgccatccgcaacgacgaggagatcggcaagctgctggccggcgtcaccatcgcccacggcggcgtcctccccaacatccacactgtgctcctccccaa

SEQ ID NO: 22657 - DNA, 222 bp, Zea mays
cccacgcgtccgcccacgcgtccgcgtacgttgtataccgccaccagataataaatgtgtataatcaagaatacgagagtgcagcagcattttggccaagtgttcatggacgcataatcacagcgttgattgtatcacagctgcttctccttgggttacttagcacaaaaggcgctggccagtcaacacctgtgctccttgttcttcctgtagtgaccttct

SEQ ID NO: 22658 - DNA, 225 bp, Zea mays
cccacgcgtccggtaacagtgcaacgagtcaaacaatattgtgagatggagagccatgaagagaaggcacacaagctgatgatgcaaaccaaaatcaatgaaaccaaggatctcatgaagaagagggctaatgagcttgacaaaatgaggatggaaagaggcaaacttgacaaaggaggatactcatcagtatctggtccacgcgtgattgaaaaaactttcagt

SEQ ID NO: 22659 - DNA, 226 bp, Zea mays
cacaggtatcttgcggaatttaagactggtcctgagaggaaggaatctgctgagagcacgatgatggcctacaaggctgctcaggacattgcgctggctgagctggcacctacccatccgataaggcttgggcttgctcttaacttctcagtgttctattatgagattctgaactccccagacaaagcttgcaaccttgcaaagcaggcgtttgatgaagctatct

SEQ ID NO: 22660 - DNA, 230 bp, Zea mays
gaaaagatgttagacaaggtctaaatatttttaggtttgcaaacagaataccacttctctttgaacaaggtgctgatgtcatcacaagaactgctgcaaaaaggatctcttggagcagctacaaaatcaatcaacagcaagataagattggtgtctttgtgagcattgtaagtacaaagatacctttcaaaggaaccggaaaggagtacattggggatgacataactgaa

SEQ ID NO: 22661 - DNA, 227 bp, Zea mays
gctcctcctccagctcgtgttcgaggtggtggtggctccgtgtttggaggaattgggtccaccattgctcaaggtatggcgtttggcacgggtagtgccatggcacacagggctgttgactctgtattaggtccccggaccatccagcatgagactcttgccacagaagctcctgctgctgcccctgctgctccagcggtgaatgctgatgcttgcagcttccgttc

SEQ ID NO: 22662 - DNA, 217 bp, Zea mays
gtggaagcttgccaaggcgcacgtggtgacccacgacacggggtaccaccagctggtgagccactggctgcgcacgcactgctgcgtggagccctacatcattgccgcgaaccggcagctcagccggctgcacccggtgtaccgcctcctgcacccgcacttccgctacaccatggagatcaacgcgctggccagggaggcgctcatcaacgccgac

SEQ ID NO: 22663 - DNA, 218 bp, Zea mays
ctcaacttcgacgccttccacggcgacaagggccacggcggcgtgcacgacggcaccaccgtggtgctgtgggagtgggccaagggacacaaccagagctggaagatcctgccctggggcgacgaagcctacgccgcgggaggcagcagcgccgccaacgcgccccgcttcggctgcggcggcgagcccaccgtccgcatctactgcaaggccgacga

SEQ ID NO: 22664 - DNA, 216 bp, Zea mays
ccgtcctaccaccacagctcgccgcggtttggctttctcccctcttccgcaccgcttctcgctccggattccggattccctctgctctttccctaacgaaggtagccatggcggggagaggtaaggcgatcggctcaggcgccgccaagaaggccacgtccaggagctccaaggctggcctccagttccccgtgggaaggatcgccaggttcctca

SEQ ID NO: 22665 - DNA, 212 bp, Zea mays
acccacgcgtccgcccacgcgtccgcgagttccttgaggagaaaggtcacggcagggtcctggtggttgatgccggtgggagcatgcgttgtgcagttttgggtggcaaccttgcccagctgatgcagaataatgggtgggctggaatcgttgtcaatggctgcatcagggacgtcgacgagataaatggctgcgacgttggtgtccgggct

SEQ ID NO: 22666 - DNA, 211 bp, Zea mays
gtcaagaagcctcataagatccactctagatcccgtgcaagaagggcacatgacgccaagcaaaagggacgccactcaggatatggtaagcgtaggggtaccagggaggctaggctacccaccaaggttctgtggatgaggaggatgcgtgtgctgaggcgccttctccgcaagtatcgtgaggccaagaagattgacaagcacatgtatc

SEQ ID NO: 22667 - DNA, 218 bp, Zea mays
caatggcgtctccaccgtcatgatctcctgctccagctgtaacgggctcaggatgcacgccaaccacgacctcatcacatgcttcctcaagggcaggctcaacttccaggtgagaataataagaagcagatagatgcgttttttaaacgttaatcagacttggaagctgcctgtgtatttttacagggcttcacgatctcggattgggaggtcatcga

SEQ ID NO: 22668 - DNA, 220 bp, Zea mays
cccacgcgtccgcaagtgttggagttgcaggaacagctttgctggcctggaaggctaatggcttggcagctgggcttgcagcttctaatcttgttctgtatgcatttgtgtatacgccgttgaagcaaatacaccctgttaatacatgggttggggcagtcgttggtgccatcccaccacttctggggtgggcagcagcttcaactgaactgtcactaaa

SEQ ID NO: 22669 - DNA, 220 bp, Zea mays
gtggacggagagccgcgacgtcggccacggcttccgctgcgtccgcatggtcaacaacatctacctcaacttcgacgccttccacggcgacaaggaccacggcggcgtgcgcgacggcaccaacatcgtgctctggaagtggtgcgagggcgacaaccagcgctggaagatcgtcccctggtaaatgtgctgttctgtggctgcactggtcatcaccatg

SEQ ID NO: 22670 - DNA, 270 bp, Zea mays
cccacgcgtccgacgggatcggcaacgtcgtcaccgtcgatcaggatcctaacacccgttacccggtggtagtgcggttcaacaaggtgaactacgccggcgtgtctaccaacaactacgccttggacgagatcctcgaggtgaaatgagtgaggccagtctgctcaaggaccccatgctcctgtgtgatttgtagttgtgaagtgaggctgctgcctagctgctacgttagctgctagcgtcacaacatcaatcttgtaatagcttaat

SEQ ID NO: 22671 - DNA, 271 bp, Zea mays
cccacgcgtccgcacagtccattattgccgtctcccttttgcgtgacaaagaaagagagcgagaagcagtcgccatgtctggcatcatccacaagatcgaggagaagctccacatggggggcgaccacaagaataaggaggaggagcaccaaaagaaggccgaggagcaccacaagaaggaggagggggagcaccacaagaaggacggcggggagcacaaggaaggcatcgtggagaagatcaggacaagatcaccggcgagcacggcgac

SEQ ID NO: 22672 - DNA, 267 bp, Zea mays
gatccgtttagctggagaaacatacttggaatcctaattgctgtagatggaatggtcttgtattcatacttctgcacagtggagacccagcaaaaaaatgttgaagtctccccacaacaggtgaaagaaagcgaggcaggccctttgatcgcagactctatgagcaaagttgaaaacgggggtggtggtgttgatgacgagcctttgaaggtacccatgtggagctcaaagtactcgcgggagtgaaaaggtcacgatggcatggca

SEQ ID NO: 22673 - DNA, 264 bp, Zea mays
  unsure (1)..(264): unsure at all n locations
cgcaaccactccgaggccaagtctagggtttgggaatctgtaggaggggagaggggagcgcgctcagggtcagggacgcgaagatgatcgaggtggtgctgaacgaccgcctggggaagaaggtgcgggtgaagtgcaacanggacgacaccatcggcgacctcaagaagctggtggcggcgcagacggggacgcgccccgagaagatccgcatccagaagtggtacaacatctacaaggaccacatcacgctcaaggactacg

SEQ ID NO: 22674 - DNA, 257 bp, Zea mays
  unsure (1)..(257): unsure at all n locations
ggtaccggtgttccaggcgggcctccgcgtctgcctcggcaaggagctcgccgtcaccgagatgaaggtggtcgctgtggccgtggtgagggcgttcgacgtcgaggtggtcggggacagtggcgccaccgcctgcgcgcccaagttcgtgtcggggctcaccgcgtccatcagcggcgggcttccggtgagggtcaggaggagagttgttcgatagagattcttgggctggcggtggncggtggtgtgtgtgtgtt

SEQ ID NO: 22675 - DNA, 262 bp, Zea mays
cccacgcgtccgggcacgtgcaagtttggagcaacttgcaagtttcatcatccccgagaaaaggctgcaatggcaactcgagttcagttgaatgaactgggctacccactccgcccgaatgaaaaagagtgtgcttattatttaagaacagggcagtgcaagtttggaagcacatgtaagtttcaccattcacaaccatccaccatgatggttgctgtacgtggctctgtttattcacctggacagtctgcaacttctcctg

SEQ ID NO: 22676 - DNA, 267 bp, Zea mays
ctcaagggagcattggatggaggcctggatattcctcacagcgagaagaggtttgctggattcaagaaggacgacaagcagttggatgctgatacccaccgcagtagcatctatggtggccatgttgctgactacatgaagaaccttgctgaagaggagccagaaaagtaccagagccacttcagtgcgtacattaagaagggagttgaggctgatgaaatagaagcgctgtacaagaaggtccatgctgccatccgtgccgatcct

SEQ ID NO: 22677 - DNA, 216 bp, Zea mays
cccacgcgtccgtggatctcatatggacactgtcgttgatgctgggatgtacgatggagccttgggtattatttcagcaatctcagcactgaaggttttgaaagttacagggaaactccagaggttaacgagaccagtggaggtcattgcattcagcgatgaggagggcatcagattccagacaacttttctgggaagcgctgctgtagctggtac

SEQ ID NO: 22678 - DNA, 261 bp, Zea mays
ctcctcctctccttcccgaaaggcgctgagcaagatcgcttgcaatcggctgcagaaggaactcgccgagtggcaactcagcccccctgctggattcaagcacaaggtctccgataacctacaaaggtgggtaattgaggtcactggagcggcgggcaccctttacgccggcgagacctaccagttgcaggttgacttccctgagcattatcctatggaggcacctcaggtcatttttctcaatccagcgccaatgcatcc

SEQ ID NO: 22679 - DNA, 254 bp, Zea mays
agcgtcgtccccggcggtgacctggccaaggtgcagcgtgccgtgtgcatgatctccaactccaccagtgttgtggaggtcttctcccgcattgaccacaagttcgacctcatgtacgccaagcgcgccttcgtgcactggtacgtcggtgagggtatggaggagggcgagttctccgaggctcgtgaggatctggctgcgctcgagaaggactacgaggaggtcggtgctgagtttgacgagggtgaggacgg

SEQ ID NO: 22680 - DNA, 192 bp, Zea mays
agcaacaaggcagcagcacaagcaagagccacacctcctcccttcgcctgtgatcatgtcgtcttgctgcggcggcaagtgcgggtgcggctccagctgctcctgcggcagcggatgcaacggctgcggtatgtaccctgacgtggagaccgccgccaccagcagcgtcaagaccacggtcgtcgccgcgcc

SEQ ID NO: 22681 - DNA, 256 bp, Zea mays
accattctctcatgtaaggtagccgtggatgaagcaggccaatccaaaggctttggttttgttcagtatgacaaagaagaagctgcgcagaacgctataaaaagtcttaacgggatgcttataaatgataagcctgtttttgttggaccttttgttcgcaagcaagaaagagatcattcttttgacaagacaaaatttaacaatgtctttgtgaaaaatttgtctgagtctaccacaaaggaagatttactcaaaa

SEQ ID NO: 22682 - DNA, 258 bp, Zea mays
cactcatcttttctcgtttagaacctctaaaatttcccccactcgccagtcgcagcagcacctgtagcagccatggacgccagcggaccggtagcaaggggaagaagggggcggccgggcgcaaggcaggcggccccaggaagaagtcggtgacgcggtccgtcaaggccgggctgcagttccccgtcggccggatcgggcgctacctcaagaagggccggtacgcgcacgtcgtgggcactggcgcccccgtctacc

SEQ ID NO: 22683 - DNA, 165 bp, Zea mays
cccacgcgtccgcccctccgagcctcagttcgcatccacgcgcgccgccgccgcctcgccggtcgacactcaccgcgcaccatggcggaacagactgagaaggctttcctcaagcagccaaaggttttcctcagctcaaagaaatctggcgagggtaagaagcct

SEQ ID NO: 22684 - DNA, 237 bp, Zea mays
cccacgcgtccgctgaaggagagcagcccggaagagggggagcaagcagcagccgtccgtggaagaagatgtcgtacctgctgccgcatctgcactcggggtgggcggtggaccaggccatcctcgccgaggaggagcgcctcgtcatcatccgcttcggccatgactgggacgagacctgcatgcagatggatgaagtgctggcagcagtagctgagaccataaagaactttgcgg

SEQ ID NO: 22685 - DNA, 239 bp, Zea mays
tgcttgattgttccagatattcgcagttgaccgggtcctcggagcacgatgaagtttgttgctgcctacttgcttgctgtcctcgctgggaacgccagcccctccgctgaggatttgactgccattctggagtcagttggctgtgaagttgacaatgaaaggatggaactcctgctgtcccaactgagcggtaaggacatcaccgagctcattgccgcgggcagggagaagtttgcttc

SEQ ID NO: 22686 - DNA, 237 bp, Zea mays
agatcctagatcttctgctagctgagacgcaaccagcgaagatctgttctcaggttggcctgtgcacttttgatggcactcacggtgttagcactggaattcgtagcgtagtggatgacaaagctgggaaatcaaatggtggtctcaagagtgatccaatgtgcaatgcctgtgagatggctgtggtatggatgcagaaccaactggcccagaacaagacacaggagctcatcctga

SEQ ID NO: 22687 - DNA, 237 bp, Zea mays
cagcctcaaggactacgtgaccaggacgccggagggacagaatgacatatactatatcactggtgagagcaagaaggcagtggagaactcccccttccttgagaagctgaagaagaggggctatgaggttctgtacatggttgatgccattgacgagtatgctgttggtcagctcaaggagtttgagggcaagaagcttgtctctgccaccaaggagggtctgaagcttgatgagac

SEQ ID NO: 22688 - DNA, 232 bp, Zea mays
cgcagaatgcagaagattagtagcttttaccaagtcttttggatcatgtggtggatatattgtcgcatcaaaggagataattcagcaccttaagcatagttgtccggcccatctatatgctacttccatgtcgccaccagcagtcctacaagaaaatatcaaaattgctccaaaatgatctaaatcgccacgatgtgatctgactactctgattgcgtacacaagtctctgc

SEQ ID NO: 22689 - DNA, 232 bp, Zea mays
cccacgcgtccggggttgtcactttacattgatcatcattgcgggaaagatcagctaccatctcgcacgttacaggttttgcatgcacatcatgatgaagtgtggtttgtccaattttcaaacaatgggaagtatttagcctcagcgtcaaatgataaatctgcaattatatgggaggttaatgaagatggagagctattactgaggcatacattgagtggtcatcaaaagt

SEQ ID NO: 22690 - DNA, 236 bp, Zea mays
agcggaattactgcagagggccaaggtgtgaaggttgaatcctcagcagttccttcagccccaactccagatgttgctgaagcacaggccccagttgctgaggaggacgacgacgatgatgttgacctttttggtgaggagaccgaagatgagaagaaggctgctgaagagcgtgctgcagctgccaaggcttctggcaagaagaaagaatctgggaagtcatcagttttacttga

SEQ ID NO: 22691 - DNA, 237 bp, Zea mays
cccacacgtccgcccacgcgtccgctgttttctctttctggtttaaccgacatgctggtgaaggagaaggtggtgaaattgtgtttggtggaatggattctagtcactacaagggtgatcacacctatgtcccagtcactcagaagggatactggcagtttaacatgggtgatgtcctggttgatggaaagtccactgggttttgtgctggtggttgtgcagcaatagcagattctg

SEQ ID NO: 22692 - DNA, 205 bp, Zea mays
ggaccgtgggcagctcccaactgcaaggttctggtggttgccaacccagcaaacaccaatgctcttatcttgaaagaatttgctccatctattccagagaagaacgttacttgcctgacccgtctggaccacaacagggctcttggccagatttctgagagacttaatgtccaagttagtgatgtgaggaatgttatcatcgggg

SEQ ID NO: 22693 - DNA, 225 bp, Zea mays
cagcaagctgctgcagtacgtgtactggtccaacggccgtgagaccgagaaccccagcgtcgacaacaagcagtgccccgggaagaacttcgtggtgctggtcggcaggctcctcctcgtcgagctcttcctccgctacgacacattcaccgccgaggtcggcaaggagctgctcggcaccagcgtcatcttcaccggtgtcacgaaatctacctccggtccggg

SEQ ID NO: 22694 - DNA, 227 bp, Zea mays
gaagaacctaaccgtcaccggagatgcggcggcttcaggcggagaggggcagaagaggggcggcggcggcaaccgcaaccgcatccaggtgtccaacaccaagaaacccctcttcttctacgtcaacctcgccaagaggtatatgcaacagcacggcgatgtagagctatccgctcttgggatggccatagcaacagttgtgaccgtggcagaaattctgaagaaca

SEQ ID NO: 22695 - DNA, 225 bp, Zea mays
gtttgctctgtacttgagacctcatgctcatggcaaggcccttctggaacatagagtttacacctcccaatcctaagaacggaggttggctgatggaagatggggagccttgtgtagatagtcacgctcagatacttgcataccactccctcgccggtaagaggctggactgcccacaatccgtggttcctttgtatcctgcgtgagtgtaaatagactaagctg

SEQ ID NO: 22696 - DNA, 225 bp, Zea mays
cgtgcactactttgtagagactgtgatgttgctatacacacagtgaattcctttgtttcagtacatcagagattcctgctaactggagttcaggtgggtcttgatcctgctgatccagttccacctattgctgaaaagcacgttaatgctgctggtggatcagtaaatcaaccagtgagacatcagccaaagagaagcccgacagttcaattttcagttgaaggg

SEQ ID NO: 22697 - DNA, 217 bp, Zea mays
cccacgcgtccgccaatcctctcttacgccgatttctaccagctcgcgggagttgtggccgtggaggtcaccggtgggcctgagattcccttccaccccggtagggaggacaagcctcaacccccacctgagggccgccttcctgacgccactaagggttctgaccacctgaggcaagtttttggcaagcagatgggcttgagcgatcaggacattg

SEQ ID NO: 22698 - DNA, 218 bp, Zea mays
agagtttcgagaagctgaaatggctcctaaagctgctcctgccaagaagggtgatgccaagacccaggccttgaaggttgccaaggctgtgaagtctgggtcagtagagaagaccaagaagatccgcacgtccgtgacatttcaccgccccaagaccctgaagaaggctagggaccccaagtacccaagaatcagcactaccggaaggaacaagcttg

SEQ ID NO: 22699 - DNA, 215 bp, Zea mays
acaccgggcacaccccccgagctcagcttagctccactccagctccaatcacagtcgtgaccagagcgcgagagctagctagagggccgtgaaaatgccgatcaataggatcgccctggggagccaccaggaggtgtaccacccgggcgccctcaaggcggcgttcgctgagttcatctccaccctcatcttcgtcttcgccggccagggctccg

SEQ ID NO: 22700 - DNA, 216 bp, Zea mays
tctcgctgggttgcttgtccagaaccttccgtgctacagagacccggatcatcgggccactggtgaagcttcttgatgagagggaagcagatgtctctcgggaggcagcgattgcactgaccaagtttgcgtgcacggataattacctgcacgttgaccacactaaagcgatcatcagtgcaggcggacgaacacctggttcagctcgtgtatttc

SEQ ID NO: 22701 - DNA, 211 bp, Zea mays
ggaaactgaactggagaagagaaaagcagaggggagatactctgcacatctcagaggacaagctcatttctttgggtacgaaggaagatgcggccttcctactaattttgattctaactattgctatgcattaggctatggtgctggtgcccttctccaaagtgggaagacaggacttatttcgtcggttggcaaccttgcggctccagta

SEQ ID NO: 22702 - DNA, 210 bp, Zea mays
cgctccaaggggaggttcctcctgcgatcgccggaatgcggaggcttacatccgtggacttctcctacagcagcctctcgggcgaggtcccgtccaccggtcagtttggctacttcaacgccacttccttcgcaggcaacgctggcctctgcggggcgttcctggccccgtgccgctccgtcggcgtggcgacttcggccctggggtccc

SEQ ID NO: 22703 - DNA, 211 bp, Zea mays
ggtgatggtgtcagccacaccgtgccaatctacgaaggttatgcccttcctcatgccatcctgcgtcttgaccttgctgggcgtgacctgactgacagcctgatgaagatcctcaccgagagaggttactccttcaccaccacggccgaacgggaaatcgtacgggacatcaaggaaaagcttgcatacgtggctcttgactatgatcagg

SEQ ID NO: 22704 - DNA, 210 bp, Zea mays
cccacgcgtccggcacgatcccgagcgccaccttgccgtgttctggatctcatgcgaggcaggtacctatgtccggactctgtgtgtgcaccttgggctgctccttggtgttggtgcgcatatgcaggaactggccgtgtcaggtcggggatcctaggggagcaggacaacatggtcaccatgcacgatgtgatggacgcgatgtggtct

SEQ ID NO: 22705 - DNA, 211 bp, Zea mays
cccacgcgtccgcccacagcgtccgcccacgcgtccgcaagcacatcatgattgatctcgggactggaaacaacaacaagatcaactgggccctgaaggacaagcaagagttcatcgacattgtggagaccgtatacaggggcgcccggaaaggccgtggtctggtgattgctccaaaggactactccaccaagtaccgttactaagaagg

SEQ ID NO: 22706 - DNA, 204 bp, Zea mays
gaccacgcgtccaacacgcgtccgcgacctggctaatcccaaggtaaacgttatggacacactgagcagattgagtcatgatgcagacgccgatgtgtcgatggctgcaattatctcattgggtttgattggtgctggcactaacaatgccagaatagctggcatgcttcgcaatctttcaagttattactacaaagaagctgc

SEQ ID NO: 22707 - DNA, 207 bp, Zea mays
cccacgcgtccgtccagagttagagcaagttgagcagcatttaagccagaatcccaacttgatgagggagataatgaatatgccagcgatgcaaaatctcatgaataaccctgatttaatacgcaatatgattatgagcaacccacaaatgcgcgagatcatggatcggaatcctgatcttgcccatgtgctcaatgacccaagtgt

SEQ ID NO: 22708 - DNA, 208 bp, Zea mays
ccttgatggtataatgcattttgctgatgaagaacggtcatactcagctgacgtatttgaagaaatgcagaagatcaggcgctttggctcatggcctgtaacaatccatattggaacaaagtatagggcagttctggaaggccctatttgcaaagctaaccgagtcatgagatggcacacagtccagacggttcaaaagaagagttca

SEQ ID NO: 22709 - DNA, 211 bp, Zea mays
cccacgcgtccgcacacttttgggcatcaagtgcatccacctctgataaaccaagccaacaatggggctttaagaattctgccatatcagaatgctacagtgatggatcattcaaggatttatgaagcaggacatgttattgatgaacatagagatatgcgtttagatgtggataacatgacttatgaggagcttgtagcattgcaagagc

SEQ ID NO: 22710 - DNA, 214 bp, Zea mays
gaaggaggcagctgcaagttgcttgatcagtcctaatcaaatctcaaagggtttttctagactagctgagggtgttgacgacttgagtcttgatattccttctgctaaagttctttttgacaagctggtttcaacagctatatctgaaggatggcttgatgcttcttttggtaaatcagctgcccctgatgaagagatacaaagtacaagcgtt

SEQ ID NO: 22711 - DNA, 238 bp, Zea mays
atctcattccactccgacattcacgtgcagctgtcgggagcaggcaatggcgccggatctaagcgaactcgccgccgccgctccagcccgtggcgcctacctcgccggcgtcggtgtcgcggtcctcctcgctgcctccttcctcccagtagccgagtcgtcctgcgtgcgagataactcattggtgagagacataagccaaatgccgcaaagcagctatgggattgaaggattgtca

SEQ ID NO: 22712 - DNA, 241 bp, Zea mays
aaccgccgggaccgtgggttggcacgtgctggtcatttagaagaagcatgggattttattgaggaaatgcatggcaaggtagatgccgtcatgttaggcgctttgcttgctgcttgccggaaatgcaagaacactgaggttggtgagagggtcatcaataggattatgaagctggagccatcaaactcgtggaactacgtggtgtcatccaagatttatgcgacctcagataaaatggatg

SEQ ID NO: 22713 - DNA, 274 bp, Zea mays
atacctgcaggacggtccgaattccgggtcaacaaggaccgggacgtggtcccctcaatatctctcgtgagactcttcagcagaacaagatcctgaaggtgagcaggaagaaccttgtgaagaagtgtgttgagctcttctttgagattgctgagaacaaggaggactacaacaagttttacgaggctttctccaagaacctcaagcttggcatccatgaggactcgcagaacaggaccaagatcgccgagcttctgagataccactccaccaa

SEQ ID NO: 22714 - DNA, 236 bp, Zea mays
actagttctagatcgcgggcggccgctcgcgatctagaactagtgtcagcacaggacttctgattcttggtgtgctatgccactctctgccactgatgctgagatatgctgtgagctccggggagcacgcagaatcctcttgggattcaggactggagctgtcccgagcatgcagcattgtcatgctccttgcctatgtagcctaccttttcttccaactgaaaacccaccgccaa

SEQ ID NO: 22715 - DNA, 238 bp, Zea mays
cccacgcgtccgcgaagtataagtgtggttttttttcaaggaagaaaacacgccgtgagaggtgtgtgatttgccaaatggagtacaggagaggaaatttgcagatgacacttccatgcgagcatgtataccatgccagctgcgtgacaagatggcttggcataaacaaggtatgccctgtttgcttttctgaagttcctggcgaggatcctgaggcaatgagtcaacagttatgagg

SEQ ID NO: 22716 - DNA, 234 bp, Zea mays
atcaagaagagccagccgtcggcgcacgacgccttcgtgggcaactggaagccgaccgagaacgacacgcgcagcaaacgcccgcccggggtcggcgccaccaagaacatactctacggcgagtcgatctgcggcaagggatacgtcgacgccatgaacgtgataatctcgcactaccagtagtaccttgacctcaatggcgtcggccgtgagcactctggcgacaaccgtgat

SEQ ID NO: 22717 - DNA, 274 bp, Zea mays
agacctgcagtacggtccggagttccgggtcaacccgcgtccgggacctggcggacgcgtgggctcgggagtttctgagggttatggttttatagagttttataatcacgtttcagcagagaaggcactgcagaatttttctggtcacgtaatgcctaatactgaccgggcttttaagttaaactgggcatcatatagtatgggagaaaaacgctcggaaatttcgtctgatcactcgatatttgttggcgatttggctgttgatgttactgat

SEQ ID NO: 22718 - DNA, 237 bp, Zea mays
ctcaggtttttgattttagccgccgccgctgctcatctcacatccctcgagaagacgcctgctcctcgccgatcgatacgatggccgtcttctccgacctccacaccgccgacggcctcaagtccctcgaggctcacctcgccggcaaaacctatgtgtctggtgactccattactaaggatgacattaaggtcttcgccgcggtgccgtcgaagcctggcgctgagtttcctaatg

SEQ ID NO: 22719 - DNA, 223 bp, Zea mays
gcttgctacgagcaattctgttcttgagacactgaatttctttcagacagatctcagggcatccccagagtatcttacccttcttgtgcgcaactgtcaaaggctgaaaaccctgaagattagtgagtgtttcatgcctgatctggttagtttgttccgaactgcacaaacactacaagaattcgctggtggttcctttgaagatcagggtcaactgtggcag

SEQ ID NO: 22720 - DNA, 234 bp, Zea mays
cccacgcgtccgcgcctcgggtcaaaccctaagcagggagttgatttatccgctgcagccatgagtaagttgcagtctgagtctgtcaaggatgccatctcccagattgttggggatgccaaggagaagaataggaagttcactgagactgtggaacttcagattggtctgaagaattatgatccacagaaggacaagcgtttcagtggctctgttaagttgccccatatccct

SEQ ID NO: 22721 - DNA, 233 bp, Zea mays
cgcccgcgtccgcatccgctatgggtgcgtacaagtgcgtctcggagctatggcggaggaagcagtccgatgtgatgcggttcgtgcagcgcgtgcgctgctgggagtacaggcagcagccggccatcgtccgcctcacaaggcccactcgtcctgacaaggcgcgccgcctcggctacaaggccaagcagggttatgttgtttaccgtgtccgtgttaggcgtggtggcagg

SEQ ID NO: 22722 - DNA, 229 bp, Zea mays
ccagacaggtccgcgacctggctgatgattcgatattacttgcacaacaatgattacctggaaatctgtcgatgttacaagtctatgtatgatatcccagcaataaaggaagatccaaccaagtggataccgattcttaggaagatctgttggtacttggtgctagcacctcatgatcctatgcgatcgagccttctcaatgctacactagaggataaaaacctttcag

SEQ ID NO: 22723 - DNA, 232 bp, Zea mays
cccacgcgtccggttgaagatattgtccgtcagcactgggccacatatggtcgccattactacacacgctatgactatgagaatgttgatgcaggggctgctaaggagcttatggcaaacctagtaagcatgcagtcatcactttctgatgttaacaagttggtcaaggagatccggtctgatgtttctgaagtagttgcagctgacgagtttgagtacaaggatcctgttg

SEQ ID NO: 22724 - DNA, 230 bp, Zea mays
cgacggcgccgccgggacgcggcggtgctgcgcgccgggacgcccgtgctcaggctcggcctgcacgagttcgtggaggtggagttccagaacacggaggaggagctgcagtcgtggcacctcgacggatacgacttctgggttgtagggttggtggggttggggttactttcttcttggcttctcctctccttgtcaaacgccattgcccgtggacttctttctccagg

SEQ ID NO: 22725 - DNA, 225 bp, Zea mays
ggacaaattgaccagcatagcttggtaacactggcgttaatcctgacgatgaacgaatcaaaccaatgttttcttggtggccttatcataagaaatctaagcatatgtacttccaactggcgatgcaaagaaacacttgaagagtatctgactaagaggaacatcatgggaatatatgacgtggatacacgtgctataacacgaagattaagagaagacggcagt

SEQ ID NO: 22726 - DNA, 227 bp, Zea mays
cagtccaaggatggggccgctaacttcgcggtttacagcaagatcgccaagggcatggtgctctgcctcttcggtggtggcggcggggacggacccgcgcttgagattgagctcgacccgtacgtccaccggaccggcgatgtctggcacgtctcgatggagagcgtggaggggtacgcccgctacggcttccgcagcgggctgttcgcaatgtttggcattgaccg

SEQ ID NO: 22727 - DNA, 226 bp, Zea mays
ggccgtgcccaaggcagagacgtcagaggacgtcaggggtggggtgcagaagttcagggtcaagctgctgccggagggcgctgggagccccatggatgtgctctgtcaggttggtctggatggaattcggatgcttgatcccaacactggtaggacactaagaatatatccccttgaaactgtaactagatgcgatgtattagattcctctatttttgccttttgg

SEQ ID NO: 22728 - DNA, 228 bp, Zea mays
cccacgcgtccgcactcacacagcaaataccccacaaggccactccaaagacctagtagtggaaccgaagatgttcgggaacatcggaaagatccccatcatcggcgacctgacgggcagcaacaagaatgcgcacctcaagggcaacgtggtgctcgtgcgcaagaccgtgctcggcttggacgtcaccagcatcgccggctccctcctcgacggcatcggcgagtt

SEQ ID NO: 22729 - DNA, 262 bp, Zea mays
gttctggtgataatcttgcttctttataccgtccacctttttctttgatgttcaacggaccctttgacaaggcaaagttagaggcttcttccctggacaaatggctattaatcaatttgcagtcgacagcggaatttagctctcacatgcttaatcgagacacttggggaaatgatgcggtggctcagttgattcggtcaaattttattttctggcaggtttattatgacaccagtgacgggatgaaggtatgcacgtacta

SEQ ID NO: 22730 - DNA, 264 bp, Zea mays
aaaggttggagtgcttcagagttctgaagtatgatgttgaagctgagcgtttgtccaaacaaggtcaaggtcctgaaaagggtcacagtagaaccagagagttggattcacaggatctgttagagcagctgccagcattgcagcagttactataccgactcgttggatgtcggcctgaaggagctgcaaataataactacctggtgcaatacgctttagctttggtgctagaagaaagctttaaagattattgtgcgataaatg

SEQ ID NO: 22731 - DNA, 260 bp, Zea mays
ccgcctcccccagacacttcgccgccggcaagatgggccgcgtgattcgcgctcagcgcaagggtgcggggtccgtgttcaagtcccatacccatcaccgcaagggccctgcccggttccggtccctcgacttcggcgagcgcaacgggtacctgaagggcgtggtcaccgacgtcatccacgacccgggccgcggcgcgccgctggccagggtaactttccgccatccattccggtacaagcaccagagagagctgttc

SEQ ID NO: 22732 - DNA, 258 bp, Zea mays
atcatcgttttataatgacacaattgtgaactgcccaacatgctcatgtggctgccagaacccaagtgggtcaaactgtgtgaatgaggattcacctaatctacaagctgcaattgatggccctggcaaatggactggtcagccccttgtacaatgcacttcccacatgtgcccgataagaatccactggcatgtgaagctcaactacaaggattactggagagtgaaaatcactatcacaaacttcaacttccgcat

SEQ ID NO: 22733 - DNA, 257 bp, Zea mays
agggccagcatgggcggttatatatcctcacaaaccgtgaggaaaattattgagataaatccttacatgctggggacaatggctggaggtgctgctgattgccaattttggcataggaacctaggaaccaagtaccgtctccatgagctttcaaacaagcgaaggatctctattgctggtgcttccaaactgttggctaacatcctttattcatatcgtgggatgggactgtcgattggtacaatgatcgctggatg

SEQ ID NO: 22734 - DNA, 262 bp, Zea mays
caacattgtggtcattggccatgtcgactctggcaagtcgaccaccactggccacctgatctacaagcttggaggtattgacaagcgagtgattgagaggttcgagaaagaggctgccgagatgaacaagcggtcattcaagtatgcgtgggtgcttgacaagctcaaggctgagcgtgagagaggtattacaattgatattgccctgtggaagttcgagaccaccaagtactactgcactgttattgatgccccgggacac

SEQ ID NO: 22735 - DNA, 246 bp, Zea mays
cccacgcgtccgcccacgcgtccgcgtgattccgcatcccgttcgcgagcgcgacacacgctgacagctcacggctgaccttcccgagtcccgacggcctccagctccatcttgattcttgaggcgaacccggtgcgtaagagtctgccatggccagcgagaataaggtctttgggttcgaggaagtcgccaagcacaacgtcaccaaggactgctggatcatcatcgccggcaaggtgtatgacg

SEQ ID NO: 22736 - DNA, 223 bp, Zea mays
cccacgcgtccggccgtccgccttgcccttcacgaaggcttggtcctcctccttgtatctccactccccccttcacagatccgttcctccagctagggttagcgttcctctgcagcgatggcgatcaagcggaccaaggcggagaagaagatcgcgtacgacaagaagctgtgcagcctgctcgatgagtacaccaatgtgctcatcgccctcgccgacaacg

SEQ ID NO: 22737 - DNA, 254 bp, Zea mays
agaatctgcagtactatgaaatttctgccaagagcaactacaactttgagaaacctttcctgtaccttgcaaggaagctggctggtgatccgaaccttcactttgttgaagctgttgctcttaagcctccgggagttaccatcgacatggctatgcagcagcagcatgaagctgagcttgctgcagcagctgcacaacctcttcctgatgacgatgatgatctgattgagtagaaaggatcatgagtcttgaac

SEQ ID NO: 22738 - DNA, 249 bp, Zea mays
cccacgcgtccgccctagtgcagatagaataaaccgcatgagaggtgaaatcaatcaggtccgtagtgttatgattgataacattgataaggttcttgaaagaggtgatcgtttggaactgctggttgacaagactgcaaatatgcaaggaaatacagttcgattcaagagacaagctcggcggttcagaaacactgtttggtggagaaatgtcaaactcacggccgcattgatacttctcctcctggt

SEQ ID NO: 22739 - DNA, 248 bp, Zea mays
cggagtggtgaaggtcactggttacttcacaagctctctggccaactcgaaagctggcaagaagttcttcaacatgttgcctggagagatcgttcttgcttcgcttgacggatttgggaagatctgcgacgccgtggaggtggccggaaagaacgttttgtccacgtcgtcaactgtgacgaccggtctagtatctcacaggtacggagacaaagccgccgccgcaacgaacgaagggctggacgccg

SEQ ID NO: 22740 - DNA, 245 bp, Zea mays
gtccgcttgcttgggcattaattgtgtggcgttgcagcttggttttcagttcatttgacaaacttgttagtgtcctgatacatctcttacctgggattgttctattcactatccggtggtggaatccacaaacatttgctgccatgcacccagaaggaagagatgctagagtcacatggccatatgtggaggacaaatcatatctgtggacatggcttttttttgttccgctagctgcttacacc

SEQ ID NO: 22741 - DNA, 245 bp, Zea mays
tgatgaagctgagactgtatctaaaagaaggaagctggaactagatgctttagaagctactcttactgctactacctccaccaccagtaccatcgacatggggcctgcagcctcaagagctgtccgggagcctagggttgttgttcagaccacaagtgaggtagacattcttgacgacggttatcggtggcgcaagtatgggcagaaggttgttaagggcaatccaaatccaaggtctcactttc

SEQ ID NO: 22742 - DNA, 241 bp, Zea mays
gtcagcaagcagagtactgtaattgctggaagagaagttcttcaacaggattacaagaaattggaacaaaaatattctgatgggagcttgattccaaaacctgaatattggggtggctacaaattgacaccgacactttttgagttctggcaaggacaacagtctcgactgcatgaccggttacaatactcgcagagagaagtagatgggagcacagtgtggcacatcgagaggttgtccc

SEQ ID NO: 22743 - DNA, 239 bp, Zea mays
cccacgcgtccgcggacgcgtgggcctgaggaagaccccgaaccctttctacctcgagtcggacaagaaggctggcaacgggtacagttttgtgacgacaccgtcgccggcacccggcgtggacgagtcgccgttcatgacgtggggtgagatcgacggaacgccgctgaggctggaccccgacgagacgccgggcggcagcgaaagagcgcatttcaagatgccaccacctcctgctc

SEQ ID NO: 22744 - DNA, 239 bp, Zea mays
ctactgcactggccttctgttggctcgccgtgtgctcaagatccgtggtttggatcaggagtacgagggcaatgttgaggccactggtgaggacttctctgttgagccagctgatgagaggaggcctttccgtgctctcttggatgttggccttatcaggactacaacagggaaccgtgtctttggtgccctcaagggagcattggatggaggcctggatattcctcacagcgagaaga

SEQ ID NO: 22745 - DNA, 237 bp, Zea mays
cggacgcgtggcggacgcgtgggcagcagcagctgcttgagcgacgagctggtgctgggcgaggagaacaacttcctaggcatctgcacgcaggagctgctcgcgcgcggcaccgagctgctcaagcgcacccgcaaagggtcgttgcattggaaggtcgtctctgtgtacatcaaccgcgcgggtctggtgatgctgaagatgaagagtcggcacgtcggtggcaccatcacgaag

SEQ ID NO: 22746 - DNA, 238 bp, Zea mays
ggccgaggaggaccgatccaaggtcgacgacctccgacgcacgcccatgagcgtcggatccctcgaggagatcatcgacgagagccacgccatcgtctcctcctccgtcggacccgagtactatgtcggcatcctctccttcgttgacaaggaccagctcgagccggggtgctccatcctcatgcacaacaaggttctctctgtggttggtatattgcaagatgaagttgatcctatg

SEQ ID NO: 22747 - DNA, 238 bp, Zea mays
cggacgcgtgggcgcgcgagagacagacgcgtatacccaggcggcggttgaggaggaggagaagaagaagaagaagatggcttcctccgcgtacgcctcatggtccaagcggtggatccgtcccgaggtgtacccgctgttcgtgccgatggccgtggccctgggtatctgctcgtaccagcttgtgcgcaacatcacgggcaaccccgaggtgcgggtgaccaaggagaagagggcg

SEQ ID NO: 22748 - DNA, 231 bp, Zea mays
cccacgcgtccgcccacgcgtccgcccacgcgtccgcggacgcgtggtgtgtttgcagcacagtcaattcaattgggtatcaatgatattgttgtggctggtggcatggaaagcatgtccaatgccccaaagtacattgctgaagctaggaaggggtctcgttttggtcatgacacacttgttgatgccatgcttaaggatgggctttgggatgtatacaatgattgtgcc

SEQ ID NO: 22749 - DNA, 233 bp, Zea mays
attgaacagaaggaggagtcccgtaagaacgaagagcatgtgaaccttatcaaggaataccgtgcgaagatcgaggctgaactgagcaatatctgtgatggcatcctgaagctgcttgactcccacctagtgccttcttctactgctgctgaatcaaaggtcttctacctcaagatgaagggtgactatcacaggtatcttgcggaatttaagactggtcctgagaggaagga

SEQ ID NO: 22750 - DNA, 235 bp, Zea mays
gctggaggatggccgcactctcgcggactacaacatccagaaggagagcacccttcaccttgttctccgcctcaggggtggtatgcagatctttgtgaagaccctgactggaaaaaccataaccctggaggttgagagctcggacaccatcgacaatgtgaaggcgaagatccaggacaaggagggcatccccccggaccagcagcgtctgatcttcgccggcaaacagctggag

SEQ ID NO: 22751 - DNA, 75 bp, Zea mays
cacacgcgtccggatcgccttaggaaagctggaatggaatttggcacaacaacacgtcgctcaaggcgttgcggc

SEQ ID NO: 22752 - DNA, 261 bp, Zea mays
tcgaattgcacggatcttgaccaagaccttcacgtctgacttccctcatgtcgagacgtattcctggaccatggttaaccactctaacttcaagacggtcattcgtgacgtcaagcaggcagagtctgcacctcctattccgaaaaacgctgctccttctaaggcgccaaaggcaaaggatgtcaagacggaggctccaaaggaggcccccaagccaaaggtggttgacgcaccagtagaagaggaagaccaaagccaaag

SEQ ID NO: 22753 - DNA, 259 bp, Zea mays
tgctgagggggctgttgagatgattgtgcctggcgtcatgcccacgggctgcttcccagtttacttgaacatgcttgatgagcccaaagaaggatacggcccccacagtggttgtgtccgccggtacaacacattctcctgggtgcacaatgcacatcttaaggccatgcttgagaagctccgggctaagcaccccaatgtgagaatcatatatggcgattactacactccagtcgtccagttcatgcttcagcctgag

SEQ ID NO: 22754 - DNA, 248 bp, Zea mays
gattcttggcccaggaactaagacggacagacttgtttcagctgacgacgctgtgtgctgcatctctcttacgactatggagatgatgatgagcttcgtcaggctccttgcacacacttctttcatgttcaatgtgtagataaatggcttaacataaatgccgtgtgccgactctgtcaaacagagattggcggtgtggttcgacgtttctttggcttgccatttcgccgtcgcgtgtcgatacgata

SEQ ID NO: 22755 - DNA, 258 bp, Zea mays
acaagataataatatcatcgccattggaatggaggactctaccatccaaatctacaatgtccgcattgatgatgtcaaaagtaagctcaagggacatcagaagaagattacggggctggccttttctcaatcaatgaacgtgctagtatcatcaggtgctgatgctcagctatgtgtgtggagtattgatggctgggaaaaaaagaaatcaagatatatccaacccccagcaaaccgacctggcactttggttggtga

SEQ ID NO: 22756 - DNA, 258 bp, Zea mays
tgccaagacccaggccttgaaggttgccaaggctgtgaagtctggggcagccaagaagaagaccaagaagatccgcacgtctgtcacatttcaccgccccacgaccctgaagaaggctagggaccccaagtacccacgaatcagcactaccggaaggaacaagcttgatcagtaccaaattctcaagtacccccttaccacagaatcagcgatgaagaagattgaagataacaacactctggtcttcattgttgacct

SEQ ID NO: 22757 - DNA, 256 bp, Zea mays
cgtgcactactttgtagagactgtgatgttgctatacacacagtgaattcctttgtttcagtacatcagagattcctgctaactggagttcaggtgggtcttgatcctgctgatccagttccacctattgctgaaaagcacgttaatgctgctggtggatcagtaaatcaaccagtgagacatcagccaaagagaagcccgacagttcaattttcagttgaagggagtgcttctgttcctactaaaaatgtaacaa

SEQ ID NO: 22758 - DNA, 253 bp, Zea mays
cagatatctccctccagaacttcaggtggttttgatctctgcaactcttcctcatgagatcttggagatgactagtaagttcatgaccgaaccggttaggatccttgtgaagcgtgatgagctgaccctggagggcatcaaacaattctttgttgctgttgagaaagaggagtggaagtttgatacactttgtgatctttatgatacactcaccatcacccaagctgttattttctgcaatactaagagaaag

SEQ ID NO: 22759 - DNA, 254 bp, Zea mays
cggacgctgggacagaagcgaggagcactacttgttggttggattctcttcagtctagcagctagtccagtgcaagtttcagacacacatggggagcattggcagaggcacggccaactgcgccaccgtgccgcagccgccgccgtcgacagggaagctcatcacgatcctgagcatcgatggcggcggcatccgcggccttatcccggcgaccatcattgcgtacctcgaggccaagctccaggagctggacg

SEQ ID NO: 22760 - DNA, 236 bp, Zea mays
tatgcgccaggcctgttttgattacttgagcctcggaggcgtcttctcgaatgggcctattgctttactctcgggtcttaatcctcggccactgagtttagttgcacacttctttgctgtcgctatctacggtgtcggtcgcttgatgctccctcttccttcgcctaaacggatgtggattggagccagactgatttctggtgcatgcggcatcatcctccctatcatcgaagctg

SEQ ID NO: 22761 - DNA, 234 bp, Zea mays
aagattggcccctcgcacccgttcgcgcgacctagagtatcttttcagcaaatatggaagaatacgtgaagtggagttgaagcgtgactatgcattcattgaattcagtgacccccgtgatgctgatgatgcgcagtacaacctagatggcagggaagtcgatggaagccgtattattgttgagtttgctaaaggagttcctcgtggttctggtggttcacgtgagtacatggg

SEQ ID NO: 22762 - DNA, 236 bp, Zea mays
gtccacatgccatggttatccatccgcgacactcaggttcagatgacatggttaagatcacagttgcagggggaaattctaacgatggtgctcgcgcaagcagacgtatagccaagcgagcaatggtccacgcgacgtccatgttgttgaaagtggaaatatggtcatttcaatccgagttctccgcaatgtgaccaacaacttcagtgaggaggacatccttggtcgaggagggt

SEQ ID NO: 22763 - DNA, 225 bp, Zea mays
cccacgcgtccgcccacgcgtccgcgcacgcgtgcgctcgcgcgtgcgggagcagcagcagcaggcggcgccgaggatcgggatcccgctcagtccttgcaaccatggctgggggattgaagaagcacttgaagatgctcaatgcgcccaagcattggatgctcgacaatcttggcggagcttttgctgccgagccgtcttctgggcctcacaagtccagggagt

SEQ ID NO: 22764 - DNA, 264 bp, Zea mays
ctgacccgcaggagcgtcggaatccgggtcaccacgcgtcccggacctggtgcgcgggacgcgcatcgggcccgagctatggctcgacttccccctcctccccgaacacgcggactcggatgaggttgacatgactgatgcgcacaagatcacgccctggccgtggaaagctgtgcgcccgagctggctgatctgaggatcgagctctgccccagccacatgagcgaggactgcttctggaagatatacttcgtactgctgcat

SEQ ID NO: 22765 - DNA, 228 bp, Zea mays
acggcgacgagggtgacgagtactagacgctctactggcgcggcgtcgtcgggcttgtgtgccactgctatcctgtggtctgccctgagtggctcctatcgtgttatgtgtctgtcggttcttatctatctgtcgttgtgtggtttacgacttacgttgtgagactttattcccccgctttgctactgggttattaagtttggcgttattgttttcttgatctctgag

SEQ ID NO: 22766 - DNA, 231 bp, Zea mays
cgatgggaaggtttttgtacctggacagtcgaacaacgcctacattttccctggatttggcctcggtcttgttatctctggagccatccgtgtccacgaggacatgcttcttgccgcctcggaagcactagctgctcaggccacacaggagaacttcgacaagggatcaatcttcccgcccttcaccaacattagagagatctctgcgcgcattgccgcagccgtggctgc

SEQ ID NO: 22767 - DNA, 224 bp, Zea mays
gtgctgatgagcaaggaattggccagcttcaagtccgtgatgaagtccttcatggggctcatagtgacggcgctggccatgggggatacactggcaatggcacctgatatcatcaaagggaaccagatggcgtcctcggtgttcgagatcctggaccgtaagaccgacgtccggatcgacacaggtgaggacatcgagagggtcgaggggctgatcgagctgcg

SEQ ID NO: 22768 - DNA, 227 bp, Zea mays
gagctgaccagcctcaaggactacgtgaccaggatgaaggagggacagaatgacatatactatatcactggtgagagcaagaaggcagtggagaactcccccttccttgagaagctgaggaagaggggctatgaggttctgtacatggttgatgccattgacgagtatgctgttggtcagctcaaggagtttgagggcaagaagcttgtctctgccaccaaggaggg

SEQ ID NO: 22769 - DNA, 243 bp, Zea mays
cccagccgccgccgcatcggcctcccaggtaagcagtagcgtccaccccagccgccgccatgaagcgcaacccccgcgtcacgagctcccgccggaagtgccgcaagcgcacttcacggccccgtcctccgtccgccgcgtgctcatgtccgcggcgctatcgacggagctccgccacaagtacaatgtgcgttccatcccgatccgcaatgacgacgaggtgcaggtcgtgcgctgcaccta

SEQ ID NO: 22770 - DNA, 260 bp, Zea mays
cccacgcgtccgcccgtggggtctgcctgacggcgacacgcggcagcccaaggctcaccgctgcaacgaccgcgccgaggacgtcgtccaggcttgctttgaagggaacccattcaagacagttccaggcccatttaagctcttctggcaatgcatgcgctcaaaacctggggaggaaccaaccgagccctatacctacctgcagctagatcctccgagaagggtggaagtgaatctggagcaaacaggaagtgaacctt

SEQ ID NO: 22771 - DNA, 260 bp, Zea mays
caagaaacacacagaagcgaggagcactacttgttggttggattctcttcagtctagcagctagtccagttaagtttcagacacacatggggagcattggcagaggcacggccaactgcgccaccgtgccgcagccgccgccgtcgacagggaagctcatcacgatcctgagcatcgatggcggcggcatccgcggccttatcccggcgaccatcattgcgtacctcgaggccaagctccaggagctggacggcccggac

SEQ ID NO: 22772 - DNA, 251 bp, Zea mays
cccacgcgtccgctatcatgccccttctttcggaggctgtgagagcataattgatcagcctgctatcatgtcctactgggattcaaaggagcagagggacatctatgggatcaaggacaacctgatcaggttcagcattggagtggaggattttgaggaccttaagaatgatcttgttcaggccctcgagaagatataagctccaatccatttgcattaataaagttatgaggtgatggttgtctggatct

SEQ ID NO: 22773 - DNA, 252 bp, Zea mays
gaagatccgggccgtgctggtggaccacgccctcgccagcggcgagccgagaaggacgcgagcgcgtccgtgttctccaagatcaacaggttcgaggaggagctgcgcgaggcgctgcccagcgagatggaggccgcccgcgtggccttcgagaccggcgccgcgccgatcgccaacaggatcaaggagagccggtcgtacccgctgtaccgcttcatccgccaggacctcggcggcgtgtacctgaccggc

SEQ ID NO: 22774 - DNA, 252 bp, Zea mays
gtggaaagcgccttgttccagttggtcttggggacgatgaccaatgcattgaggatgacttcaatgcatggaaagaagctctctggccagagttggatcgattacttcgggatgaaaatgatgcctctccaggccctacatacacagctgcaattcctgaataccgggttgaattcatcaaacctgaggatgcagctcatttggagagaaacttcagccttgcaaatggccatgcagtccatgatgcccagc

SEQ ID NO: 22775 - DNA, 255 bp, Zea mays
cggacgcgtggcggacgcgtgggctgatgaaatgctttctcgtggtttcaaggatcagatttatgacatcttccagcttctgccatccaagattcaggttggagtcttctctgctaccatgccacctgaagcccttgagattacccgcaagttcatgaacaaaccagtgagaattcttgtgaagagagacgagctgacccttgagggtatcaagcagttctatgtgaatgtggacaaggaagactggaagctgga

SEQ ID NO: 22776 - DNA, 255 bp, Zea mays
cacagttgttggtgaagcagcccctgttctgcccaggggtttggagtgggctggttttgtgttgaactcaaggatgctgtggaaggaggctgacggcaagcctgactgggtgaaggatcttgatgctgtgggcgagaatggcgaggagattgagaacccacttactctgttgaatgatccgtcctctgttgagccactgggcaactgtgggaagaaggtcctactgtggttgcttcgtgttgaagcacgggctga

SEQ ID NO: 22777 - DNA, 247 bp, Zea mays
acggacttcctcaggaccaaaggaggcgccacgaataaccctgggctccagaccgaggtcgaccccgccaccaaaggctacttcttgcaacaaacgatgttacgtgtgaaggacccaaaagtgagccttgacttctactcacgtgtgatgggcatgtcgttgctgaaaaggttggattttgaagagatgaaattcagtttgtattttctaggttacgaggatgtgaccttagcccctgatgatcata

SEQ ID NO: 22778 - DNA, 247 bp, Zea mays
aagttagtgatgtgaagaatgttatcatctggggtaaccactcgtcctctcagtaccctgatgttaaccatgccacagtgaagacttccactggggagaagcctgttcgtgagcttgtctctgatgacgagtggcttaatggtgaattcatcacaactgtccaacagcgtggtgctgcaatcattaaagcgagaaagttctccagtgctctctcggctgctagctctgcttgtgaccacattcgtga

SEQ ID NO: 22779 - DNA, 248 bp, Zea mays
ggggaccttctttggcaactacaagccacgcactgatctgccaaatgtggtggagctgtacatgaaaaaggagctggaggtggagaagttcatcacgcacagcgtcccgttcgccgagatcaacaaggcgttcgacctgatggccaagggggagggcatccgctgcatcatccgcatggagaactagatttcgctgtctagtttgtgatctggcctgggcttggggttaataaaagaggcaatgctag

SEQ ID NO: 22780 - DNA, 248 bp, Zea mays
ggcttttgctgcaaacaaaaggcgacgcggctgggatctagcacgctagcgagcgagagagacgcacatctatctgtcaagcgacgccgcggcctcgatcagagtcggaggcgaacacccccatggcggcggctggcggcggcgcaggagggaaggtatccttcaagatcatcctcacctccgaccccaagctccctttcaaagtgttcagcgtgcccgatgcggcgccctttaccgcggtgctcaag

SEQ ID NO: 22781 - DNA, 248 bp, Zea mays
caaggtggagaaggtggtggtctccgaccgcgtggtggactccccctgctgcctggtgaccggcgagtacggttggaccgccaacatggagcggatcatgagagcccaggcgctgagggactccagcatgtctgggtacatgtcctccaagaagacgatggagatcaaccccgagaacgccatcatggaggagctccgcaagcgtgccgaggctgacaagaacgacaagtccgttaaggaccttgtca

SEQ ID NO: 22782 - DNA, 242 bp, Zea mays
cccacgcgtccgggacgacgaggtgcaggtcgtgcgcggcacctacaagggccgtgagggcaaagtggtgcaggtgtaccgccgtcgctgggtcatccacgtcgagcggatcacccgcgagaaggtgaacggctccaccgtgaacgtgggcatccacccttccaaggtgatggttacaaagctgaagcttgacaaggaccgcaaggctctcctcgaccgcaatgcccggggccgcgccgccg

SEQ ID NO: 22783 - DNA, 239 bp, Zea mays
gaagcacgaggtcattgttgctgataactttttcactggttcggaagacaacctgaagaagtggattggccacccaagatttgagctcatccgtcatgatgtcaccgagccgcttcttgtggaagttgaccaaatctatcaccttgcttgccctgcttcaccaatcttctacaagcacaaccctgttaagaccatcaagacaaatgttattggtaccctgaacatgctaggacttgcaa

SEQ ID NO: 22784 - DNA, 237 bp, Zea mays
cttcagctggccttagagttatcaaaagggttgatcagacactacaagagctagcggtgaatttgaagcctaaggtcccaacgatagcagtttgcatagagcatattgaactgcggaatgagctactcacattgcttaacctacaaaagcagctgcaagatagagaggctgaagtttcagctaaccgggaaagttccttcacagaggcaccaagcacacctaatcgttctaataggg

SEQ ID NO: 22785 - DNA, 226 bp, Zea mays
aaaaagcgtgctgcagaaagaggttatagcgaagaacattgtcttagctggatacaaggagatgcagaagctctgagtgttgaggatggatctatggatggttacactatcgcatttgggatcagaaatgtgacgcacattgagaaagctctgtcagaagcttacagggttctaaagcaaggggggaggttcctatgcttggagttgaggcatgtggatgtcccta

SEQ ID NO: 22786 - DNA, 190 bp, Zea mays
ccacgcgtccgccagagctcatatttggtgccactgagtataccacagcgattgacatttggtctgctgggtgtgttcttgctgagcttatgctagggcaggtatggtgtcttcgatatttattggcatgtttattttttcaagtcaacaaaaaaagtcgtttgagttcacattttcttacaagaactat

SEQ ID NO: 22787 - DNA, 227 bp, Zea mays
gtgcgaagagaccacgactcagatggccagccgctgggtccggcccgatgtgtacccgctgttcgcggcaacgggcgtggccgtcggcatctgcggatttcagctcttccggaacatcaccggcaacccggaagtcatggtaaacgaggcagggagggcagctggtgtgcttgagaaccatgaggaggggaggcgttacgccatgcatggcctaaggagcttagtgc

SEQ ID NO: 22788 - DNA, 236 bp, Zea mays
aatctcactgctgtgttggagccagagaaagcggatgagttcaaaaagggtgtcgagggtgcaaccaagtttctccttagcaagctgaaggaccttcaattttttgttggtgagagcatgaaggatgatgcgtccgtggtattcgcctattacaaggatggtgccactaatccgacattcctctatttctctcatggtcttaaggagatcaagtgctaggcttgcggcgagattag

SEQ ID NO: 22789 - DNA, 228 bp, Zea mays
gggaaaatggctccgcttctcgctgctgccatgaaccacgctgcagcccatcctagccttaggagccacctagtaggacccaacaatgagagtttctcacggcaccacctgccgtcttcttctccacagagcagcaagcgaaggtgtaaccttagctttactacacgatctgcaagagtaggcagccaagttggagtccaaatgttgagcccctcggaaatcccacaa

SEQ ID NO: 22790 - DNA, 225 bp, Zea mays
aacgtattcactttcatgatttcatgttgaatgcacatagtcatcttcaggtgtttcagatcccttgatgttgtagcagctgagaattcagatgaggccatcatattatgtcttgatgagtttatggtaactgatgttgctgatgctatgattctgaaccgtctattcagacaattgttcagcaaaggcgttgtatgtggctactattttcttccattttcttat

SEQ ID NO: 22791 - DNA, 224 bp, Zea mays
gcaacatcgtcgactccgagaagctgagggagatcggcttcatcgtctactccatcggcaagccgctcgacgcctcgctcaaggacatgcccgcggtcgcctaatcccaccccctcacccatggattggattccgggaaggaagaggagagaagctggttgaccgttctttattacagtttgtctttgcaggctacgctaccgattgtctcttgtgtcaggcat

SEQ ID NO: 22792 - DNA, 230 bp, Zea mays
aaccacgcgtccgcggacgcgtgggtcaattcaatttttatttgtgcaggaatcggggatgttgataccaaggagacacctctacccatggaggatgccttaaatgactacaaaaggctagattacatccagcgccacatcgctactcttaaggaatcaatagacttgggatcaaatgtgcaatgctacttcgcttggtctctgctggacaactgtgaatggttcgccgg

SEQ ID NO: 22793 - DNA, 222 bp, Zea mays
cccacgcgtccgcccacgcgtccgctcctcctcgcctcctctccctagtctccacgacgcaagggagagtgacggaaagcgacgcggcgcgagcgaggagggccaaggcgaagaggggaagcaccgcaccaggacccttgttcgccgccgccgcctctgatctccgcgaggttgtcaggattcaatatgtcgaccagcacattcgctacttcctgcacgctg

SEQ ID NO: 22794 - DNA, 219 bp, Zea mays
cccacgcgtccgtgactatggcaagaagtccaagctcggtttcaccgtgtacccatccccccaggtgtccacatccgtggttgagccatacaacagtgtcctgtccacccactctctcctcgagcacactgatgttgctgtcctgctcgacaatgaggccatctatgacatctgccgccgctcccttgacattgagcgcccaacctacaccaacctcaa

SEQ ID NO: 22795 - DNA, 268 bp, Zea mays
tggaaaccctagccgccatatctcacgatccactcgagcaccaagccgagggaaggtgaggagcgatggcgcgcggcgtggtgtcggcgaagggcggcgcggtcgcgggcaagaagaaggggtcggtttccttcacgatcgactgcaccaagccagtggaggacaagatcatggaggtcgcctcgctcgagaagttcctgcaggagcgcatcaaggtcgccggcggcaaggctggcaacctcggcgactccgtcaccatctctcgcga

SEQ ID NO: 22796 - DNA, 255 bp, Zea mays
cggacgctggtcgggacgcgtgggagcgaggcgacgccgaggcacctcatctccggcgaagggaaaacgcgaccgttcaaggggatctgatctggcagattgtgaggaagaacaactccttcctggtgaagcagtttggcaacggcaatgccaaggtgcagttcaccaaggagcccaacaacctctacaatgtacactcctacaagtactctggcttagcaaacaagaaaactgtaacgatccagccagctgctg

SEQ ID NO: 22797 - DNA, 253 bp, Zea mays
cccacgcgtccgctgggtggcatgaattcgttgctccaaattgaaacatccccagcaattcctcttgtatccaaggtcccaactataatcttgggaatggatgtgtcacacggttctcctggacattctgatgtaccatctattgctgctgttgttagttctcgtgaatggcctcttatctcgaaatacagagcttctgtccgcacccaatcacctaaaatggaaatgattgactcattgtttaagccacggg

SEQ ID NO: 22798 - DNA, 255 bp, Zea mays
cttctctctaatgatagcatagggagagaaggcatactccgaggcatccttctcctttccctctccttccccaaacccttttcccctttccctcgccccaagaacttcagctcatctccaggcgccccttttgcgcttgcgcaggaggagctcacggggacagtgggcggagagctcgatcgctgcagcagtagttcactggaggtccgcccactcccatggaggagatcacccaacactttggagttggcgcaa

SEQ ID NO: 22799 - DNA, 257 bp, Zea mays
cggacgcgtggttttgacaactttgaccgtgttcgtgtccccaaaatccgatatgctgggatgcttcacgtatgatggtgagttgaagcttccaagccgttaccttgtttccccaccagagatagatagaacatctggggagtacttggtgaagaatggcatccgcacctttgcttgcagtgagacagttaaatttggccatgtcacatttttctggaacggtaaccgttacggatactttgaggcaactaaggggg

SEQ ID NO: 22800 - DNA, 243 bp, Zea mays
atccagcgtgcagcacacgcacgcttgacctagcatctgctctcgaggttggatctggtgggactactcgcgcttcaagcgacgcctccagcacctgcaacacaagatcggtgctgaccatcgctttccagttctcatacgagaatcagctacgagaaagcgtcgcagcgatggccaggcaatatgtcaggactgtggtggcatcggtgcagagggtggccatggcaatagctccttcccgtc

SEQ ID NO: 22801 - DNA, 249 bp, Zea mays
ggaagttgagcagctagcaaggaatttcctttttgacccatacaaggtcactattggttctgaagacttgaaggctaatcatgccattgttcagcatgtagagatattatctgagagtcagaagtataacaagctggttaatctactggaggatataatggatggtagccgaattttaatatttatggacaccaagaagggatgcgatcagactactagacagcttcgaatggatggttggcctgcttt

SEQ ID NO: 22802 - DNA, 248 bp, Zea mays
atctgcctaactgaatatgaggatggagaccagatacgaattcttccttgcaagcacgagttccacctgcaatgtgttgacaaatggctgaaagaaatacacagggtgtgccctctgtgccgcggagacgtctgcgaagtcgcctcgtgaagaccttggcgctgccatcccttcctcacggcaccggcagatagcgcatcccccgcctgctccgttgttgaagctggtttggtcaggcaacggcgatc

SEQ ID NO: 22803 - DNA, 251 bp, Zea mays
aaaattctaatgtcccagccgggcttttctttcagcacgctggtcatagggataagattgtagacttccactggaattcgtcagatccttggacaattgtcagtgtctctgatgatggcgagagcactggtggaggtggaacactgcagatttggcgcatgagtgatttgatctaccgcccagaggatgaagttcttgcagagctggagaatttcaaggctcacttggccagctgtgcaccgaagaattga

SEQ ID NO: 22804 - DNA, 109 bp, Zea mays
cggacgcgtggtcgggacgcgtgtggcggacgcgtggggcagcccgagaagaggtgccaggtaggcgtggtgatcctggatataactatactgatcacgcaacaatata

SEQ ID NO: 22805 - DNA, 249 bp, Zea mays
ggccaatccgaaatctcgagctttcgcgccggcgaccacagcaaagaggaggcgacagcacgacagcgccccagggtgcctactctcgtcgcagcggcagcagtgaggggaagatgtcgtcggtgttcagcggcgatgagaccgcccgccttcttcggcttccttggcgccgccgccgctctcgttttctcatgcatgggggcggcgtacgggacggccaagagtggcgtcggcgtggcgtccatgggt

SEQ ID NO: 22806 - DNA, 241 bp, Zea mays
catgtttttgcatcggcaaaatgtcaggccttaggggagcttttaccttctctggcaaatgatggtcacagagtactcatatttagtcagtggatcacaatgcttgacatccttgaatgggcattggaaattataggagttacatatagacgccttgatggagggaccgctgtgacagaaaggcagactatagtggacacgttcaacaacgatctttctatatttgcatgtttactttcta

SEQ ID NO: 22807 - DNA, 246 bp, Zea mays
cccacgcgtccggctgattgcattctaaactcgggttttgcaggtgcgcgtaaacggaccagatgcggcgccggtttacaagtttctgaaagctagcaagcctggtttgtttgggtcatcaaggatcaaatggaacttgaccaagtttctggtggacaaagatgggaaggtcatcgagagatacggaacctcgacagctccaatggcaattgaggtctccttccctctctgtctctgtctctctct

SEQ ID NO: 22808 - DNA, 245 bp, Zea mays
cagacgcgtgggggcaagccatagggaggcccctgataggtcttgttgttactgattctatagaagtggtacggcatattttggactcagctttacaaggaatttaagagcagaatatggaaatcgagcttaaaacattccatgaacatgaatgcaatggtccagtagtcttgaaggttaactcatgctgtagtcgggagctttcagagaaagtcattggagtttgctttgtagcacaagatttg

SEQ ID NO: 22809 - DNA, 242 bp, Zea mays
ggaatggcaactgatgttgctttagcatggtcagttgcacttggttcccccttcgcgtttgctactactttggaacaggagtacaagagtgatatctttggagagcgaggcatcttgctgggtgctgtccatggtatcgtggaggctctgtttaggaggtacacagaacaaggaatggatgaagagtcggcctacaaaaacactgtcgagggcataactgggatcatctcgagaaccatctc

SEQ ID NO: 22810 - DNA, 237 bp, Zea mays
tggggaagccacagcactggtgccatccctttctcgttgttcgttgtgctgcttctgctctggctctgcatctccgtgccgctcacgcttgttggcgggttccttggtgccaaggctccacatattgagtaccctgtccgcacgaaccagatccctcgtgaaatccctcctcagaagtacccatcctggttgttggttcttggtgctgtcacactgcccttcggcaccctattcatc

SEQ ID NO: 22811 - DNA, 247 bp, Zea mays
gcctcggcgccatctgcggcgtctgcctcgtcgaggcgttccggagcgcctacttcgacatgcgcgtcggcggcgccagctcgctcgcctccggctactcccgcggcaccggcctcggcgccgagatcatcggcaccttcgtgctcttctacaccgtcttctccgccaccgaccccaagcgcaacgcccgcggctcccgcgtcccggttctggctcgcctccccgtcggcttcgccgtgttcatggt

SEQ ID NO: 22812 - DNA, 243 bp, Zea mays
ccactatctacagcatcgagaagagtctaggggagtacagggacaagatcccggcagaggttgcatccgagatcgaggcagccatcgctgacctccgtcaggagatggcctcggatgacatcgagaagatcaaggccaagcttgaggctgccaacaaggctgtctcgaagattggtcagcacatgtcaggtggtggctctggcggctcacagtcgggatctggacctcagggtggcggtgacc

SEQ ID NO: 22813 - DNA, 241 bp, Zea mays
caactctcgtttgccctagctgaaatggaccatcaggttggccttcttgacgtagatatatgtggccctagcatccctaaaatgctaggccttgaaggacgagatattcatcaaagcaaccttggctggtcacctgtgtatgttgagtccaaccttggtgtgatgtcgattggtttcatgctgcctaatccagacgatgctgtcatatggaggggtccccgcaagaatggactgatcaagc

SEQ ID NO: 22814 - DNA, 242 bp, Zea mays
cccacgcgtccgggctcccccgtctccgtcctcctccgcctctgtcagggtcccggtcggacttcctcacgaccgccgcgccgagtcccgtctcgttcctccgttccgctgcgcgtcctcaggaatggaacttggcgccaccactgccctgtaccctctgcaccgctgcaaaaccatttacctggtcacgcatgcccagggcattcacaacgtcgcaggcgagaaggacttcggcgcctaca

SEQ ID NO: 22815 - DNA, 242 bp, Zea mays
gcaacgacgagctaacctaccgctacaagggcaagaccgtcatgacccaggaatagcgatacgaatccctgcggcactgcaagtaggttgatgaggtcattcctgatgcaccgtgggttctcacacaggagtttattgataagcatcagattgactatgttgctcatgatgcgctgccttatgctgatactagcggaacagcaaatggtgtctatgaatttgttaaaaagattggaaaattc

SEQ ID NO: 22816 - DNA, 257 bp, Zea mays
gtgtaccgccttcgtttacatggttcactaccaggtattatgcaccagctttggggttcttgatgtttgctgatggtgtaaactcaagtgccaaggattttattgaagcaataaagaggccagatgctattgctgcgggctatatcggacagtttgtcatcaagcctttgtttggattcctttttggcactcttgcggttgcagttcttaacctcccagctgctctaggcgctggcataatgttggtttcatgcgtg

SEQ ID NO: 22817 - DNA, 217 bp, Zea mays
tgcaagtacatctgggaaatccattgcaagcttacaggtggaagcatctgatttggcaaacttccttaccatggatcggaatggggggtaccgaggttcacaaactctcctaagatctgtattatcagagaaacaagagctgtgcttctctgttgtctcattgctctggcagaagctcatagcttctcgcgaaatgcagatgtctgcagaaagcaca

SEQ ID NO: 22818 - DNA, 186 bp, Zea mays
cacgctgaagcccctggccatcgagctgagcctgccccaccctgacggccagcagcgcggcgcggtcagcaaggtgtacaccccggctcacaccggcgtcgagggccacgtctggcagctcgccaaggcttatgcctgcgtaaacgactctgcctggcatcagctgatcagctactggctgaacac

SEQ ID NO: 22819 - DNA, 237 bp, Zea mays
ccatttcaagccccacaagctctagaagcttaaagccatccatgtctggcatgtgcacatcgctgatacaagatcaaacaagttcttgttttgactcaacatggtcaagatcacaacagtctgattcatcgttgtgactgcaaatacgaaacaatgtgtcttacaggagagcagcggagttgatgcgtacccaaggtagcggaggaggatcagccatcagggtgagcctcgtgagta

SEQ ID NO: 22820 - DNA, 180 bp, Zea mays
cgcctcgggtcaaaccctaagcagggagttgatttatccgctgcagccatgagtaagttgcagtctgagtctgtcaaggatgccatctcccagattgttggggatgccaaggagaagaataggaagttcactgagactgtggaacttcagattggtctgaagaattatgatccacagaag

SEQ ID NO: 22821 - DNA, 215 bp, Zea mays
ccgatgcttggcgttgaagaagggcgcggcgtaaaacggccctttttcacctcgcccgacgagctcctcgaggagagagtactacgacgagcagctgccggagaagaagcgccgcctcacgccagagcaggtatagctagctagtcgactcctcttgccacctagctaggcaacacgtagatgcatggcgtggcctgacctgagcgagcctgacg

SEQ ID NO: 22822 - DNA, 205 bp, Zea mays
cgcgcagacaacagccatcttggaggtatctaattccaatattgtatgtctcggttgaacttgtgaaggcgttgcaagcacatatcattaactgggatattcatatgtttgatgaggagatcggcaataccactcaggtgcacacatcaaacttgaatgagccaatgaggaccttggccgggttcatacaattttgtctgataaa

SEQ ID NO: 22823 - DNA, 185 bp, Zea mays
atcaaaaccttgtcaatttggttggttattgtgctgatggagatcaacgccttctcgtgtatgagtacatgccacttggatcattggaggaccatttgcatgatctccctcctgacaaggagcctttggattggaacactaggatgaaaattgctgcgggtgcagctagagggctggagtacctg

SEQ ID NO: 22824 - DNA, 183 bp, Zea mays
gcggcgagttcaaatcccacaatcttcttgtagcacaccactgtcttcgtccaactcggcggcgatgtctgggcgcggcaagggcggcaaggggctgggcaatggcggcgcgaaacgccaccgtaaggttctccgcgacaacatccagggtatcacgaagcctgcaatccgggagcttgcgag

SEQ ID NO: 22825 - DNA, 177 bp, Zea mays
gttcttgggagctgttgcaacttcctgacactgttctatattgtctttgtggcactgtacactatacctgttctgtatgagaaatatgaggacaaggttgatgcttttggtgagaaggctatgatcgaactgaagaagtattatgccatcttcgatgagaatggcctatcgaggatt

SEQ ID NO: 22826 - DNA, 258 bp, Zea mays
gtcgtagcagaggcaggaagagacacgacggcggccatggcgacctccttccaggggacgaccaccaagtgcaccgcctgcgacaagactgtgtaccttgtggacaagctcaccgccgacaaccgcatctaccacaaggcctgcttccgctgccaccactgcaagggcaccctcaagctcgccaactacaactccttcgagggagtgctctactgcaggcctcacttcgaccagctgttcaagaggacagggagcttg

SEQ ID NO: 22827 - DNA, 162 bp, Zea mays
cccacgcgtccgcccacgcgtccgcccacgcgtccgagcaaacaatgcacattataattcggtggctattatcgatgctgatggcgctgatcttggactctatcgcaaatcacacattccagatggaccaggatatcaagagaagttttatttcaaccccgg

SEQ ID NO: 22828 - DNA, 256 bp, Zea mays
gcagctgcagggtgagaccaatataaagccattgtggggtaccgcacagctctttatgcatccacgttacatgcatggcgctgctacgagcccagaggttaaagtatatgcttatgcggctgcacaagttaagaaagctttggaggtcactcactacctaggtggtgaaaactatgtgttctggggtggaagagagggttaccaaactcttctgaatactgatatgaagagagaacttgaccatctggctaacttt

SEQ ID NO: 22829 - DNA, 254 bp, Zea mays
acacctctcccgttacggtgcccaacctggtgtccatcctgcagaagcagctccgcgtcaaggccaagaagaacgtagtcgagatgcccggcaacggcgacgtgcccttcacgcacgccaacatctccctagccagggagcagctcgggtacaaacccaccaccaacctggacgtcggcctcaagaagtttgtcaagtggtacctgtcctattacggctacaccaggggaggatccaagaactcgcgacattga

SEQ ID NO: 22830 - DNA, 255 bp, Zea mays
cccacgcgtccggaggtcctctgtaaatcatatccatcagagtttactgcatactttcattactgtagatcactacgattcgaagataaaccagattactcctatttgaagagactcttccgtgacttatttatccgcgaggggtaccaactagattatgtatttgactggaccattatgaaatatcctcagtttagagataaaagcaaaattcagtctagcggcaagattagtgggttggcaggcccttctgca

SEQ ID NO: 22831 - DNA, 242 bp, Zea mays
cccacgcgtccgcccacgcgtccgggcacattgtgcatgggggcaaagcagctggaggagttcagagagaaccagttgtcgacctcggcatgttccaacaggactcaggtcccagcctgcaacatgaagctcaagtatgctccatatgttgaactgcctggtggtatggcgttgcaaggcgctactttggtggctatcaaaccctcacctgagggaagcaatggaagccaccctaaccgcaa

SEQ ID NO: 22832 - DNA, 254 bp, Zea mays
cccacgcgtccgagcaggtgcacccggacattggtatctcgtccaaggccatgtccatcatgaactccttcatcaacgacatcttcgagaagctggctgctgaggccgccaagctcgcccgctacaacaagaagcccaccataacctcccgggagatccagacttcggtgcgcctcgtccttcctggcgagctcgccaagcacgccgtctccgagggcaccaaggccgttaccaagtttacttcctcttagatc

SEQ ID NO: 22833 - DNA, 256 bp, Zea mays
tggcaaggtcaggactgacaagacctaccctgctgggttcatggatgtcatttccatccctagtacaatggagaactacaggctgctttatgacaccaagggccgcttccgtcttcagccaatcagggatgaggatgccaagttcaagctctgctaagtgaggtccgttcagtttggccagaagggcatcccctacctgaacacctacgacggccgtaccatccgctaccccgacccgctcatcaaggccaacgac

SEQ ID NO: 22834 - DNA, 256 bp, Zea mays
cccacgcgtccgatctggaaaaccattgtatgttgcatttgcacagcgcaaagaagatagaaaagcgatgttgcaggcacagttttctcagatgcgccctgctgtaccaatgacacccactctagccccacgccttccaatgtactctccgatggctcctcagcaactcttctatggacaagcgccaccagctatgatgccccctcagccaggatttgctttccagcaacagcttgttccaggcatgaggcctggg

SEQ ID NO: 22835 - DNA, 250 bp, Zea mays
gttcggagcgcacacacacacaaccagatctcccccaaatccacccgtcggcacctccgcttcaagatgcagatctttgtgaaaaccctgactggcaagactatcaccctcgaggtggagtcgtctgacaccattgacaacgttaaggccaagatccaggacaaggagggcatccccccagaccagcagcggctcatctttgctggcaaacagcttgaggacgggcgcacgcttgctgactacaacatcc

SEQ ID NO: 22836 - DNA, 246 bp, Zea mays
gcagtgccgcacccgccgatctcggcttatctccactccatctcgagtcacagtcgtgaccatagcgcgtgagcgatctatatgtccgtggaaattgcgagtcggtaggatcgccctgggtagccaccaggatgtttagcacccgggcgccctcaaggcggctttctctgagttcatctccaccctcatcttcgtcttcgccggccgagtctccggcatgggcttcagcaagctgaccggcgtctg

SEQ ID NO: 22837 - DNA, 247 bp, Zea mays
gccggaagcccatcgtcggcgccatcgccgggttcgccgtcactgccgggttcgagatcgccctctcctgcgacatcctcgtcgctggacgctccagcaagttcgtggacacccacgccaagtttgggatatttccttcctggggtctttcacagaagctttctcgcatcattgggccgaatagagcaagggaagtgtcactaacttgcatgcctgttactgctgaaatggcagagaggtgggggct

SEQ ID NO: 22838 - DNA, 248 bp, Zea mays
agcagctcctccgggggcggcgaactactcctcgtcgccaaaaccctagccctgcttctttgccatggcgagcagcgctagccaggcgagcctcctgctccagaagcagctcgaggatcttgcgaagaaccccgtggatgggttctccgccgggcttgtagacgacagcaacatcttcgagtggcaggtcaccatcatcggaccgcctgacaccctatatgatggaggctacttcaatgcaataatga

SEQ ID NO: 22839 - DNA, 247 bp, Zea mays
cccacgcgtccggccacaaaacgttttggttgatcctctcagccaccaggtcaagctctgtgactttggtagtgcaaaagttctgattcctggtgaaccgaacatatcttacatatgctctcgttactatcgtgcccctgagctcatatttggtgcgacggagtatacaagttcaatagacatatggtcagctggttgtgttctagctgagttgcttcttggacagccactatttccaggagagagc

SEQ ID NO: 22840 - DNA, 250 bp, Zea mays
ggacgcacaccagcacctgccctcctcgccgcctccctccgcgcgaccgatctaccctccgccgccaccatgtcgctgatcgccggggaggacttccagcatatcctgcgtttgctgaacaccaacgtggatgggaagcagaagatcatgttcgccatgacctcaatcaagggtgtcgggcgccgcttctccaacatcgtctgcaagaaggccgacatcgacatgaacaagagggccggcgagctgacgc

SEQ ID NO: 22841 - DNA, 231 bp, Zea mays
cggacgctcgaggctagagcatttcagttatactaccagggtatctttgatggtccatgtccgacatctctagatcatgctgtgttaatcattggctatggttctgaaggtggcaacgattactggagtgtgagaaactcttggggtgaaagttggggaatgaagggctatatgcatatgcatcgaaacactggtgattccaagggtgtctgcggtataaacatgatggca

SEQ ID NO: 22842 - DNA, 245 bp, Zea mays
cccacgcgtccgaatcaacataaatacttcattttgttaatagtcactgatggcgtggtaactgattttcaagagactattgatgcgatcataaaggcatcagattttcctatatccataattgttgttggagttggaggggctgatttcaaggaaatggagtttctagatccaaacaaaggagagaaactggaaagctcaaccgggagagttgcatcaagggatatgatacagtttgccccgat

SEQ ID NO: 22843 - DNA, 245 bp, Zea mays
cagatctcccccaaatccagccgtcggcacctccgcttcaagatgcagatctttgtgaaaaccctgactggcaagactatcaccctcgaggtggagtcgtctgacaccattgacaacgttaaggccaagatccaggacaaggagggcatccccccagaccagcagcggctcatcttcgctggcaaacagcttgaggacgggcgcacgcttgctgactacaacatccagaaggagagcacccccac

SEQ ID NO: 22844 - DNA, 246 bp, Zea mays
cccacgcgtccgcccacgcgtccgcagaccaccaaacaagtgccagcgccctctcgcagtcgccgcaatggagagcaccttcatcatgatcaagcctgacggcgtccagaggggcctcattggtgagatcatcagccgttttgagaagaagggcttctacctcaaggccttgaagcttgtcaacgtggagaggtcgtttgccgagaagcactacgccgatctcgcctccgaagccttcttccaggg

SEQ ID NO: 22845 - DNA, 247 bp, Zea mays
cccacgcgtccgctggcaagacaatcacccttgaggtggagtcctcggacaccattgacaacgtcaaggccaagatccaggacaaggagggcatcccaccggaccaacagcgcctgatcttcgccggcaagcagctggaggatggtcgcactcttgcggattacaacatccagaaggagagcaccctccacctggtgctccgcctcaggggtggcatgcagatctttgtgaagacattgactggcaa

SEQ ID NO: 22846 - DNA, 242 bp, Zea mays
gtgggcgggcgtgacggtgttcgagtggttcaggaacgggcagttctggatgacggccagctgctccgcgtacctggccgcggtgtgccaggtgctggtgaaggtggtgttcaggcgggacatctcgttcaagctgacgtcgaagcagcccgcaggggacgagaagaaggacccctacgcagacctgtacgtggtgcgctggacctggctcatggtgacgcccatcatcatcatcctcgtca

SEQ ID NO: 22847 - DNA, 275 bp, Zea mays
atccgctcccctacctctccagcatcctcccgtctccgtcgtctcgtctccgctcctcacctcgccagccatgggcaagatcaagatcggaatcaacggtttcggaaggatcggcaggctcgtggccagggtcgccctgcagagcgaggatgtcgagctcgtcgccgtcaacgaccccttcatcaccacggattacatgacgtacatgttcaagtacgacaccgtgcacggccaatggaagcacagcgacatcgccctcaaggactccaagacgc

SEQ ID NO: 22848 - DNA, 263 bp, Zea mays
gaacaaagaagtcgcagttgatgcattcttgcccgcgacaacagctcaagaagccattcagtactccatggacctgtatgcccagtatattttgcaaagcttgaggcagtagattgcaagcaacaatttatctatcatgcgtcttggatcggggcgtgattttaataagccgaatcgcttgctatattgcgaaccttggaattgagaacagcgtcactagctgtgattcgctcctttctcgttaaattatcatatgaataggc

SEQ ID NO: 22849 - DNA, 281 bp, Zea mays
  unsure (1)..(281): unsure at all n locations
gagatattcctatgcctcttgttacttctggtgtcgagaaaggtaaccttcgcgagcttgctttggctcgaatggaagatctgggcttaaaatgccgggacgtcagaacccgtgaggcagggattcaggatatccatcacaagatccggccagatgaagtagagcttgtcagacgtgactatgctgcaaatgagggttgggaaacattcctctcttatgaggatacacgacaggatatcctgatcgggctgttgcgcttgcgtanatgtggccgtaatgtt

SEQ ID NO: 22850 - DNA, 196 bp, Zea mays
cccacgcgtccgcccacgcgtccgcggacgcgtggttcgccggcaagcagctggaggatggccgcaccctggcggattacgacatccagacggagagcactctccacctggtgctccgcctcaggggtggcatgcagatttttgtgaagacattgactggcaagaccatcaccttggaggtggagagctctgacac

SEQ ID NO: 22851 - DNA, 280 bp, Zea mays
cccacgcgtccgagcaacagcccgctgctgccaacgccttcgtgaaggtcagcatggacggcgcgccctacctgcgcaaggtggacctgaagacgtacggcagctacaaggacctctccgctgcactcaagaatatgttcggcaccttcaccgcatctgggaacagcatgaacgaggggagattggttgatccggccggcgatgctgatgatgtggtcactacttacgaagacaaggatggtgactggatgctggtcggcgacgtcccgtgggagatgtt

SEQ ID NO: 22852 - DNA, 276 bp, Zea mays
gattgctcgtatcgcgcatggcatttctcaaaacttcaaagagacaggtgtcccacattcagtttgttcagccaaatttatcgctcaagggaaatggctggtagtgggaaatagtgatggatacatatatgtctacacttacactgacactaagcttaaggaggccaagaaattcagagctcatgacaactctgtcgacgtgttggctgtccacccaaccgaggcgtaccttctttcatcatctgcttatggcgaaacaataaagctttggagctg

SEQ ID NO: 22853 - DNA, 270 bp, Zea mays
cccacgcgtccgcgcagttggaaccctccgggtcgacattcttgggcctggatgacaacaggttgtgtagatgggatatgcgcgacgccagaagccgggtgcagacaatcggtagctcatcagactcaccagtgctgaactggtcacagggtcatcagttctcgcggggcaccaatttccagtgctttgcaagtactggggatggttcaatcgttgttggttctgtggatggcaagtcagactctattctaagactcgatgcgtatggcg

SEQ ID NO: 22854 - DNA, 227 bp, Zea mays
gtcctacttaagataaatgcaaagctgggtggcatgaattcgttgctccaaattgaaacatccccagcaattcctcttgtatccaaggtcccaactataatcttgggaatggatgtgtcacacggttctcctggacattctgatgtaccatctattgctgctgttgttagttctcgtgaatggcctcttatctcgaaatacagagcttctgtccgcacccaatcact

SEQ ID NO: 22855 - DNA, 262 bp, Zea mays
agaaaagtcaggtgttctcaactgctgctgacaatcagacccaagtgggtatccgtgtgttgcaaggtgagcgtgaaatggcagcagacaacaagcttcttggtgaatttgacctcgtgggcattccacctgctccaagaggcttgcctcagattgaggttacattcgacatcgatgccaatggaatcgtgactgttgctgccaaagacaaggctattgggaaggagcagaacatcaccatccgatcttcaggtgggctgtc

SEQ ID NO: 22856 - DNA, 264 bp, Zea mays
atgggcttcagtggcctttggcgcattgtcgtcaggctgctcagtccgctgtctgctgctcccttggtcgctctcgtcggatttggactctatgagctagggtttccaagtgttgccaaatgtgtggagattggtcttcctcagattttactgctggtggcgctttctcagtacataccacatgcggcccccttgctgagtactgcctttgagcggtgtgctgtcataatgtccattgccctcatctggctttacgccttcttc

SEQ ID NO: 22857 - DNA, 268 bp, Zea mays
agggaggtcgagggaaagtgggtcacccaaggtcctgttgatgtggacattggtgccaatccatccgccgagggtggtgatgacgaaagcgttgatgacacagctgtgaaggtggttgatattgttgacacattccgtctacaggagcaacctccttttgacgagaaatcatttgtgtcttacatcaaaaaatacatcaagaatctcactgctgtgttggagccagagaaagcggatgagttcataaagggtgtcgagggtgcaacaa

SEQ ID NO: 22858 - DNA, 260 bp, Zea mays
cacaagcgcactctagcaatggcttctgaggttgtccgccctagcgacgccgagctactaaaggcacaagccgacatatggcggctcagcctctcctacctcacgcccctgtcactgaggtgcgccgtggagcttggcatccctacggcgatctaccgccatggcggggctgcctcagccgctgagctggtcacggcgctgtctctcccctccactaactgccgttcctccgccgcctgctgggctcctcgccggtgggg

SEQ ID NO: 22859 - DNA, 263 bp, Zea mays
cccacgcgtccgctgcgcctccacaaggctttggcctctgttgtaagttttaagcttcacctccagccatgggtaaggagaagtcccacatcaacattgtggttattggccatgtcgactctggcaagtcaaccaccaccggccacctgatctacaagcttggaggcattgacaagcgtgtgattgagaggttcgagaaggaagccgctgatatgaacaaacggtccttcaagtacgcttgggtgcttgacaagctcaaggct

SEQ ID NO: 22860 - DNA, 184 bp, Zea mays
tgctctccttgcgttcacccttggagtgaagcagatgatttgctgctgcaacaagatggatgcaaccactcccaaatactccaaggcacgttatgaagagattgtgaaggaagtctcatcctacctcaagaaagttgggtacaaccctgataagattgcctttgttcccatttctggttttgag

SEQ ID NO: 22861 - DNA, 255 bp, Zea mays
gtcaatggtgccgactacaccatgagaatcttcaactctgatggcagcgaaccagagatgtgtggtaatggagtccgttgcttcgctcggtttatagccgagattgaaaatctgcaggggacaaatagattcactattcatactggtgctggaaagatcgttcctgaaatacaaagtgatgggcaggtaaaggttgatatgggcgagcctatcctttctggactagacatccccacaaaactgctagctaccaag

SEQ ID NO: 22862 - DNA, 246 bp, Zea mays
tgctacgttacggtcaggggtgagaaggcaatgcagcttcttgagagtggcctcaaggtgaaggagtatgagcttctgaggaggaacttcagtgatactggctgctttggttttggtattcaggagcacattgatcttggaatcaagtatgacccgtctactggtatttatggcatggacttttacgtcgttctggaacgagctggttatcgtgttgcacgccggcgcaggtgcaagtcccgcgtt

SEQ ID NO: 22863 - DNA, 245 bp, Zea mays
ctttcttgcattggtacactggcgagggcatggatgagatggagttcaccgaagctgagagcaacatgaacgatctggtgtctgagtaccagcagtaccaggatgccactgccgatgaggaggagtacgaggacgaggaggaggtccatgacgagtaaggtgatcttggaccctgctgcatattgtaccgtctctggacctggctttctttcaagctggagcttaggtttggttgttgtattcga

SEQ ID NO: 22864 - DNA, 239 bp, Zea mays
ggcagggctgccagctttaacatcattcccagcagcaccggtgctgccaaggctgtcggtaaggttcttcctgaattgaatggcaagctcactggcatgtccttccgggttcccaccgtggatgtgtcagttgttgacctcactgtcagaatcgagaagggggcctcttacgaggaaatcaagaaagctattaaggctgcttctgagggcccactcaagggtattatgggctacgtgga

SEQ ID NO: 22865 - DNA, 233 bp, Zea mays
accttctgttctgggatcttgcagcagctggactatcgcctggttgaatgccaggccctggtccttgctcccacccgtgagcttgcacagcaaatcgagaaagtcatgcgcgcgcttggtgattaccttggtgttaaggtccatgcatgtgtgggaggaacatccgtccgtgaggaccaaaggattcttggcagtggtgtgcatgttgttgttggtacacctggtcgtgtgtt

SEQ ID NO: 22866 - DNA, 241 bp, Zea mays
gaggatcaggcttacaggaaaatcaggctccgtgctgaagatgtgcaaggcaggaatgtgctcacaaacttctggggcatgaattttaccaccgataagctcagatctctagtaaagaagtggcagacattgattgaagcccatgttgatgtcaagacaaccgacaactacatgctgcgtttgttctgcattggttttaccaagaggcgcccaaaccaggtcaagagaacctgctatgctc

SEQ ID NO: 22867 - DNA, 240 bp, Zea mays
ggcgacggggcggatcgtggcgctgaagaagacgcggctccccgaggacgacgagggcgtgccccccaccgcgatgcgggaggtctccttgctgcggatgctgtcgcaggacccgcacgtggtgcgcctgctggacctcaagcagggcgtgaataaggaggggcagaccatcctctacctggtcttcgagtacatggacaccgacctcaagaagttcatccggggacaccgcagcaacaa

SEQ ID NO: 22868 - DNA, 240 bp, Zea mays
gtcgtctgctgataccggcaagggaaggagtaaattgtcgaccaacaaagttacacatggattccacctggtggaaggcaagtccggccatgacatggaagactaccatgtggcagagtacaagtacgtaaagaatcatgagcttggtctctttgccatttttgatggccatttaggagataaggtgccaagttacttgaaagctaacctttttagcaacataatgaaagagcctctctt

SEQ ID NO: 22869 - DNA, 240 bp, Zea mays
ggtcgatacaagcagattaagagaaccgagggagtgtcaacaacagacattgttggacggatgcttctttgtgttagagagagatcatctgatgcacataatcattcttcactacaaaggcagttcagtagcggacatggtcagaaagtcgatgatactggatctggaactggtacaagagtatctcatttccttcccacatctaggcgaatagttcagttctcaaatagcaggggtcca

SEQ ID NO: 22870 - DNA, 235 bp, Zea mays
cacccatcttggtggtgaggactttgacaacaggatggtcaaccacttcgtccaggagttcaagaggaagaacaagaaggatatcactggcaaccccagggctctccggaggctgaggaccgcttgtgagagggcgaagaggactctgtcttccactgcccagaccacgattgagattgactcgctgtatgagggcatcgacttctactccaccatcacgcgtgccaggtttgag

SEQ ID NO: 22871 - DNA, 241 bp, Zea mays
ggcaggaggagattgagaagaacaagcttgcctaggagaggaagaagaggcaggctgagaagcaggcagcaaaagctgtggcccgagcacagaaggaagctgagaagaagctgaagaaagaggagaagacaagccaagaagaaatctggtgcagctgacactgatgagccctcagaatcggatgccaagtctgacgaagccatggaagccccagcggaacaagaagtggccccagcttcca

SEQ ID NO: 22872 - DNA, 233 bp, Zea mays
cggacgcgtggggttggcacgtgctggtcatttagaagaagcatgggattttattgaggaaatgcctggcaaagtagatgccgtcatgttaggcgctttgcttgctgcttgccggaaatgcaagaacactgaggttggtgagagggtcatcaataggattatgaagctggagccatcaaactcgtggaactacgtggtgtcatccaagatttatgcaacctcagataaaatgg

SEQ ID NO: 22873 - DNA, 237 bp, Zea mays
cccacgcgtccgggttttttgattttagccgccgccgctgctcatctcacatccctcgagaagacgcctgctcctcgccgatcgatacgatggccgtcttctccgacctccacaccgccgacggcctcaagtccctcgaggctcacctcgccggcaaaacctatgtgtctggtgactccattactaaggatgacattaaggtcttcgccgcggtgccgtcgaagcctggcgctgagt

SEQ ID NO: 22874 - DNA, 187 bp, Zea mays
cccacgcgtccgattttagccgccgccgctgctcatctcacatccctcgagaagacgcctgctcctcgccgatcgatacgatggccgtcttctccgacctccacaccgccgacggcctcaagtccctcgaggctcacctcgccggcaaaacctatgtgtctggtgactcaattactaaggatgacat

SEQ ID NO: 22875 - DNA, 124 bp, Zea mays
cttggtgactggacacgggagctcaaacgggtattctcagcagcttgtgagccagctgtgggtgggaagagtagccttcttcgagcagacgaaacaaccaagaaagcgttaccaaaacttttga

SEQ ID NO: 22876 - DNA, 166 bp, Zea mays
gctcctaagcggttcccgcgacctctggagttctcgtcttccgactcaagtcaccttaacttcttgttggctgcatctgtattaagggcagagacatttggaatacacatacctgattgggctaagaacccaaagaaactggctgaagctgtggacaaggtcattg

SEQ ID NO: 22877 - DNA, 192 bp, Zea mays
ggtgctcggatggtcagggaacttttccagatggcccgctcaaagaaagcgtgcattgtattcttcgatgaagttgatgctattggtggtgctcgttttgatgatggggtgggtggcgacaatgaggtgcagcgtacaatgttggaaatagtaaaccagcttgatgggtttgatgcaagagggaactcaaag

SEQ ID NO: 22878 - DNA, 188 bp, Zea mays
gtggtgctcatcggcgactccggcgtcggcaagtccaacctcctctcccgcttcaccaagaacgagttcagcctcgagtccaagtccaccatcggcgtcgagttcgccacccgcagtctccaggtcgacggcaaggtcatcaaggcccagatttgggacaccgccgccaggagaggtaccgtgcaatc

SEQ ID NO: 22879 - DNA, 237 bp, Zea mays
cccacgcgtccggcgagatcgtgcgcacctccgagatctccacgaagttgtggtaacatggggctcaccttcacgaagctcttcagccggctcttctccaagaaagagatgaggatccttatggttggtctcgatgcagctggtaagaccaccatcctctacaagctcaagctcggagaaatcgtgaccactatccctacaatcgggtttaatgtggatactgttgaatacaagaac

SEQ ID NO: 22880 - DNA, 192 bp, Zea mays
tgtagttacacaagaacaacttgatcgtgctaaagaggcaaccaaatctgcagttctgatgaacttggaatcaaggtctatagcatctgaagatattggaagacaggttcttacttatggggaaaggaagcccatcgagtatttcctgaaaacagttgaggagatcacttggaatgacattttgtcagccgc

SEQ ID NO: 22881 - DNA, 128 bp, Zea mays
gcaccattgacgagctcctgtcgctgcaggaaactgatcctggctactacaccgacactgtcatcaaaggcattgtctcgatactgctcagtgcgggcacagacacgacggcgctgacaatggagtgg

SEQ ID NO: 22882 - DNA, 176 bp, Zea mays
ggtgaactactatgtgcaatcacacatacagatgaatgaatatcgagatcgtgtagtcctgccggctgcatcaaagaagtttgggagacagattaatacctgcttgaaggttatggatatgactggcctcaagctgtctgcactgagccaaataaagatgttgacgatgattacta

SEQ ID NO: 22883 - DNA, 174 bp, Zea mays
aaaccagaccaccaaacaagtgccagcgccctctcgcagtcgccgcaatggagagcaccttcatcatgatcaagcctgacggcgtccagaggggcctcattggtgagatcatcagccgttttgagaagaagggcttctacctcaaggccttgaagcttgtcaacgtggagaggt

SEQ ID NO: 22884 - DNA, 168 bp, Zea mays
ggcaagactatcaccctcgaggtggagtcttcagacaccatcgacaatgtcaaggccaagatccaggacaaggagggcatcccaccggaccagcagcgtttgatcttcgctggcaagcagctggaggatggccgcacccttgcggattacaacatccagaaggagagc

SEQ ID NO: 22885 - DNA, 135 bp, Zea mays
aaaaacattgctcatttgactcatgtgagtgagatggaaaagaagtgcgagtctttggccagaatgactgcaattttgaaagatgtaattcagaacaaggatcgtattattgctcggctgcaacagccttattcc

SEQ ID NO: 22886 - DNA, 171 bp, Zea mays
ctattatcatgtgaagacaaagatgtcaggataatagtatatagagtatagatacacatacaaggcggtagaagcagcagagaagaatgatgtccattgccaatgatagttctcagcattcaacaagaaataagtacccacaatagtgacacatacggtgactattatgag

SEQ ID NO: 22887 - DNA, 224 bp, Zea mays
gacgcgtaccactccgccgtcttccgcaacgcgccccacttccagggcaaggtggtccttgacgtgggcaccgggagcagcatccttgctatctggagcgcgcaggccggggccaggaaggtgtacgccgtcgaggcgactaacatggcggacacgcgcgcgagcttgctcggccaacggcgtcacggatatcgttgaggtgatacagggcaccgtggaagacg

SEQ ID NO: 22888 - DNA, 230 bp, Zea mays
cagacgctggcgcgcccccgctcgcttcacttctctaggtgcgcaccgatcagaagagatggcggtacccgctgcagacgaggaagatcgtgaagaagcgggtcaagcagttcaagaggccccacctcgaccgctacaagtgccttaagccaagctggcgcaggccaaagggtattgactcccgtgtcaggaggaagttcaagggatgcaccttgatgcccaacattggt

SEQ ID NO: 22889 - DNA, 214 bp, Zea mays
cggactctgggtctgctgactccctagaagatcttgcaggtcgattctgtgctcctgcgactcctgtgtcattgcagactgggtgagtgcggctaagcagaacgggtatatggttgggtgtggcttggaccccgaatggtcagtgcaagatgcaacttgagataaagcctgttgccaaatcatgatctttgcctcgggggaaaattccgtctag

SEQ ID NO: 22890 - DNA, 223 bp, Zea mays
acgcagccccttaaccctcgttcctctagccgtctcgcgcaccacagcctccatttctcctccgacggcggtgcggctagctcaaccatggcggactccaaggccacctcggcggtcacgctccgcactcgcaagttcatgaccaaccgcctgctggcccgcaaacaatttgtgcttgaggttatccaccccggccgcgccaacgtctccaaggcggagttga

SEQ ID NO: 22891 - DNA, 223 bp, Zea mays
cagacgcgtgggtgcgagctcgacctgccgtccgggggccacctcacccacgggtactacacggcgagtgaccagaagatttctgcaacctccatctacttccagagcctgccctataaggtgagctccgacaccgggtacgtcgactacgataagctggaggaaaaggccatggatttccgccccaagcttatcatctgtggcggtagtgcatgccctcggg

SEQ ID NO: 22892 - DNA, 223 bp, Zea mays
gaccagccgaggtttgagacttgctaccagatcgctcttgcgatcaagaaggaagtcgaggatcttgaggctggtggtattcaggttatccaaatcgacgaggctgcactgagagaagggctgccgctccgcaaggctgagcatgcattctacttggactgggctgtccactccttcagaattaccaactgcgagatccaggacaccacccagatccacaccc

SEQ ID NO: 22893 - DNA, 228 bp, Zea mays
gcaatctctagcagcagatcctcgtgcgaacaagagcgctagccccttcgtactgtcccgatacggcgcacgaagcagacggcgaacaagtccactggcggcaaggcgccaaggaagcagctggccacgaaggcggcgcgcaagtctgccccggcgaccggcggagtgaagaagccccaccgtttccgccccggcaccgtcgcgctccgggagatccgcaagtatcag

SEQ ID NO: 22894 - DNA, 233 bp, Zea mays
gacacacatccgcacacgcgtccgtgtctggtgcatgtaggtaggaaggagcgtgatggccaagacgaggtcgatcaagctggagcaccccctcgagaagaggcaagacgaggctaagcgtatcagagaggagtacgctgacagaattccagtgattggggagaaggctgagaggagtgatatccctgacatcggcaagaagaagtacctcgtccctgcagatcttacagtcg

SEQ ID NO: 22895 - DNA, 219 bp, Zea mays
cccacgcgtccggagaagatggctgagaaagagaatattctaatgcagagatatgaggaggggaagttacttggaaaagggagttttgccaaagtttaccatgctcgcaatgttaagacttcagaaagcgttgctatcaaggtgattgacaaagataagatcaagaagtgtggtcttatggatcaaataattcaagagatttcagtgatgaagttggta

SEQ ID NO: 22896 - DNA, 215 bp, Zea mays
cagacgctgggcggacgcgtgggatcttccagcagctgctgctgcgggcttaactgtggctgaggtcacacgaagcaacacacgtctctgtggcagaagatgagctcttgcgcattctgattctgctcaggaacttcttgcctgggtaccaacaggtagttcaaggcgaatggaacgtagcaggcattgcccatagagcttatgatcttgaagga

SEQ ID NO: 22897 - DNA, 271 bp, Zea mays
atacaccgaagagacacacagaagcgaggagcactacttggtggttggattctcttcagtctagcagctagtccagttaagtttcagacacacatggggagcattggcagaggcacggccaactgcgccaccgtgccgcagccgccgccgtcgacagggaagctcatcacgatcctgagcatcgatggcggcggcatccgctgccttatcccggcgaccatcattgcgtacctcgaggccaagctccaggagctggacggcccggacgctc

SEQ ID NO: 22898 - DNA, 273 bp, Zea mays
ggtcgatacaagcagattacgagaaccgagggagtgtcaacaacagacattgttggacagatgcttctttgtgttagagagagatcatctgatgcacataatcattcttcactacaaaggcagttcagtagcggacatggtcagaaagtcgatgatactggatctggaactggtacaagagtatctcatttccttcccacatctaggcgaatagttcagttctcaaatagcaggggtccaggtccagattctcgaatagtttagatggatggt

SEQ ID NO: 22899 - DNA, 275 bp, Zea mays
cagccagcgccgtcgccgcccagccgcagtaaggaggaaggagcaggaagatgccggcggggcacgggctgctgtcgcggacccgcgactcgttcgcgcggcccttccgcaagaaggggtacatcccgctcaccacgtacctgcgcacctacaagatcggcgactacgtcgacgtcaagcttaacggcgccgtgcacgagggcatgccgcacaagttctaccacggccgcaccgggagcgtctggaacgtcaccaagcgcgccattggcgtcgag

SEQ ID NO: 22900 - DNA, 272 bp, Zea mays
gcgtaaccttctgtctgttgcatacaagaatgtgattggggctcgccgcgcttcatggcgcattgtttcttccattgaacaaaaggaggagtcccgtaagaacgaagagcatgtgaaccttatcaaggaatatcgtggcaagatcgaggctgaactgagcaatatctgtgatggaatcttgaagctgcttgactcccacctagtgccttcttctactgctgctgaatcaaaggtcttctacctcaagatgaagggtgactatcacaggtatc

SEQ ID NO: 22901 - DNA, 269 bp, Zea mays
attcagaagatgcctaaaccatttccaattttgaagataaatccttcgaaaaaggatatagattctttcatggcgttagacttcaagctggttggctatgatcctcaccagaagctagagatgaaaatggcagtgtaacgatggcttagctctggagcccccagccttggaacctcggtgggtgaaatcagtcgaacgaactggtactacataaaaaatgaaccggacatcgcactagcttgtttttggtgatggtgctgaatgttgtg

SEQ ID NO: 22902 - DNA, 271 bp, Zea mays
ctgaagaggaagcccatggcgctcatcaagaagctgcgcaaggcgaaaaaggatgctcctgctggtgagaagcccgagccagtcaagacacatctccgtaacatgatcattgtccctgagatgattggaagcattgttggggtctacaacggcaagaccttcaaccaggttgagatcaagcctgagatgatcggccactaccttgctgagttttccatctcctacaagccggtcaagcacggcaggcccggtatcggtgccacccactcct

SEQ ID NO: 22903 - DNA, 263 bp, Zea mays
gacaggatggcaatgaggtgttctttcgcagaaagaggtccacccagctgaagaagctgatgaacgcctattgcgagcgccagtctgtggacatgaatgccattgcattcctggtttgatggccgcatgcttcgcggcgagcagacccctgatgagctggagatggaggacggcgacgagatcgacgccatgcttcaccagaccggtagcagcgttcctagcaccacctataagcagcagctgcggagcctcgtttggctctc

SEQ ID NO: 22904 - DNA, 259 bp, Zea mays
ctccacgcagaaaacccagccgccgccgcatcgggctcccatgtagtcaggagcgtccaccccaggcggcgccatgaagcgcaacccccgcgtcacgagctcccgccggaagtgccgcaagcgcacttcacggccccgtcctccgtcctgcgcgtgctcatgtccgcggcgctatcgacggagctccgccacaagtagaatgtgcgttccatcccgatccgcaaggacgacgaggtgctagtcgttcgcggcacctaca

SEQ ID NO: 22905 - DNA, 263 bp, Zea mays
ggaacaagaacaagtccatggaaggtctatcggcaaaatctgtggttctgaattttgtgtgtcaactaattgttttcctgtaccttcttgacaatgacacttcatggatgatccttgctagctctggaattggtgtttgcattgagttttggaagatcggaaaggcgatgcatattgaagtcgatagaagtggaaaaattcccatgttgaggttccgagatcgtgaatcatatgcacagaataagaccaaagagtacgatgct

SEQ ID NO: 22906 - DNA, 261 bp, Zea mays
cccacgcgtccggtggggagatccttggacatcacccggttctctaattatgctgaacttcgagaggaactgggtcagatgttcggcattaagggtcagttggacgaccctgatagatcaggctggcagcttgtatttgtcgacagggagaacgatgtgcttctccttggagacgacccgtgggagtcatttgtgaatagtgtatggtacatcaagatactttcacctgaggatgtgcataagatgggaaagccaggaaac

SEQ ID NO: 22907 - DNA, 264 bp, Zea mays
aactgaccctcttgagattgcaatgaaggagctgagagcgcgcaagatacccttcacgatcagacggtacttacctgatggaagctatgaagactggggagtagacgagctcattgtggaggactcctggaaacgccaggttggtggagactgaagacgcggatctacttggcatggaaagggtatgtggtgcagtgggtctttcctgtagttacaagtcttcgttgccactatgagtggatactgtagcgaatgaaccaagac

SEQ ID NO: 22908 - DNA, 262 bp, Zea mays
gtgaaagtccttcaacttgaaactgcagctggtgcagctattcgtttctttgacaaagcgattggaattaatgttccccgctcaagatttctcccggtgaaggctacatctgatttattgcttgtgcagtctgatctttacaccttggttgatggctttgtcatccgcaatccatccagagcgaatccagctaacccttcgattgagcttggacctgagttcaagaaggttgccaatttccttgctcggttcaagtccatcc

SEQ ID NO: 22909 - DNA, 156 bp, Zea mays
gctgagtgggcagcagccaagttatcttgcaagaagcgcctggccaaacatgtgttggatgtgacaggtgttacgattgatccaactagcctttttgatatacagattaagcgcatacatgagtactagacacagctcctaaacatatggggagct

SEQ ID NO: 22910 - DNA, 262 bp, Zea mays
cactgatgttgctgtcctgctcgacaatgaggccatctatgacatctgccgccgctcccttgacattgagcgcccaacgtacaccaacctcaacaggcttgtgtcccaggtcatctcatccctgactgcttccctgagggtcgatggtgctctgaacgttgatgtgaacgagttccagaccaacctggtgccctatcctaggatccacttcatgctttcgtcctacgctccagtcagttctgctgataatgcctaccacgag

SEQ ID NO: 22911 - DNA, 271 bp, Zea mays
gcaaaaaccccacgagagagacgaatcttccgaatctctcggtggcgatggcgctctccgaccgctcccgcgagtcgctcctcccgagcttcctctacggctcctcggcgcgctctttcgctgccacaggagccgccgcgcgcctccctgtctcctccccggcgcctgccgcggctggagcaggaggcggcgtgccgttctcgatccaggcgcccaaggagaagatcgagatgtactcgccggccttctatgccgcctgcactgccggagg

SEQ ID NO: 22912 - DNA, 243 bp, Zea mays
agtagtgttacgtacggtccgaattccgggttctggttttgcagtggttcagtaaggcagaaagttgttaaaccgtagttctgagatgtattaccagtggcgccatgctgtacttttagggtgtataatgcggatacaaataaacaatttagcggttcattaaagtttgaactcaaataacatgttctttgtaagcatatgtaccgtacctctacgtgaaataaagttgttgaattagcattc

SEQ ID NO: 22913 - DNA, 267 bp, Zea mays
atcaggttattggcattgactttttatcccaaacactgctaccagccattgtagaacttgcagaggataggcactggagagtccggcttgcaataattgagtacatcccattgctggcgagtcagttaggtgttgggttttttgatgacaagctgggggcactctgcatgcaatggttggaagataaggtcttctcaatcagagatgctgccgccaacaacttgaagcgccttgcggaagagttcggtccagagtgggcaatgcagc

SEQ ID NO: 22914 - DNA, 265 bp, Zea mays
cccacgcttccgagggaaccttggtccgatgtgtggcatgaaccttgccttcgacagtgatctcattgtccctgctaggtactttggtctcatgggtgatgtccagcccatcggtcgctacgaggacatgtgggcaggatggtgtgtgaatgtcatctgcgaccaccttagcctgggagtcaagactggcctgccatacatctggcacagcaaggcgagcatgcccttcggtaacttgtagaaggagtacaagggcatcttctgt

SEQ ID NO: 22915 - DNA, 268 bp, Zea mays
cccacacgtccgcccacgcgtccgaggagaaggactttttggaaactgaatttatagttgggcccataccagtagatgatggaaatggaaaagaagtagcaactgaaattgttacaaacatggttacaaacaaaacattctacactgattccagtggacgtgatttcatcaaaaggataagagattatcgatcggagtggaagattgaagtgcaccagcctattgctggaaactattatcctgttaatcttggcatctatgtggagga

SEQ ID NO: 22916 - DNA, 267 bp, Zea mays
cggacgtggcgagactccagcatccactaccagagacggaatttcatgcagttagtagtctcgggggatccctctgggagacttctgaaatataacccacagacaaaggaaacgacagtactgcatcgcaacctccaatttcccaacggtgtgtccatgagcaaggatggctcattctttgttttctgtgaaggatcgcgcggcaggttgagcagatactggttgaaaggcgagaaggcaggcactgtggatcttttcgctatcttg

SEQ ID NO: 22917 - DNA, 269 bp, Zea mays
ggcaagtcgaagcaaagcaggagtgagaagaagagccgcaagccatgctgaagcttggcatgaagcccatcactggtgtcagccgggtcactgtgaagaaaagcaagaatatgctttttgtcatctcgaagccagatgtgttcaagagcccaaactcggacacctatgtcatattcggcgaggcgaagatcgaggacctcagctcccagctgcagacccaagctgcagagcagttcaaggctcctgacctgagccaaatgatcccgaag

SEQ ID NO: 22918 - DNA, 271 bp, Zea mays
tcaactcgtgaggaagcatctcaggctttaactgaaatgaatggcaaaatgatatctggaaaaccattgtatgttgcatttgcacagcgcaaagaagatagaaaagcgatgttgcaggcacagttttctcagatgcgccctgctgtaccaatgacacccactctagccccacgccttccaatgtactctccgatggctcctcagcaactcttctatggacaagcgccaccagctatgatgccccctcagccaggatttgctttccagcaac

SEQ ID NO: 22919 - DNA, 265 bp, Zea mays
tcccactcgtccgctgctgcgtgtgcccttgtgctatgtccacgtctgcgttgatctgccgctcgaccacaagcgctctccgttcctctatgacacgctggactccgcgtgctatcacgacctggaggcgcacctccacctcatcgacgggtaccacgggcgcggtgagcggttcgtgctgtcgagctggctcgacccggcgctggtgaacaaggcgttctacttcctcaaggaccaccacgtcgtgctcccgtgctttcgccat

SEQ ID NO: 22920 - DNA, 244 bp, Zea mays
gaccactcaactctttgctgttatgctattggagatgcttctgaataattgcggagagcctgtccataggcaggtcattgataatggccttcttccaatacttgtgaagatagtgaagaagaagacggatttaccagttcgataaaaaatattcctccggtaggatgcaacacaaacatcccttggtggagctaaagcaaggttccctcagtactatgaggcatactatgagtctgtgtctgct

SEQ ID NO: 22921 - DNA, 221 bp, Zea mays
ccagtactcccacaagcactcccaccacacctacgagtacacgcacgccgccatctccccccacgtcgccaagctcctccccaagaaccgtctcctgtccgagaaccactgccgcgccatcgcactgcagcacgaccgcgggtcggcgcactacgcgatgcaccgcccggagccgcacatcatgctgctccgccgcccgatcaactaccagcagcagcagg

SEQ ID NO: 22922 - DNA, 278 bp, Zea mays
actacccgcagtacgtccgaatccggaccaccaccgtcgacacgcgtcaccacgcgtacgcccacgcgtccgcgaaatggactgcgggtttgtgacttacgacacatggacacttttacggataagcttgacatcctattcaaagacgctggttcgagatgtcaaggctttcagtacagcaaaagcttgctcaaggaagaggttgagagataccagaagtttgctgatcgcttggagcccttcaatgctgatagcgtgcatgtgctaaatgaatctat

SEQ ID NO: 22923 - DNA, 259 bp, Zea mays
tgctgagacagcttgaagctattctccatatttataggctagctcgagctgggcaaactgtagatgctttgagggaaaccatcaggctacccttccttcatttggaccccaaggctccaaatgtgactgttgacattttcaggaacttgtcaccccatgttcaagcttgcgtgccagatctcctgaaggttgctctaaattgcattgacaatgttagagatactgatgggaccttgcgcgctgtcaaatcaaagatcgc

SEQ ID NO: 22924 - DNA, 258 bp, Zea mays
gaagattgtcaccccagaataatccacagagatataaagtcctctaatattttgctggataataacttcgaagcactggttgctgattttggtcttgcaaggatagctatggatgcttgcactcgtgtagttacatgagtgcaagcatccatagctatccttgcactgcatgtaactatcgcgagtgatggggaacttgttgggtaccttgctccggagtatgcctcaagtggcaagctgaccgagagatctgatgta

SEQ ID NO: 22925 - DNA, 259 bp, Zea mays
ccaatctagaagcacccctctccctctctctctcttcgccgtccgaagctccgcaccccaatctaatcgacacctcaccgagatgggccgcaagttcttcgtcggtggcaactggaaatgcaatggaaccacagatcaggtcgagaagattgtcaaaaccctgaatgaaggacaggttcccccttcagatgttgtggaggtcgttgtcagccctccttatgtcttccttcctgtggtcaagagccagctgcgccaagag

SEQ ID NO: 22926 - DNA, 258 bp, Zea mays
gtccagtatgcactgagcaggatccgtaatgctgcaaggcacttgctcacccttgacgagaagaacccccgtcgtatctttgagggtgaggcgcttcttcgccgcatgaaccgctatgggctgcttgctgagggtcagaacaagcttgattatgttcttgccctcaccgctgagaacttcctcgcaaggcggcttcaaacacttgtcttcaaggctggcatggccaagtccattcaccatgctcgtgtcttgatcaag

SEQ ID NO: 22927 - DNA, 162 bp, Zea mays
gttactgatgagtcatctttcaataatataagaaactggataaggaacattgagcaacatgcttccgacaatgtgaataaaattttggtaggcaacaaagctgacatggatgaaagcaaacgcgctgtaccgacttcaaaagggcaggctcttgctgacgag

SEQ ID NO: 22928 - DNA, 136 bp, Zea mays
gtcattggacatgtcgactctggcaagtcgaccaccactggccacctgatctacaagctcggcggtattgacaagcgtgtgattgagaggttcgagaaagaggccgcggagatgaacaagcggtcattcaagtatg

SEQ ID NO: 22929 - DNA, 123 bp, Zea mays
ccgacgcgttcttcaacggcatcaagaaccaggccgggagcgggtgcgagggcaagaacttctacacccggagcgcgttcctgagcgccgtcaacgcgtacccgggcttcgcccatggcggga

SEQ ID NO: 22930 - DNA, 206 bp, Zea mays
cgtacatactgtactgctcttggtccaggtctcaaagggccagtaccactgtgacggatgtggaatatgtagaaccggcggcgtggagaactttttccactgtgataaatgtgggtgttgctacagcaatgtcttgaaggattcccaccactgcgtcgaaagagcaatgcatcacaactgccctgtctgctttgagtatctgttcg

SEQ ID NO: 22931 - DNA, 207 bp, Zea mays
cccacgcgtccggtgatggcgtttgaggaagaattttcctttgagattcctgacaacgaagcagagaagattgactccatcaagacagcggttgatttcattgcttcgcatcctcaagcaaaataagaggatttcttttttttcgtatttcaaagtgtgttttgcatccagaacttatgcgacacgggactagttttctctagcttg

SEQ ID NO: 22932 - DNA, 182 bp, Zea mays
cctgactggccaggacagcgagaagccgcgtcccatcgggataatatggggtggcacagcaaaccgtgggaggctaaagcttaggtgtgaccatggccctcaaaattggaccagtggagttgatcttggccgccttctggatcgtcttgaacttgatcttatcataaccagcgaatcactca

SEQ ID NO: 22933 - DNA, 253 bp, Zea mays
agatgcctgaaatggatggatttgaagccacaaaaaggattagagtgatggaaagagatctaaatgagcaaatagaacgtggagaagccccaccggaatgcgcagggctccggcagtggcgaactccaatattagccatgacagcagatgttatccaggcgacgcacgaacagtgcttaaaatctgaaatggacggttatgtatccaagccattcgagggcgagcaattgtacagagaagtagctcgcttttt

SEQ ID NO: 22934 - DNA, 143 bp, Zea mays
cccacgcgtccggcctcttcctgctcatggacatctactggaagtacgagacgcgccccacctgcgacgacgagcacgcctgcaccccctccgagcacctccgccaccagaagtccatcatgaagtcgcagcggaacgcgctc

SEQ ID NO: 22935 - DNA, 208 bp, Zea mays
cccacgcgtccggatgtacacgacgacctggatgtgttccttcataccgagacccagggaaacaaatatttggttgtgagcattacaaaagaaactgcaagcttgttgctgcatgctgcaataagctattcacttgcagattctgtcatgataaagttagtgaccatacaatggacaagtatcttcactacaaccattcattttatcg

SEQ ID NO: 22936 - DNA, 255 bp, Zea mays
gaagcccgccaagggcaggaaagggaaggccggcaaggaccccaacaagcctaagagggctcccagcgctttcttcgtgttcatggaggaatttcgcaaggagttcaaggagaagaaccctaagaacaagtctgtcgctgcggtggggaaagctgctggcgacaggtggaaatccctgagcgagtcggacaaggctccctatgtagccaaggctaacaagctcaagctcgagtacaacagagccatcgctgccta

SEQ ID NO: 22937 - DNA, 95 bp, Zea mays
ggtgaaggtagcgggcgcggaggaagatggggctcgcgttcgggaagctcttcagccggctcttcgccaagaaggagatgcgacctcttatggtc

SEQ ID NO: 22938 - DNA, 254 bp, Zea mays
actcattcaccctggtgttcgaggatgaaaggttcagtgggtccacgcttgaagtgaggggcataacggtcgaaactggcgagtgggctgttgttgggggcaccggccagtttgctatggcgaacggcatcatctccaagaagttccacgagcagagaagcgacgggaacgtcatagagcttagtgtccatgctttctgcccactgctcaaagggaaaaggggcggtgctgtgacaaaggttgggccatggggc

SEQ ID NO: 22939 - DNA, 250 bp, Zea mays
cccacgcgtccgacatctcagaatattccattggccaagcataaaagtgcttttggatgagcccaaagctcataaatccttccgagacatggatatcagcttagactcagagttcttagtttcaacatccattgatggatctgcgagaatatggaagatagatgagggcgcaccactggtcaatttgactcgatcctcggatgagaagatcgagtgctgccgcttttctagggatggcatgaaaccgttc

SEQ ID NO: 22940 - DNA, 133 bp, Zea mays
attctgatcagcttagtatgtatgttgatccggttgttgataggctggatccaaagggcgatattcgacataggctatcaagagttgcaactaagtatgaaaatggaaaacattatcgggatttgtcgaagct

SEQ ID NO: 22941 - DNA, 234 bp, Zea mays
tccccatctcccagatccaattcgcgagttctccctcctctgccgccatggcgctctctgtggagaagacctcgtctggacgggagtacaaggtcaaggatctctcgcaggcggacttcggccgcctcgagagtgagctggccgaggtcgaaatgcccggcctcatggcgtgccgcgccgagttcggcccgtcgaagcccttcgccggcgctaggatctcggggtctctccaca

SEQ ID NO: 22942 - DNA, 238 bp, Zea mays
cccgtcgcatcccatcccactaccacccatctcgtcgtccgccgattcgatccggttcttccaacccaggggctgtgatggcgacgaagaggagcgtgggcaccctcggcgaggcggatctgaaggggaagaaggtgttcgtgcgcgccgacctcaacgtccctctcgacgacgcccagaagatcaccgacgacacccgcatccgcgcctccgtccccaccatcaagttcctcctcga

SEQ ID NO: 22943 - DNA, 237 bp, Zea mays
tgacaataatggttctctttacggggatgtcaaaaggatctgtgagactaatcttggattggtctcccaatgctgtctgactaaacatgttttcaaggtgaacaagcagcagtatcttgcaaatgttgccctgaaaataaatgtgaaggttgggggaaggaatactgtgcttgttgatgctttggcaaggagaatcccccttgtcagtgacatagcgactattatctttggtgctga

SEQ ID NO: 22944 - DNA, 241 bp, Zea mays
gaagcctccaccctccagcgcctccaccttcctcgccgcctcactccctctgaggtcgcagatccgtccggttagacgaagccgcccgcacccatggcctccggtgagctcgcctgcacctacgccgccctcatcctcagcgacgacggcatcgccatcaccgccgagaagatcgccaccatcgtgaaggcggccaacatcaaggtcgagtcctactggccggcgctcttcgctaagctcc

SEQ ID NO: 22945 - DNA, 240 bp, Zea mays
cgacagcatccagagcctcgcgcttggggcgcttgacaacagcttcttagtcggcggcgccgggatacaggtggtcaagaacttccgccacggcttgcacgggaagggcgcgtcggtgaagatctcgggaggccgtggcggcagtgggagcgcttattcgacgccgaagaaggcactgctgatgcgcggcgagactaacatgctactgatgagcccaggagaggctctgcattccaatgg

SEQ ID NO: 22946 - DNA, 233 bp, Zea mays
cccacgcgtccggaagcagtcgccatgtctggcatcatccacaagatcgaggagaagctccacatggggggcgaccacaagaataaggaggaggagcaccacaagaaggccgaggagcaccacaagaaggaggagggggagcaccacaagaaggacggcggggagcacaaggaaggcatcgtggagaagatcaaggacaagatcaccggcgagcacggcgacaagtccggcga

SEQ ID NO: 22947 - DNA, 229 bp, Zea mays
ggaccgtggtagctgaagatctcgagtgcaagcaacgttggcgcttggcggccagtagtagcagctaatttagcgtcgctccttcctactagacgagagatcgagaaaccatggccaagctccaagtcactcctggcgccgcgttcaccgagtgcaatgaactcaacttccagggcctgtacatgtaccacacgcccctgggtcccaaggccaaccaagctgcgatcct

SEQ ID NO: 22948 - DNA, 231 bp, Zea mays
ggtcacccaagttcactgtgattgttgctcaaaagaaccatcacaccaagttctttcagacggcatcaccagacaatgttcttcctggaactgtggtggatagtaaagtttgccatcctaagaacttcgacttctacatgtgtgcacatgctgggatgattggaacaacaaggcccacccactatcatgttctgcacgacgagataggttttaatgccgacgagatgcagg

SEQ ID NO: 22949 - DNA, 229 bp, Zea mays
acccacgcgtccgcggaccgtggtttctggataacagagaaacggagtgtcccaactgcgttcaagctcttcactggctcagcatggatggtgctcacccaccagtttatcgaatactgcatatggggatgggacaatctcccaaggacagtcctgatgtactacgccaatttcctttcctcgccagagggctacttccacacggtcatctgcaacgtgccggagttcc

SEQ ID NO: 22950 - DNA, 230 bp, Zea mays
ctaacacgtggcggacgcgtgggctactacagctcctcatctcaagtgtgtagacgagacagagagacactgagagagcggcatggccagcctccaagtcactcctacttcggcgttcactgagtggaacgagctgaagttcgaaggcctgtacctgttccacacgcccctgggctcaggcgccaaccaagctcgggtcatagacgacgaggcgccgattggcatcggtg

SEQ ID NO: 22951 - DNA, 232 bp, Zea mays
caccgcgctggagatccccgccaaggtgccctacgacttcctcgtctccctcgtcagggacgtcggccgggactgggacatcgactacgagctccaggtcggactcaccgtcgacctccccatcgtcggcaacttcaccatcccgctctccacctccggcgagttcaagctccccaccctcaaggacttgttctgatctagtagtagctcgcttgccttctgttctgtgcgg

SEQ ID NO: 22952 - DNA, 234 bp, Zea mays
cagccaatgcagaccatggatcagatcatgcagattttaacagaggccaccataccacctgcctgttctcgcagtataaatgtcctagctgatggactggacatggacgacgacatggatgatcttgattccgactcagatcttgatgttgacagcagcggtgagattgtgtacgcaatgtgagtaacatctcagcagccatctcagcagtcaaccaaggaaccaatcaggcat

SEQ ID NO: 22953 - DNA, 229 bp, Zea mays
cccacgcgtccggcaatggttgaacgagatagaccgttatgcaagtgataatgttaacaagctccttgttgggaacaagagtgaccttactgccaacaaagttgtggcaactgagacagcaaaggcgtttgctgatgagatgggcatcccattcatggagacgagtgccaaaaacgccatcaacgtggagcaggccttcatggctatggctgcatccatcaaggatagg

SEQ ID NO: 22954 - DNA, 227 bp, Zea mays
tgcaacgccaagaaccccacctgggcctccgtcacctacggcatcttcctctgcctcgactgctcggccgtccaccgcagccttggggtccacatcaccttcgtcaggtcaacgaacctcgactcatggactccagatcagctgaaaatgatggcgttcggaggcaacaaccgggcacatgctttcttcaagcagcatggatggactgatggtggcaaggttgaggc

SEQ ID NO: 22955 - DNA, 224 bp, Zea mays
ctttcaaaccaccaaaggtgcatttcgtactaaggtgttccatccaaacatcaacagcaacgggagcatttgcctcgacatcttgaaggaccagtggagtccggcactaacaatctccaaggtgctgctgtccatctgttccctgctgactgatccgaaccccgacgaccctttggtccccgagatagctcacatgtacaagacggaccggcacaagtacgaga

SEQ ID NO: 22956 - DNA, 225 bp, Zea mays
cgagcccatcgccgtcctcgccggggacgcgctgctctcgctctccttccaccacatggccagcgtcgggtcctaccctccggacgtggacccggagaagcaccccgcccgcgtcgtccgagccattggggagctcgcgcgctgcatcggatccgagggactcgtcgccggccaggttgtcgatctcgagatgacgggcacatcagagacggtgcccctcgaacg

SEQ ID NO: 22957 - DNA, 225 bp, Zea mays
cggacgcgtggcgtgacgcgtgggcggacgcgtgggcggacgtaaggcgaaggagtagcagcagcaggcagcgccgagtagcggctccccatctacgagcttgccaccatggctagaggattgaagaagcatttgaagaggctcaatgcccccaagcattggatgctggacaagcttggcggagcttttgctcccaagccatcttctggacctcacaagtctagg

SEQ ID NO: 22958 - DNA, 231 bp, Zea mays
atctcctcgcattttccttgcaaccgattgcctatccccctcccaaccaaagaccgatggcgcccaaggccgagaagaagcccgcggcgaagaagccggcggaggaggagcccgcggccgagaagacgaccgccgggaagaagcccaaggcggagaagcgggtccccgcgggcaagtccgccggcaaggagggcggcgagggcaagcgtggcaagaagaagggcaagaaga

SEQ ID NO: 22959 - DNA, 175 bp, Zea mays
tgcactggggtcaatgtggccgtcatggttggtggattccccaggaaggagggaatggaaaggaaagatgttatgtcgaaaaatgtttcaatctacaaatcccaagcatctgcccttgaagcccatgcagctcccaactgcaaggttctggtggttgccaacccagcaaacacca

SEQ ID NO: 22960 - DNA, 174 bp, Zea mays
gaggaggagtggtttcgggagatattcggggggtccaagaaagaggatgccatccagaaccagtatgagttcctgatccagcgcatgggcggcccgcctctattctcccagaggagaggacaccctgcccttataggacgacatcgaccattcttggttacccaccgagctgca

SEQ ID NO: 22961 - DNA, 169 bp, Zea mays
ggacctggtgtcgttctttatcagaagattttcaagggagactgtcagatccccaagtgcctttcgcctgccgcgcaggaccttctcaagaggatcctccaaccgaatccgatgaagaggatcaacgtcgcggggatcagggagcacgagtggttcaagaaggactacg

SEQ ID NO: 22962 - DNA, 172 bp, Zea mays
cggcggcggcggcggacggaaggcgaaagagtagcagcagcaggcggcgccgagtagcggttccccacctcgagcttgccaccatggctagaggattgaagaagcatttgaagaggctcaatgcgcccaagcattggatgctggacaagcttggcggagcttttgctcccaa

SEQ ID NO: 22963 - DNA, 173 bp, Zea mays
cccacgcgtccgccgaaccttacatacggggaagatcttcaagattggttcactgcagatgttcatggagaacaatggaagcactgaagatatgggtcctcgaccttttcctgtcaaggaggttcacaaaatagcagtactagatattaggttagctaatgctgatcgtcatg

SEQ ID NO: 22964 - DNA, 170 bp, Zea mays
gcgtgtgccatcacatactttggggacggtgggacaagtgagggagacttccatgcagcgctcaacttcgcggctgttatggaggcaccggtgatcttcttctgccgcaacaatggctgggccatcagcactccgactactgaacaattcagaagtgatggagttgtcat

SEQ ID NO: 22965 - DNA, 170 bp, Zea mays
cagcaagacctggacagaagtggcacgtcttctacgccactgagtacccagagcaaccaatggttaaccttgagatgtgcatgactggtctggacaagaagaaagcttgtgtctttttcaagactaatgctgatgggaacacaacatgtgccaaggaaatgacaaagctc

SEQ ID NO: 22966 - DNA, 170 bp, Zea mays
agttggatggtgtccttcgcacaaagcctctagaaattggaatcgttaatggcatggatgtttatgaatgggatccttcaacagataagtacatcagcgtgaaatatgatgcaacaacggtaactgaagcaagggctctcaataaagagagtttgcaagcagaagtcgga

SEQ ID NO: 22967 - DNA, 167 bp, Zea mays
cggacctggccaagtctgacaagattgttgttgagaagtccactgtccctgtcaagaccgctgaggctattgagaagatcttgacccacaacagcaagggcatcaactaccagatcctttccaacccagagttccttgcggagggcactgccattgaggacctgttc

SEQ ID NO: 22968 - DNA, 172 bp, Zea mays
ggacgcgtggcttggtgctcccccgctggtatattaccactctggaggacttcggagtgaatccaaccttgtataacaatgggaaagtgtgtcttagcctgttgggtacctgggatggtagaggttgtgagaagtggaatccagctcaatcgacaatgctgcaagttcttgt

SEQ ID NO: 22969 - DNA, 165 bp, Zea mays
cggacttctcggtcgcagttaccatctttggtggccgtgggttcgccaaatcatgggcgacgggtgcagacatcgattcctacatgtgcggtgatcctgtagagcaagagcttcctggtggcggtctgctgatgtaccagagctttactgctgttccctctggct

SEQ ID NO: 22970 - DNA, 165 bp, Zea mays
gcttcttgatcatgccataatagccgtgaagagtcaacagggagattggagccatgaagcatacctacttttccctgttcatctggatggtactttgtttgacaacgctaacatcatgctgtccagaagggaattctattccacagctgatgttctgcaaatatt

SEQ ID NO: 22971 - DNA, 166 bp, Zea mays
gcgcctcatcggagatgcggccaagaaccaggtcgccatgaaccccatcaacaccgtctttgatgccaagcgtctcattggcaggaggtttagtgatgcctctgtccagagtgatattaagctgtggcccttcaaggtcattccagggcccggtgagaagccaatg

SEQ ID NO: 22972 - DNA, 165 bp, Zea mays
ggatcttggaccccttcatcattttcttggcatagcagtggaacgccgaccatgctggcctctttctacagcaacacacttatgctatttatatcattaatcgtgcaggtatgactggttgtaaaccttgctctacgccagttgatcttcaggccaagctatctg

SEQ ID NO: 22973 - DNA, 168 bp, Zea mays
cccacgcgtccggtctccagagcgcgaagactgctcctttcttggaaaagctggttcagaaagatattgaggttctttacctcattgagccaattgatgaggttgccattcagaatttacagacatacaaagagaagaagtttgtagatattagcaaagaggatttgg

SEQ ID NO: 22974 - DNA, 169 bp, Zea mays
catggaattgcacggatcttgaccaagaccttcacgtctgatttccctcatgtcgagaggtatttctggaccatggttaaccagcctaacttcaagaaggtcattggtgaggtcaagcaggcagagtctgcacctcctattccgaaaaaggctgctccttctaaggagc

SEQ ID NO: 22975 - DNA, 240 bp, Zea mays
gagttctacccgctgtttggccttggtgccaatgtggccctcatcttctctgggcgcacggtgaaatatttctcagacatgaggaagaatttgggtcctggagtggatggttgggcaatttctttgaaggccatgatgagcatagtggttgtactgggtcttgtcatcaccggtatctattggggagtgaacaagtttgttattgataactcatctgtgcccgtggttgagcggaaaaag

SEQ ID NO: 22976 - DNA, 239 bp, Zea mays
gaaggatgagatgattgacatcattggtgtgaccaaaggtaaaggttatgagggtgtggtcactcgttggggtgtcacccgccttccccgcaaaacccacaggggtctccgcaaggttgcttgtatcggtgcatggcatccggctagggtctcgtatacggttgcccgtgctggtcagaatgggtaccaccaccgcactgagatgaacaagaaggtctacaagatcggcaaggctggac

SEQ ID NO: 22977 - DNA, 239 bp, Zea mays
aattccctctacaattgccagtacaagtcattttttattgcattctctggcttgactgaaccaatcaagttagagcgttacttgcagcctcattttcgctactacatgcgtgaagtgcgcactgttgtctactcacagtttctggaatcgtacaagagtgtgacaatggaagccatggctgctgcatttggcgtcacagtcgactttatagaccaggaactgtcacgcttcattgccgc

SEQ ID NO: 22978 - DNA, 240 bp, Zea mays
ataagaccctagccgccgccaccgaagctgcctcccagtgaagcaggagcgtccaccccgccgccgtcatgaagcgcaatccccgcgtcacgatctcccgccggaagtgccgcaagcgcactttacggccccgtcctccgtccgccgcgttctcatgtccgccgggctgtcgacgtagctccgccacaagtacaacgtgcgctccatcccgatccgcaaggacgacgaggtgcaggtcgt

SEQ ID NO: 22979 - DNA, 239 bp, Zea mays
cggacgcgtggcggacgcgtgggggattctgcccagcagcgcggcgatccgcctcgatccggaatgcagcgcgtcttatccatggaggagatccccaacccctactggaccccgtcgagtacaacgcgatgctcaagcagaagctggagaaggacctcgctgccatcgctatgtggagggcttctggtgcagcacctccagatctttctgcgactgctgcttccttgccaagtgtcggt

SEQ ID NO: 22980 - DNA, 243 bp, Zea mays
cccacgcgtccggacccacgcgtccgagacattcttcgtgctgctcaggaagcgattgtgctccccccatgggttgcacttgctatcaggccaaggcctggtgtctgggattacattcgggtgaatgtaagtgagctggctgtgggagagctgagtgtttctgagtacttggcattcaaggaacagctggtggatggacaatccaacagcaactttgtgcttgagcttgattttgagcccttc

SEQ ID NO: 22981 - DNA, 245 bp, Zea mays
cccacgcgtccggtgatggtggtttcggaactgtttacaaagggaaactccgggacgggagagtcgttgcggtgaaacgcctgtacaagaacaactacaaacgggtggagcagttcataaacgaggtagacattttgtcccgcctcctccaccagaacctggtcatcctctatggctgcacatcccgtagcagccgcgacctcatgctcgtgtacgagttcatccccaacggaacagtcgcggac

SEQ ID NO: 22982 - DNA, 248 bp, Zea mays
atgctccatcaagttcatgacagatggtattttgctgcgagaaatccagggtgattttctgttgaagcgctattcagtgatcatattggatgaggcacacgaaaggagcttgaacacagatatacttattgggatgctttctagaattataaagattcgcaaggatttgtatgcaaagcagcaggaaaaattacggtctggatttaagatcaaaccagaggataagatcagtcagttaaaggtggtgc

SEQ ID NO: 22983 - DNA, 238 bp, Zea mays
gggttcccttaaactctgggatattcgatgtggtctggtaacaaaagaatttcagagaagccttggaaccatccttgacattgacttcagtgctgatggaagacaatttatctcttcaactgacacaaccagaagcaatattagtgagaacactataattgtttgggatgtcctgcgacaagttcctttatctaaccaggtttataccgaagcattcacatgcccgtgtgtaaggtac

SEQ ID NO: 22984 - DNA, 238 bp, Zea mays
cccacgcgtccgcgcacgcgtccgaaagaaccgcccttgttctctgcgactctgcccggccggtctccgaggcgggcggagggaaccagagagcaaggcgaggagcgcggaagggctgagggaaggggcggcggggcatggctcgccggccggcgtcgtgggagcagggcggcgacgagtacgacgaactcttcaaggtcgtgcgcatcggcgactctggcgtggggaagtccaacct

SEQ ID NO: 22985 - DNA, 233 bp, Zea mays
gcagatgctgataactgcacaagtcatcaggtcctttcttaggcccaacagctatgtcatcgttgtggaacatgacttgagtgtcttggattacttgtccgacttcatttgttgtttatatggcaagccaggtgcttatggtgtggttaccttgccattctcggtccgagagggtatcaatagtttctgggctggatttgttccaacagagaatcttcggttccgagacgaat

SEQ ID NO: 22986 - DNA, 236 bp, Zea mays
cgattcagtagccgacgcaatggactacgcgctggagatgccggaaggggagaaggtgttgagacatgagaagcaccacagatacgtgagcacgcacgacgtcgggtactgggcgaacagcttcttgcaagatcttgagcggatttgcctcgaccataacaggaggcgttgctggggcataggatttgggctgaagttcagggttgtggccctcgacccaaacttcaagaagcttg

SEQ ID NO: 22987 - DNA, 238 bp, Zea mays
cccaagaaacacacagaagcgaggagcactacttgttggttggattctcttcagtctagcagctagtccagttaagtttcagacacacatggggagcattggcagaggcacggccaactgcgccaccgtgccgcagccgccgccgtcgacagggaagctcatcacgatcctgagcatcgatggcggcggcatccgcggccttatcccggcgaccatcattgcgtacctcgaggccaag

SEQ ID NO: 22988 - DNA, 240 bp, Zea mays
cccacgcgtccggtgaaggagaaggtggtgaaattgtgtttggtggaatggattctagtcactacaagggtgatcacacctatgtcccagtcactcagaagggatactggcagtttaatatgggtgatgtcctggttgatggaaagtccactgggttttgtgctggtggttgtgcagcaatagcagattctggaacttccttgcttgctggccccacagccattattactgaaatcaacg

SEQ ID NO: 22989 - DNA, 244 bp, Zea mays
ggtgcatcccgtgcacaagctgctgagcccgcactaccgtgacacgctgaacatcaacgccctggcacgccagacactcatcaacgccggcgggtcttcgagcgcaccgtgttccctgcaaagtacgcgctggggatgtcggcagacgtgtacaagacctggaatttcaacgagcaggctctcccagcagatctcgtcaagagaggtgtggctgtgccggaccagtcaagcccatatggtgtcc

SEQ ID NO: 22990 - DNA, 168 bp, Zea mays
cggacgcgtggcgttatcgcttgtggtcaagaccattgtccttgctgcttcgattcattaaggctatcgccggacggttcgtggcggccagctagggcggcgtctgcgacggcaacacctgcaactgcgtctccagctgcgtctgctcctgctgcagctgcatcttag

SEQ ID NO: 22991 - DNA, 232 bp, Zea mays
ggagactccgatgatgaacatgattgctggtggagcagctgcaaggccttttgttacacatcacaatgaattaaacatgcggctttttatgcgcattgctcctgaattatatctgaaggaactggttgttggtggattggaccgtgtttatgaaattggaaagcaattcaggaatgaaggaattgatttaacacacaatcctgaattcacaacttgtgaattttatatggcg

SEQ ID NO: 22992 - DNA, 228 bp, Zea mays
cccacgcgtccgggcggaccaggtaagcagcagcaggaaccctagcaccgccgcatccgcagccatgggtatcgacctcgttgccggtgggaggaacaagaagaccaagcgcacagcgccgaagtccgacgatgtttatctcaagctccttgtcaagctctaccgtgtcttggtcaggaggaccaagagcaacttcaatgctgtcattctcaagaggctcttcatgag

SEQ ID NO: 22993 - DNA, 95 bp, Zea mays
actaccttttcaaacttctgcttattggtgattctggtgttgggaaatcatgcttgcgtgtcagatttgcggatgattcatatttggacagctac

SEQ ID NO: 22994 - DNA, 256 bp, Zea mays
atcatcgttttataatgacacaattgtgaactgcccaacatgctcatgtggctgccagagcgcaagtgggtcaaactgtgtgaatgaggattcacctaatctacaagctgcaattgatggccctggcaaatggactggtcagccccttgtacaatgcacttcccacatgtgcccgataagaatccactggcatgtgaagctcaactacaaggattactggagagtgaaaatcactatcacaaacttcaacttccgc

SEQ ID NO: 22995 - DNA, 251 bp, Zea mays
ctacaagaacgtcatcggcgcccgcaggcctcgtggcggatcatctcctccagggggcagaaggaggagggccgcgggaacgaggcgcacgccgcctccatccgcgcctaccgctccaagatcgagaccgagctcgcccgcatctgcgacggcatcctcgccctgctcgactcccaactcgtcccatccgccggcgggccgagtccaaggtcttctacctcaagatgaagggtgactaccacaggtacctt

SEQ ID NO: 22996 - DNA, 249 bp, Zea mays
gacaaagataccttgggaaagtggttctcctcatgtccaagattggggattgcgggtgaacatggttacttcttgaggtggtctagagaagaagagtggcaaacatgcactcaggcattggacttcggatggatgcaaatggcgaacgagtgatgaatttatatacagaagcaactgatggatcctacattgaggccaaggaaagtgccttggtgtggcaccatcaggatgctgacctaggctttggat

SEQ ID NO: 22997 - DNA, 249 bp, Zea mays
gtccgcagatggcaccgacttttatggagctagcactcgagcaggctaagtgggggcgggataacctcgaggtccctgttgggtgtgtgattgtggaggacgggaaagtgatttcctctgggagcaacaagacgaatgccactcggaatgctaccagacatgctgagatggaagctattgacgtcctgcttcgggagtggcagagcatgggtcttgatcagccacaggtcgcggagaaatttgcaggat

SEQ ID NO: 22998 - DNA, 176 bp, Zea mays
gaggaatgtaacatcaatatcccttcatggctttccttcaactcaaaagatggagtgtatgttgtgagtggtgattcgttaattgaatgcgctactattgctgacaagtgtgcaaaggttggtgcagtcgggataaattgcacacctccaagatttattcatggactgatactctc

SEQ ID NO: 22999 - DNA, 248 bp, Zea mays
cccacgcgtccgggatcgagcagccgagcgactaagcgaagactccgggtgccccgagcacaagagaaccatggcggcggcggcagtttacggcggcttcaaagggaagcttggcgtcgaggatgcccccgagctgcagctcaaccgcatccgcatcacactctcatccaagaacgtcaagaacttggagaaagtttgtgcggatttggtaaagggagccaaggacaagcatttgagggttaagggac

SEQ ID NO: 23000 - DNA, 236 bp, Zea mays
gaatgagggagatacccattggcgacttggttgtctgattgaagcagcttggtgcagatgttgattgtttccttggcacttactgcccacctgttcgtgtcaatggaatctgagggctacctggtggcaaggtcaagctgtctggctccatcagcagtcagtacttgagtgccttgctgatggctgctcctttggctcttggggatgtggagattgaaatcattgataaattaatc

SEQ ID NO: 23001 - DNA, 240 bp, Zea mays
ggatttgttgctttcaaatctgctgaagatgctaaccgagctcttacggagaacaatggcaaaatggttggaagcaagcccctttatgtagctcttgcgcacgtaagagaagacagaaaggcaaagctacaggcacaattttcacaaatgcgtcctgttgcaatggcgccttcagtaggtcctcgcatgcccatgtttccacctggtgtccctggagttggtcagcagctgttctatggt

SEQ ID NO: 23002 - DNA, 240 bp, Zea mays
ctctcgctggggctcgtgctcctctacttcttcacctcaggcagcaccgttggtctcgtggagggacagaagacgtggtgcatcgccaagccgtcggcgtcgaacgagatcctggcgcagaacctggactacgcgtgctcccaggtgagctgcgccgtgatccagaagggcgggccgtgctactacccggacagccccgtgtcccgctccgccgtcgccatgaacctctactacgcctac

SEQ ID NO: 23003 - DNA, 216 bp, Zea mays
gtccagcaggctgctgagctttctgtagctgctcctacaatccaggcgtccttggactccaggttcctcagcggtctgaaggactagcgcgttgaggcttccagaatcttccaaggtgactactccactggcctaccggtggacaatgcacagctgatcgaggacgtgaggcaagctctatatgcctccaggatctgcagttacgcgcagggcatg

SEQ ID NO: 23004 - DNA, 241 bp, Zea mays
ggattagtgaatgctttctgccaaggttttgagaaacgatttagtgtcctgcacatatccgatatgatacttgctattgggagtatgattttccatgccaccttgcaacttctcctacaacagagtgatgagactcctatggtttgggagatccttctctacatgtatgtcctctattcaccggactggcactacaggagcacaatgccaactttcctgttcctgtatggtgctgcctttg

SEQ ID NO: 23005 - DNA, 240 bp, Zea mays
ggttcctcagcaggaagaaggattacaaggatggaaggttctcacaggtcgtgcccaacgccctcgacatgaagctcagggacgacctcgagaggcgcaagaagatcaggaaccaccgtggtctgcgtcgctactggggcctccgtgttcgtggccagcacaccaagaccactggcaggcgtggaaaaactgttggtgtctccaagaagcgataagctacatatctatcggcaaatctca

SEQ ID NO: 23006 - DNA, 231 bp, Zea mays
ctgaagaccaatagtcatggaacgtgcagctattccgctccatcgatggcggcgcgtgctttggcttccctagcaccccagaggccgcagctcaatctggccttgtcagtggcaagaataatgtcctagacaggagcatccatgatgcctacatccacgccatacgccgtgccaaacacttcatctacatcgagaaccagtacttcctcggcagctcatttgcgtggaaag

SEQ ID NO: 23007 - DNA, 235 bp, Zea mays
actgatcagattgtggtcatccatggacgtgttgaggatgttgaccttgaggaaaaggttgatgttataatatcagaatggatgggctatatgcttctctatgagagtatgctgccaagcgtcctatttgcaagacataaatggcttaagcccgggggtcttattcttccttctcatgctacgctcttcatggcccccgtaacaaatcgtgagagatatgaagacagcgtcgatt

SEQ ID NO: 23008 - DNA, 235 bp, Zea mays
gccagggaaatgggcgaccggacaaggactatgaaaattggagatggaagccagaacagtgtaacctcccacgcttcgatgcaaggaagttcttggagttgatgagaggcaagacacttgcgttcgttggggattcagttgctcggaatcagatggagtccctcctttgcattctgtggcaagtagatgtcccacaaaaccgaggcaacaaaatgatgcacaagtggctcttcaa

SEQ ID NO: 23009 - DNA, 228 bp, Zea mays
atctggtggttcaaaatcgaagacaggtgaggctgatactacggttgcaaaattggatattagagtgggccttatcaggaaagcagagaagcatccagatgctgattccctttacgtggaggagattgatgttggagaggacacaccaagaacagtggtcagtggcctcgtcaaattcatacccctcgaagaaatgcagaaccggaaagtgtgcgtactctgcaatct

SEQ ID NO: 23010 - DNA, 237 bp, Zea mays
caaggaaggagatcccttgaaaccagctgtgacaggcgtcttagtgttcgtttccactccagatccaattggcaacaagtactatcttggccctgctcctttgcaggatatggcaatgcaaattgctacagccaatggccctactggctataatagggattacctgttctcaatggagaaggcattagccagcattagccacgaagatgattcgatcatagagcttgcaaacgaggt

SEQ ID NO: 23011 - DNA, 222 bp, Zea mays
cccacgcgtccggtgacgcccccgccgcccgccgccgacgacccgagactgcgccgtggtggccgcgcactccaaggccacctacgacgagcagtgggcggcccacaagagcagcagcaagctgatggtgatcgacttctcggcgtcctggtgcgggccctgccgcttcatcgagccggccttcaaggagctgtcctcccgcttcaccgatgccatcttcat

SEQ ID NO: 23012 - DNA, 228 bp, Zea mays
gtcatcaaggcgctcaaggaacccgacactgacaggaagaaggtcaagaacatcaagcacagcggcaacatcagcctctacgacgtcatcgagatcgccaagaccatgcggaacaggtccatggccaaggagttggccgggaccgtcaaggagatcctggggacctgcgtcacgtcgggtgcaccgtcgatgggaaggaccccaaggacttgcagcaggagatcgatg

SEQ ID NO: 23013 - DNA, 229 bp, Zea mays
gtcatattcactgctgatctttttctgtgggatgtttatcactgttgatggcttcaacaaaacgggcataccgaacacactatgggagttagtggaaccatattcacgaatcgatagtgctaaaggtgttgcacttcttgctgtggtgattcttatcctttcaaacgtggcctctaatgttcctacagtcctattgctcggtacaagagtggctgcatcagcggcttcg

SEQ ID NO: 23014 - DNA, 201 bp, Zea mays
cccacgcgtccgcacacgagcaccaagccgaggggaggggcgatggcgagaggtgtggtgtcagcgaagggcggcacggccgcgggcaagaagaaggggtcggtcgccttcacgatcgactgcaccaagcccgtggaggacaagatcatggagatcgcctcgctcgagaagttcctgcaggagcgcatcaaggtcgccggc

SEQ ID NO: 23015 - DNA, 222 bp, Zea mays
ggacgctggctcccaccccgcagccgccctagcacccgcgacgagcaggatgctgcccagttgctcttgcggtagttcccccaactgtcaccatgcagaacgaggagggtaagactgtggacctctatgtccccaggaagtgctcggccacaaacaggatcatcactgccaaggaccatgcctctgtccagatcaacattggccacttggatgcgaatggcc

SEQ ID NO: 23016 - DNA, 223 bp, Zea mays
attgatcaattcatctcaagtcgaaaaagggtcaagttttagctcctccatgatgaagacgtttcagcgtggtcttctgagttcaagggatggtgaagcttcaaagttgactgaaaatggcttccaatttcttctgatggaaacaaatgcacaactttggtacataatgagagaatacatttcatctgctgaggaacgtggagtggaccctacggagctgata

SEQ ID NO: 23017 - DNA, 216 bp, Zea mays
cggttaacggagttgagcgtgatgagcaagagtggaagaagatcttcattgaagctggattcaaagactacaaaattctacccgtcatcggtgacgtatcagtcatcatcgaggtctatccttgaatgctttgtgaacaaagacctccataataaactgaagaccatgaaggtgttgatagtatattatgattttttatttgtattgtacacttga

SEQ ID NO: 23018 - DNA, 218 bp, Zea mays
aaagagatgacgaagctctcggggattcatgagatcattcccgagatggagatctgtgactttgagtttgacccctgtgggtactcgatgaatggcgtcttcgggcctgcagcctccaccatccacgtgacacccgaggaaggtttcagctacgcaagctacgaagctatgaacttcgaccccagctcactggtctacagcgatgtgatcaggagggt

SEQ ID NO: 23019 - DNA, 186 bp, Zea mays
gcaatttctaaaacattgccaccaggattccatatgaaccctatacagtttgagaaggatgatgataccaatttccacatggacttgatcgctggctttgccaacatgcgggctaggaattacagtattcctgaagttgacaaattgaaggcaaagttcatagctggaagaatcatcccagccatc

SEQ ID NO: 23020 - DNA, 210 bp, Zea mays
aggagcgcgagctcgacctccgaggcaacaagatcgccgtcatcgagaatgtcggagccaccgaggaccagtttgacacaattgacttgtcggataatgagattgtgaagcttgaaaacttcccatacttgaatcgtcttggcactctactagttaataataacagaatcacgcgtatcaatcccaatcttggcgagtttttgccaaagc

SEQ ID NO: 23021 - DNA, 205 bp, Zea mays
acactcaggaggaatgcaagtattattcaacacctggaggatgcaaattcggtaaaacttgcaaatacctccaccgtgagggaaatggagggaaaacagaggttgaaaaagctgagctgaactttctaggtcttccactgcgaccaggtgaaaaggagtgcccatactatatgcgcactgggagctgcaaatttgcgactaactg

SEQ ID NO: 23022 - DNA, 214 bp, Zea mays
cacgcttttcgacctcatcttggctgcaaactatctgaacatcaagggtctgctcgacctgacctgtcagactgttgctgacatgatcaagggcaagacaccagaagagattcgcaagaccttcaacatcaagaatgacttcacccctgaggaggaagaggagatccgcagggagaaccagtgggccttcgagtaaggaggtgctggatctatt

SEQ ID NO: 23023 - DNA, 215 bp, Zea mays
cccacgcgtccgaatttagagtatacctagcaaacttggttaattgatcgatgttggttgctctgatgtttgcagcatcccgttgacgccatgggtgctggaggagatgagcagcaacccgaacatcgtatacacggacaggtccggacgccggaatcccgagtacatctccctcggctgcgacacacttccagtgctcaggggccggaccccca

SEQ ID NO: 23024 - DNA, 169 bp, Zea mays
ggccgcggcaactgccccgtcctcgcctgccgcaagaacctcaccgagacctgccccggcgagctgcagctgcgctccccggccggcagcgtcctcgcgtgcaagaacggctgcgaggccttccgcaccgacgaactgtgctgccgcaacatgtacaacagcccgcaca

SEQ ID NO: 23025 - DNA, 214 bp, Zea mays
ggaggctgagcgcatggtccgcctaggcgccgactggctacatatggacatcatggatgggcacttcgttcctaacctgactattggggctccggtgatccagagcttgaggaaacataccaaagcatatttggactgccatcttatggtcacaaagccttcagattacgtagaaccatttggaaaggctggcgcttctggattcacattccat

SEQ ID NO: 23026 - DNA, 217 bp, Zea mays
acaagcgcacctttaatctcgcttgcattgaccacagaggcacaccggagcatccggcgaggacctgcacgcttgaaaccgacgacgaggccatatgctggggaattgcatattgtgtcaagggtggtccagaaaaagagctaaaagcaatgcagtacttggagagaagagagtgtgagtacgaccagaagatatccattgatttctacaaggaagg

SEQ ID NO: 23027 - DNA, 207 bp, Zea mays
ggacgcgtggccgtgaacaggctgtatgggctttaggtaatgttgctggtgactcaccaaagtgtcgtgatctggtacttggtcatggtgggctataccctttgctgcagcagcttaatgagcatgctaagctttcgatgcttaggaatgccacatggactctctccaacttctgtcgggggaaccacaaccaactttgatcaggca

SEQ ID NO: 23028 - DNA, 187 bp, Zea mays
gcaggaggatctcaagaggcagctttttggtttgccagcaagatatcgtgattcagtccgagcaatcactcctggcttgcctcttttcctctataactacacaacccaccagcttcatggggtatttgaggctgccagttttggtgggtccaatatcgatcctactgcatgggaggataagaagtgt

SEQ ID NO: 23029 - DNA, 236 bp, Zea mays
caaccgcaagggcccgctcatcgtctacggcaccgagggctccaaggtcgtcaaggccttccgcaaccttcccggtgtggatgttgccaacgtcgagcgcctcaacctactagaccttgcccccggtggccaccttgggcgctttgtgatctggacccagagcgcgttcaataagctcgaggaggtgtatgggagctatgacgccccgtcgcagaagaagaagggcttcgtgctgc

SEQ ID NO: 23030 - DNA, 238 bp, Zea mays
agaatacattttaggagagctgtcaagaataggaaaagagaagaggctcaaaggttttgaattcgtaaaggatgtgcacctggaaccagtaccgtttgacatggaccgtgatttgatcaccccgacatacaaaaagaagcgtccgcaactgctcaagtactacaggcgtgatttgacaacatgtacaaaagtgctaagtgaactcactctacagtacacatcccgatgaagattccca

SEQ ID NO: 23031 - DNA, 239 bp, Zea mays
cggacgcgtgggcgagatgggagagagcgaacagatgccctgtcagcataagttccactcgcactgcatactcccgtggctggagctccacagctcttgcccaatctgccggtttcagtttcctactgaggagacgaagaacaacccatgcgaatcagccagcaccgcagggaccgtgaacggcggtggagacaacgctgctgcaagcggcagcgatacagaaagtactaaccacaatg

SEQ ID NO: 23032 - DNA, 240 bp, Zea mays
agttgatgcactatcaaaggaattgcttgcgcgctcaactgtcccagctcatgtctataaggcaatagatgctctcccagtaactgcacatcctatgacacagtttaccacgggagtaatggctcttcaggttgagagcgaatttcaaaaagcttatgacaatggattgccaaaatcaaagttttgggagcctacttatgaagactgcttaaacatgattgctcggcttccaccagtggc

SEQ ID NO: 23033 - DNA, 212 bp, Zea mays
ctcgaaatgctttctatagcatttgctggagatagtgataaggggatgatggacgtgatgaacgggtgcaagaatctgaggaagcttgagatcagagacagtccatttggcgatgttgcactcttgggaaatgttgccaagtatgagacaatgcgatccctttggatgtcttcatgcaatgtcacattaaaggggtgccaggtccttgcatc

SEQ ID NO: 23034 - DNA, 177 bp, Zea mays
agctagggtctgggactgggaggcggagatgtcgacgccggcgaggaagcgcctgatgcgggacttcaagcggttgcagcaggacccgcccgccggcatcagcggcgcgccgcacgacaacaacatcatgctctggaacgccgtcatattcgggccggatgacacgccgtgggacgg

SEQ ID NO: 23035 - DNA, 232 bp, Zea mays
catcaatgatatgctaaatgtgcttgcacttcgtttagatcataccagagttgtagacataatgcgcaaggctggtcagttgcatcttgtgaaaccatatatggttgcagttcagagtaacaatgtctctgctgtgaatgaagccttgaatgagctttatgttgaagaggaggactatgagagactccgtgaatcagttgacatgcatgacaactttgaccagatatgtctt

SEQ ID NO: 23036 - DNA, 227 bp, Zea mays
gtcaggacagacaagacctaccctgctgggttcatggatgtcatttccatccccaagaccaatgagaactacaggctgctgtacgataccaagggccgcttccgccttcacccaatcagggatgaggatgctaagttcaagctttgcaaggttaggtctgttcagtttgggcagaagggcatccgttacctgacacgtatgacggcgcaccatccgctacctgaccg

SEQ ID NO: 23037 - DNA, 230 bp, Zea mays
ggctgctgaggaatcaagagaaaccatagccactgccctgagggattcagatcttgttttcataacagctgggatgtgagggggtgctgctccaattgttgcccagatatcaaaggaagctggttatcttactgttggtgttgtcacctatccattcaatttcgagggccgtaagcgctctttacaggcaagtatctgagccccccttcactcctgaattagaattcaaa

SEQ ID NO: 23038 - DNA, 227 bp, Zea mays
cccgcagctcccatcctctcgctcgccaggagaagcagccgccgttgctgctgccgcgtccacagaatggggggtttcgtgaagactcataagaccaatgcgtatttcaaacgtttccaagtgaaattcaagagaaggcgggctggcaagacagactacagggccaggataaggctgattaaccaagacaaaaacaagtacaacacacccaaatacagatttgttgt

SEQ ID NO: 23039 - DNA, 181 bp, Zea mays
agcaaaccaaccctgcatgcagggccagcttattatatataatatctgaggtggagcatatctatctggctgtgtactgcaagcaggcctagtacgccgcctgcgcgttcctcctattacacatataggcccctccctgcgtgtatgcttgttaccgtcgtgtcgaaccttgactacgagg

SEQ ID NO: 23040 - DNA, 105 bp, Zea mays
gctggcttctcctccccctcttaccaagtcctcctcgggttagggttccttaaggttttgtggaggggcgatggcggcggctgatgtggagtaccgttgcttcgt

SEQ ID NO: 23041 - DNA, 232 bp, Zea mays
ctgacggtgggcgacccacgcgtccgggagaagagggtccggccgtctccttgccccgatggcgtccgagatgaagcagtccaacccgatgcgggagatcaaggtgcagaagctggtcctcaacatatccgtaggggagagcggcgaccgcctcacccgcgccgccaaggtgctggagcagctcagcggccagacccccgtcttctccaaggcgaggtacacggtgcgctcg

SEQ ID NO: 23042 - DNA, 227 bp, Zea mays
cctctcgtggccttgtttcctggcggcgacggctggtcgagcggcgccgcccttggctaggtcttcgctgggtccttccccggcgacgagcgtccatctggggtcgactgaactgagcaggcagtaggaagagacactatgttgttcttctcctacttcaaggagctggtggggaaggaggtgacagtggagctcaagaatgacttggcgatccgcgggacgctcca

SEQ ID NO: 23043 - DNA, 225 bp, Zea mays
gcctccgcggcggcgccaagaagcgtaagaagaagacgtacaccaagcccaagaagatcaagcacaagcacaagaaggtcaagctctccgtgctgcagttctataaggtggacgacaccactagcaaggtgacccgcctccgcaaggagtgccccaacacagagtgcggcgcgggcgtcttcatggccaaccacttcgaccgccactactgcggcaagtgcggcc

SEQ ID NO: 23044 - DNA, 229 bp, Zea mays
cgatcccagcatccgagagagctccacaggccaggtccccatcgccgcggcgcttgccccacctctcccccgcccggtagtagcctcgccgccgttgccgagatggggttcgtgtccttcgtcgggagggtgctcttcgtcgccgctttcctcctctccgcctaccaggagtttaatgaattcggtgctgatggtggaccagcagctaaggcccttcggcccaaattca

SEQ ID NO: 23045 - DNA, 162 bp, Zea mays
ctcaacttcgacgccttccacggcgacaaggaccacggcggcgtgcgcgacggcaccaacatcgtgctctggaagtggtgcgagggcgacaaccagcgctggaagatcgtcccctggtaaatgtgctgttctgtggctgcactggtcatcaccatgatctgg

SEQ ID NO: 23046 - DNA, 242 bp, Zea mays
cccaccgatccatttcagccgccgccgcgcgtacaagcaggagcagcaaggatgccggctggccacgggctgcgctcgcggacgcgcgacctgttcgcgcgccccttccgcaagaagggctacatcccgctcaccacctacctccgcacctacaagatcggcgactacgtcgacgtcaaggtgaacggcgccgtccacaaggggatgccgcacaagttttaccacggccgcaccggtcgcgt

SEQ ID NO: 23047 - DNA, 239 bp, Zea mays
cccacgcgtccgcccacgcgtccgacaacttgtgggtgaaccttaaagctgtcaagagactagtagaggctgaggcacttaagatggaaattattccaaaccccaaggaagttgatggtgtgaaagtccttcaacttgaaactgcagctggtgcagctattcgtttctttgacaaagcgattggaattaatgttccccgctcaagatttctcccggtgaaggctacatctgatttattg

SEQ ID NO: 23048 - DNA, 237 bp, Zea mays
cccacgcgtccgcgcaggatggagcgcgcgctgcaggtgagcttctggtgcatccaggagcagccggggcagcgccgtccatggggaaggtggtgcagatgctggatggggttatggagctcgagaggcctccgcccccgaagtcgtcggacagcttttttagcaccaccacggccagcggcggcaactccagcatggtctcgacagtcgcctcgtcggcggcgcccccggtcgcgc

SEQ ID NO: 23049 - DNA, 239 bp, Zea mays
cccacgcgtccgcggacgcgtgggatagttagtgagctcaacctgccgaagaccacgtcaatttcttttcccaatggcaaggatgatctgatgaattttgagaccaccatccgacctgatgaaggatattacatgggaggcactttcgttttcacctttcaagtgtccccatcttatcctcatgatcctccgaaggtcaaatgcaagaccaaggtgtaccatccaaatattgatctgga

SEQ ID NO: 23050 - DNA, 240 bp, Zea mays
cccacgcgtccgcccggatcgaatgatgatgacgttctccgtcttcccatcccccaaggtgtcggacacggtggtcgaaccctataacgccacactctctgtccaccagctcgtggagaacgccgacgagtgcatggtgctggacaatgaggcactatacgacatctgcttccgcacgctgaagctgactactcccagctttggtgatctgaaccacttgatcagtgccaccatgagtgg

SEQ ID NO: 23051 - DNA, 240 bp, Zea mays
cccacgcgtccggcgccgcctctgctgcagcgggcagccgccatggcgcggcgccacgggtggcagctccccgcccacaccctgcaggtggtggctataacagtgtactctgtgctttgtatagcattctatgctttcttctctccatttcttgggaaggacttgtatcaatatatcgctgtcggtatttatagttttttgccaggctttatctgtgctgattctatatgtcagatgtac

SEQ ID NO: 23052 - DNA, 234 bp, Zea mays
cccacgcgtccgggcgctgttatgggtttcctgcttgcatcaagtgggcttgtggttctgtacatcacaattaatgtatttaagttgtattacggtgatgactgggagggtctttttgagtccatcactggctatggtcttggtgggtcgtccatggctctcttcggaagagttggtggaggtatctacacaaaggctgctgatgttggtgccgatcttgttggaaaggtcgag

SEQ ID NO: 23053 - DNA, 237 bp, Zea mays
tacgtgccttttatgaccgaagatatcccaggaggtcagtggtgatgctctgggtgaggagttcaagggttatgtcttcaagatcatgggtggatgtgacaagcaaggcttcccaatgaagcaaggagttttgacttctggtcgtgttcgtcttctgctccataggggcactccctgcttccgtggttatggcaggcgtaatggtgagcgcaggaggaagtctgtccgtggttgcat

SEQ ID NO: 23054 - DNA, 237 bp, Zea mays
cccagccgcacgaaaccctaacgccgccgccgcttcacaggtaagccgccgtcatggtctccggttccggcgtatgcgcgaagcatcgtggtggacgcgcgccaccacatgctgggccgcctgtcgtcgattatcgccaaggaactgctcaatgggcagaaggtggtcgtcgtccgctgcgaggagatctgtatgtcgggtggactcgtacgccagaagatgaagtacctccgcttt

SEQ ID NO: 23055 - DNA, 236 bp, Zea mays
ccattctcagccgccgccaatcccttcccgtgctccgcaaccgctgagtgagaagaagagatggccggcaagggcgatggcccggctatcggcatcgatctcggcacgacgtactcttgcgtcggcgtgtggcagcacgaccgcgtcgagatcattgccaacgaccagggtaaccgcaccacgccctcgtacgtcgccttcaccgactccgagcgcctcatcggagatgcggccaa

SEQ ID NO: 23056 - DNA, 237 bp, Zea mays
cccacgcgtccggaacaggaaaagaccaagcgtgagcgcaaaacaacaaaatatatgacgaagtatgaacgtgcacgcattcttggtacacgagccttgcagataagcatgaatgctccagtcatggttgagcttgagggagaaactgaccctcttgagattgcgatgaaggagcttagagcgcgcaagatacccttcacgatcagacggtacctacctgatggaagttatgaagac

SEQ ID NO: 23057 - DNA, 235 bp, Zea mays
ccgccgagcacaagagccccgagcacctcgtccgcaacccgtttggtcaggttccagctctgcaggatggtgacttacctcttcgaatcacgcgcaatctgcaagtacgctgctcgcaaaaacaagccagagctgttgagggaaggaaacctcgaggaggcagcaatggtggatgtttggatcgaggtggaggctaaccagtacaccgctgcactgaatcccatcctcttccagg

SEQ ID NO: 23058 - DNA, 231 bp, Zea mays
ccgggggtccaccacacgtgcggatcactggaatagatgacccagtgtcagagtatgcccgtggtgaaggtctggaccttgtagggaagatgttgaaaagcatgtctgaggaattcaggatacctttggagtttacccctctgcccggtatttacgcaactcaagttacaaaagaaatgctggacattaggtcaggcgaacacttgctgtcaacttcactctgcagctgca

SEQ ID NO: 23059 - DNA, 236 bp, Zea mays
gaagtttggcatgtctccatccaaaggagttctgttttatggtcctcctggttgtggtaaaaccttgttggcgaaggcaattgccaacgagtgccaggctaacttcatcagtgtcaagggtcctgaattgcttaccatgtggtttggtgagagtgaagccaacgtccgcgaaatttttgataaggctcgccaatctgctccttgtgtcctcttctttgatgagcttgactcaattg

SEQ ID NO: 23060 - DNA, 232 bp, Zea mays
ataacctgtgggcaattggaatgtcacacattagggctacatcggacccagagatttggaagaaggggccagcatttggaatgcctggggtgcatgttgatggtatggatgtcctgaaggtcagggaggttgctaaggaggcaattgagagggcaaggagaggtgaagggccaaccctagtcgagtgtgaaacatacaggttccggggtcactcccttgcagacccagatga

SEQ ID NO: 23061 - DNA, 239 bp, Zea mays
cacagtcctacgagcagtcgcacgcaagtgtcagagaggcaaaacggtcgacatggctcgcacgcaatctgccgtagcggtcgccgtggtggccgcagtgctgctgctggcagcagcggcgacgacctcggaggccgccatcacctgcaggcaggtgagctccgccatcgcgccctgcctctcctacgcccgcagcacggggtccggcccctccgcgtcctgctgtagcggcgtcagga

SEQ ID NO: 23062 - DNA, 238 bp, Zea mays
cctgaccctgaggacaagaagccagagggctatgatgatattcccaaggaaattcctgaccctgatgctaagaagcctgaggactgggacgatgaggaagatggtgaatggactgcccctaccattcccaacccagaatacaagggaccatggaaacaaaagaaaatcaagaacccgaactaccagggtaaatggaaggcacctatgattgacaacccagattttaaggatgatccat

SEQ ID NO: 23063 - DNA, 208 bp, Zea mays
gagaacagataggtccattccctattatgaaggagatgacaatcagaatgttgtagttttacgtgatattctgttaacatattccttctacaatttcgaccttggttattgccaaggaatgagtgactttttggctcccatactttatgtcatggaggatgagtctgaatcattttggtgctttgcttccctgatggaacgtctaggt

SEQ ID NO: 23064 - DNA, 231 bp, Zea mays
cacgtttaagagaccgaccaccagctgaacctccgctagattggcaaacaagacaaaggattgcattgggttctgctaggggcctgtcttatttacatgatcattgtgatccaaagattattcatcgtgatgtcaaagctgcaaatattttgttagatgaagacttcgaagctgtggtgggggatttcggtttggccaaactaatggattacaaggatacccatgtaacta

SEQ ID NO: 23065 - DNA, 227 bp, Zea mays
tctccaagatcaaggtggtgcgcacctctatcgcgcgcgtgctcacagtgatctcgcagaagcagaagtcggcgttgcgggaggcgtacaagaagaagaacctgctccccctcgacctccgccctaagaagacccgtgccatccgccgccgtctgaccaagcaccagctttctctgaagaccgagagggaacagaagcgtgagaagtacttccccatgaggaagtat

SEQ ID NO: 23066 - DNA, 232 bp, Zea mays
aagagaagaatgagagctcactttgagttcatggagaagttgggagttgacaaatggtgcttccatgacagggatattgccccggatgggaagactcttgaagaaacaaattctaacttggatgagatagtccagctggcaaagcagctgcagggtgagaccaatataaagccattgtggggtaccgcacagctctttatgcatccacgttacatgcatggcgctgctacga

SEQ ID NO: 23067 - DNA, 231 bp, Zea mays
cccacgcgtccgtggaggctgagctcgaccttgccgtctgcattacagaaggaatacctcagcatgacatggtgaaagtgaaggctgcactaaacagccagtctaaaactcgattgattgggccaaattgccctggtatcattaagcctggtgagtgtaaaattggaatcatgccaggttacatccacaagcctgggcgtattgggatcgtatctcgttctggtactttga

SEQ ID NO: 23068 - DNA, 221 bp, Zea mays
cccacgcgtccgggaagagaaagccattggacggggaatccttcccttgcttcagcgtgctacgttggttcagacctttggacagaagaaccatgtctgcctgaaggatgggtccatcacgatcccgccatatgcgcctcctcagaaaatgcagactcaccttatccccccggacacccctcgatccatctttgtgtacttccgaggtctgttctatgaca

SEQ ID NO: 23069 - DNA, 181 bp, Zea mays
ctagggttaacatttcgtcaggttaacaaatggtttgaaactaggcgtcattccgcaagggtagcttcttccaggaaaggcatcagtctagataagcatagcccccaaaatactaatagtcaagtgacagctagtatggaacctaaagaacctgaggggactgtggtggaagaatctaatg

SEQ ID NO: 23070 - DNA, 228 bp, Zea mays
cccccactcagaaaacccagccgccgccgcatcggcctcccaggtaagcagtagcgtccaccccagccgccgccatgaagcgcaacccccgcgtcacgagctcccgccggaagtgccgcaagcgcacttcacggccccgtcctccgtccgccgcgtgctcatgtccgcggcgctatcgacggagctccgccacaagtacaatgtgcgttccatcccgatccgcaagga

SEQ ID NO: 23071 - DNA, 233 bp, Zea mays
ctttctttagtaagtattcaccggctatcgatatgtggagcatcggttgcatttttgcggagattttgactgggaagcctttattccctggtaaaaatgtggttcaccagctggatttgatgactgatctcctgggtacaccatcagcagatactatttcacagattcggaatgagaaagcaaggaggtatctaagcagcatgaggaggaaacagccaatacccttctcagag

SEQ ID NO: 23072 - DNA, 148 bp, Zea mays
  unsure (1)..(148): unsure at all n locations
cccacgcgtccgcggacgcgtgggnggctcagattgaggtccttaggaagaagggccactcttactcagagataattaatgagagcctgatcgagtccgtggactcgttgaacccgttcatgcatgctcgcggtgtggccttcatggt

SEQ ID NO: 23073 - DNA, 102 bp, Zea mays
ctttgattctgaccaatctctctggcctgctgcttcctgataatcgaccagttccccagtcttgctccttgcactcctccctcctccatctccagcattgtg

SEQ ID NO: 23074 - DNA, 224 bp, Zea mays
gtgcatcaggtgaagaagctccgtgacatgagcccactctatgagatggccaaggctggcattgacctcaagagcatcgagtggtcacaacattgaggcagttttcatgacaaacggtcactcgaaagcgtacacggatcgcatacataggcttatggtgctgctggtgagtacgttcatgtggtgctcctacctctgataggattatcacacttttttagctc

SEQ ID NO: 23075 - DNA, 222 bp, Zea mays
ttctcaatggaggttctgcacaatcaggagtatcaggcctgatagtacctgcagcaactgtaggagcactgggttacggttatatgtggtggaaggggatctcgttctcagatctaatgtatgtcaccaagcgcaacatggcaaatgctgtttcaagcatgactaaacatttggagcaagtgcaaagttctcttgctgctgctaaaaggcatttgacacagc

SEQ ID NO: 23076 - DNA, 224 bp, Zea mays
ccaagatccaggacaaggagggcattccaccggaccagcagcggctgatcttcgccggcaagcagctggaggatggtcgcaccttggctgactacaacatccagaaggagagcaccctccacctggtgctccgcctcaggggtggtatgcagatttttgtgaagacattgactggcaagaccatcaccttggaggtggagtcgtctgacacaatcgataatgtc

SEQ ID NO: 23077 - DNA, 215 bp, Zea mays
ctattctgctaggggtcctgaccctgaggacaatacactgtcaaatgctgatatcttgaaaccaaatctagtagcaccgggaagttccatttggggtgcttggagttcagttggattggattctgctgaatttgctggtgaaagtttcgcaatgctctctggcacaagtatggctgcgccccatgtcgctggcctcgccgctctaatcaagcaga

SEQ ID NO: 23078 - DNA, 115 bp, Zea mays
ccttagcatgttcactgcaagggagatggggaaagttttcttcacaaacagtggttcagaagcaaatgactctcaggtcaaactagtatggtattataacaatgcattggggagg

SEQ ID NO: 23079 - DNA, 204 bp, Zea mays
cggacgcgtggcgcgtacctgccgcagcgtgtgcatgtcaggaatgggccgccatgtttctttcgaccgagctgtagcgtggaaggtgctcggcgaggatagcaacatccactgcctggcgttctgcttcgtcaactggtccttcgtgtgactgaagtccaacccgtcgggtggttatggcgagctgacccattttttttttgg

SEQ ID NO: 23080 - DNA, 215 bp, Zea mays
cccacgcgtccggtgctctggaagtggtgcgagggcgacaaccagcgctggaagatcgtcccctggtaaatgtgctgttctgtggctgcactggtcatcaccatgatctggagctttgaaggcatagccacctgtggtcagcagctgctgccgtgttgctagaataaagttggtggcgatcgatcgatcgatctttggtgatgggtgtccctccc

SEQ ID NO: 23081 - DNA, 214 bp, Zea mays
gccatgaccagggccaaggtgctggacattgacctgcagaagcagctcaggccctacatggagtccatggtgccacttcccggtgtctatgatccggacttcatcgccgctaaccagggctctcgtgccaacaatgtcatcaagggcaccaagaaagaacaggtggagcagatcatcaaggatatcagggagtttaaggagaagaacaaagtgg

SEQ ID NO: 23082 - DNA, 214 bp, Zea mays
cccacgcgtccggttgagatcctgaaatctactatggtagagaagctccccaatgatctggaaggaatggagtcatcgatggggaagctttacattcttatcgatgagatctacaaatacgtcgatgatgttgtggaaggacgcgtggcacccgacaacagaattggaaggttcatctctgattcttttgcttcggtgccgaaattgtccccgg

SEQ ID NO: 23083 - DNA, 255 bp, Zea mays
aatggatcctagcttgccgacctttataattgcagagtgtgtgcttatttacctggacccaactgccactggtgctattgtgagttgggcatctcaaaagttctccactgctgtctttttcttatatgagcagattcatcctgatgatgcatttggggagcaaatgattagaaatcttgagagtagaggatgcccccttctcggtataaatgctacaccaaccctgagtcacaaggagaaactttttcttggcaa

SEQ ID NO: 23084 - DNA, 250 bp, Zea mays
accaccacatccagctgatcaaggagaaggggaacttcagccagcttgagaatgaccacgagaagacattgcgcacgaggggaagctgtactgcaagcaccaccacatccagctgatcaaggagaaggggaacttcagccagcttgagaatgaccacgagaagacatcacaggctgggtcactggaggaggatgaacaagagtattgatcactgagcacaaccacagatgaataatgaatcctcttgcat

SEQ ID NO: 23085 - DNA, 248 bp, Zea mays
gaaggagaaagttcttagcgagaatgccaccgccacaaatgctgccccagtgcttgctgctaggcgcaaggagattgctcacgaagataagcccctggttgccacaaaactcaatgcctttgaaatcatcgcgttctcagcagggttggacctttctggtctgtttatcaaggaatgcaggaaggagacaaggttcacttcagataagcctgcattggccatcatctcaaagcttgaagatgtcgcga

SEQ ID NO: 23086 - DNA, 248 bp, Zea mays
caattggtaaacaagcagaagccaatctggatgaggaagcctgaggagattaccaaagaagagtatgctgctttctacaagagcttgaccaacgactgggaggagcatcttgccgtgaagcacttctctgttgagggccagcttgagttcaaggctgtactctttgtgccaaagcgggcccccttcgacctctttgacaccaggaagaagcagaacaacatcaagctctatgtgcgacgtgtcttcat

SEQ ID NO: 23087 - DNA, 250 bp, Zea mays
cttcaggtctgcagcccccaactacccccagcctcggaaggaaccttccagaagcgcaagactctaaggccgtcgccttcccattcttcctcgccgcgggggtcgcctgagatcacataaacaatggtgaaggctgttgctgtgcttggtagcagcgatggtgtcaagggcaccatctttttcacccaagagggagatggccctaccgctgtcaccggaagtgtctctggcctcaagcctggcctccatg

SEQ ID NO: 23088 - DNA, 250 bp, Zea mays
gaagaacgagcaggcgatttctgaggttctctgctggtctcgggatccctccgagcttagaagttttatcacagtattgcgagtcatggagtagagatgatgctcaaaggcagtacattgtagaacttggtataccagaagaatggatgcatgaagctctggctctttatcacgaatactatggagataaacagggcgcactggagaatttgattcagtgtggcaactggaagaaagctcatactatttt

SEQ ID NO: 23089 - DNA, 225 bp, Zea mays
cgcgcgcaacgagttcaacccccactccaaggccaccatcggggtggagttccagacgcagagcatggccatcgaaggcaaggaggtcaaggcccagatctgggacaccgccggccaggagcgcttccgcgccgtcacctccgcctactaccgcagcgccttcggcgcgctcctcgtctatgacattacccgccgctccaccttcgacaacgtcggccgctggct

SEQ ID NO: 23090 - DNA, 123 bp, Zea mays
accagttcctctgacggccgccgtgctccgatgaagctgagcgtgctccgtatccgctgctcgcactccttctccgtcgccttcctctactggttctacgtcttctcatgaacgcatctcccc

SEQ ID NO: 23091 - DNA, 244 bp, Zea mays
gagaaacaggggaaatatttggattctgcagattctctaataaggctgacaacagtcatgtcctatttataactgtgatggaaggcgattatggaaaaatagtgtcttggaatactacctcatggacgagaaccggatcaaagaaaataactcgtgaggcaatttcagcttttgctgtgtcacccaacggtgctcttcttgcaattggaacaatagaaggaagcatcatcgtagttggctcaaa

SEQ ID NO: 23092 - DNA, 222 bp, Zea mays
cccacgcgtccgcccacgcgtccgcccacgcgtccgctcctctccctgaagaacctacaggaagcagggaccttctctgcagggttgcgattcggctaccgaacaaccggaggatccaaagaaacttccttcacacacatcctatcaagctcttgtggtcattctgcgctcctcaagtcgaggacggggagaggagggctttccacttcgtccaggcaattc

SEQ ID NO: 23093 - DNA, 241 bp, Zea mays
cccttcagcgtgtctcctacctcaacatgacagtctacccagtcacatcagtcttcatcctaatctatgctctaagcccggtgatgtggcttatccccgatgaagtatacatccagagaccattcactaggtatgtcgtgtaccttcttgtaatcatcgtgatgattcacatgattggctggcttgagataaagtgggcgggggtcacatggctggactattggcgcaatgagcagttctt

SEQ ID NO: 23094 - DNA, 238 bp, Zea mays
cccacgcgtccgcccacgcgtccgcttgtttaccattcctccccaaaacacatcctgcgatcctcgaagcctccgccgagcatcgatcatgtcggcctactgcggcaagtacgcggatgagctcatcaagaatgctgcctacatcggcacccctggcaagggtatccttgctgctgatgagtcaactggcaccattggcaagcgcctttccagcatcaatgtcgagaacgtggaggag

SEQ ID NO: 23095 - DNA, 239 bp, Zea mays
cccacgcgtccgcggacgcgtgggcggacgcgtgggtagtgcttcccaccgatccatttcagccgccgccgcgcgtagcaagcaagagcagcaaggctgccggctggccacgggctgcgctcgcggacgcgcgacctgttcgcgcgccccttccgcaagaagggctacatcccgctcaccacctacctccgcacctacaagatcggcgactacgtcgacgtcaaggtgaacggcgccgt

SEQ ID NO: 23096 - DNA, 239 bp, Zea mays
atctctggtttcgaaggtgacaacatgattgagaggtccaccaaccttgactggtacaagggcccaaccctacttgaggctttggacttgatcaatgagccgaagaggccttcagacaagcccctgcgtctccccctacaggatgtgtacaagattggtggtattggaactgttcctgttgggcgtgttgagactggtatcatcaagcctggtatggttgttacctttggtcctagtgg

SEQ ID NO: 23097 - DNA, 241 bp, Zea mays
gctcgctctggtacgagctggcctacagcgaggccaaggggaggatccggcgccgccaccgggtgtggcagatcgcgttcgggtcagggttcaagtgcaacagcgccgtgtggagggcgctccggtcggtgaacccggcggaggagacgaacccgtggatggacgagatcgacaggtttcccgtggatgttcccaaggtctctaaggtttcaagcgactgaaatgcattgctagttgcgtg

SEQ ID NO: 23098 - DNA, 236 bp, Zea mays
cgtcggactcggatccgcccgaccacgaccaccccgcgccgccgccgcgcacagcagcagatcagagaagatggccggactcgacaccttcctcttcacctcggagtccgtgaacgagggacaccctgacaagctctgcgaccaggtctcagatgctgttctggacgcttgccttgctgaggaccctgacagcaaggttgcttgcgagacctgcaccaagaccaacatggtcatgg

SEQ ID NO: 23099 - DNA, 235 bp, Zea mays
ccattcctcgcgcggcgaccacccgattcgaagcgtgcggagagaccgaagaagcgggagagatggctcgtaccaagcagactgctcgcaagtccacgggagggaaggctcccaggaagcagcttgccaccaaggctgcccgtaagtctgcccccaccactggtggagtgaagaagcctcaccgctaccgccctggaactgttgcactccgtgagatccgcaagtaccagaagag

SEQ ID NO: 23100 - DNA, 234 bp, Zea mays
gtaacaagctatatgacaagtacagtgattttgtcacgtctgacgacaaggaaggtttgattgctaagcttcaggaggttgaagactggctctatgaagatggcgaggatgaaactaagggggtttatattgctaagctagaagaacttaaaaaagttggtgatcctattgagctgcgcttcaaggaatgggagattagaagttctgctgttagccaactggtatactgcatca

SEQ ID NO: 23101 - DNA, 234 bp, Zea mays
cgattgcggcgatggaggtccatttggagcagttgtcgtccgtaatgatgaagtggttgttagctgccataacatggttctgaagcacactgaccctactgcgcatgctgaagtaactgcaattagagaggcttgcaaaaagctcgggaaaatcgagctctctgactgcgaaatttacgcgtcctgcgagccatgcccaatgtgctttggtgcagttcatctctcccgaatcaa

SEQ ID NO: 23102 - DNA, 234 bp, Zea mays
cccacgcgtccggatctcgagtgcaacgcaacgttggcgcttggcggccagtagtagcagctaatttagcgtcgctccttcctactagacgagagatcgagaaaccatggccaagctccaagtcactcctggcgccgcgttcaccgagtgcaatgaactcaacttccagggcctgtacatgtaccacacgcccctgggtcccaaggccaaccaagctgcgatcctagagagcaa

SEQ ID NO: 23103 - DNA, 230 bp, Zea mays
aactttcagtgttcctgctatgtatgttgctattcaagctgtcctttccctatatgctagtggccgtaccactggtattgtcctggattctggagacggtgtcagtcacactgtcccaatctatgaaggctatgccctcccgcatgccattcttcgtctcgatcttgctggtagggaccttactgattccctcatgaagatcctgactgagaggggttactctttcacaa

SEQ ID NO: 23104 - DNA, 226 bp, Zea mays
ggtgaccggcgggaggaacaccgggcgtgtaggtgtgatcaagaacagggagaagcacaagggcggcttcgataccatccacgtcgaggactccatgggccaccagttcgccacccgcatgggcaacgtgttcaccattggcaagggcaacaagccgtgggtgagcctgcccaagggcaagggtatcaagctcagcatcatcgaggagcagaggaggcgcgacttt

SEQ ID NO: 23105 - DNA, 225 bp, Zea mays
gggcagtctcctcaacagtatggggaatcgtggctgataagtatggaaggaaaccagttatcgtactgacccttattgcaatagttatcttcaatactatgtttggactaagctcaaactattggatggcattaatcacacgatgcctgcttggaatcatgtgtggttatctcgggccaattaaggcttatgctacagaagtgtgccgaaaagaatacaatcatc

SEQ ID NO: 23106 - DNA, 228 bp, Zea mays
gtcctggagaacttgcagatcgaggaatgcagcagggttactcttacgggcattcttgcgttcctcctcaactgcagcccaaagtttaagtctctctccctgtccaagtgcgtcgggatcaaggacatctgctccgcacctgcacaacttccggtatgcaaatcactacgttccctggccatcaaggattgcccaggcttcaccgacgccagccttgccgtggtgggc

SEQ ID NO: 23107 - DNA, 227 bp, Zea mays
gatgactgtcattaggcctgctgacatggatgctctacaaaatgcgttggacaacaataatgtatctcttttcttcacggagactcccacaaatccatttctcagatgcattgatattgaacatgtatcaaatatgtgccatagcaagggagcgttgctttgtatcgacagtacttttgcctcccctatcaatcagaaggcactgactttaggcgctgacctagtta

SEQ ID NO: 23108 - DNA, 230 bp, Zea mays
gcagctccagagtacattgcaacaggccgcctctctgcaaaggcagatgtctatagcttcggggtggtgttgcttgaactgctcactggaagaagggctctggataaatcaaaaccaggctttgagcagaacctagttgactgggccagacctcacctgggcgacaagcgcagactgtaccgtatcatggacacgaagctgggaggacagtaccccaaaaagggcgcaaa

SEQ ID NO: 23109 - DNA, 227 bp, Zea mays
cccacgcgtccgggtatcggtcgctgcacactgtcatcatgtgtgagggtgtccatccatttgaaatccagatccgaacaaaggaaatgcacctacaggctgaatatggattcgctgcgcactggaggtacaaagaaggtggctgcaggcactcctttgtgctccaaatggtggaatgggcgaggtgggtgctcacatggcaatgcgagacattgagcaaagagcgt

SEQ ID NO: 23110 - DNA, 228 bp, Zea mays
acagcacctcgccggcatccaggaccacgtcaacttcaccatgcagcaagcatacttcaagtgcgcatatgattgcttcgatcggcgccgtactcaggaagcgatcaacaattgtgtggagaattgtggtatgcctgtccttgctgtcaacaatgtttttgagagtgagatggccaagtttcaggaacggttgaaccggtcattgatggtctgtcaagataagtttga

SEQ ID NO: 23111 - DNA, 223 bp, Zea mays
ctcacatgatgccactaacaaattcaacatttaccctgagcaaatcccttcctggcttgttgactggattcctgagaaaggaggttaccttatagggaatctgcagccagctcacatggattttaggttcttctctcttggtaacctttgggctatagcttcgtctctaactactccaaaacaagctgagggaatccttagccttatcgaagaaaagtgggat

SEQ ID NO: 23112 - DNA, 222 bp, Zea mays
gagaaaacacactacgccgcaagggattctatcacggccttgaagaagtacatcatagagcagaacctcgcaaccgaatccgagctgaagagcatcgagaagaagatcgacgatgtcgttgaggaggctgtcgagtttgctgacgcgagcccgcatccgccgcgcaccagctgttggagaacgtgtttgccgaccccaaaggctttggtatcggccccgatg

SEQ ID NO: 23113 - DNA, 221 bp, Zea mays
ccgacatcgtcccttcgtccccacgagcaaccgataatccgccggcgttgagatgttggtttatcaggatctcctatctggcgacgagctcctgtcggattcattcacctacaaggagctcgagaacggcgtcctgtgggaggtcgagggaaagtgggtcacccaaggtcctgttgatgtggacattggtgccaatccatccgccgagggtggtgaggacg

SEQ ID NO: 23114 - DNA, 219 bp, Zea mays
gtttgagacgaacgtggacggtgaatctttgctagcgttgtgcgagctggtcgataggtacttggctgaagttgcctctgatccaaacctgtctgggtcgagctttgtggatttggcgacttccatgcctgaaacagccagaccgacacatgatggagtgtacactgccattgacgtatatctgaggttgcatcccggtctacccaagatggagaagag

SEQ ID NO: 23115 - DNA, 221 bp, Zea mays
gacccacgcgtccggacccaaattatgtttgagactttcaatgttcctgccatgtatgttgcaatccaagcagttctatcactctatgctagtgggcgtactactggtattgttcttgactctggtgatggtgtgagccacactgtgcccatttacgaaggatatgcccttcctcatgccattcttcgtttggatcttgctggtcgggacctcacagactc

SEQ ID NO: 23116 - DNA, 221 bp, Zea mays
ggaaagggtttagctggtgctttaaagattcttaaggagcgaggaagcctcaacgagggaacagattggggaggcagaacaacagacaagaaaaagagcaagcttataggtgtcgaggatggacctaaagacattcgcattgaaagaatagatgaatttggcagagtgatgacacctaaggaggcattccgtcatctttcgcacaagtttcatggcaaggg

SEQ ID NO: 23117 - DNA, 223 bp, Zea mays
caacatccctgcgcacatttcaccatgcttccgtgtcaaggaaggagatcatgtgatcattggccagtgcaggccagtgtcgaagactgtaaggttcaatgttgtcaaagttattcctgcaggttcgaagagtggagcagtgaagaaagctttcactgccgcttaagatcatgacgagttcatcatccatggcccggaaaagctctgtgttataacgttttga

SEQ ID NO: 23118 - DNA, 225 bp, Zea mays
cgttcccgttggtcgccgccgcggggccggccgcggcggcacacggtggccgacctggacggccgcccggccacgcgagaagcagcccatcatcgtcatcgacaactacgacagcttcacatacaacctctgccagtatatgggggagcttggattgaacttcgaagtataccgcaatgatgaactgaccatagaagatgtgagaaggaagaacccaaggggaat

SEQ ID NO: 23119 - DNA, 225 bp, Zea mays
atcgccgccgaaatcccgttgcgtctctcgcgcgttaccaagctctcaagttttctcgcgccgacggcaatggatgaggtcaccgaggccgtgaacaacctcaacatctcgggcgtaggggccgcgggcgttgccggggcggaagggcacaagaagaatcgcatccaggtctccaacactaagaagcccctcttcttctatgtcaacctcgccaagaggtacatg

SEQ ID NO: 23120 - DNA, 223 bp, Zea mays
cggacggtgggcggacgcgtgggcggacgcgtgggcggacgcgtgggcggacgcgtgggagaatctattacacagagtactcgagggtggaaggagcgattgttttcacgtaattcatccgtggcggatcttggttctgaagtgagaagagaagttaatgctggaattgcgtccgtatcacggatgatggagcgtctggaaactagaggaaatagcagaacaa

SEQ ID NO: 23121 - DNA, 215 bp, Zea mays
aatagaagcaaactcaacaaacaaagactgcataaaaatgcttgttggaaacaaagttgacaaggatgatgaaagaatggtcacagaagaagaaggtcttgcttttgctgaagaatctggttgtctgtttcttgagagcagtgcaaaaacacgagaaaatgttgagaaatgttttgaagaacttgcattgaaggtatgcttggagaaagatatta

SEQ ID NO: 23122 - DNA, 214 bp, Zea mays
caactctctctaccgtccgataccccaagcaccagcgcggcggcggcgaccatggctgtcggaaagaacaagaggatctccaagggaaagaagggtggcaagaaaaagaccgtcgaccctttctctaagaaggattggtatgacatcaaggcaccgtcggtgttcagtgtgcgcaacatcgggaagactctcgtatccaggacacagggtacca

SEQ ID NO: 23123 - DNA, 215 bp, Zea mays
ggaagaacttaacaatggacgatgtccatgacatccatggtctacggcttgtggttgaaacagaggaagattgttatcgagcacttgacatagtgcacaagctgtggccccgagttaccggaagatttaaagactatatttgtcatccgaagttgaatgggtatcggtcgctgcacactgtcatcatgtgtgagggtgtccatccatttgaaatc

SEQ ID NO: 23124 - DNA, 220 bp, Zea mays
gtgccaggcttcatcacacaggctgagcagctcaaagccaagggtgtagacgagatcctgcttatcagcgttaacgaccccttcgtcatgaaggcgtgggcgaagacctaccccgagaacaagcacgtgaagttcctcgccgacggatctggagcgtacaccaaggcgctcgacctcgagctcgatctcacggacaaagggctgggcgtgcgctcgaaga

SEQ ID NO: 23125 - DNA, 223 bp, Zea mays
aactgatgttgtggaagcctgcactggggtcaatgtggccgtcatggttggtggattccccaggaaggagggaatggaaaggaaagatgttatgtcgaaaaatgtttcaatctacaaatcccaagcatctgcccttgaagcccatgcagctcccaactgcaaggttctggtggttgccaacccagcaaacaccaatgctcttatcttgaaagaatttgctcca

SEQ ID NO: 23126 - DNA, 215 bp, Zea mays
gtcttgctcttagtacaatggagctgagtcaaatggtgacacaaggcatgtgggatcgggattctgtgctgcttcaagttccacacttcacaaaagacttggctcggaggtgccaggaaaatgaagggaagcccatcgagagtatctttgatctagctgagatggctgtcgatgagatgcgggatctcttacaactatcgaactctcagctgcaa

SEQ ID NO: 23127 - DNA, 217 bp, Zea mays
ggacacgacccgctcttctactcgcaccactccaacgtcgaccgcatgtcgcacatctggtcgaccaggctcggcggcgggcagggcatcacggaggcggactggctcgacaccagcttcgtcttctacgacgacgtcaagagcccgcggaaggtgcgcatcaggttccgcgacgtcctggacacgcgcgacctcggctacacgtacgacgccgagt

SEQ ID NO: 23128 - DNA, 216 bp, Zea mays
gcagatatcaactatgttcacgcaccaccagaagatagtagtagtcgaccatgagatgccgaaccagggatcccagcaaaggaggatagtcagcttcattggtggcattgacctttgtgatggaagatatgatacccagtaccactccttgttcaggacgcttgacactgtccatcacgatgacttccaccagccgaactttgagggtggatcaat

SEQ ID NO: 23129 - DNA, 223 bp, Zea mays
cccacgcgtccggtcgcttccagactaccgatgagaagcagaggttctttggcaagctcaaggcgtaaggcgctgcggtgcacgaagtcccatttctcaaaatcatcaaactgtgatacttttgtttgtaaccttgctgtaccaagttttgtagccggatggtttaggagcatggtccggtcttctatggatcgttccatgcttcagaactgtagtgtctatg

SEQ ID NO: 23130 - DNA, 221 bp, Zea mays
atttaagttggattatataatctagaaggtaaataagttaaaaatcaaacaaacaatacagattattaggtgaattatataatctagatacctagattatgataaatccataaccaggtcactaggtgcttacataatccataagctggattatatgatcctggaagtaaacaaacagggccaagtctcttacaatttgccttgtttgccatgaccttctg

SEQ ID NO: 23131 - DNA, 224 bp, Zea mays
cagtgcagtcgcctttatgactcctcaatctcaaatgccaattttgagcttgatgcgagtcgcattgctcaggaacttggagggaccaccactgtaatggagagagagaaggcttccattcaagagttgatgaatgttgtcaatgaaatgatgtggaacacagaatttggtattaggtcatatctgatgttgaggccaagattcacccgtccaagtgctggagt

SEQ ID NO: 23132 - DNA, 219 bp, Zea mays
gcagcattatggcctgagcaagactgcaaatgaggtgactatcctcatagaggcctacaggaccctgagggacaggggccctgtcccagccagccaggttgtgagagaccttagtgggaagttcgcgttcatcctgtatgacaccctgtcgaagtccacctttgttgctgctgacgctgatggtagcatccctttcttctggggcgttgactacgaaaa

SEQ ID NO: 23133 - DNA, 219 bp, Zea mays
gaccgggatgatctacctgatcagggcagtggtcactttgctgacacagtacagaagctaaaggctttgaagccagacatgcttattgaagcgcttgtacctgatttccgtggagatccaagctgcgtagagaaggttgcgacttctggattgcatgtttttgcgcacaacattgaaactgtggaagagcttcaaaggaatgtcagagactaccgtgca

SEQ ID NO: 23134 - DNA, 215 bp, Zea mays
ctccctcttgccggtcccgaataaagagcagcagcgcaagaggtcggtagagcgagaagaaggcaatggcggccgagagcttccttttcacctcggagtccgtgaacgaggggcaccccgacaagctgtgcgaccaggtgtcggacgccgtgcttgacgcatgcctcgcgcaggaccccgacagcaaggtggcctgcgagacctgcaccaagacc

SEQ ID NO: 23135 - DNA, 208 bp, Zea mays
cccacgcgtccgcgccgggcccggcggcagcatgctgcccatgctgccgcgctgctccgcctagcagacttcgacgcaatgagcctcggctccagcttctacgggatatcgtccatggggaagcccggatccatcggcgcggcctgctacccgcactctgtcggcgggctggagcagtggagggtgcagcagatgcagaacttcccgt

SEQ ID NO: 23136 - DNA, 207 bp, Zea mays
aactggtgttcatctaactgcttactcaccactaggttcacctggtacaacttggatgaatggtaatgtccttaaagaaccaataatcatctcaatagctgagaaactcgggaaaacttctgcacaagtggctctgcgctggaacattcagatgggtcacagtgttcttccaaagagcacgaatgaagaaaggataaagcaaaacct

SEQ ID NO: 23137 - DNA, 204 bp, Zea mays
caactacccccagcctcggaaggaaccttccagaagcgcaagactctaaaggccgtcgccttcccattcttcctcgccgcgggggtcgcctgagatcacataaacaatggtgaaggctgttgctgtgcttggtagcagcgatggtgtcaagggcaccatctttttcacccaagagggagatggccctaccgctgtcaccggaag

SEQ ID NO: 23138 - DNA, 209 bp, Zea mays
cattccactccgacattcacgtgcagctgtcgggagcaggcaatggcgccggatctaagcgaactcgccgccgccgctccagcccgtggcgcctacctcgccggcgtcggtgtcgcggtcctcctcgctgcctccttcctcccagtagccgagtcgtcctgcgtgcgagataactcattggtgagagacataagccaaatgccgcaaag

SEQ ID NO: 23139 - DNA, 214 bp, Zea mays
tgctggacgatctcaaacatcacagctggtaacaaggagcagattcaggctgtgatcaatgcaaatataattgcacctctggtgcaactcctgcaaactgctgaatttgacatcaagaaagaagcagcctgggcaatttcaaatgccacttctggtggcacacatgatcagatcaagtaccttgttgcccagggttgcattaagccactctgtg

SEQ ID NO: 23140 - DNA, 197 bp, Zea mays
ggtctccggggtgcactggtggtataaaactgccagtcatgctgctgaattgcctgccggattttacaacccgtgtaaccgtgatggctatgctccaattgctgcagtattaaagaaatacgatgctgctttgaactttacatgtgttgaattgcgcaccatggaccagcatgaggtataccctgaggcatttgcag

SEQ ID NO: 23141 - DNA, 263 bp, Zea mays
ggaaggggttcccgtcgtacttggcgatgaagacggggccggagggcggcgacggcgcggcggcggcggcgcacaggcgctcatcgacgcggacctgcggaacctcggcgtcgccgcgcgaaagctcgccaaccacgccttcgtcctcggcggcgggttggggttcggcacttccttcctcaagtggctggccttcctcgccgcagtgtatctcttgatattggaccgcacgaactggaagaccaacatgctgacagctctct

SEQ ID NO: 23142 - DNA, 253 bp, Zea mays
gctcgcgacgctggcgctggccgtgctcctggcggcgaccgtggtggctcccccggccgcggtgcgcgcggcgatgtcgtgttccaccgtgtacagcacgctgatgccgtgcctgccgttcgtccagatgggcggggccatgccgccccatccgtgctgcggcggcatccgcagcctgctggcacagccaacaacacccccgaccggtcgcacatctgcggctgcctcaagaacgtcgccaacggcgccaacg

SEQ ID NO: 23143 - DNA, 192 bp, Zea mays
ctccagaacgccttcagcacctacggcgaggtcctcgagtccaagatcatcctcgatcgggagacgcagaggtcccgcggcttcggcttcgtcaccttctccacggaggaggcgatgcggaacgcgcatcgagggcatgaacggcaaggagctggacggcggcaacatcaccgtcaactgggcccagtcccg

SEQ ID NO: 23144 - DNA, 263 bp, Zea mays
ggagcatgtcatcaagcctgtcatccctgagcagtaccttgacgagaagaccatcttccaccttaacccatctggccgctttgtcattggtggacctcacggcgatgctggcctcactggccgcaagatcatcattgacacctacggtggctggggagcccatggtggtggcgctttctccggcaaggacccaaccaaggttgaccgcagcggagcctatgtcgcaaggcaggctgccaagagcatcgtcgccagcggccttg

SEQ ID NO: 23145 - DNA, 268 bp, Zea mays
ggcacaagagctcagggaggcaaggacgctgcaagtcctcggtatatcttcaccaagctgtctaatattacacgttcaattttcccgaagatgacgatattcttcttaattatctgaatgaggatgggcagtcaattgaacccacctggtatatgccaatccttcccatggtattggtcaatggaagtgaaggaattggaactggatggagcacatatattccaaactacaatccaagagacattgttgctaacgtcaggcggttgtt

SEQ ID NO: 23146 - DNA, 264 bp, Zea mays
ggacgcgtacgcccacgcgtccgggtgctccgggggtcggtttcgtgggtgagcgggtcgagagggcgagcgtcggatgttgagtagcgctgcgtcgtcggctgcctcgcctggtccgcggacgacgactccctccacaacgccttcagcacgtacggcgaggtccgcgagtccaagatcagcctcgatcgggagacgcagatgtcccgcggcgtcggcttcgtcaccttctccagcgaggaggcgaggcggaagccatcgagg

SEQ ID NO: 23147 - DNA, 213 bp, Zea mays
cccacgcgtccgcccacgcgtccgcccacgcgtccgcccgagtcccgacggcctccagctccatcttgattcttgaggcgaacccggtgcgtaagagtctgccatggccagcgagaataaggtctttgggttcgaggaagtcgccaagcacaacgtcaccaaggactgctggatcatcatcgccggcaaggtgtatgacgtcactccgtttat

SEQ ID NO: 23148 - DNA, 256 bp, Zea mays
accgcctatctcgccaagcaccgccgcatcaccgaagttcgcaaagatggcggtgccgctgctgacgcagaagatcgtgaagaagagggtcaagcagttcaagaggccccatcttgaccgctacaagtgccttaagccaagctggcgcaggcccaagggtatcgactcccgcgtcaggcgtaagttcaagggatgcaccttgatgcccaacattggatatggctccgacaagaagaccaggcactaccttcccaac

SEQ ID NO: 23149 - DNA, 260 bp, Zea mays
cccacgcgtccgcgcgcgaccgatctaccgccgccgccaccatgtcgctgatcgccggcgaggacttccaacatattctgcgtctgctgaacaccaacgtggatgggaagcagaagatcatgttcgccatgacctccataaagggtgttgggcgccgcttctcaaacatcgtctgcaagaaggccgacatcgagatgaacaagacggccggtgagctgacccctgaagagctggagcgcctgatgacggtcgtggccaac

SEQ ID NO: 23150 - DNA, 260 bp, Zea mays
ccggcattctcgagcatagcttctctgcctctctctcccctcctctcctctcgtccactcctttgtccaaagcttcgagatggctcagcagcagaaggtggtggtcagggttccaaccatgacagatgacaagatcaagcagaaggccatcgaagctgttgcggacatttacggtattgactccatagcagcggatctgaaggagaacaagatgaccatcataggcgagatggatgcagtagcgattgccaagaagttaa

SEQ ID NO: 23151 - DNA, 258 bp, Zea mays
tgaagaagaagggctatgaagtcctgtacatggtggacgccatcgacgagtatgctattggccagctcaaggagttcgagggcaagaagctcgtctcggccaccaaggagggcctgaagctcgatgagagtgaggatgagaagaagcggaaggaggagcttaaggagaagttcgagggcctgtgcaaggtgatcaaggaggtgctgggcgacaaggtggagaaggttgtggtctctgaccgcgtggtggactccccct

SEQ ID NO: 23152 - DNA, 266 bp, Zea mays
ccgcctctcgagtctcgtccacccgtcgtcctcctagctcctctactcgccagtcgccatgggcaagattaagatcggaatcaacggcttcggaaggatcggcaggctcgtggccagggtcgccctccagagcgaggatgtcgagctcgtcgccgtcaacgaccccttcatcaccacggactacatgacctacatgttcaagtacgacaccgtccacggccactggaagcacagcgacatcacactcaaggactccaagacccttc

SEQ ID NO: 23153 - DNA, 268 bp, Zea mays
cccacgcgtccgcggacgcgtggggcatcgacttctactccaccatcacccgtgccaggtttgaggagctcaacatggacctgttcaggaagtgcatggagcctgttgagaagtgcctgagggatgccaagatggacaagagcaccgtccatgacgttgtacttgttggtggctccactaggatccccagggtgcagcaactgctccaggacttcttcaacggcaaggagctgtgcaagaacatcgaccccgatgaggctgtcgccta

SEQ ID NO: 23154 - DNA, 254 bp, Zea mays
gcttgggcccatccaaagtatggtgcaatccttgcatcgtgcagttatgatggccgtgtcattatttggaaggaggatgcacgaggcaattggtctcaagtccacgtcttcagtgacaacaagtcatctgtcaactccattgcttgggctccgtatgaggttggcctctgccttgcctgtgcatcttctggtggaagaatatccatcttgacgatgcaagctgacgggggttgggatactgcaaccattgagcg

SEQ ID NO: 23155 - DNA, 253 bp, Zea mays
cagctgcagcgtgctatacgaatgcagttgccctgagctggaggagcttgtgaaggtctgcagagacaacggagcactgggagcacgtctgacaggagctgcgtggggtggctgcgcggttgctctggtcaaggagcccatcgtccctcagttcattctgaaactaaaggaaatgtactacaaatcaaggattgacaggggagtaatcaagcagggcgatgtgggcctgtacgtgttcgcatccaagccgtcg

SEQ ID NO: 23156 - DNA, 252 bp, Zea mays
gctcgtcgccatgaagtacatcccgagggggctcaagattgacgagaatgtggcgagggagatcataaaccaccgctcgctgcggcaccacaacatcatccgcttcaaggaggtcgtgctcacgcccacgcacctcgccatcgtcatggagtacgccgccggcggcgagctcttcgaccggatctgcagcgccggcaggttcagcgaggacgaggcgaggtatttcttccagcagctcatctgcggtgtcag

SEQ ID NO: 23157 - DNA, 250 bp, Zea mays
cccacgcgtccgcccacgcgtccgcttaggtgaaggtggatatggcatagtatacaagggttatttacgcgatggctccgttgttgctgtcaaaaggctgaaggattataatgccgtcggtggggaagttcaattccaaactgaagttgaagtcataagcttggctgttcatcggaatctcctacgtcttattggattctgcactacagagagtgagaggttacttgtttatccatacatgccaaatgga

SEQ ID NO: 23158 - DNA, 240 bp, Zea mays
cccacgcgtccgcgctcctgctcagctccaacccggtgcacaagaccgtgcccgtgctgctccacgcgggtcgccccgtaaacgagtcccagatcatcctgcagtacatcgacgaggtctgggcggggaccgggccggccgtgctggcgcgcgacccctacgagcgcgcggcggctcggttctgggcggcctacatcgacgacgaggtgagatccgcgtggctgggcatgctgttcgagt

SEQ ID NO: 23159 - DNA, 254 bp, Zea mays
gatgtgacaaacaaggcttcccaatgaagcaaggagttctgacttctggtcgtgtccgccttctgctccacagaggcactccctgcttccgcggttatggcaggcgtaatggtgagcgcaggaggaagtctgtccgtggttgtattgtgagccaagacctatctgttatcaacttggtaattgttaagaagggtgagaacgatctgcctggtttaactgacactgagaagccaaggatgaggggtcccaaaagg

SEQ ID NO: 23160 - DNA, 235 bp, Zea mays
gccggtccaccaggtgattgtggtggataacttcttcacggggcgcaagggcaacgtggcgcaccatctccagaaccccaggttcgaggtgatccgccacgacgtcgtcgagcccatactgctcgaggtagaccagatctaccaccttgcctgtccagccagccccgtgcactacaagtacaaccccatcaagaccatcaagacaaatgttgttgggacactgaacatgcttgga

SEQ ID NO: 23161 - DNA, 238 bp, Zea mays
ccaatgcggacaccacccggagacaatgcactgctgtcaccgaagacagcattcttgttcaatgtgatgtggcaaagatcacatagcttttcgaccttgtttccagcctccttcgacttcatcggcgaggcctacttcggcgtgcgcccctcggcgaccgagctcggcaagggcgggccgagcaaggcggccaagtggctcatctggcagctccacccgctggtcacgctcggcctcc

SEQ ID NO: 23162 - DNA, 231 bp, Zea mays
gagaaagttctccagtgctctctcggctgctagctctgcttgtgaccacattcgtgattgggttcttggaacacctgagggtacatttgtttccatgggtgtgtactctgatggttcatacggtgttccttctggactcatttattcattcccagtaacatgcagtggtggtgaatggaaaatcgttcaaggcctcccgattgatgagttctcaaggaagaagatggatgc

SEQ ID NO: 23163 - DNA, 238 bp, Zea mays
caacctcagcggcgaaatcccagccgagataggcaaggtgaagagcctgcagatcgcgctgaaccttagctccaaccacttcaccgggccgctgccccgcgagctcgggcggctcgataagctcgtcgtgttggacttgtcgcgcaacgagatatccggccagatcccaggcgacatgagagggatgcttagcttgatcgaggtcaatctgtcgaacaaccggctcgcgggcgccata

SEQ ID NO: 23164 - DNA, 88 bp, Zea mays
ctggatctcccgggaggttatggtgggcttcttgttgctcgaggaacaatgtagtgtggaaattcctaatatattccaaattgtgctg

SEQ ID NO: 23165 - DNA, 232 bp, Zea mays
cccaggaggtcagtggtgatgctctgggtgaggagtttaagggttatgtcttcaagatcatgggtggatgtgacaaacaaggcttcccaatgaagcaaggagttctgacttctggtcgtgtccgccttctgctccacagaggcactccctgcttccgcggttatggcaggcgtaatggtgagcgcaggaggaagtctgtccgtggttgtattgtgagccaagacctatctgt

SEQ ID NO: 23166 - DNA, 232 bp, Zea mays
ggtgaccggcaccatcgacctgtccggcaacaatttccggttcaacctcaccggcgtagagatgcccatgcagctgtctttcctgaacctgagccacaaccggatctacggcggcgtgcccgtgtcgctccgggacaccagggtggcggtgctggacctcagctacaacgatctctgcgggaagatacctaccggcgggcatatggtgcagtttaaggcggcggcgtacgag

SEQ ID NO: 23167 - DNA, 233 bp, Zea mays
ggtgatcctgggcacgccgccggacccggatggtctccgagcgcacactacgggcccgttccaatccactccgatcgtatacaaccctttgatccctactttttactacctctctttggagggcatcaccgtgggcaagacgcggctgccgttcgacaagtcggtgttcgcgctcaagaaggacggctcgggcgggacggtgatcgactccggcacgagcctcaccaccttac

SEQ ID NO: 23168 - DNA, 233 bp, Zea mays
catccggccagctccgccggatgggcaatgatggcgctccacaagctctgtgacgacggcggcccccagctctcttacggaagcagggcgacgtcagcaaggactcgaccgctccaacagctgtccctccgccaggctccgtcgcacctccgacagccacgacatcacgccagcaaggtgccaagacctctccggctgccacattggcatgtacctagggcgctactcacgct

SEQ ID NO: 23169 - DNA, 235 bp, Zea mays
ggcaagcacaaatgtgaagatgttgatgaatgtaaggaaaggactgtgtgccagtgcgaagaatgcagatgcaaaaacacgtggggaagctacgagtgcggctgcagcgggggcctgctttacatgaaggagcatgacacatgcataagcaaaaacggagcatcagaagccggctggggcttcctgtgggccgtcgtcttcggcctcgtcgcagcaggaattgcagggtacgcgg

SEQ ID NO: 23170 - DNA, 228 bp, Zea mays
caccaagtgggtgctgttccagctcagcccgctgctcagcctcggcctgcccaagcacgtggaggactccctgctccactcgttccgcctcccgccggcgctggtcaagaaggactacgaccggctggccgacttcttccgcgacgctgccaggagggtggtcgacgagggagagcgcctcggggtcgcgcgggaggaggcggtgcacaacatcctcttcgccatgtg

SEQ ID NO: 23171 - DNA, 227 bp, Zea mays
ctgagggccccatagttgctgataagaactgtgagacaatccactttatggcaccgaatatatactgctgtggagcaggaactgctgcggacacggaggccgttacagatatggtgagctcccagctacagcttcaccgttatgcaacgggccgcgaatcaagagttgtaactgctcttacactactgaagtcacacctcttcaagtatcaaggccatgtcagtgct

SEQ ID NO: 23172 - DNA, 227 bp, Zea mays
gggaatggaaaggaaagatgttatgtcgaaaaatgtttcaatctacaaatcccaagcatctgcccttgaagcccatgcagctcccaactgcaaggttctggtggttgccaacccagcaaacaccaatgctcttatcttgaaagaatttgctccatctattccagagaagaacgttacttgcctgacccgtctggaccacaacagggctcttggccagatttctgaga

SEQ ID NO: 23173 - DNA, 228 bp, Zea mays
gcatttgaagcgtgatggaaattcctacactgttcctcatgccccctatgtaatgaataggagccaaaagttagttttttgtgacttcttgagaagagtaaaatttcctgatgggtatgcttctaacttagcaaaatctattactagtgatggatgtaaccttcaaggattgaaaactcatgactgtcatatcctactccaaagaattttacctgttgctatccgagg

SEQ ID NO: 23174 - DNA, 228 bp, Zea mays
cgctctcttgatctcagccatggcggaggtggagcagcaacaggacacgccgaagctcttcaaccgctggaccttcgatgatgtccaggtgaacgacatctcgctgaacgactacctcgctgtgaacgcgacgaagcacgcgatgtacctgccgcacaccgcggggcgctactccaagaagcggttccgcaaggcgcagtgcccgatcgttgagcgccttacaaactc

SEQ ID NO: 23175 - DNA, 228 bp, Zea mays
cccacgcgtccggatcccaccattgaacgtattatcacccctcggattgctctaacaacagcagaatatttggcatatgaatgtgggaagcatgtacttgtcatcttgacagatatgagctcttatgcagacgcacttcgtgaggtttctgcagcccgagaagaggtgccaggtaggcgtggttatcctggatatatgtatactgatctggcaacaatatatgagcgt

SEQ ID NO: 23176 - DNA, 229 bp, Zea mays
gggacccggggcggaagaagagagagaagacgtctctctcctctcggcgtcccagttccccaacctctcgtctgctgcctgcctgcctgcctgcctgcaaaaaggagtttgtcatggcgtctaagcgcatcctcaaggagctgaaggacctgcagaaagacccccccacatcatgcagtgcaggtcctgctggtgaggacatgtttcattggcaagcaacaattatggg

SEQ ID NO: 23177 - DNA, 228 bp, Zea mays
gccaggagaacggtctggtgccaattgttgagcctgagatccttgttgatggccctcatgacattgatcgctgcgcttacgtcactgagacagtccttgctgcctgctacaaggctctcaacgagcaccatgtcctcctggagggtaccctcctgaagcccaacatggtgactcctggctccgactctaagaaggtgacacctgaggtgatcgcccagtacaccgtcc

SEQ ID NO: 23178 - DNA, 228 bp, Zea mays
ctacttatgaccgacacacgcaaacgcctccttgagatgggttataaaaaccctgttcttctgctccatccactaggaggattcacaaaagcagatgatgtgcctcttagttggagaatgaagcaacatgagaaggttcttgaggaaggtgtcctcaacccagaatcaactgttgttgcgatcttcccctctcctatgcattatgctgggccaactgaggttcaatgg

SEQ ID NO: 23179 - DNA, 254 bp, Zea mays
ccgcaagtatcagaagagcactgagctgctgatcaggaagctgcccttccagaggctcgtcagggaaattgcacaggacttcaaaactgatttgcgtttccagagccatgcggtgcttgccctccaggaggctgctgaggcataccttgttggcctgtttgaggacaccaacctgtgcgccatccatgctaagcgtgtgaccatcatgccaaaggacattcagctggcaaggaggatccgcggcgagagggcct

SEQ ID NO: 23180 - DNA, 251 bp, Zea mays
ctggtgatcctcaagttggttgggacacagatcagttcatgacagacattgcagaggctactttggttatgtcaagtgtagttaagaatggtggacttgcacctggtggtttcaactttgatgccaaattgcggagggaaagtactgatgttgaggacatgtttcttgcccatatctccggaatggacaccctggcacgtggcctccgtaacgttgccaagctgattggggatggctccctagatgatctt

SEQ ID NO: 23181 - DNA, 251 bp, Zea mays
gctcgaagtctggtgcttcaatgaggcgccctgggtgccagggctcaggtatgaaagtcaccattcgtcagctggggccttccatgatacagcagatgcagcagccttgcaacgagtgcaaggggactggggagagcatcaacgagaaggaccgctgcccagggtgcaagggtgagaaggtcgttcaggagaagaaggttcttgaggttcatgttgagaagggaatgcaacacagccagaagatcaccttc

SEQ ID NO: 23182 - DNA, 234 bp, Zea mays
cgcaccacagcacgccaccgctgctgccggctcctccccgcgctcgcattgcgatttgcgacctagcgcgagggtaccgggggtggtgcgcgtgctccgtgatccgggaagcgccgcgagatggccgggggcggaggcggcggtgccgcgccgaagcacgacgacttcacgccgcaccccgtcaaggaccagctccctggggtctcctactgcatcaccagccctcccccgtgg

SEQ ID NO: 23183 - DNA, 232 bp, Zea mays
cccacgcgtccgcccacgcgtccgcgtgctggcgctggcctggagcgtggcgcactgggctgggtacgccgcgttcggttcgaatgctccgggcaacatcttggcggcaggcgggctgggtcccttgtggctcgtcgacattgccaacatgtgcctcatcctccacctgatcggtgcataccaggtatacgctcagcctgtcttcgcttcggttaaaagttgggcggcttca

SEQ ID NO: 23184 - DNA, 249 bp, Zea mays
cccacgcgtccgcccacgcgtccgcccacgcgtccgcccacgcgtccgcccacgcgtccgcccacgcgtccgaggggtactgcctcaccgtccgcgacggcaacgtggtgctggcccccgccaacccgcgcgacgagcaccagcactggtacaaggacatgcgcttcagcacccaggtcaaggacgaggagggcaaccctgcgttcgccctcgtcaacaaggccactgggctcgccatcaagcactccc

SEQ ID NO: 23185 - DNA, 145 bp, Zea mays
gcgacgcgtccgctctagatccgttcatcctggtggttttgtgaggtcgaaagcggcgagcgaattagaagatgctggacaagctgtgggacgacgtggtggccgggcctcgcccggagacgggcctcgagaagctccgcaaggc

SEQ ID NO: 23186 - DNA, 249 bp, Zea mays
gagatgagcagcaacccgaacatcgtatacacggacaggtccggacgccggaatcccgagtacatctccctcggctgcgacacacttccagtgctcaggggccggacccccatccaggtctacaccgactacatgcgcacttccgccagaggttccgtgactacctcggcaatgtcatcgcggagatccaagtgggtatgggtccttgtggagagctgaggtatccttcgtaccctgaggccaacggaa

SEQ ID NO: 23187 - DNA, 130 bp, Zea mays
gggcacagtcgggggcgggactcagctggcgtcgcagtccgcctgcctggacctcctgggcgtgatgggcgcgagcgggaccgtcccgggtcgaacgcgaggctgctggccaccgtggtcgccggcgggg

SEQ ID NO: 23188 - DNA, 247 bp, Zea mays
ggccaaggtcaggctccagctgcagaagaacgtcgtcgccgccgccgcctccggggacgccgcgccacgcttcccaagtaccgcggcctgctcggaactgccgccaccatcgctagggaggaaggggccgcagcgctctggaagggcatcgtcccgggcctccaccgacagtgcatctacggggggctccgcattggcctctacgagcctgtcaaatccttctacgtcggcaaagaccacgttgggg

SEQ ID NO: 23189 - DNA, 246 bp, Zea mays
tgctgagattactgacaagcttggattacactccctgcgccacgacactggtacatccagagcacttgtgccacaactggcgagggtctgtatgaaggcctggactggctgtccagcaacattgcgagcaaggcttgaggcctaccttgaatgtcaaccgcgaactgactaggagctccggatgtatcatggaaactcaggacagaatcgcagttgcaacctgttagatgtcttctaccggcacta

SEQ ID NO: 23190 - DNA, 239 bp, Zea mays
ccagcagtggcaccagctgtaagtgctccacctgctgctgcaggtgctccacctgctgagaaaccacctgctgcaaagcctgatggcaccagtcagattgctgctggggttaccagccaaaccaataactaccacagggccgacggtcagaacaccggaaacttccttacggaccgtccttcgaccaaggtccacgctgctcctggcggtggctcttccctgggatacctgtttggtgg

SEQ ID NO: 23191 - DNA, 104 bp, Zea mays
cccacgcgtccgggcggcctcgcctgggccacggacgaccactccctccacagcgccttcagcacctacggcgaggtcctcgagtccaagatcatcctcgatcg

SEQ ID NO: 23192 - DNA, 222 bp, Zea mays
ccacgcgtcgccacgcgtccgcggacgcgtgggtggagaaacgccataactatgtccgcaaaacagctgaacttgctacccagtttttcatcaatccagctactagtcagcctaatgttgcaggattgattcttgccggttctgcagattttaagactgagctgagccaatctgacatgtttgatcagcgactccaagccaagatacttaatggggtgaatg

SEQ ID NO: 23193 - DNA, 113 bp, Zea mays
  unsure (1)..(113): unsure at all n locations
gagaccnttgggagcaaagctctggtaataactgccagtatccagcaaccatgttgttgacagctgatcatgacgatcgtgttgtgccattgcattcactgaagttattagca

SEQ ID NO: 23194 - DNA, 120 bp, Zea mays
tgtacagccccatgatgcgccacggcctcaacgagcccggcaagcacctcggcgtcgtcggcctcggcggcctcggccacgtcgccgtcaagttcggcaaggccttcgggatgaaggtca

SEQ ID NO: 23195 - DNA, 131 bp, Zea mays
gtacgtagcacagtccattattgccgtctcccttttgcgtgaccaagaaagagagcgagaagcagtcgccatgtctggcatcatccacaagatcgaggagaagctccacatggggggcgaccacaagaata

SEQ ID NO: 23196 - DNA, 152 bp, Zea mays
cccacgcgtccgcccacgcgtcaggccccacgcgtccgcggaccgtggcgaagtcagaggttgatgacgaggatggcagcagtgacgaggaaaacgatgacgatgagtaaacagtctccaaggtcacgaggtagcaaatcgagtgttaggtc

SEQ ID NO: 23197 - DNA, 129 bp, Zea mays
cccacgcgtccgggctgttctttctgctgctgatgcttccccggtctcagctatcgggtttgagggctatgagaagcgccttgagatcacattctctgaggcacctgtctttgtggaccctcatgggcg

SEQ ID NO: 23198 - DNA, 70 bp, Zea mays
gaggtgggctggcttctcctccccctcttaccaagtcctcctcgggttagggttccttagggttttgtgg

SEQ ID NO: 23199 - DNA, 146 bp, Zea mays
caagtactcggagttcttcaagcgagagtgcccgcagccttcacctacgcgcacgacagcccctcgctcacccacgagtgcgccgcgccgcgcgagctcaaggtcatcttctgccactagagctcggagctcggagggcgccgccg

SEQ ID NO: 23200 - DNA, 148 bp, Zea mays
aatttattgtccctgttccatatgtgaagcaagtgaagttgtcaaatgctggaggaagacttattattgcttcagatggcatttgggatgcattatcctcagaagccgctgctaagtcttgcagaggtttgcctgctgagcttgccgc

SEQ ID NO: 23201 - DNA, 179 bp, Zea mays
ctcatgtggatgtgggtcttgataccacggctgtccgggaggcggttatcaaagtcatggaccagaagggtttgcctataatgttattcagcaccgatgaggcatcaaacaaagccgttatctatgctggtgtgcctcccaatgctcctagcggcttcaaggtgttggactggctaaca

SEQ ID NO: 23202 - DNA, 238 bp, Zea mays
cccacgcgtccggtgatcggtacaaggatcaccgctgtgcctgcgcgtgctgcttcaccgaatcgagtcagatcctgtccgaatccgagctaagggatggcaaccggtagtgaagcctcgaaggcagctgaggctgtggttgactggcataaacacgacagcaagaggatgctccatgcggtttaccgtgttggggatctggaccgcacaatcaagtactacacggaatgctttggga

SEQ ID NO: 23203 - DNA, 203 bp, Zea mays
  unsure (1)..(203): unsure at all n locations
ggacctggnctggtgttgttgcatcagctcgcaaattaataggagctactaacccccttcaagctgaaccagggactataaggggtgatcttgcagttcaaactggaaggaacgttgtccatggaagtgatagtcctgataatggcaagcgtgaaattgaactgtggttcaaagaaggcgagctctgccaaaatgggaatcag

SEQ ID NO: 23204 - DNA, 242 bp, Zea mays
cagttcggtagtccctctcctctcgaggtggcggcgctccccccgtcttcttcttcttcttcttcctgtactatatagcctcccctcgcaaatcgtcactgacgttcattccgcttgcttgattgttccaggtattagcagtcgaccggttcctcggagcacgatgaagtttgttgctgcctacctgcttgctgtcctcgctgggaacgccagcccctccgctgacgatttgactgccattc

SEQ ID NO: 23205 - DNA, 264 bp, Zea mays
ctcgctctcgccggggacaactcaatcccgaggccaggatggcccgctacgatcgcgcgatcaccgtgttctcacccgacggccacctcttccaggtcgagtacgccctcgaggccgtccgcataggcaacgccgctgtcggcgtccgcggcgtcgacaccgtcgtcctcggcgtcgagaagaagtccacccccaagctccaggactccaggtccgtgcgcaagatcgtgagcctggacacccacatcgcgctggcgtgcgcgg

SEQ ID NO: 23206 - DNA, 252 bp, Zea mays
cccacgcgtccgcccacgcgtccgctagctattcgtctggagacattgggtggcatcatgatatggtttacagcaacatttgctgttatgcaaaatcaacgagcagagaatcagaaggcctttgcttctacaatgggtcttcttcttacttacactctcaatattaccaatttactcacagctgttcttcgtcttgctagtcttgctgaaaatagtttaaatgctgttgaacgggtcggaacatacattgag

SEQ ID NO: 23207 - DNA, 195 bp, Zea mays
ggtactcgcagggccaccgccacgcccccacctaccgcgacgtctgcggcaacggcacgggccacgccgaggtggtccgcgtgcactacgaccccaaggcctgcccctacgacgtcctcctcgacgtcttctgggccaagcacaaccccaccacgctcaacagacagggcaacgacgtcgggacgcataccggtc

SEQ ID NO: 23208 - DNA, 250 bp, Zea mays
ctcttctccctcttgccggtcccgaataaagagcagcagcgcaagaggtcggtagagcgagaagaaggcaatggcggccgagagcttccttttcacctcggagtccgtgaacgaggggcaccccgacaagctgtgcgaccaggtgtcggacgccgtgcttgacgcatgcctcgcgcaggaccccgacatcaaggtggcctgcgagacctgcacaagaccaatatggtgatggtgttcggcgatatcacga

SEQ ID NO: 23209 - DNA, 218 bp, Zea mays
gaacagttcagtgatggtgttgggtatagttggatcgatggattgaaggaccatgccagccaacatgtctccgattccatgatgatgaatgctggctttgtttaccccgagaacacacccacaacaaaagaagggtactactacagaatgatattcgagaaattctttcccaagcctgcagcaaggtcaactgttcctggaggtcctagtgtggcctg

SEQ ID NO: 23210 - DNA, 253 bp, Zea mays
catgtctatcacaaccttcaaaatcggttaactaaaacattgatccatgcatttcttgatcctgccaaatcactgacacaacattatggtgctgtccaagggatatctgcactggggcccagcgcgattagactccttcttttgcccaaccttgtgacatatatgcaacttctggagccggaactgcagcttgagaagcagaaaaacgagatgaaaaggaaggaagcttggcgtgtttatggtgccttgctgt

SEQ ID NO: 23211 - DNA, 264 bp, Zea mays
ctcgccgtctgccttctgcgcctccatttcggcctctgtccctcgcaagttcaatctcacctccaaccatgggtaaagagaagtcccacatcaacattgtggttattggtcatgtcgactctggcaagtcgaccaccacaggacaccttatctacaagcttggaggcattgacaagcgtgtgatcgagaggttcgagaaggaggctgctgaaatgaacaagcggtccttcaagtacgcgtgggtgctcgacaagctcaaggctg

SEQ ID NO: 23212 - DNA, 226 bp, Zea mays
cccacgcgtccggctcgaaatgcatggggagtccgaccctaccatggtatcatacacggaattcttagagatgttcaatgatccggattggggatttgggatcctgagcactctggtgaagctcgaagagagtgaccacatacgccatggtagccacacatgctccatctgccggtaccctatcattgggtcacggtttaaggaaacaagacactcatccagcctg

SEQ ID NO: 23213 - DNA, 167 bp, Zea mays
cccacgcgtccggtggtttcaaggatcagatttacgacatcttccagcttctcccagccaagattcaggttggagtcttctctgctaccatgccccctgaggcccttgagattacccgcaagttcatgaacaagccagtgagaatcctcgtgaagagagatgagctg

SEQ ID NO: 23214 - DNA, 246 bp, Zea mays
cccacgcgtccggccgccaccaggtgcagagtctttcgtcatctcttctccggcgaagaacccccagtcgcccaccagatcacttgttaaactttgttgaggggtgatggcggtttctttcgcaaacctcagctccgaggcagggcttaaaaagcttgatgagtaccttctcactcgcagctacatcactggctaccaagcttccaaggatgacttggctgtctacacttcgtttgcgtctgctcc

SEQ ID NO: 23215 - DNA, 239 bp, Zea mays
cccacgcgtccgctagaacactagtcgagcatgctcgtgttgaaactcagaatcataggttctcatacggggagccaatgaccgtagaatcttcaacacaagctatttgtgacttagctctgcgctttggcgaaggtgacgaagagtcaatgtcacggccatttggagtctctctcctaattgctggacatgatgagaatggacctagcctgtactacaccgacccatctggtactttt

SEQ ID NO: 23216 - DNA, 197 bp, Zea mays
cccacgcgtccggaagaatgaaatgatcctggtctacgattacatggcccatggtactctccgtgagcacctgtacaagacccagaagccacctcttacctggaggcagcgtttggatatctgtattggtgcagctcgtgggcttcactaccttcacactggtgcaaagcacaccatcatccaccgtgatgtgaaga

SEQ ID NO: 23217 - DNA, 231 bp, Zea mays
cgcagtcactcccgggccgccgccgccgccgcctccgcgaaaaaccctagcaggcttcgccgctatcactccaaggggcgcgaccatggtggccacaaagaagacgaagaaatccacggacaacatcaataacaagctgcagcttgttatgaagagtggcaagtacactctcggctacaagaccgtcctcaggactctcaggaactctaagtcgaagctagtgatcatcgc

SEQ ID NO: 23218 - DNA, 229 bp, Zea mays
aacacacagaagcgaggagcactacttgttggttggattctcttcagtctagcagctagtccagttaagtttcagacacacatggggagcattggcagaggcacggccaactgcgccaccgtgccgcagccgccgccgtcgacagggaagctcatcacgatcctgagcatcgatggcggcggcatccgcggccttatcccggcgaccatcattgcgtacctcgaggcca

SEQ ID NO: 23219 - DNA, 228 bp, Zea mays
accacttcctcatggagttaaacttcatgcactcattgatgcttgtcatagtgggactgcacttgatttgccttatctctgcagaatgaacaggagtgggcaatatgtatgggaagatcaccgaccgcgatctggtgtctggaaaggcactagtggtggggaagctatttcctttagtggttgtgatgatgatcagacctctgcagatacctctgctttatcaaagat

SEQ ID NO: 23220 - DNA, 114 bp, Zea mays
cccacgcgtccgcccacgcgtccggtcaaggccaagatccaggacaaggagggcattcccccggaccagcagcggctcatcttcgctggcaagcagctcgaggacgggcgcaca

SEQ ID NO: 23221 - DNA, 197 bp, Zea mays
cggacgcggggtggaagcattgttggggtctacaacggcaagaccttcaaccaggttgagatcaagcctgatatgatcggccactaccttgctgagttctccatctcctacaagccggtcaagcacggcaggcccggtatcggtgccacccactcctcgcggtttattcctctgaaatgagctgttactcggctctt

SEQ ID NO: 23222 - DNA, 132 bp, Zea mays
cggacgctggggtaaccttccagtcaaggaatgtgctaagcaagaaacttatggtgaagaaagaggaatctctcgacaacattaatctattttcgataattacagtcatgtcattcttcctgttggccccgg

SEQ ID NO: 23223 - DNA, 132 bp, Zea mays
gacctcaagaagggcggcaacaggttcatcaagaccgccgcatacggccactttggccgtgacgacgccgacttcacctgggaggtggtcaagcccctaaagaaggcatccgcttaagaatgtattgggaag

SEQ ID NO: 23224 - DNA, 224 bp, Zea mays
cccacgcgtccgttcttatggagatggaggtccctgaatcgtacatggagtccctcccaaagaatggcaagtcaacgcttggagattcagcgtacaagcttataaccgacgactgtttcgacgccgaagaacttctgcgctccgtggacttgtcggacgagcacagcatcgtcgatctgaagaaccgggtcgaagcctcggtggtcatctggcagaagaagatg

SEQ ID NO: 23225 - DNA, 157 bp, Zea mays
cccacgcgtccgggcaggacccgcagagaaggacggtaactggcggcatgataaaggaacttctcatttctttcaagagggcaactggacagaagccccagaggatcatattctacagggatggtgtcagtgagggacagttctatcaagtattgct

SEQ ID NO: 23226 - DNA, 218 bp, Zea mays
cccacgcgtccgggaggagccgctaatccaggccgcggagtgccgcatatgccaggaggaagatagcgtgaagaacctcgagaaaccgtgtgcttgcagcggcagtctcaagtatgctcacagagcttgcgtgcaacgtggtgcaacgagaaaggagacactacttgtgaaatttgtcatgaggaatacaagccaggttacactgcgccacctcgtgt

SEQ ID NO: 23227 - DNA, 218 bp, Zea mays
cccacgcgtccgaacaacagttttctcctggtgccatgccaacagagaactattgcctggatacgacactctcttgaaaatttgctgcaagcttggtgaaagcaagatcatcctctgtgaagagggtagtaagcacaagttgcagaaggttcagcttaactatccgagtgacgatgtgacatttgccctcaaggaatccccagatcttccttggctat

SEQ ID NO: 23228 - DNA, 222 bp, Zea mays
gagatgttataaattacgtgattgagaagtcaccagagggagcccagatcagttccccggggtcttcctgtccccccacgcacaccagagttacagttggtagttgctttgctttgccttttttttcattatttcatttgacactagtgtaagtgggtgtttggtttatagggactaaacattagtccctctactttattccattttagttcataaattgtt

SEQ ID NO: 23229 - DNA, 225 bp, Zea mays
cgccgccgctgctcatctcacatccctcgagaagacgcctgctcctcgccgatcgatacgatggccgtcttctccgacctccacaccgccgacggcctcaagtccctcgaggctcacctcgccggcaaaacctatgtgtctggtgactccattactaaggatgacattaaggtcttcgccgcggtgccgtcgaagcctggcgctgagtttcctaatgccgcccgc

SEQ ID NO: 23230 - DNA, 226 bp, Zea mays
gtgggaaatgaggtgctcggaggccaagatcaaagcttgtatcagccacttgttgatgctgtgaagaatgtgtatgatgggctcaagaggctccacttggagagaaaaattgagcttttcacacctcattcggaagctgtttttgctacttcttatccaccctccgcatgtgtgttcaaggaggaactcatgccatacatgaaacctcttctcgacttctttgcaa

SEQ ID NO: 23231 - DNA, 232 bp, Zea mays
cccacgcgtccgaaccattcctcccaacaccacctcgcctgcgatcttcgtagcctccgtcgcgtcgagcatcgatcatgtcggcctactgcggaaagtacaaggatgagctcatcaagaatgctgcctacattggcacccccggcaagggtatccttgctgctgatgagtccactggcaccattggcaagcgcctttccagcatcaatgtcgagaacgttgaggagaaccg

SEQ ID NO: 23232 - DNA, 233 bp, Zea mays
caagctgacaaatgcttactgtctggtagcgattggagggtcagagaacttctacagtgcctttgaggctgagcttgcagatgccatccctgtggtcaagacctctattggtggcactagaataataggccgactttgtgttggaaacaagaatggacttctattgccacatactacaaccgaccaagagcttcagcatctgaggaattgcttgcctgatcaagtggtggttc

SEQ ID NO: 23233 - DNA, 222 bp, Zea mays
cccacgcgtccgcccacgcgtccgcaaagatagaggctataatgaatgacttcattcaactggaaccacaatccaatttatttgaagcagagactatggtggaaggtacccttgatggattcacatttgattcagatgaggagggtgaccaaatcaatgaaccacaggctaatcaaaacgatctgaataataacggagatgaaggtcaacctaaggcaaaga

SEQ ID NO: 23234 - DNA, 218 bp, Zea mays
cccacgcgtccgcccacgcgtccggtgttgtttaccctagtccagagtgtttatcttcgttcgtctcgtgtttgttgttgcccatctgtgtttttgattgaaggtcgctctgtgtcagttgttagtgctgtgttcatcctcggctccagcagacccatgcatcaaccagcatggactgcggatcgatgggtgctgttacccccgtcaggctttattct

SEQ ID NO: 23235 - DNA, 219 bp, Zea mays
ctgacggttgctctagatccgttcatcctggtggttttgtgaggtcgaaagcggcgagcgaattagaagatgctggacaagctgtgggacgacgtggtggccgggcctcgccggagacgggcctcgagaagctccgcaaggccaccaccgcccgtccgctcgtcatcaacaaagacgcggacggcggcagctacaagcgggcgcagtcgatgccgtcga

SEQ ID NO: 23236 - DNA, 218 bp, Zea mays
ggggaaggtgttatgatctggctgcttgccattatctacttcatatctggtgcgcctggggcttatgtgctatgaactgagagcgctttgaagtttgggtggtttttcctattttacatgattcatataatcttctgtgtgtgggcagctgtggctcctccatttcctttcaaaggaaaatctttggctgggattttaccagcaattgatgtcataag

SEQ ID NO: 23237 - DNA, 224 bp, Zea mays
cccacgcgtccgagcacttcgctgctgggccgcccccgccgccccaagctggtgctgggcgccgcacgccgaccccgccctcgtctggatccggcgggaacgggtgcgaagaaaataaaaccatttgggtcggtgacctccagtactggatggatgaaaactacctacataactgcttcgggcccagcggcgaggtggttacaataaaagttatccgcaatagg

SEQ ID NO: 23238 - DNA, 226 bp, Zea mays
cccacgcgtccgcccacgcgtccgggcggcttaaaccctagttctcactcccatcgccgcttcagctccgccgctgcagatggagttctggggtctcgaggtcaagcctggttccactgttaagtgtgagcctggatatggctttgtgctgcacctttcccaggctgctcttggggaatcgaagaagagtgataatgccttgatgtatgtcaaaattgatgatcag

SEQ ID NO: 23239 - DNA, 212 bp, Zea mays
gccaaaggttactacatttatgagaagggtgcgaaccaaagccagaccctagtgttaagcatgtgatcgaggagtaccgaaagcaggcaaacacaatgcctggtggaaagcctgttactttaatggatcaagatattttggagatgattttcttcccagttgtgaatgaggcatgcagggttatggatgaaaatgttgtaattcgagcttcc

SEQ ID NO: 23240 - DNA, 206 bp, Zea mays
gcggacacggaggcgaaggaggaggagcagcagcagcaggcgtcgccgaggagcggcatcccactcagtgcttgcaaccatggcctaggggattgaagaagcacttgaagaggctcaatgcgcccaagcattggatgctcgacaagcttggcggagcttttgctcccaagctatcttctggacctcacaagtccagggagtgcctt

SEQ ID NO: 23241 - DNA, 218 bp, Zea mays
atttatacgggaaggataccaatttgattacgtatttgactggactgcactcaagtaccctcaaatgggctccaacaacaagcttgttcaacaaccaagtgcaagaatggctggagttggaccatcagttgagagaacagacaaagcttccatgggacaagagatccgggatagggtcactggtgctgctgaggcgatcgccagaagaaatcccggct

SEQ ID NO: 23242 - DNA, 222 bp, Zea mays
tgagcagaggaaggccagcctcattgaaaggctcaaccaactcaactcctccggtggtgctgatgacgacgatgaggacgacgagtaaagttaattgccatcgaagtagtgctatctcaatccagcgatcagcaattgtgtactgtcttatgcggggacctgtagtactgcaataggcatttttgtttaagttttgcgaggtgaacaaaactgtttctgtta

SEQ ID NO: 23243 - DNA, 222 bp, Zea mays
atcgacaccaacttcaccgtcacctccaaggcctcggatgaagacggcgacttcgcggactgtacatgttcaagtggacgacacttctgatcccgcccaccaccatcctgatcatcaacctggtcggcgttgttgccggcatctcctacgccatcaacagcgggtaccagtcgtggggtccgctcttcggcaagctcttcttcgccttctgggtgatcgttc

SEQ ID NO: 23244 - DNA, 239 bp, Zea mays
tacgttacatgtccgcgaccgtggcgacctggcggacgcgtggcggacgcatggtttgtgaaagaagtctcatactacctcaaactagttgggtacaaccctgataagattgcctttgttcccatttctggttttgagggtgacaacatgattgagaggtccaccaaccttgactggtacaaaggcccaaccctgcttgaggctcttgaccagatcaccgagcccaagaggccttcaga

SEQ ID NO: 23245 - DNA, 246 bp, Zea mays
cattctcaaaatttgggccaaaggcagagatatcacatatattccgcgcaccagagaagaggccacccaaggagctctcgctagcgttcacgggtctcacgcttctgccgtttattggattcttgatagggctcgttcgtcttggagtgaacttgaagaacttcccgtccttgccaggaccggccgcatttgcctcacttttccatgctgggataggagcagtcctgatgctctacgttctcttct

SEQ ID NO: 23246 - DNA, 246 bp, Zea mays
aagaatccgatccatccaagccaagccaaggcagagaagaagaagaagaggaggaagaagaagcatcggcagcatgtcggaggggactgccaactgcgtggacatcctgatcgccatcatcctgcctccgctgggggtgttcctcaagtacgggtgcggccacgagttctggatctgcctcctcctcaccttcctcggctacatccccggcatcatctacgccatctacgccatcaccaagaacaa

SEQ ID NO: 23247 - DNA, 248 bp, Zea mays
aaacccatcacaaggtggaacctttgtgaaggtttacaaatcagggtccctcgggagatcgctcgacatcaccagattcggcagctactacgagttgcgtgtcgagctcgagcggttatttggtctcgaaggccaactggaggaccctgcaagatcaggctggcagcttgtattcgtcgaccgggaaaacgatgttcttctcctcggcgacgacccgtggcaggagtttgtgaatagcgtagggtgca

SEQ ID NO: 23248 - DNA, 247 bp, Zea mays
cggaacgaaactcggcgagtgagagcggaagcgacgccgagcaaccaacccctctcctcgtccgtcgccgtctccccggaccatggccatggccgcctcctcctcccggctgctctgggcgtcccgcgccgccgcctacctcaggatctccacattccccagggccttctccaccgtgatgaaggatctgaagtatgctgactctcatgaatgggtgaaagttgagggtgattcaacaaccgtgggg

SEQ ID NO: 23249 - DNA, 244 bp, Zea mays
cccacgcgtccgcaatgttgttggccatgagtcaaagtacaactgccatttgatggaaaagattgattctgagaatctgctacatagggcattcagtgtgttccttttcaactcaaaatatgagctgctacttcagcaaaggtccgcgacaaaggttacctttcctttagtttggaccaatacctgctgcagtcaccctctgtaccgtgagtctgagcttatccaggagaactaccttggtgtg

SEQ ID NO: 23250 - DNA, 241 bp, Zea mays
cggacgcgtggggttttcaatgatgacatccagggcacagcatcagtggtccttgcaggtttgttagaggcactcaaggtggttggtgggaccttggcagagcacacttatttattccttggtgctggggaggctggaactggtattgcagaactcattgctcttgagatttcaaaacagacgtcggctccaattgaagagtgccgcaagaagatttggttggtggactcaaagggtttga

SEQ ID NO: 23251 - DNA, 243 bp, Zea mays
gagctgtacaaaagtggactaggtgaaataatgtttgataagttagcaacaacagttttctcctggtgccatgccaacagagaactattgcctggatacgacactctcttgaaaatttgttgcaagcttggtgaaagcaagatcatcctctgtgaagagggtagtaagcacaagttgcagaaggttcagcttaactatccaagtgacgatgtgacatttgccctcaaggaatccccagatctt

SEQ ID NO: 23252 - DNA, 241 bp, Zea mays
ctaccacggattcttttggtagatttcgtcttagaggacttgtgcctggatcgacttactctataagagtggctgcaaaagataatcttcagtttgcagcagttgagcgtgcttcacctgaatatttgtcagttaatgttggtcatgaagacatgactggtattgattttgtggtttttgaacgccccgaagtaacaatcttgagtggccatgtggaaggagatggcattgatacgttaca

SEQ ID NO: 23253 - DNA, 239 bp, Zea mays
cccacgcgtccgcgacgcagaggcgcgggcgctcgcaccaagccgatccgatggccttcatgcgctcccgctcaaatgcatcttctggcatgggagttgctcctaacattagggagacgtttgtcgagctccaaatgaagaagacattccgatatgttatcttcaaaatcgaagaaaagcaaaagcaggtagttgtggagaagacaggggccactactgaaagctatgatgattttctg

SEQ ID NO: 23254 - DNA, 239 bp, Zea mays
ggcggcagctacaagcgggcgcagtcgatgccgtcgaccccgacgacgccggtgacgccgtcgtcgtcgtcgtcgtcgacgacgccgcgcggcgccggcaacgtgtggcgcacgtcttccacccggggagcaacctggccaccaagggcatgggcgccaacctcttataccggccgcagcccaactcccccaccgtctacgactggctctacagcgacgagaccaggagcaaccaccgc

SEQ ID NO: 23255 - DNA, 238 bp, Zea mays
cgctgaaaataattggcaagaagaagacatcggctttcaggcggcctccaatcttgatcgtcatcggcgacccaacctgtgatcccaagtctctacagcatgctctgggaaagggagccatagagtatgaagagtttctgaaaaccggtgacccggagttcagttggaagccaccgaaggacgagtggcagagcatcgccctaggctacacttctgggactacttccagcccaaaggg

SEQ ID NO: 23256 - DNA, 238 bp, Zea mays
cccacgcgtccgcccacgcgtccgatctcgagtgcaacgcaacgttggcgcttggcggccagtagtagcagctaatttagcgtcgctccttcctactagacgagagatcgagaaaccatggccaagctccaagtcactcctggcgccgcgttcaccgagtgcaatgaactcaacttccagggcctgtacatgtaccacacgcccctgggtcccaaggccaaccaagctgcgatcctag

SEQ ID NO: 23257 - DNA, 239 bp, Zea mays
cgacttctgggttgtagggtacggcgatggccagtggaatgagacgcagcggcagacgtacaatttggtggacgcgcaggcaagacacaccgttcaggtgtaccccaacgggtggtcggcgatcctggtgtcgctggacaaccaggggatgtggaacctgcggtcggcgatgtgggaccggcagtacctcgggcagcagctctacctcagggtgtggacgccggagcagagcctctcca

SEQ ID NO: 23258 - DNA, 234 bp, Zea mays
cccacgcgtccgaggcaagcctctttttgggacgcttatagcacttttgcacaatgggaagccggttattggtgtcattgaccagccaatcttgcgagaaagatggattggggtggatggaaaacaaacaactttgaacggacaagaaatatctgttcgctcttgtaatttacttgcacaagcttacttatatacaacaagcccacatctctttgaagcagatgctgaagatgc

SEQ ID NO: 23259 - DNA, 231 bp, Zea mays
tcggacaaccacttcggttgtccttgctcaagggatgattactgagggtgtaaaggttgtagcacctggtgctaatccagtgcagatcacccgtggtattgagaaaacagccaaagcactagtcagtgaactccaaaagatgtccaaggaggttgaggacagtgagcttgctgatgttgctgcagttagtgcgggaaataactatgaaattgggaatatgatagctgaggc

SEQ ID NO: 23260 - DNA, 231 bp, Zea mays
tgctcttgctgatctggccccaacccaccccatcaggctcgggcttgctctcaacttctcagtgttctactacgagatcctcaactcccctgaccgtgcttgcaaccttgcaaagcaggcctttgatgaggcaatctccgaactagacagcctgggagaggagtcctacaaggacagcactctgatcatgcagctcctgcgtgacaacttgaccctatggacttccgacac

SEQ ID NO: 23261 - DNA, 233 bp, Zea mays
cccacgcgtccgcgacgtatgactctgagaagttggcagagagaattgcaaagctttctggtggagttgctgtggttaaggttggagcatcgaccgaggcagagctagaggaccgcaagctccgcatagaggacgcgaagaatgcgacttttgcagcaatagaggaaggtattgttccaggaggcggtgcagcatatgttcatctatcgacattcgtaccggctatcaaggag

SEQ ID NO: 23262 - DNA, 244 bp, Zea mays
gagctcgtgaaggcctgcaccaccatcatctggatcgcgtcggcgctacacgccgccgtcaacttcgggcagtacccgtactgcgggtaccacccgaaccggccgtccgtgagccggcggcccatgccggtgccgggctccgacgcgtacaaggagctggagaagaacccggagaagttcttcgtgcgctccatcaccgcccagttccaggccgtcgtcggcatctcgctgctggagatcctgt

SEQ ID NO: 23263 - DNA, 245 bp, Zea mays
ggcgcgtctccatcggcgtcgaggccgtgcgtgacccgcccgtgctcatcctcgacgagcccacctccggcctcgacagcgcctccgcgctccacatcgtcggcgcgctccgcgccatggccgaggcgcgtggacgcaccgtgctgctcagcatccaccagccgggagcgcgcatcgtcaagatgttcgactccgtcctcctgctagccgccggctccgtcctccaccatggcaccgtcgaccag

SEQ ID NO: 23264 - DNA, 244 bp, Zea mays
cccacgcgtccgcttctccaagaggcggcggggcctgttcaagaaggccgaggagctctccatcctctgcgacgccgaggtcggccttgtcgtcttctccgccaccggcaaactcttccacttcgccagctccagcatgaagcaggtaatcgatcggtacgactctcattccaagactctccagaggtccgaaccgcagtcgtctcaactgcagtcacatatggatgacggcacttgtgcaagg

SEQ ID NO: 23265 - DNA, 128 bp, Zea mays
caacgccatgcagctgcttgagagcggcctcaaggtcaaggcgtacgagctgctcaggaggaacttcagcgacaccggctgcttcgggttcggcatccaagagcacatcgaccttggtatcaagtatg

SEQ ID NO: 23266 - DNA, 242 bp, Zea mays
aaagcaacaaggcagcagcacaagcaagaaccacacctcctcccttcgcctgtgatcatgtcgtcttgctgcggcggcaagtgcgggtgcggctccagctgctcctgcggcagcggatgcaacggctgcggtatgtaccctgacgtggagaccgccgccaccagcagcgtcaagaccacggtcctcgccgcgccgaccaccaaggccagcgccggcggcttcgaggcggccaccgagggcgg

SEQ ID NO: 23267 - DNA, 240 bp, Zea mays
cccacgcgtccgcccacgcgtccgatggcagggagggtcacagggaagatgacccagcgaagggcctagcacacgtcgtcaatgagattaaggggaagcatcagctcaagtatgtgtacgtatggcatgccatcaccggatactggggcggagtgaggccaggtgcagctggaatggagcactacggatcaaagatgcagcggcccgtgccatcgccgggggttcagaagaacgagcgct

SEQ ID NO: 23268 - DNA, 239 bp, Zea mays
gtccgccgccgacgtcttcgaccgcgtcgccagcttccttgagtcgctgtggcgggacatcgacatggggcggctggaccaggaccccagctgcgagacgaacctggtgatcgtctcccacggcctcacctcgcgggtgttcctgatgaagtggttcaagtggacggtggcccagttcgagcgcctcaacaacttcgacaactgcgagttcagggtcatgcagctgggccccggcgggg

SEQ ID NO: 23269 - DNA, 238 bp, Zea mays
cccacgcgtccggttacctttgaggatattggagcattagaaaatgtcaaggaaactttgcaggagttagttatgcttcctttgcaaaggcctgagttgttctccaaaggacaacttatgaagccatgtaaagggatattgctttttggtccacctggcaccggtaagaccatgcttgccaaagctgttgcaacagaggctggtgctaattttatcaacatatcaatgtcaagcattg

SEQ ID NO: 23270 - DNA, 233 bp, Zea mays
atgatttcttcgccaggaggatggcggagaacgagtccaagcctgagggtatcccgccatcccagggcggcaagtacgttgggttcggatccagcccagcgccagcggctaataggaacggcggtgctgctcaggacgattgggacgaccaaggcaagaagggtgaacctgtgaaaccgcaccaaagcagtgactcctgggctggctgggatgatgggaaggacgatggtttt

SEQ ID NO: 23271 - DNA, 235 bp, Zea mays
gctggattgaaagctgtgggtgaaagcgtacagaagccattactttattatgacaacaacgtcattggcacgataaatcttctagaagttatgtctgttcacggttgcaagaagttggtgttctcatcatcagctgcagtttatggatcacccaaaaactcaccctgcacagaaaattttcctcttactccaaacaatccatatggcaaaacaaagctcgttgttgaagatattt

SEQ ID NO: 23272 - DNA, 232 bp, Zea mays
gccgtctttcaaccaccatccgctgcctttctcacccaagcgcgcacgtgcgggctcagcatgtccgtcctccgtgacatcctgaaccacggatccgtgagccccaacaagatcagccgaggggaacagcagcggaatggcatccagagcccatcgtaccggtgcgtggccgcaggcatcctcaactggcaagcggacgtggagaggtgcatagagtgggaagctcacagcc

SEQ ID NO: 23273 - DNA, 233 bp, Zea mays
ggtctgcagcccccaactacccccagcctcggaaggaaccttccagaagcgcaagactctaaaggccgtcgccttcccattcttcctcgccgcgggggtcgcctgagatcacataaacaatggtgaaggctgttgctgtgcttggtagcagcgatggtgtcaagggcaccatctttttcacccaagagggagatggccctaccgctgtcaccggaagtgtctctggcctcaag

SEQ ID NO: 23274 - DNA, 233 bp, Zea mays
gttacatgctgccttcgtttccctggtcagctgaattctgaccttcggaaacttgcagtgaacctgatccccttcccgcgcctgcactttttttatggttggattcgctccactgacctcacggggctcccagcagtaccgtgccctcactgtgccagagctgacccagcagatgtgggactccaagaacatgatgtgtgctgctgaccctcgccacggtcgctacctcacgg

SEQ ID NO: 23275 - DNA, 229 bp, Zea mays
ccgacttttatgttaaggttgacgatgatgtccatgtgaacatagcaacgctcggacagattctgtcgaaacatgcattgaagccgagagtgtacatcggatgcatgaaatctggacctgtcttatccgaaaagggcgtgagatattatgaacccgagcactggaaattcggcgaatcggggaacaagtacttccggcatgctaccggtcaattatacgctgtttcaaa

SEQ ID NO: 23276 - DNA, 229 bp, Zea mays
ctcaagttccaggaacttggagaggcttatcaagtcctaagtgatcctgggaaaaaggaggcgtatgataattatggaaaggagggtattccccaggataacatggtggatcctgctgctgtctttgggatgctttttggaagtgactattttgaagattacgttggccagcttgctctagcatctatagcttcagtggaggttgaggaaaactcaaatagtcaagagg

SEQ ID NO: 23277 - DNA, 229 bp, Zea mays
cccacgcgtccgacgctggcgtcgacaccttcaagaattaccgcgacgacggcaacgtcggcgacgacaggttcacctcctacgccaagggcgcaaacggcggcgcggcggagttccagagctacggcaactcggccaacccgggcagcaccatcttcaagggctacggcgagggcaccaaccccaaccaccacattgggttcaaggagtacgccggcgagaacaacac

SEQ ID NO: 23278 - DNA, 230 bp, Zea mays
tgaaaggtcattgattgcaaatctgtcagcggcaaactgttacaaatctgagcatctaaagagaccagagaactgggcactagttgaaaaggcaaaatacatctacattgctggatttttccttacagtgtcgcctgattctatccagctagtcgctgagcatgctgcagcaaataacaaggtgttcctgatgaacctctctgctcccttcatttgtgagttcttccgtg

SEQ ID NO: 23279 - DNA, 228 bp, Zea mays
aaatacttcagaatctctgtggaggtccaaacattgtgaagttgcttgatattgtcagagatcagcattcaaagactcccagtttgatatttgaattcgtcaacaacacagacttcaaagtcttgtaccccacattgacggattatgacatccgctactacatatatgagctactcaaggctctagattactgccattctcaaggcatcatgcatcgagatgtcaagc

SEQ ID NO: 23280 - DNA, 232 bp, Zea mays
ctaaagctcaaatcaggagtggagatcttggcatttgtttctaaagtgcaccaagtcgtacttccagaagatgcagttgattatgagactgtaaccttggaacatatagagagcaacatcgttagatgtcctgatccagaatatgcagagaagatgattgctgccattgatacggtacgagttagaggagattcaattggtggggtcgtcacatgcattgcaagaaatgttc

SEQ ID NO: 23281 - DNA, 254 bp, Zea mays
cttgagtcgctgtggcgggacatcgacatggggcggctggaccaggaccccagctgcgagacgaacctggtgatcgtctcccacggcctcacctcgcgggtgttcctgatgaagtggttcaagtggacggtggcccagttcgagcgcctcaacaacttcgacaactgcgagttcagggtcatgcagctgggccccggcggggagtactcccttctcgtccaccacacccaggaggtactccagcagtggggcat

SEQ ID NO: 23282 - DNA, 255 bp, Zea mays
ctaggcaccacacctcttcctcctcttcctcctcctagcacagctagcgcctgctccccttcgtctgtgatcatgtcttgcagcagcggcaagtgcaactgcggctccagctgctcctgcggcagctcatgcaactgcatgtcccctgacgtggagaccgccgccgccagcagcatcaagaccatggtcctcgctgcgccgaccaccaaggccagcgccggcggcttcgaggcggccaccgagggcggcggctgc

SEQ ID NO: 23283 - DNA, 252 bp, Zea mays
acctcaacctggtccgcctcatcggcttctgctccgagggccggcaccggctgctggtgtacgagttcatgaagaacggatcgctggacgcgttcctgttcggcgacgcgccgccgggcgggaagatgccgtggccgacgcggttcgccgtggccgtgggcacggcgcgcggcatcacgtacctgcacgaggagtgccgcgactgcatcgtgcactgcgacatcaagcccgagaacatcctcctggacgagc

SEQ ID NO: 23284 - DNA, 252 bp, Zea mays
agagaagcagatgaatctcgtttacgtgaagtttgtgagagcttcctaggtcctccgatgggcatggttggttcggcatcacctactgatcccaaaaatctagcgtgggaccctgatgttcttggaatgaagaagcacaaacttcttaaagaagatatacttccttcgatggcgtcgaaccggaaagtgcagcggctgctcaacgagttcatggacctcctgttagaatatgaaacggatgtcacactgata

SEQ ID NO: 23285 - DNA, 255 bp, Zea mays
cccacgcgtccgaaccacacacacctccacccactctctgagacaagtgaagcatctcgcgcactgtcgcagtcgcagacggagatgatgaagcactcgagcagcttgtgcttgctcttcctcttggcgctctgcaccaccctgctggcctgcgagctggtccaggcacaagtcctcttccaggggtttaactgggagtcgtgcaagcagcagggaggctggtacaacaggctcaagacccaggtagatgacatc

SEQ ID NO: 23286 - DNA, 253 bp, Zea mays
gcctgctgctgaggcagagagaccaggatcttctggtagtggaagcacatctttctggaatcaaatatttacttccaacgaggatcgaacacatgctcctgcaagagataacacagcaaacaaatcttatgctatgcctgcccctaatctggatcattcattctccactatacagttaagagagccaccagtcgtcctgaagccttcagaacaccagtctgagcaggaggcacttgaaatagcaattacaaag

SEQ ID NO: 23287 - DNA, 252 bp, Zea mays
ctggaaccgcggcatctccgcctgtgccgtctgtgacggtgccgcccccatcttccgtaacaagcccatcgccgtcataggcggcggcgactccgctatggaggagtccaatttcctcaccaagtacggctcccacgtctacatcatccaccgccgcaataccttccgtgcttccaagatcatgcaggccagggcgcttgagaaccccaaaattaaggtcctctgggactcggaagttgtcgaggcctatgg

SEQ ID NO: 23288 - DNA, 251 bp, Zea mays
tccttctcctttccctctccttccccaaacccttttcctctttccctcgccccaagaacttcatctcatctccaggcgccccttttgcgcttgcgcaggaggagctcacggggacagtgggcggagagctcgatcgctgcaccactacttcactggaggtccgcccactcccatggaggagatcacccaacactttggagttggcgcaacagccacggccatggccacggccagcaccaccatcatcacca

SEQ ID NO: 23289 - DNA, 252 bp, Zea mays
agaaccgccgccacgccacacaaaaagcagtgactgagtgagaaaggacagcaagcaagccctccctccatctccgccccgtcgccatggtccttctcttcgtggagaagctcctggtcggcctcttggcgtccgtcatggtcgccatcgcggtgtccaagatccgtggccgcaagctccggctgcctcccggccccgtccccgtgcccgtcttcgggaactggctgcaggtcggcgacgacctcaaccacc

SEQ ID NO: 23290 - DNA, 251 bp, Zea mays
cttttctgcttccagacattgtccacgagctagtgcactggtgtcgctcgcaaccaaattaaggactgaggcatggcatccaagggcgtcctcttcttggctctcaacctcctgttcttcacagtggccaacgcctgcggcagctgcccgaccccaacgcccccggtcgagccaccgccgccgcctcctgctaccccacccccttcatcctccagtgggaagtgcccgctgaacgcgctcaagttcggcgt

SEQ ID NO: 23291 - DNA, 249 bp, Zea mays
gaaatcaacaaggtcgttaagctccaagaagagcttgacattgatgtgcttgtgcatggcgagcctgagagaaacgatatggttgagtacttcggtgagcagctctccggttttgcgttcactgccaatggctgggtgcagtcttatgggtcaaggtgcgtcaagcctccgatcatctacggtgacgtgagccgccccaaccccatgaccgttttctggtcgaagacggcgcagagcatgacgtctcgc

SEQ ID NO: 23292 - DNA, 93 bp, Zea mays
ccagcatggactgtggatcgatggatgctgttactcctgtcaggatttgttctaagttaatcctaaggaaaaaatggtgcttcttggtgctgc

SEQ ID NO: 23293 - DNA, 245 bp, Zea mays
cttacctagacaaagttaatatgtcactctggcctcgcttcaagatggtgttcgacttgcatttgaacagcttgcgaaatgcaaatattaaaacactttgggaggatgatgtccatccacactatgttacaaggagatatgctgaatttacagcttctctagttcatctcaatgttgagcatggggacggtcagcttgatctaaatttggagcgattgcggatggccattgaggatttgcttgtt

SEQ ID NO: 23294 - DNA, 245 bp, Zea mays
caaccaagtgcagtttctacaaggtcatctgctcttccaccaagtgaccctgtcacagtaactatagaagagaagctcaatgttgttgttaaaagagatggtggtattaataactttgatgttcaaggaacacttgctcttcaggttctcaatgatactgatgggttcatccaattgcagattgaaagccaagatattcctgggcttagcttcaaaacacacccaaatatcaacaaggatttgtt

SEQ ID NO: 23295 - DNA, 245 bp, Zea mays
ggggacgacaactactgcgcggggatcgtgctcacctccaacggcgtcgaccacgcgcacggcggcgcgcccaccagggggggattctccgacgtcctggtcgcgagcgagcactacgtggtccgcgtccccgacggcctggcgctggaccgcaccgcgccgctgctctgcgccggcgtcaccgtgtacagccccatgatgcgccacggcctcaacgagcccggcaagcacctcggcgtcgtcgg

SEQ ID NO: 23296 - DNA, 245 bp, Zea mays
cccacgcgtccgctggtcactcatgccgttactttgggtatcttgtctcacgcaagaagtatgtgatttcaatttatgacaattgcctcccagcgaaggacactgctgggtcgactgttgatgttgttgcacagcacatggccaatctgaaaacacctgctacacctttctttttcaacacactctatgatccatacaggaaaggtgctgactttgtccgtggttacccattcagcctgcgcgag

SEQ ID NO: 23297 - DNA, 240 bp, Zea mays
cagctgtatctggtgttgctgggcctctggtcatattggataaagtaaagggcccaaagtaccaagaaattgtaaacatccgacttggagatggcaccaatcgccgtggtcaagtcctggaagttgatggcgaaaaagctgttgtgcaggtctttgaaggaacttctggaatagacaacaaatacacaaccgtgcagtttacaggcgaggttttgaaaactcctgtctcacttgatatgc

SEQ ID NO: 23298 - DNA, 244 bp, Zea mays
cccacgcgtccgcccacgcgtccgcagatcatatcatcacttaccacctccctgaggtttgatggggctatcaatgtggatgttactgagttccagaccaaccttgttccatacccacgtattcatttcatgctttcctcatatgcccctgtaatatctgctgagaaggcctaccatgagcagctctctgtgcctgaaatcaccaatgctgtatttgagccctcaagcatgatggccaagtgtg

SEQ ID NO: 23299 - DNA, 246 bp, Zea mays
gcagaatccagatgtgctgttcttgcaagtgaactacgaggagcacaagtctatgtgccacagccttcatgtccatgtcctacccttgttcagattctacaggggagcacagggacgactctgtagcttcagttgtacaaacacaactattaagaagttcagggatgcactcgcgaacacaagccagatagatgtagccttggcccaaccagggggctagaggaatctgagttattagccttggcg

SEQ ID NO: 23300 - DNA, 247 bp, Zea mays
gagatcacggccgacatctttggtatcaaggatgacaagggtgaaggctacctggtcgacaaggtcctggacaagaccgggatgaagggaactgggaaatggacagtccagcaggctgctgagctttctgtagctgctcctacaatcgaggcgtccttggactccaggttcctcagcggtctgaaggacgagcgcgttgaggcttccaaaatcttccaaggtgactactccactggcctaccggtgg

SEQ ID NO: 23301 - DNA, 246 bp, Zea mays
gataattttgacagaattttcctgtttgcatcatgctgtatttttctttttcttgtgttgactcaatttctttaacttagcgtactggttgtgggatttgatggtaacataaatagtatgagagttgcttgggaattagatgattctggagaatcagcttccaaatgttaatgacaacggaaaactcaatgtaggggcttcccctacagtatttctcaaaaaagaaaaaaaacggaaactcaatgc

SEQ ID NO: 23302 - DNA, 137 bp, Zea mays
gtaaaaacattgcccttatggggaactattggatgtttctcaacgtttgaagactgcaagtgaagttaatgctgctattcctacaagccaaagccatgagaaagatccgaagcttccaagcttgttaaagatgttga

SEQ ID NO: 23303 - DNA, 241 bp, Zea mays
gccttcctggtgggagagttttgatatttggtgggtctgtggcaggtcttcattctgcttcaaaactttacctcctggatccaactgaagagaagctgacctggaggcttctgaatgctccagggcatcctccacggttcgcctggggccatagtacttgtgttgttggagggacaaaggcaatagttattggaggaggaactggagaagagtggacactaacagaaatacatgagctttc

SEQ ID NO: 23304 - DNA, 244 bp, Zea mays
cactattcctttctgctgagctcaggaaatcccctctggtctccccgtcccccattccacccgccgccgccgacgcgccgcgcctgttcaagatgaatgtggagaagctcaagaagatggcgggtgctgtgcgcactggaggaaagggcagcatgcgcaggaagaagaaggcagtccacaagaccgcaaccaccgatgacaagcggcttcagagcacgttgaaaagaattggagtgaacactat

SEQ ID NO: 23305 - DNA, 244 bp, Zea mays
tgcagggtcacccttcccctcggcctcaagagctctgcggttgccgcggccaagggcgtccgtggagaagcgggagcaggtggcggcgatggaagagcaaggcggccaggcggcgctcggatgggcggccagggacgactccggcgtcctctccccctacagcttctccagaagggttcctaaagacgacgatgtcacgatcaaggtgctctactgcgggatctgccacaccgacctgcacgtc

SEQ ID NO: 23306 - DNA, 235 bp, Zea mays
agtgggtgcaaacaaatgtggcatttgcacggcgctttgaggtttacttagactacccgttctttgaacaccagattcattggttctccatcttcaattcattcatgatggttattttcttgactggtttagtgtcaatgatattgatgaggacactaagaaatgattatgcaaaatatgctcgtgaagatgatgatctggaatcacttgagcgagatgttaatgaagaatccgg

SEQ ID NO: 23307 - DNA, 228 bp, Zea mays
gcggacacggaggcgaaggaggaggagcagcagcagcaggcggcgccgaggagcggcatcccactcagtgcttgcaaatatggctaggggattgaagaagcacttgaagaggctcaatgcgcccaagcattggatgctcgacaagcttggcggagcttttgctcccaagccatcttctggacctcacaagtccagggagtgccttcctctgatcctcatcatcaggaa

SEQ ID NO: 23308 - DNA, 239 bp, Zea mays
gtccatcaaacttgacatatctggctcagcatccattgtttgagcagataaaagagctcagtgaagacataattgttcccgaatactgttacgctggtggaggtgaactccaatcacttaatgcttggtttggtccagagggtacagtgacaccattgcaccatgatccgcatcacaacatcttagctcaggtattgggcaggaagtatattagactctatcctgctttcatagctgag

SEQ ID NO: 23309 - DNA, 257 bp, Zea mays
aacgaggacaagcttgagttcagcaagatcttggaggctattaaggcgaacttcaatgacaagtttgatgaagtcaggaagaagtggggaggtggcatcatgggctccaagtcgcaggccaagaccaaggccagggaaaagttgctggccaaggaggccgcccagcggtatgacgtagattatccactgttgagcttgcccctgtagtttgacgtggaagaaccgatgagcattgtgcactcgtattgtgttttttt

SEQ ID NO: 23310 - DNA, 252 bp, Zea mays
gaagtttggcatgtctccatccaaaggagttctgttttatggtcctcctggttgtggtaaaaccttgttggcgaaggcaattgccaacgagtgccaggctaacttcatcagtgtcaagggtcctgaattgcttaccatgtggtttggtgagagtgaagccaacgtccgcgaaatttttgataaggctcgccaatctgctccttgtgtcctcttctttgatgagcttgactcaattgcgactcagagaggaag

SEQ ID NO: 23311 - DNA, 252 bp, Zea mays
cccacgcgtccgaggatatcaatgctcttgagcagcacatcaagaacctcctcagcccatccaccccgttcttcttcaacaccctgtacgacccctaccgtgagggtgctgactttgtgcgtggataccccttcagcctcagggagggtgctcacaccgccgtctcccacggcctgtggctgaacatccctgactatgatgctcccacacagctggtcaagcccaaggagaggaatgagaggtatgttgatg

SEQ ID NO: 23312 - DNA, 252 bp, Zea mays
ggagagcaccctccaccttgttctccgcctcaggggaggcatgcagatcttcgtcaagaccctcactggaaagactatcaccctcgaggtggagtcttctgacaccatcgacaacgtcaaggccaagatccaggacaaggagggcatccctccagaccagcagcggctcatttttgccggcaagcagctcgaggacgggcgcacgctggccgactacaacattcagaaggagagcaccctccacttggtgct

SEQ ID NO: 23313 - DNA, 251 bp, Zea mays
gacagaggactagaatacattcatgagcacaccacagatcattatgttcatagagacattaaatcaagtaatatcttgcttggtggttccttcagagcgtagatttcagattttggccttgcaaaacttgcagggcaatccaatgacgcagaggcttctgtcactaaggttgttggaacttaaggattatctagcccctgtgtacctgcgggatggcctggctgctacgaagagtgatgtctatgcttttg

SEQ ID NO: 23314 - DNA, 251 bp, Zea mays
gccagaggactagaatacattcatgagcacaccaaagatcattatgttcatagagacattaaatcaagtaatatcttgcttgatggttccttcagagcgaagatttcagattttggccttgcaaaacttgtagtgaaatccaatgacgcagaggcttctgtcactaaggttgttggaacttttggttatttagcccctgaatacctgcgggatggcctggcaactacgaagagtgatgtctatgcttttgg

SEQ ID NO: 23315 - DNA, 249 bp, Zea mays
catacaacaagctgctggtgtatgagttctacgaaaagaattcctcgctgtgcaaggccatggacaagccgttcgagaagctcgccacgcagtacaaaggcagggccgacttctgcaagctggacgtggacaactttgagcttttggcgcggatttgcggagtggaaggagcgtatccgacgttcgtgctgttcaagaaatgcgcgcaggtgggcaaggtcgttggcctcaaggaggacgacctcgagc

SEQ ID NO: 23316 - DNA, 249 bp, Zea mays
ctcgtcgacgatctcgtagcggcggcgcacatggcgagcgacggcgcggcggctacgccagcgaaggttaccccaaagaaggccaatctcctcgacccgcactccatcaagcaccttctcgacgagaccatctccgaggtcgtgaagagtaagggctacaccgaggacacgcggctgggcaactggaagctggggatcggagccgccgtgattgctgtcgccctcctcgctcagttttaccccaagaag

SEQ ID NO: 23317 - DNA, 245 bp, Zea mays
gccgcccaaggtgcggttcgacaccccctgcttccaccccaacgtcgacgtgcacggcaacatctgcctggacatcctccaggacaagtggtcctccgcctacgacgtgcgcaccatcctcctctccatccagagcctgcttggagagccgaacaacgactcgccgctcaacactcaggcggcagcgctctgggcgaaccaggaagagtttaggaagatggtggagaaaatctacaagcccgccg

SEQ ID NO: 23318 - DNA, 245 bp, Zea mays
agcacatgtcctaaaactcagcagcagcttgcccacctgtcattgactccaaactactgtgttaaggccctgattgccagctggtgcgagcagaacgattttccacttcctgatggtccaccaggaacttttgatgtaaactggagacttgcttcctctgacactgaggctacaggttgtgtgtctgttgaaagttttgactgtaccagtgcaaagagcgtcaagattgtcccgatggaggatgc

SEQ ID NO: 23319 - DNA, 243 bp, Zea mays
gcagcagcacaagcaagaaccacacctcctcccttcgcctgtgatcatgtcgtcttgctgcggcggcaagtgcgggtgcggctccagctgctcctgcggcagcggatgcaacggctgcggtatgtaccctgacgtggagaccgccgccaccagcagcgtcaagaccacggtcctcgccgcgccgaccaccaaggccagcgccggcggcttcgaggcggccaccgagggcggcggctgcgactg

SEQ ID NO: 23320 - DNA, 243 bp, Zea mays
actggatgcaaagacggatccaccatcaggcacacgcacacttgaccttgcatctaccctcgaggttggatctggtgggacaacgcgtgcttcgagtgacgcctccagcacctgcaacacaagatcagtgctgaccattgctttccagttctcatatgaaaatcacctacgagagagcgtcgcagccatggccaggcaatacgtcaggaccgtggtggcatcggtgcagagggtagccatggc

SEQ ID NO: 23321 - DNA, 243 bp, Zea mays
cccacgcgtccgcccacgcgtccgcgctctatctctttcgccgagctcctcgaaaccctaggagcgtgcttgaccggcggcggcgaggtgatggcgatggaccctgacgcggtagcgaaggccttcgtggagcattactaccgaacgttcgacaccaaccgcgcggcgctggttgggctgtaccaggagacctccatgctcaccttcgagggccagaagttccagggcccctccgccattgcc

SEQ ID NO: 23322 - DNA, 244 bp, Zea mays
cccacgcgtccggacccagcagctattgtggtcgtccctcagccgcgtcgcaccgcatcgcattctacgattcgaagctctctctgctcgcagccatggcgaagaattacccaaccgtgagcgccgagtacagcgaggccgtcgagaaggccaggcgcaagctccgcgccctcatcgccgagaagagctgcgcgcccctcatgctccgcctcgcgtggcactccgcggggacgttcgacgtgtc

SEQ ID NO: 23323 - DNA, 241 bp, Zea mays
cgatttcatggatcacaacgagcaaggtgataggtaccgtgaattggcccatagggtggatgatgctcttgggttcatgactgcatcggggcttacagtcgaccacccgataatgacgactactgacttctggacctcgcacgagtgccttctcttaccctacgagcaggctcttacccgtgaggattccaccagtggccttttctatgattgttcggcccacatgttgtgggttggtgag

SEQ ID NO: 23324 - DNA, 240 bp, Zea mays
ggttaatcaggttattggcattgactttttatcccaaacactgctaccagccattgtagaacttgcagaggataggcactggagagtccggcttgcaataattgagtacatcccattgctggcgagtcagttaggtgttgggttttttgatgacaagctgggggcactctgcatgcaatggttggaagataaggtcttctcaatcagagatgctgccgccaacaacttgaagcgccttgc

SEQ ID NO: 23325 - DNA, 237 bp, Zea mays
cgagttgcttggttactgtgctgatgggacactccgtgtccttgcttatgagttcgctacaatgggttcccttcatgatatgcttcatggaaggaaaggggttaaaggggctcaacccggtccagtcttatcgtggtcgcaacgtgtgaagatagcggttggggcagcgaaaggcctcgagtatcttcatgagaaagcgcaccccatatcatacaccgagacatcaagtctagcaac

SEQ ID NO: 23326 - DNA, 237 bp, Zea mays
gcaccgacgagttccgcatgtacagcttcaaggtgaagccctgctcgcgcgcctactcccacgactggaccgagtgccccttcgtgcaccccggcgagaacgcgcgccgccgcgacccgcgccgcttctcctacagctgcgtcccctgcccggagttccgcaagggcggcgcctgccgcaagggcgacaactgcgagtacgcgcacggcgtcttcgagtgctggctccacccggcgc

SEQ ID NO: 23327 - DNA, 236 bp, Zea mays
cccacgcgtccggcttgaagatattgttccttcatcacacaactgtgacattccgcatgtgaaccgtactgagtatcagctgattgatatttctgaggatggatttgtgagccttcttacttcagatggcaacactaaggatgatcttagactcccaactgatgagactcttgtggcctagattaaggaagggttcgaaagcgggaaggatcttgttgtgactgtccagtctgcga

SEQ ID NO: 23328 - DNA, 236 bp, Zea mays
gaacttaggagccggtcccgtgttctgaagatgctggggcatattgatgctgacggtgttctccagttgaaaggacgtgctgcctgtctaatagacacaggggatgaactgcttatcactgaacttatgttcaatggtacatttaatgatcttgaccatcatcaagttgcttcccttgctagctgctttgtaccttgtgataaatcaagtgagcagatacgcctaagaaatgaact

SEQ ID NO: 23329 - DNA, 233 bp, Zea mays
tcaggagtgttggtcgacggcggcgcagatgacgaccctcgatctgatgggagggtacggacgggtggacgagcaggtggccatccaggaggccgccacggcggggctgcgcgggatggagcgtctcatcttgcagctctcccaggctggcaccggggagcggtcgtcgtccccaccggcggtacaggcgcacgccagcagcagaagcagctggagcagatccagcagcaggt

SEQ ID NO: 23330 - DNA, 175 bp, Zea mays
cccacgcgtccgcccacgcgtccgcccacgcgtccgcccacgcgtccggcaagaagaaggctttcacaaagtatgctctcaaatatgaaaatgatgctggcaagaaggaaattcagctgcagcttgagaagatgaagaaatatgcttctgttatccgtgtcattgctcataccca

SEQ ID NO: 23331 - DNA, 165 bp, Zea mays
gtgccgaattgacatgaagaatctgattggcgaacatcttgtagaatctgtcaggaaaacttcagcacaactgttaatgcactcactgagcctattgatatatatagtgaatggattgatgagtgtgagcgtgtcaacactgttgaaggcgacgatgatgcgtga

SEQ ID NO: 23332 - DNA, 172 bp, Zea mays
cccacgcgtccggagagatggctgagcaaattgcaagtgaccctgtgttcaaccagatggctgaacagcttcagaaaagtgctcagggtgctggagaacagggtattcctgcattggatcctcaacagtatatggaaacaatgcaacaagtcatgcaaaaccctcagtttgt

SEQ ID NO: 23333 - DNA, 171 bp, Zea mays
cccacgcgtccgccgggagacccccgagggcaggaaagccgtccaggctctcaaggatgtgtatgctcactgggttcccgaggacaggatcctcaccaccaacctgtggtccgctgagctctccaagcttgccgccaatgcgttcttggcacagaggatctcctctgtcaa

SEQ ID NO: 23334 - DNA, 138 bp, Zea mays
ggccagcccatcggtcgctacgacgacatgtgggcaggatggtgtgtgaaggtcatctgcgaccacctgagcctgggagtcaagactggcctgccatacatctggcacagcaaggctagcaaccccttcgttaacttg

SEQ ID NO: 23335 - DNA, 167 bp, Zea mays
ggcacgacaagacgatgctcatcggtgccgaccccacgcacgtcggcgaccgctgcatcagggtcaccatccaccactgcttcttcgacggcacgcgacagaggcacccccgcctccgcttcggaaaggttcacctctacaacaactacacgcgcagctggggcatc

SEQ ID NO: 23336 - DNA, 155 bp, Zea mays
cgcatgagcaggaattgattaaaaatgaacctctttcaattacttacagttactgggatgggactgggcacagaagagcaatccaggtccgtaaaggtgacaccattggagaatttctaagggctgttcaacagcagcttgcccctgaattccgt

SEQ ID NO: 23337 - DNA, 162 bp, Zea mays
ctcagaacaacccctcccagctcctcccctcagagctgatcgatcggtgcatcgggtccaagatctgggtgatcatgaagggggacaaggagctcgttggcaccctctgcggctttgatgtctacgtcaatatggtgctggaggacgtcaccgagtatgaat

SEQ ID NO: 23338 - DNA, 119 bp, Zea mays
gcaccctccacctggtgctccgtctcaggggtggcatgcagatctttgtgaagacactcactggcaagacaatcacccttgaggtggagtcttcggataccattgacaatgtcaaggcc

SEQ ID NO: 23339 - DNA, 150 bp, Zea mays
attcagcaggcactacctgatattgcatggggcaaacgaagccgtgtcattttggatgttggttgtggagttgccagctttggaggctacatgtttgatagagatgcgcttaccatgtcttttgctccaaaagatgagcatgaggctcaa

SEQ ID NO: 23340 - DNA, 159 bp, Zea mays
gtgggttggcttctcctccccctccggttcgggttcgggttcgtgaggttctccggggttcggtttcgtgggtgagcggatcgagatggcggcgtcggatgttgagtaccgctgcttcgtcggcggcctcgcctgggccacggacgaccactccctcca

SEQ ID NO: 23341 - DNA, 160 bp, Zea mays
gcttgatgtccgctgcgaaacaaagacaaaggataatgtcttcgtcaatgttgtggcatctgtgcaatatcgtgcccttgccgataaggcatctgatgcattttacaggcttagtaacaccagggagcaaatccagtcatatgtttttgatgtcatcagg

SEQ ID NO: 23342 - DNA, 157 bp, Zea mays
gaataatgttgccagcctgtggttcatgtcactttttatctgcattgctgctacgagcatcctagaaatgagatggagtggtgttggaattgatgactggtggaggaatgagcagttctgggtcattggaggtgtgtcctcacacctctttgctgtg

SEQ ID NO: 23343 - DNA, 240 bp, Zea mays
ggagaagatctcacggcatgctcgagacggaactacgacatcacgagaaataattgttcaatttaatgctgatgttgctgatggaatgccgtggaagttcatccctacacagagagaggtcagggttaaacctggtgaaagtgctcttgctttttatactgctgagaatcgcagttcagctccaattactggtgtatccacgtataatgttgctcctatgaaggctgcgatttacttcaa

SEQ ID NO: 23344 - DNA, 122 bp, Zea mays
caacttcagttaccggattgaataacaacgaataccagataaccaggggaaaggagctcaaccgtttagcaggaattagtggaacatgtgattttgtcaaggcggacttcatgaagatgccg

SEQ ID NO: 23345 - DNA, 133 bp, Zea mays
cccacgcgtccgatccactgcggcctggacgcgtgcgagagacttgaccaagcagcagcagcagggatggcgcctctgaagctgtacgggatgccgctgtcccccaacgtggtgcgcgtggccaccgtgctca

SEQ ID NO: 23346 - DNA, 233 bp, Zea mays
ggacgtgggcgggaacgtagatcttcctgatcccactatcaagaaagtggaagtaagtgctaccgacttcttggttgataaggtctcgcgatttcctggagaggtctctgtgctcgccttgggtcctctgacaaacatagcattggccatcaagaaggatccctcattcgtgaaaaacgttaagaagatcgttgtgctgggtggagcgttctttgcggctggaaatgccactc

SEQ ID NO: 23347 - DNA, 234 bp, Zea mays
caacttcagttaccggattgaataacaacgaataccagataaccaggggaaaggagctcaaccgtttagcaggaattagtggaacatgtgattttgtcaaggcggacttcatgaagatgccgttcgatgacaacacttttgatgctgtttacgccattgaggcaacatgtcatgcacctgatccagttggttgctacaaggagatatatcgtgtgttgaagcctggccagtgct

SEQ ID NO: 23348 - DNA, 234 bp, Zea mays
gggcaatgctatggatattgtataccctgaatttaagcggtgctgctgtttcactaaaagctactatcgttatgtgaaggggacaggctctttgttggctacatctaaaaacctcaatgttcctgaagagaagctccaaatttcttccctgaaggagttgggcctacgatttttcacccctcgtgaggttgccaatttccattccttcccttcaaatttctgcttcccggatca

SEQ ID NO: 23349 - DNA, 235 bp, Zea mays
gacatgcgttaatcacgagacaggaatggttgatccaaggaagtttggtttgctagcgaactggcagcgggactacacgatggagaacatcctcacccagctcaagaaagagatggctgcctcgcagaatcgaaagttagtgcagcctccagaagggacattcttctaacgaagtgttcacttggcccgtcatgggatccaacagtaattgaaagttttatgggctaaaaaacag

SEQ ID NO: 23350 - DNA, 151 bp, Zea mays
ggagagtgctcctcctcctatgaagaaggactacaagctggctaatcttctctgctggaaggaggaagcggatgccatggaggagaaggcgggagtgcttgatgagtaagacgggcttctggggtcgatttgcttctgagttgtttatttt

SEQ ID NO: 23351 - DNA, 226 bp, Zea mays
gatattataaggttcggtgctcagaaaaatgacaggacaggaactggaacattgtcaaaatttgggtgtcagatgcgattcaacttaaggaaaaattttcctctgctgacaacaaagagggtgttttggcgtggtgttgtcgaagaactcctttggttcatcagtggctcaacaaatgcaaaggttttgcaagaaaagggtattcatatctgggatggcatgcttc

SEQ ID NO: 23352 - DNA, 231 bp, Zea mays
gcgagaagaagtaccttcgcatccaggatgatactttgactgggaacgcatcgtccgtggacatcgccaccaaggagaacatggagtctctgatatcgatcggccaggagctgctcaacaagccagtggcgagagtgaacatcgacacagggctgtacgagtcctgcgagggtgagggcacaaatgcacagtcgctagctgacttcgccaagcagctctctgacgagcgca

SEQ ID NO: 23353 - DNA, 230 bp, Zea mays
ggctgcactgagagaagggctgccgctccgcaaggctgagcatgcattctacttggactgggctgtccactccttcagaatcaccaactgcgagatccaggacaccacccagatccacacccacatgtgctactccaacttcaacgacatcatccactcgatcatcgacatggacgcggacgtgatcaccatcgagaactcgcggtccgacgagaagctgctctccgtgt

SEQ ID NO: 23354 - DNA, 127 bp, Zea mays
cccacgcgtccggaaagaaatcaggaaacaagtagatgacgccattgcaaaagcaaaggaaagttctatgcctgatacttctgagctcttcacaaatgtttataagaagggattcaacgtggagtca

SEQ ID NO: 23355 - DNA, 244 bp, Zea mays
cggacgcgtgggccgctgttaggttctaccaggagaccttcggcgtccctccggccacgcgagctcgccgaaatggtcgcccacaggttccatcagtaccaggtggtgggtcgcgcgctgccgaccccaaccgatgagcaccccaagatctaccgcatgaagctctgggccaccaacgaggttcgcgccaagtccaagttctggtacttcctgagaaagctcaagaaggtgaagaagagcaatg

SEQ ID NO: 23356 - DNA, 224 bp, Zea mays
ggaggacagcagcggcttcttgtgtacgagtacatgccgagagggagcttggagcatcatcttttcaggaggggctccaacttccagccgctcccatggaacttacgcatgaaggttgctctcgaggctgccagaggtcttgctttcctgcacggcgaccaggccaaagttatctaccgcgatttcaagacctccaatatccttctcgactcggagtacaacgc

SEQ ID NO: 23357 - DNA, 202 bp, Zea mays
actgaatcctccgcaactcgccgccgccgggaccgaccgacccgatcctatcgatcgaggatgtcgtacgcctacctcttcaagtacatcatcatcggcgacacaggcgtggggaagtcgtgcctgctgctgcagttcacggacaagcgcttccagcccgtgcacgacctcaccatcggcgtcgaattcggcgcccgcatga

SEQ ID NO: 23358 - DNA, 192 bp, Zea mays
cccacgcgtccgcccacgcgtccgcccacgcgtccgcaaggagctgcccgcgccgtacccgaccaaagacaacctgatcaagaacgacggcttcgagatcggtccccaggtgctcaggaactcgacggtcggcgttctgctgccccccaagcagaaggacgcgacgtcgccgctgcccggctggatcatcga

SEQ ID NO: 23359 - DNA, 225 bp, Zea mays
aaccaaggccagggaaaagctgcttgccaaggaagctgcccagcggatgacctaagtcttgccctgttaaattaaaattttcttgtacttgcgatcgtgtgcaatcacggtggttgtcagatctagtttttgagagttttgcttgagaaagaccgagtcaccgaccatgacagaaagacatcatgtaagaattcaaagttttggttctgtaccatctagttcatg

SEQ ID NO: 23360 - DNA, 222 bp, Zea mays
tggaaaccctagccgccatatctcacgatccactcgagcaccaagccgagggaaggtgaggagcgatggcgcgcggcgtggtgtcggcgaagggcggcgcggtcgcgggcaagaagaaggggtcggtttccttcacgatcgactgcaccaagccagtggaggacaagatcatggaggtcgcctcgctcgagaagttcctgcaggagcgcatcaaggtcgccg

SEQ ID NO: 23361 - DNA, 221 bp, Zea mays
cccacgcgtccgatcaaatcagaccctggtgaagttgttaaacctgaccaattcaaggcgattaatgatgaggggatgccaatttaccagaggcctttcatgaaggggaagctgtacatccatttcacggtggagttccctgactcgttggcaccagagcagtgcaaggctctcgagacagtacttccaccaaggccttcatccaagctgacagacatgga

SEQ ID NO: 23362 - DNA, 222 bp, Zea mays
cccacgacgtccgcccacgcgtccgcccacgcgtccgcccacgcgtccgagggaattcaataaaggttttgaactgtcatgattctgttatctacatattagcaccactgaagtatgctactgtgtatggttgttctgatgctacggttgttcttggtgctgttggtaaggtagtaaaagtggagcattgtgaaagagtgcatatcattgcagctgcaaaac

SEQ ID NO: 23363 - DNA, 223 bp, Zea mays
agctagtccagttaagtttcagacacacatggggagcattggcagaggcacggccaactgcgccaccgtgccgcagccgccgccgtcgacagggaagctcatcacgatcctgagcatcgatggcggcggcatccgcggccttatcccggcgaccatcattgcgtacctcgaggccaagctccaggagctggacggcccggacgctcggatcgccgactacttc

SEQ ID NO: 23364 - DNA, 144 bp, Zea mays
gttgcaaagatcaacccacaggcacccttagataaagtctgcctgctcggttgtggtgttcctactggtcttggagcggtgtggaatactgcaaaggttgaatctggctcagttgttgctgtttttggccttggaacagttgga

SEQ ID NO: 23365 - DNA, 199 bp, Zea mays
ctgttgatgcttgctgttctagctgcaacagtcacgtaccaagctggcatcaaccctccaggaggtgtatggtctgatgatagctcagccagtggtaaaccaggagacccaatccttcagcacaacaattccaagcgctatgatgtttccaactactcaaactcactctcattcgtggcatctgtagttatcacaatac

SEQ ID NO: 23366 - DNA, 224 bp, Zea mays
cacaagcacaagcgcactctagcaatggcttctgaggttgtccgccctagcgacgccgagctactaaaggcacaagccgacatatggcggctcagcctctcctacctcacgcccctgtcactgaggtgcgccgtggagtttggcatccctacggcgatctaccgccatggcggggctgcctcagccgctgagctggtcacggcgctgtctctcccctccactaa

SEQ ID NO: 23367 - DNA, 215 bp, Zea mays
cccacacgtccgcccacgcgtccgcctgaagacacatacaagggacatggtttccgcacagaacttatatccatgcttttggatttgaaaccacgattcttgagatttcctggaggttgttttgtagaaggtgactggctaagaaatgcattcagatggagagagtcaattggtccatgggaagagaggcctggacacttcggggatgtttggca

SEQ ID NO: 23368 - DNA, 221 bp, Zea mays
cccacgacgtccgcccacgcgtccgggtgtcgatttgcttctgagttgtttattttatatcgtcgcaatttcgtggttgtcgtttggttattctgtgaagcagccaagccaggctattgttatgaaaatttgtcgtctgtaagcatgtgaacttccgatgttgccacatgctggatcagtctgaataagtaagtatgcagctctaggtggtcagctgcgtc

SEQ ID NO: 23369 - DNA, 181 bp, Zea mays
gtccgactaccgccacatggaagggttcggcgtgaacacgtacacgttcgtgagcgcggcggggaaggcgcagtacgtcaagttccactggaagccgacgtgcggcgtgcggtgcatcctgacggacgaggaggcggcgctggtcgggggacggaaccacagccaggcgacgcaggacttg

SEQ ID NO: 23370 - DNA, 171 bp, Zea mays
agcccacctcgatctcgcgctaggttttcgccacaccgctctcgtcctccgcgaagatgccgaagaacaagggtaagggaggcaagaaccggaagcgtggaaagaacgaggctgacgacgacaagcgcgactcgtcttcaaggaagacgggcaggagtatgcgcaggtgac

SEQ ID NO: 23371 - DNA, 216 bp, Zea mays
agaaaactagaaaagcctcctcccgaccgcaacgcccctcatctccctcgaccccgacatccccgacccgatggcgcccaaggcggagaagaagccagcggagaagaagccggcggccgaggagaaggcggagaagacgaccgcaggatagaagcccaaggccgagaagcggctgcccgcgtccaagtcctccggcaaggagggcggcgagaagaa

SEQ ID NO: 23372 - DNA, 217 bp, Zea mays
ccatcgcgtcctctccgctacacctcgccgatcggatcgcgacgagacgccgcgcgatccgacctaggctgacgccaacgaccactctcgccgccggcggtcatggcgtacggcgaccgcgttaccaccttcgaggactcagagaaggagagcgagtacggctatgtccgcatagtctctggacctgtggttgttgctgatggaatgggtggtgctg

SEQ ID NO: 23373 - DNA, 208 bp, Zea mays
gccaccaccgcccgcccgctcgtcatcaacaaagacgcggacggcggcagctacaagcgggcgcagtcgacgccgtcgatcccgacgacgccggtgacgccgtcgtcgtcgacgacgccgcgcggcgccggcaacgtgtggcgcacgtcttccacccggggagcaacctggccaccaagggcatgggcgccaacctcttcgaccggcc

SEQ ID NO: 23374 - DNA, 217 bp, Zea mays
ggcccgcccgcccgcccaccagccgccgccgcaccgccaccgcgcgacctaccttcttcgccgcaaaccgctctgggcgcttgaagatggcggtgccgctgttgactcagaagatcgtgaagaagcgggtcaagcagttcaagaggccccacctcgaccgctacaagtgcctcaagccaagctggcgcaggcccaagggtatcgactcccgtgtcag

SEQ ID NO: 23375 - DNA, 138 bp, Zea mays
caaagatgtggaccaaaacaatgacggtcagattgattatagtgagtttgccgccatgatgagaaagggcaatgctggcggacaggacggcggaccatgaggaacagcttgcatgtgaatcttggcgagctcctgaag

SEQ ID NO: 23376 - DNA, 126 bp, Zea mays
gtgaaagtcagtttacccaggtcatcaacattgagctggatcagatcattgaggcatgtaagtttctggatgagaagtggtcacccaagttcactgtgattgttgctcaaaagaaccatcacacca

SEQ ID NO: 23377 - DNA, 252 bp, Zea mays
cgcctcgggtcaaaccctaagcagggagttgatttatccgctgcagccatgagtaagttgcagtctgagtctgtcaaggatgccatctcccagattgttggggatgccaaggagaagaataggaagttcactgagactgtggaacttcagattggtctgaagaattatgatccacagaaggacaagcgtttcagtggctctgttaagttgccccatatccctcgtcccaagatgaaggtgtgcatgcttggt

SEQ ID NO: 23378 - DNA, 124 bp, Zea mays
cccacgcgtccgatgtgctcgaagacgatcccgttgggaggctcaaggtgtatgtctacgagttgccgaccaagtacaacaagaagatggtggctaaagactctaggtgtctcagccacatgtt

SEQ ID NO: 23379 - DNA, 171 bp, Zea mays
cccacgcgtccgagcttgttgactgtgacacttcatacaaccaggggtgcaatggaggtctgatggactatgcgtttgagttcatcatcaacaatggcggaatcgacaccgaggaggattacccttacaagggcacggacggacggtgtgatgtcaacaggaaaaacgcca

SEQ ID NO: 23380 - DNA, 247 bp, Zea mays
gtagctcggtagccccctctgatctgtttctagatctgccactgtgcggaaccgctgctgctcggcccgttctatcacagatccatggcggagaaggaggcggcggctatgtggggcggcggcgacaagctcattctgcgcggccttcagttccatggcttccacggtgtccttcaggaggagaagacgttgggacagatgttcgtggttgacatcgacgtctggatggacctcgccgctgcaggcg

SEQ ID NO: 23381 - DNA, 181 bp, Zea mays
cccacgcgtccgggaacctttcctgggtctcggagatggcggcgcctccggcgagggcccgggccgactacgacttcctcatcaagctgctcctcatcggagatagcggtgttgggaaaagttgtctccttttacggttctcagatggctccttcactactagcttcatcaccaccattgg

SEQ ID NO: 23382 - DNA, 183 bp, Zea mays
cccacgcgtccgaattttgaagaggtttgacactcactcgaaaaccaacgagcagactgtccaggaaatgctaaacctagccatcaagtacaacaaggcagtgcaggaggaggacgaactgcctcctgagaaacttgcgatacaaatgtgggtcggcaagatgcaaaaaagcatttggaagag

SEQ ID NO: 23383 - DNA, 172 bp, Zea mays
ctctccgcacacaccctccctacctcgccgtcgccgtcgcatctgccatgggggcgtacaagtacgtctcggagttatggagaaggaagcaatccgacgtgatgcggttcgttcaacgcgtgcgctgttgggagtacaggcagcagccggccatcgtccgcctcacaaggcc

SEQ ID NO: 23384 - DNA, 203 bp, Zea mays
cccacgacgtccgcccacgcgtccgctcttacataaaaaaatacatcaagaatctcactgctgtgttggagccagagaaagcggatgagttcaaaaagggtgtcgagggtgcaaccaagtttctccttagcaagctgaaggaccttcaattttttgttggtgagagcatgaaggacgaagcgtccgtggtattcgcctattac

SEQ ID NO: 23385 - DNA, 170 bp, Zea mays
cccacgcgtccgaggatatcaatgctcttgagcagcacatcaagaacctcctcagcccatccaccccgttcttcttcaacaccctgtacgacccctaccgtgagggtgctgactttgtgcgtggataccccttcagcctcagggagggtgctcacaccgccgtctcccac

SEQ ID NO: 23386 - DNA, 169 bp, Zea mays
gcctcgggtcaaaccctaagcagggagttgatttatccgctgcagccatgagtaagttgcagtctgagtctgtcaaggatgccatctcccagattgttggggatgccaaggagaagaataggaagttcactgagactgtggaacttcagattggtctgaagaattatga

SEQ ID NO: 23387 - DNA, 132 bp, Zea mays
cccacgcgtccgaaacggtcatgactcttgcatctcctgactctaagcctgaggacctcaaccgccctggtcatattttccctttgaaatacagagaagggggtgttctgaaacgagctggacacaccgagg

SEQ ID NO: 23388 - DNA, 135 bp, Zea mays
cgctggtggtgaaggagacgctgcggctgcacgtgcccgtgccgttcctgctgccgcgggagtgccgcgaggcgtgccgggtgatgggctacgacgtggcccggggcaccaaggtgctggtgaacgcgtgggcga

SEQ ID NO: 23389 - DNA, 169 bp, Zea mays
cactcatcttttctcgtttagaacctctaaaatttcccccactcgccagtcgcagcagcacctgtagcagccatggacgccagcggagccggtagcaaggggaagaagggggcggccgggcgcaaggcaggcggccccaggaagaagtcggtgacgcggtccgtcaagg

SEQ ID NO: 23390 - DNA, 236 bp, Zea mays
ggttataatggcaactaatcgggcagacactctagatcctgctttgttgcgtcctggtagacttgacaggaaaattgagttccctctgccagaccggcgtcagaagaggcttgtttttcaagtttgcactgccaaaatgaacctgagcgatgaggttgatttggaagattatgtttccagaccggataagatcagtgctgctgatattgctgctatctgccaagaggctggcatgc

SEQ ID NO: 23391 - DNA, 248 bp, Zea mays
gccacgggtatggtggccacggcaagttcaagcatggtcacggccaccacggcaagttcaagcacgggcacggcaagttcaagcatggcaagcacgggcacggcatgtttggcggcggcaagttcaagaagtggaagtgatgtgccctccatggttgatcgtagctgaactcaggcttccaggacatgtgttgcctgtaataccttttcagcgttactcatccttcatctgtatttccagtaatccag

SEQ ID NO: 23392 - DNA, 263 bp, Zea mays
gaagaagcagaagagcgtgaaaaaattgtaaaggatcccaaatccattgtaccagcagcatttgtttccttccgatcacgttggggtgcagcagtttgtgctcagacacagcaaaccagtaacccaactgtttggttgacagaatgggctccagaacctcgtgatgtgtactgggataatttgtctattccatttgtctcccttacagttcgaaggctgataattgcagtggcattcttcttcctgaacttcttttatgtgtt

SEQ ID NO: 23393 - DNA, 262 bp, Zea mays
ccaggagcagctgtggagctgcaagtccaccagcgccgtgaaccagctctggacgctcaagagggacggcaccatccggtccaacggcaaatgcctgaccagcagcggcgacgcggccggcgcccgcgtggtggtcgacgactgcccgcgcttccccacgggccgcgtcgtctgggaggtgcgcgtggacggtaccgtcgcgctcaagtggtcccgcggcctggtgctggccgtgacctcgtcgactctcttcgcggggctc

SEQ ID NO: 23394 - DNA, 268 bp, Zea mays
cccacgcgtccggcaggaacaagttgtccctgggtgttttctgcgagctcgtgctattgggctcatgcctatgatcgatcagggtgagaaagatgataagatcatagctgtctgtgctgatgaccctgaattccgtcactacaaggacatctcggacctccccccgcatcgccttcaagagatccgccgcttttttgaagattataaaaagaatgaaaacaaagaagttgcagtgaatgatttcctcccagccgaagatgccatcaaa

SEQ ID NO: 23395 - DNA, 268 bp, Zea mays
ggcgggctacatgtcgagcaaaaagacaatggagatcaacccagagaaccctatcatggatgagctccgcaagcgtgccgaggctgacaagaatgacaagtcagtcaaggatctcgtgatgctgctgttcgagactgctctcctgacctccggcttcagcctggatgaccccaacaccttcggcaaccggatccaccgcatgctcaaactcggtctgagcatcgatgaggacgagcctgttgaggcagaggctgagatgcctcagctt

SEQ ID NO: 23396 - DNA, 267 bp, Zea mays
cccacgcgtccgcccgcgcgcaggggagcgataaaccctagtcttcgccgtcgtcgcaggaggacccgcgatgtcgcacttcgggaggtcaggcccgccggacatccgcgacaccttctcgctcctcgtcctcaacatcagcttccgcaccacggccgacgacctcttcccgctcttcgagcgctacggcaaggtcgtcgacgtcttcatcccgagggacaggaggaccggggactcgaggggtttcgcgttcgtgcggtacaagta

SEQ ID NO: 23397 - DNA, 269 bp, Zea mays
ggcgaaaggactgcaactattctgaagcacctctttcctgtcccaaagccagattcaaagcgaataattacatttgctaacagagacgattacatctctttcaggcatcatgtatatgaaaaaccaggtggccccaaatcgattgacctgaaggaggtcggcccccggttcgagttgcggctgtaccagatcaaactaggaaccgtggaacaaaaggaagcgcagagcgagtttgtgctgcggccctacatcaatactgccaagaagca

SEQ ID NO: 23398 - DNA, 274 bp, Zea mays
cccacgcgtccgccaggacacagggtaccaggattgcttctgagggtctgaagcacagagtctttgaggtttgcctagctgatcttcagggcgacgaggatcaagcttacaggaaaatcaggctccgtgctgaagatgtgcagggcatgaatgtgctcacaaacttttggggcatgaattttaccactgataaactcagatccctagtgaagaagtggcagacattaatcgaagcccatgttgatgtcaagacaaccgacaactacatgttgcg

SEQ ID NO: 23399 - DNA, 261 bp, Zea mays
cccacgcgtccggctcggaacgcacacacagcccggtccccgatctccgatcccctcgtcgatccaagatgcagatcttcgtcaagaccctcactggaaagactatcaccctcgaggtggagtcttctgacaccattgacaacgtcaaggccaagatccaggacaaggagggcattcccccggaccagcagcggctcatcttcgctggcaagcagctcgaggacgggcgcacacttgccgactacaacatccagaaggaga

SEQ ID NO: 23400 - DNA, 257 bp, Zea mays
ccacgcgtccgccttgggtgcttcggcccctcggaattttctgtcgccgtgaccatcttcggcgggcggggccaagctgggacatggggaaaggaacttggtgcggaggcttatgactgcaacaacatggtcgagcaggagctgcctggaggtgggatcctcatctaccagagcttctgtgctgctgaagacgccgttgctagctcgcccaaatccgttcttcgctgctttgatggcgagaatgcagcaccttttgc

SEQ ID NO: 23401 - DNA, 262 bp, Zea mays
tgacaaatgactaggaggagcatctggctgtgaagcacttctctgtggagggtcaactggagttcaaggctgttctctttgttcctaagagggccccctttgatctctttgacaccaagaagaagcaaaacaacatcaagctctatgtgcgcagggtgttcatcatggacaactgcgaagagctgatccctgagtggctgagcttcgttaagggtattgttgactctgaggaccttcccctcaatatctctcgtgagactct

SEQ ID NO: 23402 - DNA, 262 bp, Zea mays
cagaggggagctcttggttctgtcaatcagctctccgtcacgattggtatattgcttgcctatttgtttggcatgtttgttccctggagaattcttgctgttctaggcattttaccctgttcaatcctgattcctggactgttctttgtccctgaatccccaaggtggttggcaaaaatggggaagatggaggattttgaatattcattgcaagttctgcgaggatttcagacagatatcacagcagaagtaaatgaaataa

SEQ ID NO: 23403 - DNA, 265 bp, Zea mays
gtcaggaaccacggcgacactggtggtcatcgatgggttcacggtcacagtggcgtcggtgggagactcgcgctgcatcctggacacgcagggcggcgagttgcagctgctaaccgtggaccaccgcctggaggagaatgcagaggagcgggagcgcgtcacggccagcggtggggaagtaggccggctcaatctcttcggtggtcaggaggttggtcctctccggtgctggcctggtggcttgtgcctttcaagatccattggg

SEQ ID NO: 23404 - DNA, 254 bp, Zea mays
cctgaacagactttgcccagttgatgtttttttgaaggcaatgctggatgttccatttgtgttcaagagagtagatgccatgctttacattgccagcttctatttggagatcaatcggctgagaatgtcgtatgctactcttgagggggcttgccaggagatgagaagcagcaggctgttccacaaagtccttgaggctgttgtgaatttcggcaatttcatgagcaccaattcggggtctccaagttcaaaag

SEQ ID NO: 23405 - DNA, 256 bp, Zea mays
cggggaacgtcctgaccgtaaccatgtcgaagccctacgggttccgctacaggagcgggcagtacattttcctccagtgcccaacaatctccccgttcgagtggtacgtacatacgcacgcatagttggcactctcatgcatgcatctcttgatacttctccgcgtcggtggcgtatgtggcaggcaccctttctccatcacctcagctcccggagacgactgcgtcacgtccacgtccagaccaggggcgactgg

SEQ ID NO: 23406 - DNA, 257 bp, Zea mays
  unsure (1)..(257): unsure at all n locations
gatcattttcgaagccgggtttagccgttacaagatcatacctgtactcggtgttcggtcgataatcgaggtctacccataaaaatctatgcaactcaagtatactgcatgcgtgaataatctgcgtgtgaaatcaaaactaggtgtgaagaagtgagtatctgcggggctgggctgcaacgccgcaaactccattggagtggtgcctcctgtggcggaatgatcgcttctcnccccttggctgtccgtggcggggc

SEQ ID NO: 23407 - DNA, 234 bp, Zea mays
ccctaagcagggagttgatttatccgctgcagccatgagtaagttgcagtctgagtctgtcaaggatgccatctcccagattgttggggatgccaaggagaagaataggaagttcactgagactgtggaacttcagattggtctgaagaattatgatccacagaaggacaagcgtttcagtggctctgttaagttgccccatatccctcgtcccaagatgaaggtgtgcatgct

SEQ ID NO: 23408 - DNA, 234 bp, Zea mays
cccacgcgtccgcctcatcttggctgcaaactatctgaacatcaagggtctgctcgacctgacctgtcagactgttgctgacatgatcaagggcaagacaccagaagagattcgcaagaccttcaacatcaagaatgacttcacccctgaggaggaagaggagatccgcaggagaaccagtgggccttcgagtaaggaggtgctggatctattgatgcctgagtgtggtggtgt

SEQ ID NO: 23409 - DNA, 234 bp, Zea mays
gagagagatgattagttgtggtggtcgtatgaagctttcatcccagatgttctttgcatcgatagaccagagaagtgagcgagcagctggggagactgcatgtacatcacttgtagctattattgcagactggttccaagcaaatcagaatattgtgcctgtccagtcacagtttgacagccttatccgtgaaggatcactagagtggagaaacctttgtgagaacgagacata

SEQ ID NO: 23410 - DNA, 234 bp, Zea mays
gttgaagagtgcttcaaaaaacagctctttggtctgcctgcagtccattattcatatgtgaagaatgtaaaacctggtatgcctttgtttctattcgattatattgacagaagactccatggtgtttttgaggctgcaagtcttggtcaggtgtctattgatccgtatgcttggagtaatgaggacttattaaggacgccttttcctgctcaggttcgtatttgcatggggact

SEQ ID NO: 23411 - DNA, 227 bp, Zea mays
gtgccggcaaccgcgtcagggacgatggtgggcctctctgaaggggagaaacacttcatccgcggcggcattgcacaagaccttcgcactgatggacgtaggcggctgcagttccggtccctctccgtccaaaccggagtcattccacaggcgaatggctcagcgcgtgttaggttgggggccactgatataatcgctagtgtcaaggctgaactaggagaaccaag

SEQ ID NO: 23412 - DNA, 229 bp, Zea mays
caatgagtggagcgcgcgtcgcgctctgggcatgggatatcgtcgtcggcggctgcgctgtctgccgcagccacatcgtggatctatgcgtctagtgccatgctagccgagccagcgcgaccagcgatgagtgcactgttgcttggggagtctgtaatcatgctttgcacttccgctgcatcggcatgtggcttgagactcgtcgagtgtgcccattagatagcagtga

SEQ ID NO: 23413 - DNA, 232 bp, Zea mays
acgggaaaaagctcgaagatattgttccttcgtcacacaactgtgatattccgcatgtgaaccgtactgagtatcagctgattgatatatcagaggatggatttgtgagccttcttacttcagatggcaacactaaggatgatcttagactcccaactgatgagactcttgtggcccagatcaaggaagggtttgaaagtggcaaggatcttgttgtgactgtccagtctgc

SEQ ID NO: 23414 - DNA, 224 bp, Zea mays
agcgtcgcctgcatcgccgtgttcgtcgtcgagatgtacgataacaactgccccaagcacgggagccagctcggcgactgcgtccgtgcttccaccgccgcttctccttccagccgctccgcgagaacccgctgctcggcccgtcctcctccactttggagaaaatgggagctcttgactggaataaaattgtccatcaaaaccaagggtggcgccttattagc

SEQ ID NO: 23415 - DNA, 225 bp, Zea mays
aagatcagaccacgtttgcgaacagctctggagatgctgagaacgacacaagatatagaaaggcgtctagaagaggtttctttgcccttgatcattttgcacggtgaggctgatatggttactgacccggcggttagtaaggctctttatgagaaagccaatagccaagacaagaagctgtgcctctacaaaggtgcgtatcacgctatcttggaaggtgaaccg

SEQ ID NO: 23416 - DNA, 225 bp, Zea mays
ggtgattgtgagtggaaagctcagggcccaaagagccaagtccatggagttcaaggatggctacatgatctcatctggtcagccagtgaacgagtacattgactctgctgtgagacacgttcttctcaggcatggtgttctctgtatcaatgtgaagatcatgcttgactgggaccctaaggcaaggttggcccggtcgctcctcttccggacctggtgaccatc

SEQ ID NO: 23417 - DNA, 225 bp, Zea mays
cccacgcgtccgtaaaacatgaggtctggaggttggaaaaaataggaaaggatggctcattccataagaggctgaacaaatctggaatatctacagttgaggatttccttaggctcgtaattcgggacccacagaaattgcgcagtatacttggaagtggtatgtccaacaaaatgtgggatgcccttgtggaacatgcaaagacttgtgtcttaagtgggaaat

SEQ ID NO: 23418 - DNA, 109 bp, Zea mays
gatgcaccacgaggcacttcatgaggctcttccgggtgacgatgttggcttcaacgtgaagaatgttgctgtcaatgatctcgagcgtgggtttgtggccgccaactcc

SEQ ID NO: 23419 - DNA, 244 bp, Zea mays
atatcattgcaaaatatgaaggcggccttgatgagaaattcctcgggtgcaatgaatgattctaggattcttgactttgttaactcaatatgcaatatccaatatggcatgattgattttgaagagttctctgctacgaccattagtgtatatcaaatggaaggcctggagacctgggaagaacatgctcaacaagcatatgaattgtttgacaatgagggcaaccgaccaatcgtgattgaag

SEQ ID NO: 23420 - DNA, 226 bp, Zea mays
  unsure (1)..(226): unsure at all n locations
cccacgcgtcgggaccgtgggtcgagcacgcgtccggggcgcagagaatccccaagcaaacaaacacggtaactggacctnagatgacaggagaggagatgttgggtctgggacaccatggctccgatgaagctgtacggggcggtgatgtcgtggaacgtgacgaggtgcgcaacggcgctggatgaggctggctccgactactagatcgtgcccatcaacttcg

SEQ ID NO: 23421 - DNA, 245 bp, Zea mays
cggagccgtggagcctaccatgggaggggctgaaagccgggaccaagaagcagaaatatgacaaaatcagcgagaaaaagatgctcactcccgtggaggtactctgcaaatcgtatccatcagaatttatctcctatttccactactgccgttcattgcggtttgaagacaagcctgattactcttacctgaagagactattccgcgatctctgtattcgggaaggataccagtttgactatgtg

SEQ ID NO: 23422 - DNA, 244 bp, Zea mays
cccacgcgtccgcccacgcgtccggcgacgacctcctcaagctccccatgccgcagagcatcaaagaggacaagacaggttggatgacatatgaggagtttggacgggagattctcgccggcgtgaaccccatgctcgtcaagcgtctcacggagttccctccgagaagcagtcttgacccgagcaagtacggcgaccacagcatcaccatcagggaggcggacctcgagaacaagctcgaggg

SEQ ID NO: 23423 - DNA, 242 bp, Zea mays
tgtcactcaacaacttcgaacgatttacagacaggagccttacttcaattgcaaaagggtgcaagaatctcacagatcgtgttctcactgattgccagttactaactgatagaagccttgaatttgtagctcgtaactgcaagaagttagcacgtttgaagatcaatggttgtcagagcatggaatctgttgcactggagcacattgggcgatggtgtccgcgccttttggagctctctcta

SEQ ID NO: 23424 - DNA, 222 bp, Zea mays
gggaggaattcgtgagatctgtggcgtgtcaggcgtgcgagcgcgggaatcaggggtttcacacatagcttcgtctatttgaatttgatgtactaatggagtctaagggtggcaaaaagtctagcagtagtcgttctagtgatgatgaagctcgccttggctacagcattgaggacgttcgacgctgccggagggtggaagaagttccagtctgcggcttac

SEQ ID NO: 23425 - DNA, 238 bp, Zea mays
gggagtcagaggaatctgacgaagaagagaactacttttccattgaattgacaccaagtttgtttacatctgccgtcgataatgcctaccagtcgatacatgacttctcaaagcctttgatcaacatgatgaaggctgcaggttgggatcttgatggggctgctagtgcgatcgagcctggtgtggtttacacaagaagggctcacaagaagtttgcttttgaatcctatatttgcca

SEQ ID NO: 23426 - DNA, 239 bp, Zea mays
aaagtgtactagcaaatgaaccagtctctgtcaagagtggccagttcattgttgaagtcaaaccacagggaataagcaagggaatagttgccgagaggatacttgcatcagtgaaggagagaggaaagcaggctgatttcttattgtgcatcggcgatgataggtctgatgaggacatgtttgaaaatattgctgatatcattgggaggaatttggttgctccaagaacagcactggtt

SEQ ID NO: 23427 - DNA, 240 bp, Zea mays
ggcatggacgtcgtcaaggccatcgagaaggtgggcacccgcaacggctccacctccaaggtggtcaaggtcgctgactgcggacagctctcctagatctctctgatctggtctgttcggccgccctccctccgtcatcgtcgactccccctgcgtccgttcctttggatctgaataagatggtggtgatctgagtggtggtcttagttatcatgtatcgctcgcagtttaatttagcgg

SEQ ID NO: 23428 - DNA, 247 bp, Zea mays
cccacgcgtccgtcgccgccgccgctgccaacgccgcctgctggcgcagccgccatgggggcgtacaagtatgtgtcggaactatggaggaggaagcagtcggacgtgatgcgcttcgtgcagcgcgtgcgctgcgtgggagtacaggcagcagccgtccatcgtccgcctcaccaggcccacccgccccgacaaggcccgtcgtctcggctacaaggccaagcagggatatgttgtctaccgtgtc

SEQ ID NO: 23429 - DNA, 238 bp, Zea mays
ggggacttcgtgcccgaccgcttcctcggcgaggagggcagcaagctgctgcagtacgtgtactggtccaacggccgtgagaccgagaaccccagcgtcgacaacaagcagtgccccgggaagaacttcgtggtgctggtcggcaggctcctcctcgtcgagctcttcctccgctacgacacattcaccgccgaggtcggcaaggagctgctcggcaccagcgtcatcttcaccggtg

SEQ ID NO: 23430 - DNA, 238 bp, Zea mays
cccacgcgtccgggtccctgttgatgctgtcttccagaaggatgagatgattgacatcattggtgtgaccaaaggtaaaggttatgagggtgtggtcactcgttggggtgtcacccgccttccccgcaaaacccacaggggtctccgcaaggttgcttgtatcggtgcatggcatccggctagggtctcgtatacggttgcccgtgctggtcagaatgggtaccaccaccgcactgag

SEQ ID NO: 23431 - DNA, 108 bp, Zea mays
ctcataaccaagatcgataggcggtctggcaaggagcttgagaaggagcccaagttcctgaagaatggtgatgccggtatggtgaagatgattcccactaagcccatg

SEQ ID NO: 23432 - DNA, 211 bp, Zea mays
cccacgcgtccggacaagaccaagcgtatggtcatccctgacgctcttaaggttctgaggctacagcctggacacaagtactgcctcctcggcgagctctctaaggaggtcgggtggaactaccatgacaccatcagggaacttgaggagaagaggaaggagaaggccaaggttgcctacgagaggaagaagcaattggccaagctgcgtg

SEQ ID NO: 23433 - DNA, 226 bp, Zea mays
cccacgcgtccgctcctcagactcctctccgcacataccctccctacctcgccgtcgccgtcgcatctgccatgggggcgtacaagtacgtctcggagttatggagaaggaagcaatccgacgtgatgcgggtcgttcaacgcgtgcgctgttgggagtacaggcagcagccggccatcgtccgcctcacaaggcccacccgccccgacaaggcgcgccgcctcgg

SEQ ID NO: 23434 - DNA, 141 bp, Zea mays
gagaggcactggatctggcatgggcacccttcttatttccaagatcagggaggagtacccagacagaatgatgttgacgttctctgtattcccatcaccaaaggtctcagatactgttgtggagccttacaatgctacact

SEQ ID NO: 23435 - DNA, 124 bp, Zea mays
ggcggcctctcgcctgccagaccgcgataacggtgttcgacaagatcacgagacccggtttcctggccgaggtgtccatggaatgggagagcttcaagcagctgctccgcgccatgctgagcgg

SEQ ID NO: 23436 - DNA, 207 bp, Zea mays
gaagtctggtgcttcaatgaggtgccctgggtgccaggctcaggtatgagagtcaccattcgtcagctggggccttccatgatacagcagatgcagcagccttgcaacgattgcaaggggactggggagatcatcaacgagaaggaccgctgcccagggtgtaagggtgagaatgtcgttcaggagaagaaggttcttgaggttcat

SEQ ID NO: 23437 - DNA, 222 bp, Zea mays
cttctctccttttgctcggaacgcacacacagcccggtccccgatctccgatcccctcgtcgatccaagtttggtgattcttatgcagatgcagatcttcgtcaagaccctcactggaaagactatcaccctcgaggtggagtcttctgacaccattgacaacgtcaaggccaagatccaggacaaggagggcattcccccggaccagcagcggctcatctt

SEQ ID NO: 23438 - DNA, 208 bp, Zea mays
cccacgcgtccgccacggtccgtcgctagtgcctccgaccttctacttcgtgctaccgatggaatgctcgtcgatggtgaagcttgtactgtgccacagcttgagcttctggaagtgaccgctcgggctgtccatcttatcatcgaatggggagattcaggtttatcagttgcagatggtctttcaaatctgctgaagtgccgtctat

SEQ ID NO: 23439 - DNA, 221 bp, Zea mays
gcgattatcttcactcgtggagatgctctacaaacaattgatatgaatcaagacaactatctggaagaagcttacaaaatgaggaatgtccttcaagagtttgtaaggcatcctagggacaaagctccaactatccttgggttaagagagcatatcttcactggaagtgtttcatctcttgctggcttcatgtcatatcaagagacaagctttgttacaat

SEQ ID NO: 23440 - DNA, 217 bp, Zea mays
aacagcgtcaaggacgaggaagggtacccggccttcgcgctcgtcaacagggtcaccggcgaggccatcaagcactcccagggcgatggccacccggtcaagctggtgccctacaaccccggctaccaggacgagtcggtgctttggacggagagccgcgacgtcggccacggcctccgctgcgtccgcattgtcgacaacatctacctcaacttcg

SEQ ID NO: 23441 - DNA, 110 bp, Zea mays
cccacgcgtccgatggacaaatgtcaacatagctcctgatgagaaggttgacaaggggcaggatatccatatgcaagcagccccatctcaagcagaactgttgtataaga

SEQ ID NO: 23442 - DNA, 104 bp, Zea mays
atgggcgccaacctcttcgaccggccgcagcccaactcccccaccgtctacgactggctctacagcgacgagaccaggagcaaccagcgctagatcgggcgaga

SEQ ID NO: 23443 - DNA, 154 bp, Zea mays
accgtccgccaggtccgccacggtccgccactcgtccggttcctccgagcccaggagcagccccgcgccatgaggaagtgtgttcttttaacaatatgtcgagggaggagaatgtttacatggccaagttggctgagcaggctgaaaggtatgg

SEQ ID NO: 23444 - DNA, 218 bp, Zea mays
gaccgtgggaagttcatctacatctccactgaagagatgaaggcagttgcagagtacattaggaagcaagggagagtgagcatatcacatctggccaacaactcaaaccagttcatcgatctggagccgaagcccagtacgaggtggagagccagcaggatgacagtgcagaagcaggcacagaagcatgagaattccttgtgacctggcaccatgtc

SEQ ID NO: 23445 - DNA, 220 bp, Zea mays
gatttacattgtggatcatgttaatctgaatgcttgtagtgtgcctgaggttcttcggccactctatgaatcccctaagatactggcacagaagatgactgcggcggcgttgcgacacattaggcaaattgcacatgagtcaagtggtgaaatgccctatggtgctgggcgacaccggctgttctcagaactttcagtcaaaggctcagcagaggcttca

SEQ ID NO: 23446 - DNA, 255 bp, Zea mays
atataaggtgatgttctatgacttgggccatgttctctgggacaccctttatgttggtgatactgcatcaaacagggtggaggtactgttgagggaacttgaccctgtccttgagacgatatctggtatggtgcacaacaaagtgcggaaccgtgctattactgcactgatgaaagcaacttttgatggtttcttgctggtgcttcttgctggtgggcctttgcgtgctttcacccgccaagactctcagataat

SEQ ID NO: 23447 - DNA, 236 bp, Zea mays
cccacgcgtccggcaacagtcgcatcggcagggccagggcctgggtcctggcccgaggggccgcatcatgagcatcacgggcagtgggcgaacttgcctccggaactgctgctggatgtgatacagagggtggagtccagcgaggcgacgtggccggcgcggcgccaggtcgtggcatgcgcgccatttgccgatcatggcgcgaggtcaccaaggaggtggtgaagacgctcgag

SEQ ID NO: 23448 - DNA, 199 bp, Zea mays
cagacggtgggcggacgcgtgggcggacgcgtgggtgcgggaagaagtacctgcgcgtccaggatgatactacgactgggagcgcatcgtccgtggcacatcgccaccaaggagaacatggagtctctgatatcgatcggccaggagctgctcaacaagccagtggcgagagtgaacatcgacacagggctgtacgagt

SEQ ID NO: 23449 - DNA, 249 bp, Zea mays
cgccacgttccaccagccggcgccccttcttctcactccgctggcgccggcgccgcgttatccatggcgtcggagaagaagcaatccaacccgatgagggagatcaaggtgcagaagctggtgctcaacatctccgtcggagagagtggggatcgcctcacccgcgccgccaaggtcctggagcaactgagtggccagtcaccagtgttctctaaggctaggtacactgtccgttcctttggtatcagg

SEQ ID NO: 23450 - DNA, 217 bp, Zea mays
gtctgccactcgctgggaggaggtactggttcaggaatgggcacgctgctcatcgctaagatcagggaggagtacccggatcggatgatgttaacattctctgttttcccgtcgcccaaggtgtctgatactgtagtggagccctacaacgcaacgctctctgttcaccagctcgttgataacgcagacgagtgcatggtgctcgacaacgaggctc

SEQ ID NO: 23451 - DNA, 241 bp, Zea mays
acgaactagacgagggaagagcgctgaagcctgaagctgtggaggaaaacgaaggatctccccgtgcttgtgtatgccaagtcgcctgctctccgtccgcatcccgtccctcgcgaaactcggcgctcccaggtgtgcaaaatccatggcttcagacactggcaagaagctcatccagatcgatgtgagctcggacacagtatgcccttggtgctttgtcggcaaaaagaacctcgagaaa

SEQ ID NO: 23452 - DNA, 242 bp, Zea mays
atctgggctgtgtctggcgttgctttccatacttgcagaccggaacaaggataaggatgtcggagagggattagtgtcagttgaagatattgctatggagcactggaaaacctatggcaggaatttcttgtctagatacgattatgaggcgtgtgaatcacacagtgcaaaccagatgatggatcacgttagagatgttatggcaaatagcaagcctggagagaaatacggaaattacaccc

SEQ ID NO: 23453 - DNA, 235 bp, Zea mays
gtccgtgctcgcgagagtggttttgagatccgtgattgcgagtacagtcctgaagcacaggagagccggatgcgggagatggagaggctactgcgagagcaagaggctatgaggaccactcttcttcagtggtgttatgccagctacagcgaggtattcagttcctggatgcgcttgtgtgctgtgcgtgtgtttgtggagagcattcttagatatggtctgcggccatcattcc

SEQ ID NO: 23454 - DNA, 236 bp, Zea mays
ggcgccgccaaggccgatgccaagctggcggtgaagagcaagggggcggagaagcccgccaagggcaggaaatggaaggccggcaaggaccccaacaagcctaagagggctcccagcgctttcttcgtgttcatggaggaatttcgcaaggagttcaaggagaagaaccctaagaacaagtctgtcgctgcggtggggaaagctgctggcgacaggtggaaatccctgagcgagtc

SEQ ID NO: 23455 - DNA, 217 bp, Zea mays
cgaggacgtcgtccaggcttgctttgaagggaacccattcaagacagttccaggcccatttaagctcttctggcaatgcatgcgctcaaaacctggggaggaaccaaccgagccctatacctacctgcagctagatcctccgagaagggtggaagtgaatctggagcaaacaggaagtgaaccttgaacgagcatgcctagtttaccatctcgtggc

SEQ ID NO: 23456 - DNA, 244 bp, Zea mays
gatttgtgttaggggacctataatattctgtggttactataaagatgaagtccaaacaagagaggtcattgatgaggatggttggttacatactggagacataggtttgtggctgcctggagggcgtctaagaattatagataggaaaaagaacattttcaagttagctcaaggagaatacatagctccagagaagattgagaatgtctatgctaagtgcaagttcattgctcaatgctttata

SEQ ID NO: 23457 - DNA, 247 bp, Zea mays
gctgtcgcaaatggcccaattgtccttgagatggatacctacagataccatggccactctatgtcagatccaggaagcacttaccgcaccagggatgagatttcaggtgtcaggcaggaacgggatccaattgaaagggttagaaagttgcttttgactcatgacctggcaaatgctgctgagctcaagaatatggagaaagaaatcaggaaacaagtagatgacgctattgctaaagcaaaggaaa

SEQ ID NO: 23458 - DNA, 240 bp, Zea mays
ggacctggcggccatggcgacctccttccaggggacgaccaccaagtgcaccgcctgcgacacgacggtgtaccttgtggacaagctcaccgccgacaaccgcatctaccacaaggcctgcttccgctgccaccactgcaagggcaccctcaagctcgccaactacaactccttcgagggagtgctctactgcaggcctcacttcgaccagctgttcaagaggacagggagcttggacaa

SEQ ID NO: 23459 - DNA, 242 bp, Zea mays
cccacgcgtccgcccacgcgtccgcccacgcgtccggaacaccattcctggtattgaagaggtcaacatctttaaggatgatgttgttattcagtttgtgaatcctaaagtgcaagcttcaattggtgctaatacatgggtggtcagtggaactccacagacaaagaagctgcaagatctgcttccgtccattatcaaccagctcggccctgacaacctagacaacctgcggaggcttgcgg

SEQ ID NO: 23460 - DNA, 240 bp, Zea mays
cacaacttaaagatttcagactttggtttgagtgcacttccaaactgcaagagaaaagatgggttactccacacaatttgtgggactcctgcatatgttgctccagaagtaattagtcaaaaaggatatgatggtgcaaaagctgacatatgggcttgtggagtgatcctctatgtgttgttggcgggctatcttcctttccaagacaagaacatgatggacatgtataagaaattttgc

SEQ ID NO: 23461 - DNA, 243 bp, Zea mays
tgaaaaaaaggaggtcctgttggaggatcatgaccctgtctggcttgagcttaggcatgcacatatagcagatgcaagtgagaggctacatgataagatgaccaacttcatttcaaagaacaaagctgcacaattgcatcaagcacgaaccgatggagaattatcgacaagagatttacaaaaaatggttcaggctcttccacagtacagtgatcaaattgataagctttccctgcatgttga

SEQ ID NO: 23462 - DNA, 237 bp, Zea mays
aagacgagcagcaaagcaaaccgtatttgtcccgcggcggcctcttcgtcccgcaaggtcgccccacctagatccggccacgccgcacgttccccttttccgccgcagcgatggtgtacgtggattcctgggacgagttcgtggagcggtccgtgcagctcttccgcgccgaccccaacaccacccgctacgtgatgaagtatcggcactgcgaggggaagctcgtgctcaaggtca

SEQ ID NO: 23463 - DNA, 226 bp, Zea mays
ggttttgatacggctgtggaagaggcccagcgtgccattgattcagctcatgaggaagcttgcagtgctgagaatggaataggtttagtaaaactgatgggccgttatagtgggttcattgcgatgtatgctactcttgctagtcgagatgtggactgctgtttgattccagagtctccattttatctggatggagagggtggattgcttcaatatgtagagaaga

SEQ ID NO: 23464 - DNA, 228 bp, Zea mays
gaagaaggcgagcgcgcggtgtccaccactccctctcctctcccgtcctatccatccggcacgcccagcatccatccactcctcccctgctccggctccggctccggctctgccatgggcctttcaacagtttactccccggccggaccgcgcctcgtgccggcccctctcggccgctgccgctctgcccagccccgccgcccgcgccgggcccagctcgctaccgtc

SEQ ID NO: 23465 - DNA, 229 bp, Zea mays
aatagctgaggttcttggcacaggagacctgtataactaccttgaaaaatatggcctccagcttgacccacagcttgaaagacttattggaagacataataggaaaccatggcccaagtttgtgaatgctaggaacagacatcttgcaacacctgaggctattgatttggtagataaactcctccggtatgatcaccagaaaaggcctacagccaaggaaaccatggct

SEQ ID NO: 23466 - DNA, 229 bp, Zea mays
gtggccccgtgctattcaagaactcactagcctgaaccatattgaagaggctgctgttcttagtacctgtaatagaatggaaatttatgtggtggcgctatcatggaaccgtggtatcagagaagtagtggactggatgtcgaagaaaagtggtattcccgcttccgagcttagggagcacctgttcatcttgcgaacagtgatgccacacgccatctgtttgaggtgt

SEQ ID NO: 23467 - DNA, 232 bp, Zea mays
cccacgcgtccgcccacgcgtccgcccacgcgtccgcggagcactacaagcgcgctgatggcacaggcccgctcatctacctcaagagggaggacctcaaccacacaggcgcccacaagatcaacaatgctgtggcgcaggccctgctcgccaagcgacttgggaagcagcgcatcattgccgagacaggggctggccagcacggtgtcgccaccgccactgtgtgcgcccg

SEQ ID NO: 23468 - DNA, 232 bp, Zea mays
ccagctcatccgccagggcaagatcgccggccgcgccgttctcctcgcgggccagcccggtaccggcaagaccgcgctcgccatgggcatcgccaagtcgctcggcgcggagacgcccttcgcctccgtcgcagcctcggagctcttctcgctcgacctctccaagacggaggcgctcacgcaggccttccgccgcgccatcggcgtgcgcatcaaggaggagacggaaatc

SEQ ID NO: 23469 - DNA, 252 bp, Zea mays
cggacgctgggcggcacgcaggctagcagcacagcagcagccagagccatcccctctcctcgctacgctacgcttcctcggcgccgattcctcctcctcctcctccaccctcgtccgtccccttccggcgcacgagctcgcccgagatggcgaacgcgagatcgggtgtcgctgtgaacgatgagtgcatgctgaagtttggcgagctgcagtcgaagaggctgcaccgcttcataactttcaagatggacg

SEQ ID NO: 23470 - DNA, 245 bp, Zea mays
gcaaagcaagaactgatcaaaagttagtagcactgaacaagatcacgttttttttgtggttgatgttcttggggccaggctgttcctccagtaccccttgccgtatttcttcaggcctaagaggaacagcctggccccaagaaatacggcaagggggactggaggaacatatcgcgcaactacgtccagacgcggacgcccacgcaggtggccagccacgcgcagaagtacttcatcaggctcaa

SEQ ID NO: 23471 - DNA, 243 bp, Zea mays
ctacatgtggctggccaggttgcaggtgcatctgtttcaacctcacctcttccatatggtacaatgactagtcaatgtgaagcccttggattgggcaccaggaagaagctatcgagctggcttgtcaatggacacgaatcaaccccggacaatcctatgccaagccttcccactgcccatcattccatcattcccaaggtaaaccctgccacgttccgcacatcatctgaatcatgttctgca

SEQ ID NO: 23472 - DNA, 244 bp, Zea mays
cccacgcgtccgcccacgcgtccgggagaagcagccgccgttgctgctgccgcgtccacagaatggggggattcgtgaagactcataagaccaatgcgtatttcaaacgtttccaagtgaaattcaagagaaggcgggctggcaagacagactacagggccaggataaggctgattaaccaagacaaaaacaagtacaacacacccaaatacagatttgttgtgcgatttaccaacaaggacat

SEQ ID NO: 23473 - DNA, 246 bp, Zea mays
cccacgcgtccggccatccacaatggcgagggcaagtgctggacctccaaggtgaagagcgaggaggagctgacggctgctattgagacagcgctaggggagaagaaggactgcctgtgcttcatcgaggtgatcgcgcacaaggacgacaccagcaaagagctgctggaatggggctctagggtttctgccgccaactcccggccaccaaatcctcagtagaagtcccgcacgctccaagcctcg

SEQ ID NO: 23474 - DNA, 250 bp, Zea mays
ctctcgctggggctcgtgctcctctacttcttcacctcaggcagcaccgttggtctcgtggagggacagaagacgtggtgcatcgccaagccgtcggcgtcgaacgagatcctggcgcagaacctggactacgcgtgctcccaggtgagctgcgccgtgatccagaagggcgggccgtgctactacccggacagccccgtgtcccgcgccgccgtcgccatgaacctctactacgcctacagcggcaggc

SEQ ID NO: 23475 - DNA, 249 bp, Zea mays
gaagaggtacagagggatgtcataccccttctctgttcaatattcttagcgagtcaaagtactggggaaactgctgaagctatatcaccggatgacgaagaatctttgttgcaaggagaacgcgaaccgaaatgatgatcgtggaggcctacgcagcacttgtgctcgcctttctttcaacggaaagtatgaaggttcgaggagccatttccagctgccttccggacaacaacttaaaagttcttgtac

SEQ ID NO: 23476 - DNA, 237 bp, Zea mays
caagaaaataagcttgctggatggggatatagtgctggaggacttctggtggcctcggcaattaattgtcgtccagatttgtttcgtgctgctgttttaaaggtccctttcttggatgtttgcaacacccttctccatcctattgtacctcttacagccattgattatgaagagtttgggtatcccgtggattatgaggaattccttgcaatcaggaagtattctccttatgataac

SEQ ID NO: 23477 - DNA, 238 bp, Zea mays
cggacggtgggttacagcagcatttcaatctgacaacaacctagggttggtgaagcaagtgctctcatcgaagtacaaacggaacatccaaaggctgacccagacttacttaactctttcacttgaagatattgctaggtctgttcaacttgaaacaccagaggatgctgaaatgcatgtacttcgcatgatcgaagatggagagatccatgcaaccataaaccagaaggatggaatg

SEQ ID NO: 23478 - DNA, 233 bp, Zea mays
gcaccgaggaagcagccaaggaccctctcgatctttcttcgggtagcaaccttggaaagacaggccaagcacccgcggcagcctccaagcctagcgcaaagaaagacaattttcaggtcaagtccggcatatgggcagactcgctgagccggggattgattgatctgaacataactgcaccgaagaaggtgaacctagctgatattggcatcgtcggtggccttggcgatggg

SEQ ID NO: 23479 - DNA, 238 bp, Zea mays
gcgggcagcagcacacagccccatcccaatcctagtcgatcttcttcccctcctcaaggaagaaaagaagctgaaccatggggaagagaaagtcagctgctaagccacctcctaagaagcggatggacaagcttgacactgtcttttcctgcccattctgcaaccacgggagtagtgttgagtgccgaattgacatgaagaatctgattggcgaacatcttgtagaatctgtcaggaa

SEQ ID NO: 23480 - DNA, 243 bp, Zea mays
agatctgaggtcaatggatctactcaaataaagcctccaaaatttcaaaagggtgtattacgtacaaactgtatagattgtttggatcgcacaaatgttgctcaatatgcctatggcctagctgctctaggataccagttacatgcacttggttctgtagaatctccagaagttcatttagactcccctttgtctcggcatttgatgcatttttatgaacggatgggtgacacacttgcttta

SEQ ID NO: 23481 - DNA, 240 bp, Zea mays
cccacgcgtccggaagaaacaaaggagaagaagaatgctgttgaagcttatgtgtatgacatgcgtaacaagctatatgacaagtacagtgattttgtcacgtctgaggacaaggaaggtttgattgctaagcttcaggaggttgaagactggctctatgaagatggcgaggatgaaactaagggggtttatattgctaagctagaagaacttaaaaaagttggtgatcctattgagctg

SEQ ID NO: 23482 - DNA, 236 bp, Zea mays
catacaatgcaaccctgtctgtccatcagttggttgagaacgctgatgaatgcatggttcttgacaacgaagcactttatgacatttgcttccgaactctgaagctgacgacccctagctttggagacttgaaccacttgatcagtgcaacgatgagtggtgtcacttgctgcctccgcttcccaggacagcttaactctgacctgcgcaacttgcagtcaacctgatcccgttcc

SEQ ID NO: 23483 - DNA, 230 bp, Zea mays
  unsure (1)..(230): unsure at all n locations
cccacgcgtccgctagctagttgctctactagagggcgggtatagagctgcctgcaatccgccgctgataatggacgatcggaagctacggtgaggtcgtttgctcctgtctttctgtctgcggtcgtggcctggctcgagctggcgtgcaccggcatggcggcaacttctaccaggacacagagatgacctggggcgatggcccggcaangtattttactgcgggtgcg

SEQ ID NO: 23484 - DNA, 231 bp, Zea mays
cctgaatttcagagtcattgctctttctcctggcttcagaaagctttcttcggagcactttgtttcttcttataacagggcttctagaagggcaatatttctcgactacgacggcacacttgtgccccagtcgtcaatcaacaaggctccaagtgaagaagtcatctccattcttaacaccttgtgtaatgatccaaagaacgttgtgtttatcgtaagtggacgaggacg

SEQ ID NO: 23485 - DNA, 233 bp, Zea mays
acacacgcgtccgcccacgcgtccgcacacgcgtccgcggacgcgtgggcgagaccaccaagtactactgcactgttattgatgccccgggacaccgtgacttcatcaagaatatgatcactggcacttcccaagctgactgagctgttcttatcattgactcaaccactggtggttttgaggctggtatctccaaggatggccagacccgtgagcatgctctccttgctttc

SEQ ID NO: 23486 - DNA, 245 bp, Zea mays
ggtacggcccggaccgcgtcaagtacctgggccccttctccgcccagacgccctcgtacctgaccggcgagttccccggcgactacggctgggacaccgccgggctgtccgcggacccggaggcgttcgcgcggaacagggcgctggaggtgatccacgggcggtgggcgatgctgggtgcgctgggctgcatcaccccggaggtgctggagaagtgggtgcgcgtggacttcaaggagcccgtg

SEQ ID NO: 23487 - DNA, 245 bp, Zea mays
ggtggccgggctcggcgtcgccaaggacctgggcgacagcgtcggcttcctagccggcacgctctgctccgtgctcccgctctgggccgcgctcctcgtcggcgccgcgcagaacctcgtcggatacggatgggtctggctcgccgtcacgcgccgtgtccccgtgcccccgctctgggcgatgtgcattctaatcttcatcggtaacaatggtgagacatacttcaacactgctgcacttgtct

SEQ ID NO: 23488 - DNA, 238 bp, Zea mays
agaagctgaactgaagaagattgaggaacaactggacaagaagaacgctgaatatgcagagaagatgaagaacaaggttgcaatgatacacaatgaagccgaagagaagcgagacgatggtggaggcaaaacgcggtgaggaggtcctgaaagccgaggagatggctgccaagtaccgggccaccgaccacgctcataagaagctcatcggctgcttcggagcctaagaaaccttcca

SEQ ID NO: 23489 - DNA, 244 bp, Zea mays
cggacggtgggtgcagatcaaggagaaggctctgttcgactgcgagcgtggagcggcaccaaaggcgacgacggaccagttcaagtgtgccagatgtgggcagcggaagacgacttactaccagctgcagactcggagtgctgatgaaccgatgacgacgttcgtcacatgcgtgaactgcaacaatcactggaagttctgctgagtgttcagccttgctaaagtgtttacttagttgtgctga

SEQ ID NO: 23490 - DNA, 240 bp, Zea mays
ttcaggtcgattttgggaggatttggtgctagtggtagtaggcgaccagcttgagtatagcgatgatgtctgtggtgttgtgcttagtgtccgtttcaatgaagacattctgagcgtctggaaccggaacgcatcagaccatcaggctgtgatggcattgagggattctatcaagaggcacctcaagctgccgcacagctatctgatggagtacaaaccccatgatgcttcgcggcgtga

SEQ ID NO: 23491 - DNA, 241 bp, Zea mays
cggacggtgggtgcagatcaaggagaaggctctgttcgactgcgagcgtggagcggcaccaaaggcgacgccggaccagttcaagtgtgccagatgtgggcagcggaagacgacttactaccagctgcagactcggagtgctgatgaaccgatgacgacgttcgtcacatgcgtgaactgcaacaatcactggaagttctgctgagtgttcagccttgctaaagtgtttacttagttgtgc

SEQ ID NO: 23492 - DNA, 241 bp, Zea mays
ggatgaaagatgctcgaagttgaaaatatacccaatactgcagaaggtttaccatgaaagaattttgaggaaaccagaaattgatgcatttgcagaggagcttaggccgcatcaaaaagctttattaccagataagtcgactgtgcttgaccgagcaatgatcgagcataatctccttagtgccagtaaactttacacaaatatcagctttgatgagcttgggacattactggggattgat

SEQ ID NO: 23493 - DNA, 241 bp, Zea mays
cccacgcgtccgcccacgcgtccgacgactgcttcgtcgagggctgcgacgcgtcggtgatcctggtgtccacggggaacaacacggcggagaaggaccacccgagcaacctctccctggccggcgacggcttcgacaccgtcatccaggccaaggcggccgtggacgccgtgccggcgtgcgccaaccaggtgtcgtgcgccgacatcctggcgctggccacccgggacgtcattgagct

SEQ ID NO: 23494 - DNA, 239 bp, Zea mays
cccacgcgtccgggtcctagagctctccaatgaccctagccccggctataacatcgagcagcttgcaaagaagggagaaaaattcattgatgtcccttatgttgtgaagggtatggatgtgtcattcagtggcatattgagctttattgaagctgcggcgattgaaaagcttaaaaataatgagtgcacacctgcggacctatgctactcattgcaggaaactatctttgccatgcttg

SEQ ID NO: 23495 - DNA, 237 bp, Zea mays
cccacgcgtccgctccttaaccaattagatggatttgatgagctaggaaaggtaaaaatgatcatggccacaaatcgacctgatgttctggacccggcgctcctgcgtcctggacgtttagataggaagattgaaattccgctacccaacgagcaatcaagaatggaagttctaaaaatccatgcagccggtatcgccaagcatggggagattgattatgaagcagtcgtgaaacta

SEQ ID NO: 23496 - DNA, 237 bp, Zea mays
ctcaactcccaaggtccctttgtttttctcgatctggaagcgccgcagtagcagccatggacgtgagcggagcaggcggtaaggcgaagaagggcgcggcggggcgcaaggccggcgggccgacgaagaagtcggtgtcgcggtcctccagggccgggctgcagttccccgtcagccgcgtcgggcggtacctcaaaaagggccggtacgcgcagtagtaggcacgggtgcccccgt

SEQ ID NO: 23497 - DNA, 234 bp, Zea mays
cctgaattgaatggcaagctcactggcatgtccttccgggttcccaccgtggatgtgtcacttgttgacctcactgtcagaatcgagaagggggcctcttacgaggaaatcaagaaagctattaaggctgcttctgagggcccactcaagggtattatgggctacgtggacgatgatctggtttccaccgacttcaccggtgacagcaggtcgagcatcttcgacgtcaaggcc

SEQ ID NO: 23498 - DNA, 236 bp, Zea mays
cccacgcgtccgctccgttcaatgaggagcacagggcatggcagcaattgcggagaggtcgttatgtggagttcaaccttgtctacgaccgtggtaccacatttggcctaaagactggaggaaggattgagagcatacttgtgtcccttccgcttacagcacgatggcagtatgatcataaaccggaagaaggaaccgaggaatggaaacttctggaagcctgcataaacccgaag

SEQ ID NO: 23499 - DNA, 240 bp, Zea mays
  unsure (1)..(240): unsure at all n locations
cggacggtggncggcgattggcgcacagatattgcgggatctaggagtccgttcaatgaagctgatgactaataaccctgcgaaatatagtggtctcaagggctatgtattgagcattgcgggcagggtgcccttgattacgccaattaccagtgagaaccgtagtacctggagactaaaagaacaaagatgggacatgtatatgggttggccaatgcgcaggccaacctagcaaatggc

SEQ ID NO: 23500 - DNA, 161 bp, Zea mays
caagacaattgcaatgcttagtcaggattttatttatgatgggtgtactatacttgtccatgggtattccagagtagtactggaagttctaaagcttgctgcatccaatcgcaagctcttcggggtactatgcacagagggcacgccagacatatcttttt

SEQ ID NO: 23501 - DNA, 160 bp, Zea mays
caatgacagaagatgcccagaatgctttgaggcgtaccacagagacttactccaaagtgaccagattcttttttatatgcaactatatcagcaggataatagaaccacttgcatcaagatgtgcaaagtttaggttcaagcctctttcagaagaagtggt

SEQ ID NO: 23502 - DNA, 232 bp, Zea mays
gcttgaatcattcggtcctcttcgagggtttgatcttgtgaaggatagggaaactggtaactcaaaaggctatgcattctgtgtttaccaggacctcaccgtcactgacatcgcttgtgctgcactaaatggtatcaagatgggtgacaaaacccttactgtcagacgagcaaaccagggggcatctcagcccagaccagagcaggaaagtatcctattgcaggcacaacaa

SEQ ID NO: 23503 - DNA, 231 bp, Zea mays
actgcaccggcctccagggcttcctggtcttcaatgccgttggtggtggcactggctctggccttggttctctcctccttgagcgcctgtctgtggagtacggcaagaaatccaagctgggcttcactgtgtacccatctccccaggtgtcaacctctgttgtggagccttacaacagcgtgctctccactcactcactcctggagcacactgatgtctccatcctgctcg

SEQ ID NO: 23504 - DNA, 235 bp, Zea mays
agagacgctgcacgcatcgcggacaggaccagcagcggcggcgcggcgacatcgcgaggccatggcagaggcgaccgccgagagtccctgccaccatggacaccttcttcctatcgcacggctcgcccacgctctccatcgacgacagtatcccggcgcggcacttcttcaagtcatgggtgccggcgaaggtcgcgggcgaccagcccccgcgcgccatcctcgtcgtctcggg

SEQ ID NO: 23505 - DNA, 232 bp, Zea mays
ctggcaagacgatcacccttgaggtggagtcctcagacaccattgacaacgtcaaggccaagatccaggacaaggagggcattccaccggaccagcagcggctgatcttcgccggcaagcagctggaggatggtcgcaccttggctgactacaacatccagaaggagagcaccctccacctggtgctccgcctcaggggtggtatgcagatttttgtgaagacattgacggg

SEQ ID NO: 23506 - DNA, 232 bp, Zea mays
gctcaacccctacctcggcactgcccggaagatggccacccttgctgaggctgcccgagtcaaggcccggaaggagaagcttgattccaagaggaccaagcttacctcggagactgccaaggtcaaggctgccggcaaggcgtggtacaagaccatggtctcggacagtgactacaccgagtttgagaacttcaccaagtggctcggagtgacgcagtgaagcggcctttga

SEQ ID NO: 23507 - DNA, 159 bp, Zea mays
cccacgcgtccgcccccaccaagacccgtgggcttggagctggcaaggctgccgacctcacctactgggagagcgctgcccgcatgattgcggatgtctccaagtctgacaagattgttgttgagaagtccactgtccctgtcaagaccgctgaggcta

SEQ ID NO: 23508 - DNA, 151 bp, Zea mays
cggacgcgtggcgtaggagtccgagattacatccatgtggttgaccttgctgacggacatattgctgcataccagaagctttttgagaactctagcatagggtgtgaagcgtacaaccttggaaccggaagaggtacatctgtgctggaga

SEQ ID NO: 23509 - DNA, 228 bp, Zea mays
cattacataaaatgattaggcttgtcacaatgggtttaggaggtgaaggctatctaaatttcatgggaaatgagtttgggcatcctgaatggatagattttccaagaggtcctcaaagtcttccaaatggctccgtcattcctgggaataacaatagctttgataaatgccgccgtagatttgaccttggagatgcagattatcttagatatcgtggtatgcaagagt

SEQ ID NO: 23510 - DNA, 224 bp, Zea mays
cccacgcgtccggctcgttgttgaagatatttgccgggatatctaccgttcagatcctgaatggaagatcattttacttaggtacttcaatccagttggtgctcatcctagtggatatcttggcgaggacccacgaggaattcccaacaatcttatgccctatgttcagcaagttgcggttggtaggaggccagctctaacagttttaggaaatgactatgcaa

SEQ ID NO: 23511 - DNA, 227 bp, Zea mays
gccagatctagcatcctcatttcttactgctacattttgccctcttgcagccaggatacgagcgcctttgctgcctccggtgcatacagacacgtgaccacaactttgcaacgacttgtgtctgccgagtccccaagcatctgagggaggagcaagtgatagaatgtgtccattgcggctgcaggggttgtgccagcggtgactaatcttgtcatcatggtgacggg

SEQ ID NO: 23512 - DNA, 225 bp, Zea mays
ggacggtggtgttctacaaggaaggagatcccttgaaaccagctgtgacaggcgtcttagtgttcgtttaccactccagatccaattggcaacaagtactatcttggccctgctcctttgcaggatatggcaatgcaaattgctacagccaatggccctactggctataatagggattacctgttctcaatggagaaggcattagccagcattagccacgaggat

SEQ ID NO: 23513 - DNA, 136 bp, Zea mays
atcaaaccaactctttcccaaatccaccgccggctcggctcgcccatcttcgcgccaagcaccgaatctccgatggcccgcacgaagcagacggcgcgcaagtcgacgggcggcaaggcgccccgcaagaagttgg

SEQ ID NO: 23514 - DNA, 186 bp, Zea mays
  unsure (1)..(186): unsure at all n locations
cccacgcgtccgcccacgcgtccgggtccggccgtctccttgccccgatggcgtccgagaagaagcagtccaacccgatgcgggagatcaaggtgcagaagctggtcctcaacatatccgtagnggagagcggcgaccgcctcacccgcgccgccaaggtgctggagcagctcagcggccagaccc

SEQ ID NO: 23515 - DNA, 204 bp, Zea mays
cccacgcgtccggcccagttctccgagctggtcaacgagttctacaacaacgggctgacctccaacctggcgggcagccgcaacccgagcctggactacgggttcaagggcaccgagatcgccatggcgtcctactgctccgagctccagtacctggccaaccccatcaccaaccacgtcaagagcgcggagagcacaacgggg

SEQ ID NO: 23516 - DNA, 182 bp, Zea mays
cgcagacgcaccgcaaagagatcatcgagcgcctggacgtgatgaccggcgagctgctcgacgagttcgtgaaggaagtcggcaagctccccagcagaatcatattcttcagggacggcgtcacgagacgctgttctacaaggtgctgacggaggagctgcaggcggtgcggctggcgtgct

SEQ ID NO: 23517 - DNA, 240 bp, Zea mays
gggacaacacgcgtccgggacgtggcgagctactcgtaatggactccatgaacagcaacatctacaggatggcgctgcagctgtcccgatatagcaggccaaagcttgttgctggttctccagaaggatttcctggtcatgttgatgggaagctgcgagaggcgaggatgaaccatccaaagggatttacagtggatgacaggggtaacatctatgtggctgatgccatgaaaatggcca

SEQ ID NO: 23518 - DNA, 190 bp, Zea mays
ggaacccaagcccccctccggcgaaatggcccccaagcgaggtggcagggcgccggtgccggccaagaagaagacggataaagtgacgaaccctctgtgtgagaagaggccgaagcagttcggcatcggcggcgcgttgccgcccaagaaggacctgcaccggttcgtcaagtggcccaaggtcgtgcgt

SEQ ID NO: 23519 - DNA, 227 bp, Zea mays
cgctctcctcgctctcagaccacagttgccgccgccgccgccctaagccagggtgctgaggctttcgttggcctcttcgccggcagcgagcacccaccagcagttctgtagaaatggctgatggtgaggacatccagcctcttgtctgcgacaatggaaccggaatggtcaaggctggttttgccggcgatgatgcaccaaaggctgtattccctagcatcgtgggg

SEQ ID NO: 23520 - DNA, 187 bp, Zea mays
  unsure (1)..(187): unsure at all n locations
cggacgctggncgcgacgcgtgggttctcctttgggagcgtccaagaccatggggccagcaaagccaaccaaggaatgcaatcatcaaaattttgcctaaacatcgccggggacaccccttcttccaaccgcctgttcgatgcgatagtgagccactgtgtccccgttatcatcagcgatgacatcg

SEQ ID NO: 23521 - DNA, 226 bp, Zea mays
aggaaatgttccagatcatggacactgacaacagtggcgcaatcacttatgatgagctaaaagaaggattgagaaaatatggctccacactaaggacactgagattcgtgatcttatggaagcagctgatattgacaacagtggaacaattgactacatagaattcattgctgcaactttgcatctcaataagctggagcgtgaggaacatctcgtggctgccttt

SEQ ID NO: 23522 - DNA, 221 bp, Zea mays
attgcattgaagatctctcagcttcctttggcttcaggcaagcaaaagaggactgctgtgattactcaaggcgctgatacagtggttgttgctgaggatgggaaggtgaaaacgttccctgtgatcctattgcccaaggagaagcttgttgacaccaacggcgcaggtgacgctttcgtcggaggctttctctctcggctggtccagggcaagagcatcga

SEQ ID NO: 23523 - DNA, 183 bp, Zea mays
cccacgcgtccgctacccatacccccgccgccgccgccatgccgcccaagctcgacccgtcgcaggtggtggaggtcttcgtccgggtgacgggcggcgaggtcggcgcggcgtcgtccctggcgcccaagatcggcccgctcggtctctccccgaagaagatcggcgaggacattgccaagg

SEQ ID NO: 23524 - DNA, 217 bp, Zea mays
gacaagacctaccctgctgggttcatggatgtcatttccatccccaagaccaatgataactacaggctgctgtacgataccaagggccgcttccgccttcacccaatcagggatgacgatgctaagttcaagctttgcaaagttaggtctgttcagtatgggcagcagggcatcccttatctgaacacgtatgacggccgcagcatccgctaccctg

SEQ ID NO: 23525 - DNA, 218 bp, Zea mays
atattttaataaaaaatttaactctcaaatgatacttgaatatctcaggcccctttgtagatctgacccaatgctggttttagagtcttccttgtacgtccttgagcgcaacccatcagaaactattgagctctttttgtctgaaaatgttccagcagatttggtaaattcatatctgaagcagcatgccccaaatttgcagtcaccttacttggggg

SEQ ID NO: 23526 - DNA, 204 bp, Zea mays
gggctccaccttccaccgcgtcatccccgagttcatgtgccagggcggcgacttcacccgcggcaacggcaccggcggcgagtccatctacggcgagaagttccccgacgagaagttcgtgcgcaagatcaccgcccccggtgtgctctccatggccaacgccgggcccaacaccaacggctcccagttcttcatctgaaccgt

SEQ ID NO: 23527 - DNA, 236 bp, Zea mays
agaatctgcagtactatgaaatttctgccaagagcaactacaactttgagaaacctttcctgtaccttgcaaggaagctggctggtgatccgaaccttcactttgttgaagctgttgctcttaagcctccggaagttaccatcgacatggctatgcagcagcagcatgaagctgagcttgctgcagcagctgcacaacctcttcctgatgacgatgatgatctgattgagtagaaa

SEQ ID NO: 23528 - DNA, 233 bp, Zea mays
cccacgcgtccgcgctcatcaaggccaacgacaccatcaagatcgatctagagaccaacaagatcatggacttcatcaagtttgacgtcggcaacgtggtcatggtgaccggcgggaggaacaccgggcgtgtaggagtgatcaagaacagggagaagcacaagggcagcttcgagaccatccacgtgctgcttggagctttttgctatgtctagttttttcctatttgttgt

SEQ ID NO: 23529 - DNA, 233 bp, Zea mays
gtcagcgtgggcatggaggaggaggatcagcggcccctgaaccgggccctgctccaccggagcgccaccaccaacgcctcccaggtggccatggtcggctccaatccctgccctatcgagagcctcgactacgagatgatagagaacgagctgttcgaccagaactggaggacgaggcgcaaggcggaccaggtgcggtacgtggtgctcaagtggaccttctgcttcgccat

SEQ ID NO: 23530 - DNA, 234 bp, Zea mays
ggacgctggcgacggcgtcgtcggcgtcgacaacttcaacgcctactacgacccgtcgctcaagaacaccgcacagggcgctgctggcctcccacggggtgttcgtcgtcgagggcgacatcaacgacggccgcctcctggccaagctcttcgacgtcgtgccattcacccacgtgctccacctcgccgctcaggccggcgtgcgctacgccatgcagaacccggcgtcgtacg

SEQ ID NO: 23531 - DNA, 226 bp, Zea mays
ggacctggttctgttgggaggaatccttctaatgtatgagctgcacaatttcttacgcccacttcacctcctgatgtactccttttgggtacctcaaattgtcacaaatgtcatcagggatacaagaaaacctctgcacccacaatatattttaggcatgacagttacacggcttgctattccattgtatatatttggttgccctagtaatttcatgcgtatcgag

SEQ ID NO: 23532 - DNA, 228 bp, Zea mays
gtctccaagaagaagtacatctacaccatcgacgacgactgcttcgttgccaaggacccatctggcaaggatatcaatgctcttgagcagcacatcaagaacctcctcagcccatccaccccgttcttcttcaacaccctgtacgacccctaccgtgagggtgctgactttgtgcgtggataccccttcagcctcagggagggtgctcacaccgccgtctcccacggc

SEQ ID NO: 23533 - DNA, 229 bp, Zea mays
gccttggggctatcgtccagtttatgtgcagctacatcacccttccactctatgcccttgtttctcagatgggttcagaaatgaagcgaacaattttcgacgagcagacagcgaaggccctgaagaaatggcacaaggccgtggtgaagaagaaacaccacaaggattcctcacacaattcttccgagactcctagcactgacacaacaggacctgcaggggaagcggg

SEQ ID NO: 23534 - DNA, 231 bp, Zea mays
cgtccctgcctacaccctgcacctgacgggctccggcgtcctgctggccaacgacacgacgaaccagacctactgcgtggcgcgggagggcgcggaccccaagatgctgcaggcggcgctggactgggcgtgcggccccgggaaggtggactgctccgtgctgatgcagggccagccgtgctacgacccggacaccgtggacgcgcacgccacgtacgccttcaacgccta

SEQ ID NO: 23535 - DNA, 224 bp, Zea mays
aaacccagtaactcgcatcttcctccgtgatccaagttctagcagcgcacgctcggtttcggcaatgtcggggcgcggcaaaggcggcaagggtctgggcaagggcggcgccaagcgccaccgcaaggtcctgcgcgacaacatccagggcatcaccaagccggcgatccggaggctggctaggaggggcggcgtcaagcgcatctccgggctcatctacgagg

SEQ ID NO: 23536 - DNA, 222 bp, Zea mays
gcggctgccagtcgattagatatcccgtccgacaaggttatttcaaatcttgccaactatggcaataccagcgcggcatccatcccgttagctttggatgaggctgttcgcagtggcaaggtgaaggctggcgatattattgcggcgtcaggttttggtgctggacttacctggggttcagctattgtcaagtggggctaattatttgacgtgaaccgtaaa

SEQ ID NO: 23537 - DNA, 220 bp, Zea mays
ggacgctgggcgagtacaaaattcacaatgctgaggtgttattccgtgaagatgctactgtggatgatatcattgacgttatcgaagggaaccggaagtacataaagtgcgtctacgtatataacaagatcgatgttgttggtatcgatgacgttgataatcttgctcggcaaccaaattcactagtgatcagctgcaatttgaagctgaacttggacag

SEQ ID NO: 23538 - DNA, 224 bp, Zea mays
cactctctttcatgtagcatccacagccattgtcccttttcagccttaaggcaacctccgtattcaggataagtacaagaaagagagagcaagcatgaaaggcaccattcaatccccaagtttaagctctgcaaggtgaggtctgttcagtttggctagaaaggcatcccctacctgaacacctacgactgtcgcaccatccgctaccccgaccctctcatcaa

SEQ ID NO: 23539 - DNA, 226 bp, Zea mays
ctgttctctctgctccaaggaacaggacgtgcaacagaactgctccagctgtggggcctgcatgggcaagtacttctgtaaagtatgcaagttcttcgatgatgatgtaagcgtactcgaatcccagacgatgaacaaagaaactgaactcgatgcgttgtttactgcgtttcttttttcccccttcttcttcacgtacatactgtactgctcttggtccaggtct

SEQ ID NO: 23540 - DNA, 219 bp, Zea mays
  unsure (1)..(219): unsure at all n locations
ggacgtggnncggacgcgtgggcgaggatgatgaagagggtagtgaggaggatgaagaagatgacgagtgatggacctcctcgagacaatggaccgtgcttcatccaacaatggagcggctacacaaggccccgtggcgatcacaaaaaaggagcctatatccatgtactagaataatccattttcactcaaaacggggaggtttaattttaactttgg

SEQ ID NO: 23541 - DNA, 223 bp, Zea mays
cttgaatttcgcttgcatcaaaggggaggtgaattctggtgcgttggagagacttgttgctaggtctccaaatctacgcatttgaggttgaatcgttctgtttcagtagacacactctcaaagatactattgcgagccccaaatttggaagacttggggacaggtaatctgacagatgagttccaagctgagtcctattccaggcttactagtgctctggaga

SEQ ID NO: 23542 - DNA, 223 bp, Zea mays
cctgtactgcatattgccagcagtttgtcttctcactgggaagttcatcatcccaaagattagtaacctagagagtgtttggtttatatcgctctttatctcaatctttgccactggtatccttgagatgaggtggagtggtgttggcattgatgaatggtggaggaacgagcagttctgggtcattggtggtatttctgcgcatttatttgccgtcttccag

SEQ ID NO: 23543 - DNA, 224 bp, Zea mays
tccgcttcaagatgcagatctttgtgaaaaccctgactggcaagactatcaccctcgaggtggagtcgtctgacaccattgacaacgttaaggccaagatccaggacaaggagggcatccccccagaccagcagcggctcatcttcgctggcaaacagcttgaggacgggcgcacgcttgctgactacaacatccagaaggagagcaccctccaccttgtgctc

SEQ ID NO: 23544 - DNA, 221 bp, Zea mays
  unsure (1)..(221): unsure at all n locations
gttctagatcgcgagcagccagtcgaccagaacgcccgcatcgccgcgcgcctctccgccgaggagngcagcgctcctcctccgcggcgccaacgccctgggctcggccggaggcgacgacgactccgacgtcatcgcgctcaagaactacatgaacgcgcagtactttggggagatcggcgtcgggacgcgccgcagaagttcaccgtcatcttcgacac

SEQ ID NO: 23545 - DNA, 204 bp, Zea mays
  unsure (1)..(204): unsure at all n locations
tgaattcctccatcttggcggtgtcacccagtctgtgatccatggagatgttaagtcttcgaatatcctcctttcagaggattttggggcacggctgtgtgatttcgggttagcgaacangtgtctgcatcgactccccacctaacgtgtaccgacatcaccgggactttcgggtacatggcgcccgagtacttttcacacggg

SEQ ID NO: 23546 - DNA, 203 bp, Zea mays
ctaccgggcggaccagcaaatgctcatataccaagggaaaattctcaaggatgaaaccactttggaaagcaacggagttgctgagaacagcttccttgttataatgttgtccaaggctaaggcatcatcgagtggagcttctaccgctactactgcaaaagctcctgcaactctggcccaacctgctgctcctgtggcccctg

SEQ ID NO: 23547 - DNA, 221 bp, Zea mays
atgaagctccccttggctacagcattgaggacgttcgacctgccggaggcgtgaagaagttccagtctgctgcttactccaactgcgcgaagaagccatcctgatatcccttttggcttcctcattctagtagtttaggatttcttttctgacactttgattctgaccaatctctctggcctgctgcttcctgataatcgaccagttccccagtcttgctc

SEQ ID NO: 23548 - DNA, 221 bp, Zea mays
ccaccccctgctcacccacccgtcccctcctgctcgcccatggctcccatcgctgtcggcgacgccctccccgacggccagctcgggtggttcgacgagaacgaccagctgcagcaggtctccgtccacgcgctcgccgccggcaagaaggtcatcctcttcggcgtccccggcgccttcaccccgacctgcagcaaccagcatgtgccaggcttcatcac

SEQ ID NO: 23549 - DNA, 219 bp, Zea mays
gaaaccacctggtgtcttgtggtctgataacaaaggtcatttggcaggcaatcctgttctccttgatattaatcctcggcgctacgaaatattcttctgcttcaactctatctcgttcatggcatctattgtcgtagtcatgttcctgttgaacaaatctgcccggaagaaggccgtgccacttgaagtactgcacttgatcatgatactggacctgct

SEQ ID NO: 23550 - DNA, 215 bp, Zea mays
gccgagaagaacccgggcgtgcagttcctgcaggtgaactacgagacgcacaagtccatgtgctacagcctccgcgtccacgtcctccctttcttcaggttctaccggggagccgagggccgggtcagcagcttcagctcaccaacgcaacgatcaacaagttcaaggacgcgctcgccaagcacggggctgagaggtgcacctcgggcctgcgc

SEQ ID NO: 23551 - DNA, 218 bp, Zea mays
gtccggcttcggcccgacggccggcgcacgctctgcagccacatgggggtcgacaagcttgcgttcacgggatcgacgggcacggggcagatcgtgctcgagctggcggcgaggagcaaccttaagccggtgacgctggagctcggtggcaagtcccctttcatcgtcatggacgacgccgacgtcgaccaggccgtcgagctcgcgcaccaggcggt

SEQ ID NO: 23552 - DNA, 218 bp, Zea mays
ggcgtcggactcggacaagcagccgtatgtggcgcgggtggagaagatggaggccgacggacgcggcactgcgggtgcaggtgcgctggtactaccgccccgaggaatccaagggcggtcgccggcagttccacggcgccaaggagcttttcctttccgatcatttcgacctacagagcgcccacaccatcgaggggaaatgtgttgtccactctttc

SEQ ID NO: 23553 - DNA, 212 bp, Zea mays
ggacgctggtgcaccatgaggcgcttcaggaggctcttccgggcgacaatgttggcttcaacgtgaagaacgttgctgtcaaggatctcaagcgtgggttcgtggcctccaactccaaggatgaccctgccaaggaggctgccagcttcacctcccaggtcatcatcatgaaccaccctgggcagattggcaacggctatgccccagtgctg

SEQ ID NO: 23554 - DNA, 216 bp, Zea mays
acgacatcttcggcaagtacggcgcgatccggcagatccgtctgggcaacgccaaggacacgcgcgggaccgcttacgttgtctacgaggacatctacgacgccaagaacgccgtcgaccacctctccggcttcaacgtcgccaaccgctaccttatcgtgctctactaccagcccgccaagatgtccaagaagtcggatatcaagaagaaggagg

SEQ ID NO: 23555 - DNA, 213 bp, Zea mays
cccacgcgtccgcccacgcgtccgagaaattctcttcttgttgctccaatgcccactgcttccactagtcagattcttggcaacaatgagtgttttgaaccctacacgtctaatatatacagtcgacgtgttctaagtggggaatttgttgtggtcaacaagcatcttcttcatgatctgactgaaatgggcatttggactcctaccttgaaa

SEQ ID NO: 23556 - DNA, 145 bp, Zea mays
cggacggtggacagagtaatctatgatggcaatgtttgcctggtcatgaagtattattactttcgttgaaaccgtgatgctattaagacttaatttttttatggaacatcgaatgtaaggcatacatggttatgagttttgtact

SEQ ID NO: 23557 - DNA, 213 bp, Zea mays
cccacgcgtccggcctcttctcctccctcctgccgggtccttaataaagagcagcagcgcaagaggttggtagagcgagcgagaagaaggcaatggcggcggagagcttcctgttcacctcggagtccgtgaacgaggggcacccagacaagctgtgcgaccaggtgtcggacgcggtgctggacgcctgcctggcgcaggaccccgacagca

SEQ ID NO: 23558 - DNA, 253 bp, Zea mays
cggacgcgtggcggacgcgtgggcggacgcgtggggagctgtgcaagaacatcaaccccgatgaggatgtcgcctatggtgctgctgtccaggctgccatcctgagcggtgagggcaatgagaaggtgcaggacctgcttctgctggacgtcacccctctgtccctgggtctggagactgctggaggagttatgacagtgctgatcccgaggaacaccaccatccccaccaagaaggagcaggtattctccac

SEQ ID NO: 23559 - DNA, 252 bp, Zea mays
gaccaggagcggacgatattgatgcttcttctcgtcttccacttctcaataatgtttactacagagatattcttggtgaatttggagctttctttgctcttgccaacagaattgacaaaatacataaaaattcttggatagggtttcagtcctggagagctacagcaagaaaggttagctgttctggaggcctttcaaaggatgtatggtgtacatcttgatcgtgacctggattctctgttacatatgcct

SEQ ID NO: 23560 - DNA, 255 bp, Zea mays
caaatccccaaagcctccgacccccttcctctctccctccgccgccgctgcgcacgcagggaacaagcgacatgggcgtctacacctttgtgtgccgcaacaacggcggcgagtggaccgccaagcagcactccggcgagatcgaggcttccgccgctaccccatacgagctgcagcgccgcctcgtcgctgccgcctccgcggccgactctgcctacggcgtccagtcgtccttctccatggtcacccccagct

SEQ ID NO: 23561 - DNA, 253 bp, Zea mays
cccacgcgtccgagctaatctccctggcaatgggttcagtacttggagcggactacaagagagattaggttttcctcaacgagctagcatggactggcaaggagcaccaccaagtcctagcacccaagttgtgaagaagattcttcgtctggaggttccggttgattcttatccgaatttcaattttgtggggcgcattttaggacctagaggtaattctctaaagcgtgtagaagcatccactggggtgccg

SEQ ID NO: 23562 - DNA, 252 bp, Zea mays
cgcttcacgtccgctacagaccggcgaggagacgaaaggagggagttttgagaagctcaaatggctcctaaagccgctcctgccaagaagggtgatgccaaggcccaggccttgaaggtggccaaggctgtgaagtctggggcaggcaagaagaagaccaagaagattcgcacatctgtaacatttcaccagcccaagaccctgaagaaggccagggacccgaagtacccaagaatcagcactactggaaga

SEQ ID NO: 23563 - DNA, 244 bp, Zea mays
cattggcagttgctcagatcgtgatggctgctgggcatttcctctttgctatggcttggcctggaactatgtacattgcgagcttgctggttggacttggatatggagctcactgggctattgtgccagctgctgtctccgagctttttggtgtaaaacactttggtgcgatgtacaattttctcatactagcgaaccccgcaggatccctcatcttctcagagctaattgtcagcaacctcta

SEQ ID NO: 23564 - DNA, 245 bp, Zea mays
cccacgcgtccgcccacgcgtccgtgttgttcgtccaactttgggaggtctcacttccaaggtgttgctactcggacttacatatttcctggcgtctgagttgctggacattgcagaaaatgttggaacaattaatgatatatcaggcaaagcaaggcttttcctggtccttcctgatgcatttttggatgcttttctcatactctggattttcacttctctttcccgcacactagagaagctac

SEQ ID NO: 23565 - DNA, 245 bp, Zea mays
tgaaaattggtctccgtgtccttacaaggcctatgccagagaggctaccacatatctacagaactctgggagagaacttcaatgagagagttttgccttcaatcatccatgaaacactgaaagctgttgttgctcaatataatgctagtcagctgatcacacagagagagactgtgagtagggagattaggaagatactgactgagagggctagattcttcaacattgctcttgatgacgtctcc

SEQ ID NO: 23566 - DNA, 243 bp, Zea mays
tgagaacaacagagttgcaacatttatttctacacaaggtccactagtgaagacatttggagatttttgggaaatggtctttgaatatcagtgccctgcaattgtcatgctcacccactttgacagtattaagtgtgataaatatcttccactgggaagtgaacggcgaacatatggggattatgatatcaagattacaaagacaagaacagatagccaccatttacagttgcgtgatgtcaa

SEQ ID NO: 23567 - DNA, 241 bp, Zea mays
cccacgcgtccgaaggatgaacggcatgaacgagagcaagctggtggatctgctcaacggctccgagtacgtgccgacctacgaggacaaggacggggactggatgctcgtcggcgacgtgccgtgggagatgttcgtcgaatcatgcaagcgccttcggatcatgaaaggatcagaagccattggcctggcgccaagggccatggagaaatgcaagaacagaagctgaggagaagacgga

SEQ ID NO: 23568 - DNA, 244 bp, Zea mays
gaggagatgaacaagattgaagcgtatgcgcagaccaagaacgatcctctgttcttgcttgatcttgccaagaaccatcttaagattgcctgaagatgtgacaaagcagcattagtccgttgatcggtggaagaccactcgtcagtgttgagttgaatgtttgatcaataaaatacggcatgttgtaagggttgttttacgctatttataatacaatgtactgttcagttgttgaactctattt

SEQ ID NO: 23569 - DNA, 245 bp, Zea mays
catcaatgatatgctgaatgtgcttgcacttcgtttagatcataccagagttgtagacataatgcgcaaggctggtcaattgcatcttgtgaaaccatatatggttgcagttcagagtaataatgtctctgctgtgaatgaagccttgaatgagctttatgttgaagaggaagactatgagagactccgtgaatcagttgacatgcatgacaactttgaccaaataggtcttgcccagaagctgg

SEQ ID NO: 23570 - DNA, 242 bp, Zea mays
cgatccgaagctcaatcaattcactcaaacctcttccccaaatcttcgattagattctcgttgacaagaagactagaaccgaacctgaccatgtcgctgatccgccgcagcaacgtgttcgatcccttctccctcgacctctgggacccctttgagggcttccccttcggctccggcagcagcagcagtctcttcccctcgttcccgcggaccagctcggagaccgcggccttcgctggcgc

SEQ ID NO: 23571 - DNA, 236 bp, Zea mays
ggacctggttcaggtctgcagcccccaactacccccagcctcggaaggaaccttccagaagcgcaagactctaaaggccgtcgccttcccattcttcctcgccgcgggggtcgcctgagatcacataaacaatggtgaaggctgttgctgtgcttggtagcagcgatggtgtcaagggcaccatctttttcacccaagagggagatggccctaccgctgtcaccggaagtgtctct

SEQ ID NO: 23572 - DNA, 195 bp, Zea mays
cccacgcgtccgcccacgcgtccgcccacgcgtccgcccacgcgtccgatggaatcacgaaacttgttgtgttgcctctataccctcagttctccatatcaactagtggttcaagtctccgtttattggagagcatattcagagaggatgagtatctcgtgaatatgcaacatacagttataccttcctggtacc

SEQ ID NO: 23573 - DNA, 258 bp, Zea mays
gagcctcattcatctccattcgaaacaccctcgcacccacactctcccttcgtccccagcctaaatccccgcaaagatggctcgcacgaagcagacggcgcgcaagtccacgggcggcaaggccccgaggaagcagctggcgaccaaggcggcgcgcaagtcggcccctgcgaccggcggcgtgaagaagccgcaccgcttccgcccgggcacgtggcgctgcgcgagatccgcaagtaccagaagagcacggagctg

SEQ ID NO: 23574 - DNA, 253 bp, Zea mays
ggagtctgttgagaagtgcctgagggatgccaagatggacaagagcaccgtccatgacgttgtacttgttggtggctccactaggatccccagggtgcagcaactgctccaggacttcttcaacggcaaggagctgtgcaagaacatcaaccccgatgaggctgtcgcctatggtgctgctgtccaggctgccatcctgagcggtgagggcaatgagaaggtgcaggacctgcttctgctggacgtcacccct

SEQ ID NO: 23575 - DNA, 270 bp, Zea mays
gtctcgagacggcgaattccggtcagcggtgcgggagtggcggacggtggcggacggtgggtgaaaggagtgtaatgctgagtgtttagtgagagtgaggcgagatttttcttccaacaactgatttcaggagttagttattgccactcaatgcaaatatgccatagagatttgaaactagaaaacactctcctggatgatagtatagcacctcggctaaagatatgtgattttggttactccaagtcctctgtgctgcactctcaacca

SEQ ID NO: 23576 - DNA, 251 bp, Zea mays
aaaccctagccctcgcgccgccgcctccttcgccacccagcgctcgagctcctcgctccctgcgagcgcgcgccgcaacgccaccatgaagttcaacatcgcgaacccttccaccgggtgccaaaagaagctggaaatcgatgacgaccagaagctacgtgccttttatgaccgaagatatcccaggaggtcagtggtgatgctctgggtgaggagttcaagggttatgtcttcaagatcatgggtggatg

SEQ ID NO: 23577 - DNA, 245 bp, Zea mays
cccacgcgtccgggaggaaagaaggtgaaggagcggatcgacgcccgcaaccagctggagacgtacgtgtagaacatgaagaacacggtgggcgacaaggacaagctcgcggacaagctggaggcggaggagaaggagaaggtggaggaggccctcaaggaggcgttggagtggctggacgacaaccagtcggccgagaaggaggactacgaggagaagctcaaggaggtggaggccgtgtgcaa

SEQ ID NO: 23578 - DNA, 248 bp, Zea mays
ggctgctgttaagcaaatctatggcgagaaagtcctcattcagtttgaggacttcgcgaatcataatgcttttaatttgcttgcaaaatatagcaagagccatcttgttttcaatgatgacatccagggcacagcatcagtggtccttgcaggtttgttagcggcactcaaggtggttggtgggaccttggcagagcacacttatttattccttggtgctggggaggctggaactggtattgcagaac

SEQ ID NO: 23579 - DNA, 241 bp, Zea mays
ggacgctggtgagcgcgtacaggtacgagggcccgcgggtggacaaggtggtggcgaaggcggaggccgaggcgctgggtgccgccgtgaagcgcgccgggaacgggaagctggtggagaacgacgaggtgctccgcatcctgaccaccaggagcaagccccacctcgtgcagacgttcatgtactacaaggagatgcacggcaggcacgtcgaggaggacctgggccaacgcggggagga

SEQ ID NO: 23580 - DNA, 245 bp, Zea mays
  unsure (1)..(245): unsure at all n locations
ggacgctggcggacgcgtgggcgcgacgcgtgngctgctcccatatccactcccctaccagtccagcatccactcgtctccgtcgtctcgtctccgctcctcacctcgccagccatgggcaagatcaagatcggaatcaacggtttcggaaggatcggcaggctcgtggccagggtcgccctgcagagcgaggatgtcgagctcgtcgccgtcaacgaccccttcatcaccacggattacatgac

SEQ ID NO: 23581 - DNA, 248 bp, Zea mays
gcgcaaagtacatccatggaaagttggaggagtggacaaagcggtatgggggcttcttcaagccctgctcttacctcgctgaaagagctgcaaaagggattcctctgagtgcaccaacaaagaaagttcaggctcggctataagatgatttccttgtggatggaggagacaataatggattccggtgaagcatttggaatgcgtagagctgtaggctaccactatcacatgcatgtaacgcaatatac

SEQ ID NO: 23582 - DNA, 247 bp, Zea mays
cccacgcgtccgcccacgcgtccggccaggctgtggaaggtggacaagctggacttcctggcgtgcgtggcggcgttcctcggcgtgctgctggtgtccgtgcagacgggcctgggcgtcgccgtcggcatctcgctcttcaaggtcctgctgcaggtcacccgccccaacgtcgtggtggagggcctcgtcccggggacgcagagctaccgcagcgtggcgcagtaccgcgaggccgtccgcgtgc

SEQ ID NO: 23583 - DNA, 244 bp, Zea mays
cgacgcgtgaaggagataactgggcgccgcgtcgcctgcgccaagctgaaggccatcaccgaggcggactcaactacccgtcgctggtggtgaagctgctgtcccatccgatcaccgtccgccgcaccgtgaccaacgtcgggaaggccaactcggtgtacaaggccgtggtggacatgcccagggccgtgtccgtggtggtgcggcccccggtgctgcggttcgccagggcgaacgagaagca

SEQ ID NO: 23584 - DNA, 241 bp, Zea mays
cattttctctggtcgagcttgaagctgcaactaataacttcgagaactctcacctgctggggcaggactctcacggcgagatgtaccgaggaaggttaggcaatggcaccccagtgacgatcaggacgctgaagatgaagaggagccagaccgcccagagcttcaaccgccacatcgagacgatctccaggctgaggcaccagaacctggtcagcgctctgggacactgcttcgagtacaa

SEQ ID NO: 23585 - DNA, 241 bp, Zea mays
ccacactggtgtcatggtagggatgggacagaaggatgcatatgttggcgatgaggcacagtccaagagaggtattctcacgctcaagtacccgattgagcacggtattgtgagcaactgggatgacatggagaaaatctggcatcatactttctacaacgagcttcgtgttgcaccagaggagcaccctgtgttgctcactgaggctcctttgaacccaaaggccaacagggagaagatg

SEQ ID NO: 23586 - DNA, 242 bp, Zea mays
cctaagcagggagttgatttatccgctgcagccatgagtaagttgcagtctgagtctgtcaaggatgccatctcccagattgttggggatgccaaggagaagaataggaagttcactgagactgtggaacttcagattggtctgaagaattatgatccacagaaggacaagcgtttcagtggctctgttaagttgccccatatccctcgtcccaagatgaaggtgtgcatgcttggtgatgc

SEQ ID NO: 23587 - DNA, 244 bp, Zea mays
ggtaccggtgttccaggcgggcctccgcgtctgcctcggcaaggagctcgccgtcaccgagatgaaggtggtcgctgtggccgtggtgagggcgttcgacgtcgaggtggtcggggacagtggcgccaccgcctgcgcgcccaagttcgtgtcggggctcaccgcgtccatcagcggcgggcttccggtgagggtcaggaggagagttgttcgatagagattcttgggctggcggtggcgggtg

SEQ ID NO: 23588 - DNA, 245 bp, Zea mays
caagatgaagggtgattactacagataccttgctgagttcaagactggagctgagagaaaggacgccgctgagaacacgatggtggcatacaaggctgcccaggacattgctctggctgagcttgctccaactcaccctattaggcttggactggcacttaacttctcagtgttctactatgagattctgaactcacctgatcgcgcctgcagtcttgcaaagcaggcttttgacgaggccatct

SEQ ID NO: 23589 - DNA, 234 bp, Zea mays
ggacgggctcgcggtgaaaatggtgagggtaggcaggcagagaggggacttgggcccgccagccttaccgtggaggtgggcgacgtggtgggtacagcgatgggcaggctgggaatgagtttggacgtcctcgccgggcatatgagcgccacagcggcacaggccgtggctacgggatgaagcgtgaaggggctgggcgtggaaattggggaactgcaactgatgaaggccttg

SEQ ID NO: 23590 - DNA, 240 bp, Zea mays
ctcggctcgtcggatccagttcgggggatcctccatggcgtcgcgtccgtcgctgaagtcgaagcccaagggcaagggcgggaagaaggccaccgccgacgacgaggacgccaccgcggcggcgaccacggtgcggctcatgaaggagtggaccacgtggacgatgaagaaggcgaaggtggtggcgcactacggcttcatccccctcgtcatcgtcatcggcatgaactccgagcccaa

SEQ ID NO: 23591 - DNA, 237 bp, Zea mays
gttgcctttgcctgctggttccgcttggcttttgcaaggtgtgagatggaccgcatcctcctggagatggacaggatcctgaggcccaggggcacggtgatcgtcagggaagacgtggacatgctggtgaaggtcaagagcctggcggacgggatgaggtgggagagccagatcgtcgaccacgaagacggcccgctcgtcagggagaagatcctcctggtcgtcaagacgtactgg

SEQ ID NO: 23592 - DNA, 237 bp, Zea mays
gcaggtcaagaccgcggccagcgccgccggggtggagctcgccggcgagaacgcgctggagggtacgacgaagcggcgttctcgcaggtggcgtcgacagcgcgcggcgcgctctggccgccttcacgtacctgcgcatgaacaagacgctctttgacggcgacaactggcggcagttcgtgtccttcgtcagggccatggccgacggcggcgcgagaccagcactgccacggtgcg

SEQ ID NO: 23593 - DNA, 269 bp, Zea mays
ggcgagcagttggtgtcgaacatatcccagagttggttgctacttctactgaaaacatcaagaaaagtgcagcagccccacatctaaatgatggatccctcagtatacacgtttctgatggcagggaaggttggccagaactggcaccctatgaagccatccatgttggagctgcagcaccgcagatccccgaggcgctgatcgagcagctgaagcccggcggcagaatggtgatccctgtcgggacagtcttccaggagctgaaggtt

SEQ ID NO: 23594 - DNA, 165 bp, Zea mays
aatacttgaaaagattagcaacatatatcctgagtaagggtggtttcttctttctcctaattgttttattggtagcttctggaatcttgctcgtcgtttcggatggtctgcataagaagcatgtgcaggaattccttaattatgctaaatttgtgtcgtggtggg

SEQ ID NO: 23595 - DNA, 249 bp, Zea mays
ccccatctcttcgactcctttctggagcagctagggttccgtcctcgatccgatccgccgagtgcacaccacctttccccactccgatcgaatcgatggccgccgagggcgagaagaagatgataaccctcaaaagctccgatggcgaggagttcgaggtggaagaggcggtggcgatggagtcgcagaccatccgccacatgatcgaggatgactgcgccgacaacggcatccctcttcctaacgtca

SEQ ID NO: 23596 - DNA, 270 bp, Zea mays
gagcatcggaacccagacactcttaaaaagttgaatgaggctgagagagcgaaaaaagagttggagcaacaagagtactatgatccaaaattagcagatgaggagagagagaaaggcaatgagttcttcaaggagcaaaaatacccagaagcaataaaacactacacggaggctctcaagagaaacccaaaggatcctagggtttacagcaatagggctgcctgctacaccaagttaggagccatgcctgaaggtcttaaagatgcagag

SEQ ID NO: 23597 - DNA, 169 bp, Zea mays
agctcctggcatccatgagaccacctacaactccatcatgaaatgcgacgtggatatcaggaaggacttgtatggtaacattgttctcagtggtggcacaaccatgttccctggcatcgctgaccgtatgagcaaggagatcaccgcccttgccccgagcagcatgaaa

SEQ ID NO: 23598 - DNA, 254 bp, Zea mays
attgtcacttgtgctgctgatggcgaggtgaggcttgccaagatacaggatgctggagacgtgtccacaacattgcttggtgaacatgagggaagggctcacaatttggctatagagcctggtagtccttacattttctacagctgtggtgaggaaggctttgttcaacattttgatctcagaacaaacacagcctcaaaactatttctttgcagaaactccactaaatcagtatactcatctcttgttcacct

SEQ ID NO: 23599 - DNA, 187 bp, Zea mays
gacagagctgtctgtggtcgggtagcaggtgtgattgccaagaagtatggagacacaggttttgctggccagctcaacatcacgttcaatggaagtgcagggcagtcctttggttgtttcctgactcctggaatgaacattcggctagttggggaggccaatgattatgttggaaagggtatggctg

SEQ ID NO: 23600 - DNA, 261 bp, Zea mays
cttactctccgccgtcgccctgctcgcccgaagcagctgccggcaaaatggccccgaagagatgcggtagggcgccggtccccgccaagaagaaggcggtggtgacgaacccgctcttcgagaagaggccgaagcagtttgggatcggcggcgcccttccgcccaagaaggacctccaccgcttcgtcaagtggcccaaggtcgtgcgcatccagcgccagcgccgcatcctcaagcagcgcctcaaggtgcccccggcgc

SEQ ID NO: 23601 - DNA, 212 bp, Zea mays
ggcttttggcagcaagtgcaaccccgaggcgctgaaggaggtcccagttgtcctgaaagccctgtacgacggagatatcctggaggaggaaaccgttgtggactggtacaacgctgctgtcgcagctggaaaggactcccaggtcgtcaagaatgccaaaccgtttgtcgagtggctccagagcgccgagtctgacgacgaggatggcgatg

SEQ ID NO: 23602 - DNA, 245 bp, Zea mays
cccacgcgtccggctcggcttcgcggccaaccgggagaccaacctgctggtgtacgagtacatgccgaacggcagcctcggcgcaggtgctccacggcaagaagggcggccacctgcagtgggcgacgcggttcaagatcgccgtggaggcggccaagggcctctgctacctgcaccacgactgctcgccgccgatcctgcaccgcgacgtcaagtccaacaacatcctcctcgacgcggatttc

SEQ ID NO: 23603 - DNA, 105 bp, Zea mays
ggtgaactactatgtgcaatcacacatacagatgaatgaatatcgagatcgtgttgtcctgccggctgcatcaaagaagtttgggagacagattaatacctgctt

SEQ ID NO: 23604 - DNA, 264 bp, Zea mays
cggacggtgggcgagtctcgtccacccgtcgtcctcctagctcctctactcgccagtcgccatgggcaagattaagatcggaatcaacggcttcggaaggatcggcaggctcgtggccagggtcgccctccagagcgaggatgtcgagctcgtcgccgtcaacgaccccttcatcaccacggactacatgacctacatgttcaagtacgacaccgtccacggccactggaagcacagcgacatcacactcaaggactccaagac

SEQ ID NO: 23605 - DNA, 255 bp, Zea mays
cctcgccgtcctcgtgtgcaatccccagctctcctcgcccctccctcccaaactccagcggccccccctgaccaagctccggggacggatggacggaggagccggctttccgggcacgcagccggtctcccgctcgccggaggacgtcttccgggactaccgcgcgcgccaggccggcctgatcagggcgctcaccaccgatgtggagaagttctacgtgatgtgcgacccagagaaggagaacttatgtttata

SEQ ID NO: 23606 - DNA, 219 bp, Zea mays
agaagctcagaagtcagatcagaagccgccgaggggaggcgccgacgccgagtttttgctccatcccgcatccaccgccagaatgtttctcacgaggacggagtacgaccgcggggtgaacaccttctcgccggaggggcggctgttccaggtcgagtacgccatcgaggccatcaagttgggatccactgcgatcgggttgaaaacaagggatggtgt

SEQ ID NO: 23607 - DNA, 253 bp, Zea mays
cccacgcgtccgcccacgcgtccgtagagtcaactggcgccttcatcggtgcttcgagatatgcgagtgcaactatgattcctccatcgattatcagtcggggcgtgggatggcagggcattggtctgttgctcgattcatttcgggacagcgaacgggacatcggtttcagtagagaatattggactgcttgcgttgacacgcattggcagccggagagtggtgcagatatctgcaggcttcatgattttct

SEQ ID NO: 23608 - DNA, 230 bp, Zea mays
cccacgcgtccgcccacgcgtccgaagtagggttaggaaggcggcggccagcggcgagagcgcgagaggaggaggggtcggccatgacggggaaggcgaacgacacgaagcacacagcgaaggagcatcgccgcgaagatcgacgcggcgacgacgaaccggggcggcggcaaggccgggcaggcggaccggctggggcaggacaagggcgggcacgcgcaagtggcgtg

SEQ ID NO: 23609 - DNA, 244 bp, Zea mays
gacccagatcgagggctcgatccgtcggccatggcgctggagtgggtggttctgggctacgcggcgggcgcggaggcgatcatgctgctgctgctgacgctgccggggctcgacggcctgcgccggggcatgatctccgtggtgcggacgcgctgaagcccatgatgtcggtagtgcccttctgcctcttcctgctcatggacatctactggaagtacgagacgcgccccacctgcgacgacga

SEQ ID NO: 23610 - DNA, 255 bp, Zea mays
agggctcccgctccgcgtcgccgctgctgagggcgtggtccaccagcacggcggtcgccgagggcaccgcccccgtggcgaaccggatcgcggacagccggtcgttcccgctgtaccgcttcgtgcgcgaggagctcggctgcgtcttcctgaccggcgagaggctcaagtcccccggcgaggagtgcaacaaggtgttcgtcggcatcagccagggcaagctcgtggaccccatgctcgagtgccttcaggagt

SEQ ID NO: 23611 - DNA, 64 bp, Zea mays
cactgctaatggttcagcaaaagagatacctgatgaaaagcctgccgtcactaagcctagtccc

SEQ ID NO: 23612 - DNA, 215 bp, Zea mays
cccacgcgtccgtgaatcagagaatgagatacccactgatcctatatccgacccaattgtggactcaagagttctgccgattccagctggcaacttaagctttggatcaggcgcacagctgaagaactctgttgggaattggtccagatggttgactgatacgtttggcatggatgctgctgaatctgaaaagggtggtcaagatgtggaagtta

SEQ ID NO: 23613 - DNA, 214 bp, Zea mays
acggaaaccgacaagagactcactgccttccatcctgaaatcgaggagctcatctacagcgacgtcgagaactccgagcacaagttcgtgctgaaggacaagaagaagccgatcatcttctcgatggcgcgtctcgaccgcgtgaagaacatgacaggcctggtcgagatgtacggcaagaacgcgcgcctgagggagctggcgaacctcgtga

SEQ ID NO: 23614 - DNA, 214 bp, Zea mays
gctttcagtgcgaaaagaacaggtgaagaagctgctggagcaaattgaggagcttggtgaggctggtaaagtggatgaagctgaggcacttatgagaagggttgacattttaaacgctgagaagacagctttagctaacgaagcagacaacaaagtagctatgcttgagaagaagatggaactttgtgaaccatgtggatcatccttagttgcg

SEQ ID NO: 23615 - DNA, 221 bp, Zea mays
ggaactttgagttcgagctggtatcgccattcccagagaacgactggaacgctcatggtggttggcatcaagggcgaggtgatggttaactacaagaggcggaagcttgccgtggacaactaagattgtggccgcagtctctagatgcttgcttcttgttgattcaattgttttcacatgtttgtcagcatttgttcagtgcaagttctgctgtacgcaag

SEQ ID NO: 23616 - DNA, 223 bp, Zea mays
cgacgaggaggcggaagaggtggggatggaggtggaagagagcttcgacgcgggggtggaagacgagcaggcggtggcagaggtgattggaagcgaaaagaccagcgccgactactacttcgactcctactcccacttcggtattcatgaagaaatgctaaaagatgtcgttcggacaaaaacatatcaaaatgttatcacccagagtagctttcttatcaag

SEQ ID NO: 23617 - DNA, 225 bp, Zea mays
cccacgcgtccgattgtgggtaccatgtcatttattctggaacagttgctggtgctagggaggcattcttatacgggattcctgcaatagctatgtcatatgattgggttgcgggtcggagcagtgttaatgacctcaaggtgtctgcagaggtctgcatgcctctgataaatgctatcgtgactgagatcaagaatgggacttaccctcaaggatcattcttga

SEQ ID NO: 23618 - DNA, 223 bp, Zea mays
cccacgcgtccgattgtgtatacacatctactattttgagaaaatgtgctagatggggttccatgacactaaatccttggaatcgatgttccaagtggaaattagcacatgccgagaggttcgctgctgatttctacgtagcggatgcaaaatcaggtaggagggccttggtgaaagctgggcaccactcaaaggtcgtgccgctgatcgacgagaacctcct

SEQ ID NO: 23619 - DNA, 217 bp, Zea mays
catgacgtcttcgtccaaggaggacctcggaggcggcgcgtccgggtctgccgcggccgtcgcagccgccgcgggggagcagagccggctggtgttcgtggggaagggcgccgggtacagcttcgacctggaggacctgctgcgcgcgtcggcggaggtgctgggcaaagggagcgtggggacgtcgtacaaggcggtgctggaggaaggcacgacg

SEQ ID NO: 23620 - DNA, 213 bp, Zea mays
cccacgcgtccgcaacgacgtggtgtgccgcgcggtgctgggcgcgtcgcaccggaaccaaggccggaacaggctgttcagcgagctgacagagatcaacgtgtccctcctcggcgggttcaacctcgaggactacttccccccgaatatggccatggcggacgtgctcctccggctggtgtccgtcaaggcccggcggctcaaccagaggtg

SEQ ID NO: 23621 - DNA, 218 bp, Zea mays
atggaaatacttaaattgagacttgggttaggaacaggtgatgttctacccaagttggttaaggattaacgcgtatgtaggcgtgctgaccgaggaccctttaactggtcacatgcctcgtcatgggtaagccttgcctcgggcagactaaggccggaataagataacacgaaatgggcgtggagcggtggcgagagtagcgtgtaccctccgtggca

SEQ ID NO: 23622 - DNA, 210 bp, Zea mays
tctgagctcaggagcagagtgagaaaagagcttctccaagccatccaggttgcagaaagaatgccaaaaccaccagttactgagcttttcactgatgtttacgacaagatcccttccaacctgcatgaacaagagcaattgctgcgggatacaatcatgaggcaccctgcagactacccaactgatgtacctgttggggtcgtgcttcgg

SEQ ID NO: 23623 - DNA, 205 bp, Zea mays
aattcatgtaacatgtgcattagtttatgggccttcaccaacaggaaggatccaccaaggagtttgttcaacatggatgaagaatacaattcctctggaatatagcgaagaatgcagctgggctcccatatttgtgaggcagtcaaatttcaagttacctgctgacccatccactccgattatcatgattggtcctgggacaggg

SEQ ID NO: 23624 - DNA, 235 bp, Zea mays
caccaactgaaattcgtggaacacttggtaccgttaatcaactttttatttgcattggaattcttgcagctttgttagctggattgcctctggcaggaaatcctgcctggtggaggacaatgtttggaattgctgtagttccatccattctgctggctgtaggaatggccttttcgcctgaaagccctcgttggctattccagcaaggaaaggttactcaagcagaattagctgt

SEQ ID NO: 23625 - DNA, 235 bp, Zea mays
atatggcgagtgcggatattatgtttggtggaattactatagtgtgtggaattgttggaacactagcaggaggtttcatccttgacaagatagggtctactattcctaatgctttcaagcttctttctggtgcgacatttgtaggggcaatattctgctttggtgctttttgtttcaagagcctttatgggttcataccctcctttgcagttggggagctttcagttttcgcaac

SEQ ID NO: 23626 - DNA, 231 bp, Zea mays
tgctagacatgcaaactcaggtacaaacatatatcgtgccctgaagtgccgtgagccagagagtaatgaactcttgtcttacatgaagattttgtataacatctgtccgtacttgaagtttggctatatggctgccaatggggcaattgcagaggcattaagaaatgaggacaggatccatattattgatttccagattgcccaagggacacagtggataacactgataca

SEQ ID NO: 23627 - DNA, 234 bp, Zea mays
cgccgccatggcgttcgagaagatcaaggtctccaacccaatcgtcgagatggacggtgatgagatgaccagggtattctggcagtctatcaaggacaagcttatcctcccatttctggacctggacatcaagtactatgatttggggatactgcaccgtgaagcaactgatgacaaggtcacagtggaggctgcagaggctactctcaagtacaacgtggctattaagtgtgc

SEQ ID NO: 23628 - DNA, 226 bp, Zea mays
aattactggggagccaatccagcggttaggtgcttacctccttgagggtttggttgctagacatgcaaactcaggtacaaacatatatcgtgccctgaagtgccgtgagccagagagtaatgaactcttgtcttacatgaagattttgtataacatctgtccgtacttgaagtttggctatatggctgccaatggggcaattgcagaggcattaagaaatgaggac

SEQ ID NO: 23629 - DNA, 226 bp, Zea mays
cggacctggcgcgcgcttcaccttccccaccccgccgccgccatcgcacgcccgcatccgcatacgctatgggtgcgtacaagtacgtctcggagctatggcggaggaagcagtccgatgtgatgcggttcgtgcagcgcgtgcgctgctgaggagtacaggcagcagccggccatcgtccgcctcacaatgcccactcgtcctgacaaggcgcgccgcctcggct

SEQ ID NO: 23630 - DNA, 229 bp, Zea mays
cccacgcgtccgctccaatttgctgtcccaggagggcttattggtgtgggaacaaccatggacccaactctaacgcgtgctgacaggctggttggccaggttcttggtgaagtaggttcactacctgatgtttacgtagagcttgagatcaatttcttcctactccggaggctgttgggtgtgaggacgaaaggtacagagaaggcagggaaggtgtcgaagctcacca

SEQ ID NO: 23631 - DNA, 230 bp, Zea mays
atccttgactggcaaaggagaacgatggagatgatgtacactgacatcgcacaagctctcgaagccaacgggattgaagcaaaccccaaggactatctcactttcttctgcttaggtaaccgtgaggtaaagcaggagggagaatatgaaccagaggagcacccagaacctgacactgattacatccgggctcaagaggctaggaggtttatgatctatgttcataccaa

SEQ ID NO: 23632 - DNA, 231 bp, Zea mays
agtgacggttgctctagatccgttcatcctggtggttttgtgaggtcgaaagcggcgagcgaattagaagatgctggacaagctgtgggacgacgtggtggccgggcctcgcccggagacgggcctcgagaagctccgcaaggccaccaccgcccgcccgctcgtcatcaacaaagacgcggacggcggcagctacaagcgggcgcagtcgacgccgtcgaccccgacgac

SEQ ID NO: 23633 - DNA, 229 bp, Zea mays
aacatcctaggctactcctctggctccacgaacaattggcacaagtggtttcccttccttaaaacgagcgcctgctgtgaggcctgtgcgaacctgaaaggtgcatttctggtggccgtggtgttcctggttctgtgcctgacggtaaccctgatcttcgccaaggaggtgccatacagagcgaacgagaacctcccgacgacgaaggcaggcggcgaggtccagactg

SEQ ID NO: 23634 - DNA, 230 bp, Zea mays
cccacgcgtccgggacttgcagccttggattgctagagatgacgaacaaggtcagaagatgtggagagtcaaccagcgtatagtgaagcttatagctgagcttatgaggaaccatgacagccctgaagcgttggtgatactcgctagtgcctccgaccttctacttcgtgctaccgatggaatgctcgtcgatggtgaagcttgtactttgccacagcttgagcttctgg

SEQ ID NO: 23635 - DNA, 228 bp, Zea mays
cccacgcgtccgattcacttcagagacacttcagtaatgcttccttcatcgaagaagaaagttcagagatatacttcttctatcccctgcgttactggttttggatgcttcctggtacatgccggtagagaacagggatccatggaaagaatatcaggtggcacacatccccggtgcgctattcttcgacttagatggcatagttgatcggacaactgatttaccgca

SEQ ID NO: 23636 - DNA, 225 bp, Zea mays
gcacaattgggaacatacttgatcaaggtcactgtggctcttgttgggcttttggtgctgtggagtgcctccaggaccgtttttgcattcacctcaacatgagcattttactttcagtcaatgacctactggcatgctgcggttttatgtgcggcgatgggtgtgatggaggctatcctatagaggcatggcgctactttgttcaaaatggtgttgttacggatg

SEQ ID NO: 23637 - DNA, 225 bp, Zea mays
cccacgcgtccgctcctggttttgcttttgttgagtttgaggacgcacgtgatgctgaagatgcaatatatggccgtgatggatacaactttgatggccataggttgcgggtggaattagcccatggtggacgaggcacatcttcttttgatcgatctagcagctatagcagtgctggacaacgcggtgcctcaaaacgttctgattaccgtgttatggttactg

SEQ ID NO: 23638 - DNA, 226 bp, Zea mays
gtgaccatgtacctgaatgactgccaacgcactgcattctatgagggaattggtctggacaccaaagaattcgacatgcatgtgatcatcgagaccaaccgcacaacggcgaggatcttccctgctgtcctagacgtcgagaaccccgagttcaagaggaagcttgacaggatggttgagatcaaccagaagatcattgccgtcggagagtccgacgaaatccccc

SEQ ID NO: 23639 - DNA, 227 bp, Zea mays
agtccactcacttaaagtttctctggaagatctttacaatggaatctcaaagaagctctctctttcgcgcaatgtcatctgctccaagtgcaagggcaagggctcgaagtctggtgcttcaatgaggtgccctgggtgccagggctcaggtatgaaagtcaccattcgtcagctggggccttccatgatacagcagatgcagcagccttgcaacgagtgcaagggga

SEQ ID NO: 23640 - DNA, 225 bp, Zea mays
ccgggagagggaaggcgatcggctcaggggccgccaagaaggccatgtccaggagatccaaggccgggctccagttcccagtgggaaggatcgccaggttcctcaaggccggcaagtacgccgagagggtcggcgccggcgcccccgtctacctcgctgccgtgctcgagtatcttgctgctgaggtaaagaagacttccaattttgcggtggtagtgttcgatt

SEQ ID NO: 23641 - DNA, 223 bp, Zea mays
ctcacgcgtccgctaatattatttctcttcgatatctagaatgctcttgagaatgctccttatggaggacatggggatagttcttttgttatgtatcaattacagtcacaatatttgtatgatattttgtaggaggatgggttggattcttctcatatgatacagtgcgttatgttgaaacaaagaagcttcctttcagtaaggcaccacatgatgataggaa

SEQ ID NO: 23642 - DNA, 225 bp, Zea mays
ataaacttggaaaacagagttgcgtttgctcggatattcttcccttctgaagccaagcttgtcatgcgcatcgcacaagccgattcaacccaagagtttgccggcatcaccaacttcagcagactcaaggaagttgatctaaacgaaaccccatcgatgcagaataggaggcttcgcgaacgccttgatgccttaacaaagacagttgagctagggagacgatac

SEQ ID NO: 23643 - DNA, 227 bp, Zea mays
agcattcctatcctctccccgcccgcccgtgccgccgccgcggcttcccttcctctcccgagccaagatgaatgttgaaaagctcaagaagatggcaggtgctgtgcgcaccggggggaagggtagcgtgcgcaggaagaagaaggcagtccacaagactacaaccacagatgacaaacggcttcaaagcaccttgaaaagaataggagtgaacagcattcctggta

SEQ ID NO: 23644 - DNA, 252 bp, Zea mays
gtcggggatgcccgccccggggacttcctcttcttccactacagcggccacggcacgcgcctgccagccgagacggcgcagcacgacgacaccggctacgacgagtgcatcgtgccctgcgacatgaacctcatcacagatcaggatttcagggaactcgtgcagaaggtccctgaaggttgcctattcaccatcgtctctgactcatgccatagtggtggcctgctggacagtgctaaggagcagataggt

SEQ ID NO: 23645 - DNA, 252 bp, Zea mays
gcagaagccaccgatcggcgtgccgcgtgcgtgaggcgatcggagcatcccgtcccgaggaggaagacaaccggcgacgcggggggaacatggggaagacgccggtgcggatgaaggcggtcgtgtacgcgctgtcgcccttccagcagaaggtaatgccggggctgtggaaggacatcaccaccaagatccaccacaaggtcaccgagaactggatctccgccacgctcctcctcacccccgtcgtcggca

SEQ ID NO: 23646 - DNA, 252 bp, Zea mays
cggacggtggggagaagctgaggcctagcgccgcacccgccgccgcatcagccatcagccatggcgatggaggctcgcctcgtctcgcgctcccgtcagctacattcggttcaagcagcttttgcgaatggaggtgccactcaagttcgctcctttgccaaggatgcagctccagctgaccgtccacctgttggtggggatgatctcctgaagggcatattctttgaggtaaagaagaagtttgagacagct

SEQ ID NO: 23647 - DNA, 250 bp, Zea mays
tgtcgtcaccatggtgaacaagatgggcttctttgcggaggctgggccggtgcagatcttcgtgtccaaccatttgattccagacgatatggagttccaatcaggagatgtgccgaactacacaacttctgatggatcggtgaaaattcaaaaagagagtgaggtgcggctgaagattattggtactcgtgtcgatgctacagaaattttttgcattggcacaataaaggatgattttctgggtgttatc

SEQ ID NO: 23648 - DNA, 253 bp, Zea mays
cggacggtgggcgccagcggagccggtagcaaggggaagaagggggcggccgggcgcaaggcaggcggccccaggaagaagtcggtgacgcggtccgtcaaggccgggctgcagttccccgtcggccggatcgggcgctacctcaagaagggccggtacgcgcacgcgtgggcactggcgcccccgtctacctcgccgccgttctggagtacctcgccgccgaggttctggagttggcagggaacgcggcgaa

SEQ ID NO: 23649 - DNA, 255 bp, Zea mays
aggtacttcaccaaggacttcaagggcagcgtgcccggcttcaaggtcgacaccgtcgacaccaccggcgccggcgacgccttcgtcggctccctcctcgtcaacgtcgccaaggacgactccatcttccacaacgaggagaagctccgcgaggctctcaagttctccaacgcctgcggcgccatctgcaccaccaagaagggcgccatcccggcgctgcccacggtcgccaccgcccaggacctcatcgccaag

SEQ ID NO: 23650 - DNA, 255 bp, Zea mays
ccgcaagttcgttttttttacgccggcggaaatcaacctgcgccgctgccttctccgttctcgccgtcgcctccgcctccgctgccgccgcgcaggtcagggtcatgtcgatcttcgagtacaacgggagcgccgtggtggcgatggtggggaagaactgcttcgcgatcgccagcgaccgccgcctcggcgtgcagctgcagacgatcgccaccgacttccgacgggtgttcaaggtccacgacaagctctaca

SEQ ID NO: 23651 - DNA, 256 bp, Zea mays
cccacgcgtccgcccacgcgtccgatccacgagatcaaggacttcctgctgactgcgcggcggaaggacgcaaggtcggtgcggatcaagcgggccaaggacgccgtcaagttcaaggtgcgctgctccaggtacctctacaccctctgcgtccacgacgccgacaaggccaacaagctcaagcagtcgctcccgccaggtctgactgtccaggagatttaaggtatcaagccacaaactgtgctttttttgcggt

SEQ ID NO: 23652 - DNA, 240 bp, Zea mays
ctccggcgtgttggtcgacggcggcgcagatgacgagcctcgatctgatgggagggtacggtcgggtggacgagcaagtggccatccagtaggccgccacggcggggctgcgcgggatggatcgtctcatcttgcagctctcccaggctggcatctgggagcggtcgttgtccccaccggcggtacaggcgcacgccagcagcagaagcagctggagcagatccagcagcaggttgactg

SEQ ID NO: 23653 - DNA, 250 bp, Zea mays
gcagcaacgactacctcaacaactacctcatgcccaactacaacacccgcaacgagtacaacggcgaccagtactccacgctgctggtgcgccagtacgccaggcagctcgacgcgctctacggcctgggcgcccgcaggttcgtcatcgccggggtgggctccatggcctgcatccccaacatgcgcgcgcggagccccgtcaacatgtgctcgcccgacgtcgacgacctcatcatccctttcaacac

SEQ ID NO: 23654 - DNA, 249 bp, Zea mays
gtcaggagaaggtctcagcatggacgatgagagggctcatcacagcaatccgaagctctaggctgtcaaccatatctaatactatcgagagctttgatgatgtagatggcatggaacagaaggataaagaaataaatagtgaatgggaggccaaggccgcggcgtatgccatattcaagaatgtcgcaaagcccagctataagcacattgaggaggtggatctgctgagatttttcaccaaggaggagg

SEQ ID NO: 23655 - DNA, 250 bp, Zea mays
agggtttgcagatgacgaccgcggcgcgccccacctgggcgccggccaagggcggcaacgagcaggggggcacccgcatcttcggcccctcccagaagttctcctcccgcgacctcgccgcgcacacctccctcaagccaagaaaagacggtcaacagacccaagaggagttacagaagaggaatctcagggaggaacttgaggaacgtgagcgcaagcactactcttccaaggataagtcctatgccga

SEQ ID NO: 23656 - DNA, 248 bp, Zea mays
caccaagttctttcagacggcatcaccagacaatgttcttcctggaactgtggtggatagtaaagtttgccatcctaagaacttcgacttctacatgtgtgcacatgctgggatgattggaacaacaaggcccacccactatcatgttctgcacgacgagataggttttaatgccgacgagatgcaggagtttgttcattcgctctcttacgtgtaccagaggagcacgacagccatctcagtggttg

SEQ ID NO: 23657 - DNA, 246 bp, Zea mays
ctgacggtgggtcgacccacgcgtccgcaactccaacaaactcgtgttcaatggccatgagatctacccatctgctgttgtgtccaaaccaagggtggatgttcaagggggcgatttgcggtctttcttcacattggttatgacagacccagatgttccaggaccaagtgatccatacctaagggagcaccttcattggatcgtgactgatatacctgggacaacagatgcctccttcgggcgaca

SEQ ID NO: 23658 - DNA, 248 bp, Zea mays
cttcttcttcttcctcctcctcctagcacagctagcgcctgctccccttcgcctgtgatcatgtcttgcagcagcggcaagtgcgactgtggctccagctgctcctgcggcagctcatgcaactgcatgtcccctaacgtggagaccgccgccgccagcagcatcaagaccacggtcctcgccgcgccgaccaccaaggccagcgccggcggcttcgaggcggccaccgagggcggcggctgcgactg

SEQ ID NO: 23659 - DNA, 240 bp, Zea mays
cccacgcgtccggttggttttgtgttgcagataccacatttaagtgtgaggtgttcgaggatgctattcttgttgattggcatcaatctttattggagcaagatggaatataccatcatttcgagtgggctattggaacagatgaaggaaaatctgatattctaaactttgaaaatgtgggcatgaatggacaagtccacaggaaaggcctcgatcttgatcactttgaagactattttg

SEQ ID NO: 23660 - DNA, 240 bp, Zea mays
gggctccaccttccaccgcgtcatccccgagttcatgtgccagggcggcgacttcacccgcggcaacggcaccggcggcgagtccatctacggcgagaagttccccgacgagaagttcgtgcgcaagacaccgcccccggtgtgctctccatggccaacgccgggcccaacaccaacggctcccagttcttcatctgcaccgtcgcgaccccttggctcgacggcaagcacgtcgtcttc

SEQ ID NO: 23661 - DNA, 240 bp, Zea mays
cggacgcgtgggtggatggagagttgaactatctcgtaattccagtggtcgtggtggtcgtgatcggtatggtggatctgagtcgaagtgctatgaatgtggtgagactgggcactttgcacgtgaatgtcgtctgcgcattggctctggaggtctaggcagtggaagacgtcgcagtcgcagtcgcagtcgcagtcgcagcaggagcagaagccgcagccgcagccgcagccctagata

SEQ ID NO: 23662 - DNA, 241 bp, Zea mays
gtggcacacctgttgttattacaagtggatttgcatctcagagcattgttagagttctccaaggagagaagattggtactctcttccataaggatgcaagtctgtgggagccatccaaggatgttagtgctcgtgagatggctgttgctgcaagagaatgttcaaggcgtctgcagaatttatcatcggatgaacgcaagaaaatattgttagacattgcagatgctttggaacaaaatga

SEQ ID NO: 23663 - DNA, 253 bp, Zea mays
cccacgcgtccgcaccagccgccgtcatgtcgaagcgaggtaggggaggttcggctgggaacaagttccgcatgtcactgggtctaccggtggcggccacggtgaactgcgcggacaacacgggcgccaagaacctctacatcatctccgtcaagggcatcaagggccgcctcaaccgcctcccgtccgcctgtgtcggcgacatggtcatggccaccgtaaagaagggaaagcccgacctcaggaagaaagt

SEQ ID NO: 23664 - DNA, 219 bp, Zea mays
gttctttgggtgacagattttccaatgtttcaatggaacagtgatgagcaaagatacgaggccctacatcatcctttcactgcaccaaatcccgaggatatggacgatctaccatcagctcgtgctctggcttatgacatgatttacaatggtgtggagattggagggggaagtttgagaatctacaaaagtgatgtacaacaaagaatttttgagatc

SEQ ID NO: 23665 - DNA, 129 bp, Zea mays
cccacgcgtccgcttcacgccagtctcggtctcttccgaacgcgtcgcgcgcggttgtttgagaggagatgaggaagatgagggagtgcatctccgtccacatcgggcaggccggcatccaagtcggca

SEQ ID NO: 23666 - DNA, 257 bp, Zea mays
gatcaactacgggcagatcgcgaacaatctcccggacccgacgcaggtggcgaccctcctccggtcgatgaacgtgaacaaggtgaagctctacgacgcggacccccgggtgctgacggcgttcgccaacacgggcgtggagtttatcatcgccgtgggcaacgagaacctgcagaccatggccggcagccccgccgcggcgcggcagtgggtggcggcgaacgtgcggccctacatcccggccacgcgcatcacct

SEQ ID NO: 23667 - DNA, 257 bp, Zea mays
cggagaactacaccgccagcgacgccgccgtgtactggggcccctggcagagggcccgggccacctggtacggccagcccaacggcgccggccccgacgacaacggtggcgcgtgcggattcaagcacaccaaccagtaccccttcatgtccatgggctcctgcggcaaccagccattgttcaaggacggcaagggctgcggctcctgctacaagattcggtgcaggaaggacccgtcctgctccgtgctgacggag

SEQ ID NO: 23668 - DNA, 261 bp, Zea mays
gcgccaagaccctgcgcaagcccgtcttcaccaccgtcgaccagctgcgcccccagacgcacggccacaccctcaccgcccgcgtcatctccgcccgcaccgtcctcgacaagccctccacgcacatcggccgcacccgcgtcgcagagtgcctcgtcggagacagcaccggcaccgtcctcgtcaccgcccgcaacgaacaggttgaccttctgaagccagatacaacagtgatcttccgcaacgctaagattgacatgt

SEQ ID NO: 23669 - DNA, 257 bp, Zea mays
agctgctgcatgacaggtactatgcccggggtgacgatgtcatgctcccagaggttccatatgaccagttccgtgctgggtcgcagttctttgtgctcacgagaaggcacgccatcatggtcgtgagggatatgcgactttggaagaagttcaagttgccctgtctgatcgagcgcagggattcatgctacccggaggagcattacttccccacactgctggatatgcaggatcctgagggttgtactaagtatacc

SEQ ID NO: 23670 - DNA, 247 bp, Zea mays
aaagacaagtcgtgtcaagtatcctgaaggatgggagcttattgaaccaaccatccgtgagttggatgccaaaatgagagaagctgaaaatgatccacatgatggaaagagaaagtgtgaagctctctggcctattttccgtatttctcatcaaaggagccgctacatatatgatctttactacagaaggaaggagatatcacgggagctttatgagttctgcctggaccagagctatgcagatcgt

SEQ ID NO: 23671 - DNA, 247 bp, Zea mays
gatagataatccagatcagaggtttgcagctttcctatctccgcttacacttggtcgagtaaacattgcagttaactcagtctacatttcaaaggtcagcctagcaattgctgtgagatacagtttgtcaaggagagccttttcaattgcaccagatgcccctgaaatgttgttgcttgactatcccagtcaccagcgacgccttctaccacttctagcaaaagtatgtctgatgagcagtgctggc

SEQ ID NO: 23672 - DNA, 245 bp, Zea mays
cggacgcgtgggctaggcacgccatcgagcagtgggtgacggagtacctcgccgtctactaccccaacgacggcgtgctgcgggcggacgtggagctgcaggcgtggtggaaggaggcgcgcgaggtcgggcacgccgacctcaaggacgcgccctggtggcccaagatgcagacggtggccgagctggtcaaggcctgcaccaccatcatctggatcgcgtcggcgctccacgcggccgtcaac

SEQ ID NO: 23673 - DNA, 194 bp, Zea mays
cgcctcgccaccgaattgggaggaatctgcggggaagggggatatggggtcgccgggtgcggggagcagcggcggccacgagtgctccttcaagttcctcctcatcggggactcgggcgtcggcaagagcagcctcctcgtcagcttcgtcgccgcctcccacctcgacggcgacatcgcccccaccatcggtg

SEQ ID NO: 23674 - DNA, 252 bp, Zea mays
cggacggtgggcgacgggaacgtcatagagcttagtgtccatgctttctgcccgctgctcaaagggaaaaggggcggtgctgtgacaaaggttgggccatggggcggaagcggagggtctccaatggagctgacagagacggagacgcccatgcgtctggagagcatcaccgtcagcagcggcgtggccgtcaactccatctcattctcctacgtcgactctgccggccacaagcgctctgctggtccctgg

SEQ ID NO: 23675 - DNA, 233 bp, Zea mays
ggaaagggttgaactatgagcgccgtggcggtttcgtcgtcgctgaacccggacgcgccgctcttcatcccggcggcgctgctgcaggtggaggacttctcgccgcagtggtgggacctcatcaccaccactgcctggttccgcgaccactggtcccgcgagcgcgcccacctggacgagatggccgagcagatcgacgcggccggcctcctccccgacgacgaggacctctt

SEQ ID NO: 23676 - DNA, 241 bp, Zea mays
cccacgcgtccgctcgaagtctggtgcttcaatgaggtgccctgggtgccagggctcaggtatgaaagtcaccattcgtcagctggggccttccatgatacagcagatgcagcagccttgcaacgagtgcaaggggactggggagagcatcaacgagaaggaccgctgcccagggtgcaagggtgagaaggtcgttcaggagaagaaggttcttgaggttcatgttgagaagggaatgcaa

SEQ ID NO: 23677 - DNA, 242 bp, Zea mays
ctccggcatcgacgaggcgaaaccctagcgcccgagtccctctccctgcacccacaacccatggcggcggatatggcgtacgcgccgccgatgaaggctggcaaggccgggttcgaggctggcatgatggatccacagcacaggatccgcatcacgctctcctccaagagcgtcaagaacctcgagaaagtctgcggggatctggtgaagggcgccaagggtaaggagctcaaggtcaaggg

SEQ ID NO: 23678 - DNA, 174 bp, Zea mays
cgcaaacgggaaaagatcaaaggaaagaaaaacaccgtggtattcaagttgatcattggatcacttgagaggagttgagtgcaactctcgtccgttgggacgccacaacgtggagtaggcaagttttgtacttggccgaaccacgggataaccaccgtgtcaactctgtgattg

SEQ ID NO: 23679 - DNA, 188 bp, Zea mays
ctccgatcgacctgctccctccccaccaccgagcccatggcggaccagctcaccgacgaccagatcgccgagttcaaggaggccttcagcctcttcgacaaggacggggatggttgcatcacgaccaaggagctgggcactgtcatgcgctcgctggggcaaaatcctacagaggctgagctccagga

SEQ ID NO: 23680 - DNA, 247 bp, Zea mays
tgcagatctttgtgaagacattgactggcaagaccatcaccttggaggtggagtcgtctgacacaatcgataatgtcaaagccaagatccaggacaaggagggcattccaccggaccagcagcgcctgatctttgctggcaagcagctggaggatggccgtaccctcgccgactacaacatccagaaggagagcaccctccacctggtgctccgcttgcgaggtggtatgcagatctttgtgaagac

SEQ ID NO: 23681 - DNA, 245 bp, Zea mays
gcgaggcgcgggcgcgagcgcgtcgttgagatggattcggaggcggtgcagcacggctgcgcgcattacagccgtgggtgcagcgtcgtggcgccctgctgcggccaggccttcggctgccgccattgccacaacgacgccaagaactcgctggaggtcgacccgcgcgaccggcacgagatcccccgccacgaaataaagaaggtgatctgttctctctgctccaaggaacaggacgtgcaaca

SEQ ID NO: 23682 - DNA, 244 bp, Zea mays
atctcccaagacctcctcagacccgagaagcgcactgcggccatggacgccaccggcactggagctggagggaaggcgaagaagggagcggccggtcgcaaggccggcgggccgaggaagaagtcggtgacgaggtccgtgaaggccgggctccagttccccgtcggccgcatcgggcgctacctcaagaagggccgctacgcgcacgcgtcggcagcggtgcccccgtctacctcgcggccgt

SEQ ID NO: 23683 - DNA, 245 bp, Zea mays
cccacgcgtcacccacgcgtccggggagcccacggcgggggcgccttctccggcaaggacccgaccaaggtggaccgcagcggggcctacgtcgcgaggcaggctgccaagagcatcgtcgccgccggcctcgcccgccgcgccattgtccaggtctcctacgccatcggcgtgcccgagccactttcggtgttcgtggacacgtacggcaccggcgcgatccccgacaaggagatcctgaagat

SEQ ID NO: 23684 - DNA, 243 bp, Zea mays
cggacccgtggcggacgcgtgggccagagcctaagccagagcctaaacccgaaccgaaaccggagccgttgccagagccgtaacctaagccagagcctaagcctgagccgaaaccagaaccaaagccagagccacaaccaaagcctgagcctaaaccagaaccaaaaccagagccaaagccagagcctaagcccgaaccaaaaccagagccaaagcctgagcctaaacccgaaccaaggccag

SEQ ID NO: 23685 - DNA, 247 bp, Zea mays
cccacgcgtccgcgtgggatcccagccaccgccgctagaagaagagctcggcgattcccaggtcccgcgagaatacgccgaagcagatccatgagattaaggacttcctcctcaccgcgaggaggaaggatgcccgctcagtgaagatcaagaggagtaaggatgttgtcaagttcaaggtgcgctgctccaagtacttgtacacgctctgcgtcttcgatgctgagaaggcaaacaagttgaagca

SEQ ID NO: 23686 - DNA, 246 bp, Zea mays
atgcagcttacaaggctgttgacaaaataatccagattccaacggttctccgagaatacagtatgacatcagtcacagaaggcattgacgcaatcgcgacaactcgggttgttgtcactggagatgtgagcaacaacgccaaacatgccctgactggccagtctttcaaccgctccttcagcgggagcggggcatccatggacattgtggtgtccagtgtcagagcttacctgagcgccctgaaca

SEQ ID NO: 23687 - DNA, 154 bp, Zea mays
gtcacctcttggggtgccgacgcagtctgctcacccagctcgcttctcaccagatgacaagtactctcgccagcggtacctgttgaagaagagatttggacttctgccaacgcagaagccagcactgaagtactgaagcttcaactttccaacc

SEQ ID NO: 23688 - DNA, 242 bp, Zea mays
cccacgcgtccgcccacgcgtccgcggacgcgtgggagcgagtgggactggctgcgcggcgcgctggccaccatggaccgcgactacggcatcctcaaccgcgtgttccacaacatcacggacacgcacgtcgcgcaccacctcttctccaccatgccgcactaccacgccatggaggccaccaaggcgatcaggcccatcctcggggactactaccacttcgacccgacccctgttgccaa

SEQ ID NO: 23689 - DNA, 241 bp, Zea mays
ccagagaggtcatcgccgtgaagcagctggacaggaacgggttccagggcaaccgcgagttcctggtggaggtgctgatgctcagcctcctgcaccacccgaacctcgtcaagctgctgggctacagcaccgactccaaccagcggatcctggtgtacgagtacatgcccaggggctcgctggaggaccacctcctggacctgcccccgagctggaagcccctgccgtggcacacgcggat

SEQ ID NO: 23690 - DNA, 240 bp, Zea mays
gcacctgtagcagccatggacgccagcggaccggtagcaaggggaagaagggggcggccgggcgcaaggcaggcggccccaggaagaagtcggtgacgcggtccgtcaaggccgggctgcagttccccgtcggccggatcgggcgctacctcaagaagggccggtacgcgcagtcgtgggcactggcgcccccgtctacctcgccgccgttctggagtacctcgccgccgaggttctgga

SEQ ID NO: 23691 - DNA, 242 bp, Zea mays
agctcactcactgctcgttgccggctgcccccgcggccccggccagtccatcccctcgctcgctccccaactccagcaggcagatcagatacatccatccattcgcggaccggaaggaaaggaaagggttgaactatgagcgccgtggcggtttcgtcgtcgctgaacccggacgcgccgctcttcatcccggcggcgctgctgcaggtggaggacttctcgccgcagtggtgggacctcat

SEQ ID NO: 23692 - DNA, 237 bp, Zea mays
cccacgcgtccgccttcatgcccttgcaacccgtctgaagaagaacactgccgcgtatgagaactaccgtcgaatttatgtgcctttaggcgaaccacttccatctgaacctggcgagccgttgagagtgaacgtgctattcaagcatattcaggcaatgctgtctggcgacacggctgtcatcgcagagactggggactcgtggtttaactgccagaagctgaagctaccggaagg

SEQ ID NO: 23693 - DNA, 236 bp, Zea mays
cacgatcagtcctcaacctcagctcagctgtgcactgaagttcctgcccgtgtttttcaggagttccctccgagaagcagtcttgacccgagcaagtacggcgaccacaccagcaccatcagggaggcggacctcgagaacaagctcgagggcctgaccgtgcagcaggcgctgcacggcaaccggctctacatcctggaccaccacgacaacttcatgccgttcctggtcagggt

SEQ ID NO: 23694 - DNA, 236 bp, Zea mays
ggcaatttcaaatgccacttctggtggcacacatgatcagatcaagtaccttgttgcccagggttgcattaagccactctgtgatctgcttgtttgcccggatcccagaatcgtaacagtttgcttggagggtctcgagaacatcctgaaggttggcgaggcagagaaaaaccttcgtgcaggtgatgtcaatgtctatgcacagatgattgatgatgctgagggcctggacaaga

SEQ ID NO: 23695 - DNA, 236 bp, Zea mays
ccgcgcctctacatttcttctctctctgctcctccgcctccgcctccgcctgatccatccaagacagggatcgccatgtcggactcggaggagcaccacttcgaatcgaaggccgacgctggggcgtccaagacctacccgcagcaggctggcaccgtccgtaagaacggcttcatcgtcatcaagaaccgtccctgcacagttgtggaggtttctacctccaagactggtaagca

SEQ ID NO: 23696 - DNA, 235 bp, Zea mays
attttgtttgtttctgcccccagatcaacccagactctgcaaaaggctataaaactcgtggaatggcatatgccatgcttggcaaatgggaggaagctgctcatgatctgcacacagcatctaacatggattacgacgaggagatcaatgctgtgctcaagaaggtggagcctaatgctcacaagatagtggaacatcgcaggaagtatgagaggttgagaaaagagagggagga

SEQ ID NO: 23697 - DNA, 237 bp, Zea mays
cccacgcgtccgggaggagaccgccgacgtcgagttcatccagaagaggaacgccccctctcctgctgagccagagctaatgctaaacaaccgggtgtacacctgcaacaacgtccagtgcccgcacagtgactacagctatggattccttgaccggaatgcccgcaacagccaccagtacacctgtaagtacaacgatccgatcactcagagcgccgagaacaagcctctgccagc

SEQ ID NO: 23698 - DNA, 235 bp, Zea mays
acggaaaccgacaagagactcactgccttccatcctgaaatcgaggagctcatctacagcgacgtcgagaactccgagcacaagttcgtgctgaaggacaagaagaagccgatcatcttctcgatggcgcgtctcgaccgcgtgaagaacatgacaggcctggtcgagatgtacggcaagaacgcgcgcctgagggagctggcgaacctcgtgatcgttgccggtgaccacggca

SEQ ID NO: 23699 - DNA, 235 bp, Zea mays
cccacgcgtccgcgatatgttatcttcaaaatcgaagaaaagcaaaagcaggtagttgtggagaagacaggggccactactgaaagctatgatgattctctggcctctctcccagagaatgactgccgatatgcgctgtatgattttgattttgtcaccggggagaatgtgcagaaaagcaagattttcttcattgcctggtccccgtcgacatcccgcatccgtgccaagatgc

SEQ ID NO: 23700 - DNA, 238 bp, Zea mays
gaaacatactacctaaagcggatattacctcttgcgaggaagcacaaggtaattcatttcgataaatcagacgcccgccttgcaaacaatggccttccgattcagctgcagatgctgcgttgccgagtgaactttgaggctctgagattcacaccacagatcgaggcccttggcagaaagctcatctccactctccagagacgaagtgggcagtttgttgtgcttcacttgcgctacg

SEQ ID NO: 23701 - DNA, 178 bp, Zea mays
cccacgcgtccgcccacgcgtccgctacgagctgcctgatggccaggtgatcaccattggggcggagaggttccgatgccccgaggtcctcttccagccttccttcattggtatggaagctcctggcatccatgagaccacctacaactccatcatgaaatgcgacgtggatatcggg

SEQ ID NO: 23702 - DNA, 145 bp, Zea mays
cccacgcgtccgaagaaaaagaccgtcgatcccttctctaagaaggactggtatgacatcaaggccccatcggtcttcagtgtgcgcaacattgggaagactctcgtgtccaggacacagggtaccaggattgcctctgatggtc

SEQ ID NO: 23703 - DNA, 179 bp, Zea mays
cccacgcgtccggttcattgaggaagctgaacgaagtctccatgatgccatcatgattgtgaggagagcacttaagaactcgacagttgtgccgggtggtggtgctattgatatggaaataagcaagtatctcaggcagcatgcacgaacaattgctgggaagtctcagttctttgtaa

SEQ ID NO: 23704 - DNA, 178 bp, Zea mays
cacaacgatgttattggaggatgcgtcagtggcagagatgagttggtttccaaagtccgtatttatcaccatgtggttggtggtgttctaaacccgaatgctgcgtaccttatccttcgaggcatgaaaacacttcatctccgtgtgcaatgtcagaataacactgctcttcggatgg

SEQ ID NO: 23705 - DNA, 171 bp, Zea mays
cccacgcgtccgcggacgcgtggccggcggggatccggccctgcgtctcctccttcggcgccgaccagttcgacgagcgcaccccgagtacaagcgccggctcgaccgcttcttcaacctcttctacctcgccgtcacgctcggcgccatcgccgccttcagggccgtggt

SEQ ID NO: 23706 - DNA, 169 bp, Zea mays
gccgcccagcggatctcggggcgccggcgctggcacaggggaaggtggtgtctgcgccttcgtcgcccgcggttgtgtctcctgccgccgggaagaagagccggcgggggcccaggtcgcggagctcgcaataccggggcgtcaccttctacaggaggaccggccgttg

SEQ ID NO: 23707 - DNA, 174 bp, Zea mays
cccacgcgtccggcttgggcagaaaggggtaaagagcctgcttgctgttcccattagttttgttagcgaacacattgaaactttggaagaaatcgatgtggagtacaaagagttggctttggaatctggcatcaagcactggggacgggttccagcactaggttgcgaacccac

SEQ ID NO: 23708 - DNA, 168 bp, Zea mays
  unsure (1)..(168): unsure at all n locations
tcacttgcaagcactttggaaaaacttactcgtgganataaacgtgctgaaaagattagacgctacattgttgtagaatccatctaccagaattctggccaaattgcccccttggatgagattgtcaggttgaaggagaaatatcgatttcgtgttattctggaggag

SEQ ID NO: 23709 - DNA, 168 bp, Zea mays
gacccacgcgtccgcccacgcgtccggcgagctcggctccggtcacccgtcgatccacgcaaccatgtcgaggaggaagaccagggagcccaaggaggagaacgttacccttggacccactgtccgtgaaggagagtttgtctttggtgttgctcacatctttgcatc

SEQ ID NO: 23710 - DNA, 168 bp, Zea mays
gcgagaagaagtaccttcgcatccaggatgatactttgactgggaacgcatcgtccgtggacatcgccaccaaggagaacatggagtctctgatatcgatcggccaggagctgctcaacaagccagtggcgagagtgaacatcgacacagggctgtacgagtcctgcg

SEQ ID NO: 23711 - DNA, 169 bp, Zea mays
acaaggcccagatcagcatctacgacccccaggtgacggaggaccagatccagcgggacctagccatgaacaagttcgactgggaccacccgatgcacctgcagccgacgagcccgacggccgtgaagcaggtgagctgcgtgtgggacgcgtacgaggccaccaaggg

SEQ ID NO: 23712 - DNA, 168 bp, Zea mays
ctcctctctcgcatccgcagcctctcgagctctactccatcccctcgatctcgaagcgcagcagcagcagtcaggcggccatggacgccagcgcagcaggagccggcgggaaggcgaagaagggcgcggccgggcgcaaggccggcgggccgaggaagaagtcggtga

SEQ ID NO: 23713 - DNA, 162 bp, Zea mays
tggcaaaactgcacaggaagttgttaaagaggtcaggagacaatttattgagaggcctggtatcatggactacaaagagaagccggattatggacgctgtgttgcaattgtggcatctgcatccttgagagaaatgataaagcctggacctctagcatttat

SEQ ID NO: 23714 - DNA, 242 bp, Zea mays
tgcttcatcattccttccctgtttctcttttcctgccccgcaatgtccgattggagcacaagacattgaagcttctgaagtattggacctggcaatttgttattgttaggccagtatgttccattctgattattgcactccagcttcttgggctgtaccccagctgggtcagctggacgtttagtattatactgaacttttcagtctccatggccttatatgcattggttctcttctaccac

SEQ ID NO: 23715 - DNA, 241 bp, Zea mays
gaatagtggaactggcaccaggatacttgcccgtggcatacagtatggtaaggaaagccggtgggctctgcatcgccgacgaattcaggcaggagtcgcgagaactggaagccacttctggggattcgaagggcatggtgtcatcccggacatagtcaccatggccaagggtatcgggaatggcatacccataggagctgtagtaacgacgccagagatcgctcaggtgttgacccgcaga

SEQ ID NO: 23716 - DNA, 250 bp, Zea mays
cggagggggagcaccacaagaaggacggcggggagcacaaggaaggcatcgtagccagaagatcaaggacaagatcaccggcgagcacggcgacaagtccggcgaccacaaggagaagaaggacaagaagaagaaggataagaagaagcacggcgagggccacgaccacgacggcggccacagtagcagcagcagcgacagcgactgagatctggtgtcgcagcacaggtgcaacacaagtatgcttgct

SEQ ID NO: 23717 - DNA, 240 bp, Zea mays
gaggcgctcatcaacgccgacggcatcatcgaggagtccttctggccgggcaagtacgccgtcgagcttagctccgtggcgtacggcgcgacgtggcagttcgacacggaggcgctgcccaacgacctcgtcaagcgcgggctggccgtgctctgggaggacggggagctggagctcaccatcaaggactacccctacgcccacgacgggctcctggtctgggactccatcaagcagtgg

SEQ ID NO: 23718 - DNA, 139 bp, Zea mays
gggtaccggccttcgcgctcgtcaacagggtcaccggcgaggccatcaagcactcccagggcgagggccacccggtcaagctggtgccctacaaccccggctaccaggacgagtcggtgctgtggacggagagccgcga

SEQ ID NO: 23719 - DNA, 140 bp, Zea mays
aattaatcccgagcttcatgtggaggcccttcagaacagagcaagccctgatactgaaaatgtgtttaatgatgccttttgggagagcttagatgctgttgtaaatgcattggacaatgtcacggcaaggatgtacattg

SEQ ID NO: 23720 - DNA, 244 bp, Zea mays
ctgaggtcgaaatagcgtggtagcttggatctgcacatctatatgattgagggcctggtgtttaggattataacctgcccagattatataacctatcttatttgaactaagtgttagttcaaaataagttagattatataatctggacaaattatattcccaatcaaacaggctatgattggacttactgatacccatttgagtagaactgatcttgacaggtatccgagaaaacgatgacctt

SEQ ID NO: 23721 - DNA, 239 bp, Zea mays
cgccgtgctcggtggcgcaccgcctgtccaccatccgcggcgtcgactccatcgccgtggtgcaggacggccgcgtggtggagcagggcagccacggggacctcgtgtcccgccccgacggcgcatactcgcggctgctgcagctgcagctacaccatggctgatcctgcgcctggaatagatactggagggcgcacggccggtgtagatactggagggcggtgttagcgtggcgtggc

SEQ ID NO: 23722 - DNA, 239 bp, Zea mays
ggttacaactgtgctgcagactggtagtccaggcattggtggactcccagctacaggcaatgctgcagaaaatgcgaatgtttagtacgtactttgaggagatatacgcagcgcagtcggaatgggtgatagcagatgaccagctaagggtggacattagggcagcagtggaggagacagtgatgccagtttacgcctctttaattgccaagttgaagtcttctcctgaaactgggcgg

SEQ ID NO: 23723 - DNA, 238 bp, Zea mays
cacctcttgatttgactaagcaataactaagtacgctgatctaaaaaataacaggctcactaattacacatttagttttgaacaaatgctgagcgataagggaaatactgctgtgtaccttcagtatgcacatgctcgtatttgttccattattcggaaatccaacaagaacgtggaagagctgaagatgagtggagccatttctctcgaccatccggatgagcgcgtgttggggctg

SEQ ID NO: 23724 - DNA, 240 bp, Zea mays
gtccaactcatctggccatattatctcagccaccagacacgatacatggatcacttcgtgtaacagttcaaggcgaagttattgagcactcctttggagaggagctcttgtgcttcagaactttgcaacgctacactgcagctactcttgagcatggcatgcatcctccgatttcccctaagccagaatggcgtgctctgatggatgaaatggctgttgtagcaactaaagaatatcgat

SEQ ID NO: 23725 - DNA, 239 bp, Zea mays
gaatgagaaagcaagaaggtacttgagcagcatgagaaaaaaggaccctgttccattttcccagaagtttcccagtgcagatcctttggcacttaaactgttagaaaaactattagcgtttgatccaaaggaccgtctgacagcagaagaggcattgcgtgatccatacttcaaaggtcttgccagggctgaaagagaaccatcctgtcaaccaatcagaggagttgagtttgactctg

SEQ ID NO: 23726 - DNA, 146 bp, Zea mays
gcctgctggcgctgcccggggtgcgcaaggagtgcctgacccgcgtgatcagccacccgcatgcgctggcgcagtgcgagcacacgctcacaggcatgggcctgaacgtggtgcgcgaggccttcgacgacacggccggcgccgcc

SEQ ID NO: 23727 - DNA, 131 bp, Zea mays
cttttctttctgagtacctagttaacgccattgagggagcatctgattcattgaacctaccggtggcttttatcagtgttattttgcttcctattgtgggcaatgcagctgaacatgcaagtgcaataatg

SEQ ID NO: 23728 - DNA, 234 bp, Zea mays
cccacgcgtccgctcatgtttgcagtttctttgtgcgaggtgaatgtacaagaggagctgagtgcccttatcgtcatgagatgcctgaaactggggagttatctcagcagaacattaaagatcgctactatggagttaatgatccagttgcactgaaacttttgagcaaggcaggtgagatgccatccctgacaccaccagatgatgagactataaggaccctctacattggcg

SEQ ID NO: 23729 - DNA, 229 bp, Zea mays
catccatttggcgttgctgatatcgcgttcaattccatagattcatcgatcaatgatatccaattcttaaacagaaattcccgggctccaggtcctgctcaacaacgtatgcgaacatacaccaaggtgcacaagcgcggcgctgttggaagatctatcgacatcaacagatattctgggtacgatgaactgaagcatgacgttgcccgtatgtttggaattgaggggc

SEQ ID NO: 23730 - DNA, 131 bp, Zea mays
gatgttgagtaccgctgcttcgtcggccgcctcgcctgggccacggacgaccactccctccacaacgccttcagcacctacggcgaggtcctcgagtccaagatcatcctcgatcgggagacgcagaggtc

SEQ ID NO: 23731 - DNA, 229 bp, Zea mays
cccacgcgtccggtgaaatccagcatagtggcacccgagtgttccaagtaccatgacgtgcctgctgtgatctttgctctgactggatacaccggaaatctattccatgacttcaccgacgtgcttgtcccccttttcacgactgcaagcgagttcaatggtgaagttcagttcctaatcacagacatggctatttggtggacaaggaagtatgctgtggtgtttgaga

SEQ ID NO: 23732 - DNA, 233 bp, Zea mays
ggagggctggaccagcaccagaagctaatgcagagattcaagcaaacttagaccagaggcgacgaatgataactcatgcaaatgcaaagagtaaaagtgagaagtttcctcctccgcatcaggatggaggtacgggtaatccgcttggatcctatcatcatatggagcctatgttcgagcaccaggatgcttccttcagtacagtagtccccatagagaaggggacctcacaa

SEQ ID NO: 23733 - DNA, 245 bp, Zea mays
gagaccggctgcccgaccccggtccggcgatccctctgcacccctttctttgcgctgccagccccaatctctcgcatccctgtcaaccatggcggcgtcagcaggcggaggcgcggtgcgcgcgctgtcccagaaggagcaggacatacagatgatgctcgcggccgacgtccacctcggcaccaagaactgcgatttccagatggagcggtatgtctttaagcgtcgcaccgacggcatctaca

SEQ ID NO: 23734 - DNA, 242 bp, Zea mays
gcttcttgcagccgtcgccgcgaagcatccagagaacttccgtcaacatggggaagacacgtggtatgggagccgggcgcaagcacaagacccaccgcaggaaccagcggtgggctgacaaggcatacaagaagagccatttgggcaatgagtggaagaacaccttcgctgggtcatcccatgccaagggcattgtcctggagaagattggtattgaggccaagcagcccaactccgctatc

SEQ ID NO: 23735 - DNA, 236 bp, Zea mays
gtgctactgacggttgctctagatccgttcatcctggtggttttgtgaggtcgaaagcggcgagcgaattagaagatgctggacaagctgtgggacgacgtggtggccgggcctcgcccggagacgggcctcgagaagctccgcaaggccaccaccgcccgtccgctcgtcatcaacaaagacgcggacggcggcagctacaagcgggcgcagtcgatgccgtcgaccccgacgac

SEQ ID NO: 23736 - DNA, 237 bp, Zea mays
gcaccacacctcttcttcttcttcctcctcctcctagcacagctagcgcctgctccccttcgcctgtgatcatgtcttgcagcagcggcaagtgcgactgtggctccagctgctcctgcggcagctcatgcaactgcatgtcccctaacgtggagaccgccgccgccagcagcatcaagaccacggtcctcgccgcgccgaccaccaaggccagcgccggcggcttcgaggcggcca

SEQ ID NO: 23737 - DNA, 236 bp, Zea mays
cggaccgtggtcccgccggagctcggcaacctccgcatcctcaactacctcaacgtttcccacaacgcgctccaaggggagattccgcctgccatcgccggaatgcagagcctgacagccgtggacttctcctacaacaacctctcgggcgaggtcccgtccaccggtcagtttggctacttcaacgccacttccttcgcaggcaacgctggcctctgcggggcgttcctgtcccc

SEQ ID NO: 23738 - DNA, 239 bp, Zea mays
ttctcgtttagaacctctaaaatttcccccactcgccagtcgcagcagcacctgtagcagccatggacgccagcggaccggtagcaaggggaagaagggggcggccgggcgcaaggcaggcggccccaggaagaagtcggtgacgcggtccgtcaaggccgggctgcagttccccgtcggccggatcgggcgctacctcaagaagggccggtacgcgcagtcgatgggcactggcgccc

SEQ ID NO: 23739 - DNA, 235 bp, Zea mays
gcactgaaaagatatcagtctggcaagtttggaaagatcagcaaagccatcagatttccagaaaccctcaacttggctcgctatatgaacccagatactgatgacatatcgccagtttacagcctctatgcagtggttgtccatcatgatgtcatgaatgctgccttctctggccattatgtatgttatgttaaagatacacagggaaagtggtttaaggcagacgacagccagg

SEQ ID NO: 23740 - DNA, 237 bp, Zea mays
cccacgcgtccggagaatctgagcctcagccggcgggagagagccaatttctgtcgtcgtgccgctgtctatctcgtattggtatatctattcataaatcatccttgtcatggtttgctcttcttgtcagtgttataaatttgcttcttgttagtgttataaatttggccatcggaaaggatgtgtttgtagttgtaatatcttgtttggagttgtaatatcttatcttgcttatga

SEQ ID NO: 23741 - DNA, 233 bp, Zea mays
caggcacattgatcagatcatactatgcagcatatatggagttgccaagatctctcaactgcaactttcattcaaggagattgtttttgcgtataggaaacaacctcaatgcaagccacaagtttttcgaagtgtttatgttcattggcccccaacaagccataatgggaaaacaggagaagatcatgttgatattatcactttctacaatgaagtatttattcctgctgtca

SEQ ID NO: 23742 - DNA, 233 bp, Zea mays
gtcctttcatccgcaaagcagtgagcaacatattctaccagtttgtctttgagactgatcggcacaatgggatcgcggagctgctggaggtctttggcagtgtcattagtgggtttgcattgcctctgaaagaagaacacaagatctttctttggagagttctgattcctttgcacaaaccaaaatctgttggtgtgtatcttcagcagttgacctactgtgtaacacagttt

SEQ ID NO: 23743 - DNA, 232 bp, Zea mays
gcagaacagccttcacttgacttgaacttagaacatagcaaatatgcaaatttgaatgagcaacttgtggaagcaagccttcgactcaggcagatgagaggtgaagaacttgagggattgagtgttgaagaactccagcaattggagaagaatctggaatctggtctgcatagggtgcttcaaacaaaggatcaacaattcttggaacagatcagcgacctcgaacaaaaga

SEQ ID NO: 23744 - DNA, 232 bp, Zea mays
gaagaaaaatgtatccttgctgcctctcgcgacaatctggacagattgtatcgagactctagcaactcgctaaccatcttggagaggagccaccgttttacgatggaagaactggacaaccagcgtcgcaggctgcaagaatccgcagacgaagtgacccgtctcacgcaattgatatcagcaaaagatgccaccatcaagggactccgagcttctaagaaatccattgctc

SEQ ID NO: 23745 - DNA, 232 bp, Zea mays
caacttcctgctcgctcatgcacaccgctgtggatcttgtgaacgagactaagcttgacagcgagattaagtcttggcttgcttttgctgcccagaaggttgttgaggttgatgctcttgctaaggcattggctggtcaaaaggatgaggcttacttcgcagcaaatgctgctgctcaggcctcgaggaaatcctcaccccgtgtgaccaatgaagaagtccagaaggctgc

SEQ ID NO: 23746 - DNA, 230 bp, Zea mays
gagcaccgtccatgacgttgtacttgttggtggctccactaggatccccagggtgcagcaactgctccaggacttcttcaacggcaaggagctgtgcaagaacatcaaccccgatgaggctgtcgcctatggtgctgctgtccaggctgccatcctgagcggtgagggcaatgagaaggtgcaggacctgcttctgctggacgtcacccctctgtccctgggtctggaga

SEQ ID NO: 23747 - DNA, 228 bp, Zea mays
cccacgcgtccgacagaagcgaggagcactacttgttggttggattctcttcagtctagcagctagtccagttaagtttcagacacacatggggagcattggcagaggcacggccaactgcgccaccgtgccgcagccgccgccgtcgacagggaagctcatcacgatcctgagcatcgatggcggcggcatccgcggccttatcccggcgaccatcattgcgtacct

SEQ ID NO: 23748 - DNA, 220 bp, Zea mays
tggtggcgtttgtattgctgatgaagtccagagtggttttggccgtactggcagtcattactggggattccagacacaaggtgtcattcctgacatagtcaccatggcaaagggaattggcaatggcctaccattgggggcagttgtgacaactcctgagattgcaagtgtgttagctcaaaaaatccaatttaacacatttggtggaaatccagtttgt

SEQ ID NO: 23749 - DNA, 227 bp, Zea mays
cccctcactgcattccctctgagcgccgccactccctgacatcgagaccggctgcccgaccccggtccggcgatccctctgcacccctttctttgcgctgccagccccaatctctcgcatccctgtcaaccatggcggcgtcagcaggcggaggcgcggtgcgcgcgctgtcccagaaggagcaggacatacagatgatgctcgcggccgacgtccacctcggcacc

SEQ ID NO: 23750 - DNA, 227 bp, Zea mays
cccacgcgtccgcccacgcgtccgcccacgcgtccgcggcctctgtcccttgcaagttcaatctcacctccaaccatgggtaaagagaagtcccacatcaacattgtggttattggccatgtcgactctggcaagtcgaccaccacaggacaccttatctacaagcttggaggcattgacaagcgtgtgatcgagaggtttgagaaggaggctgctgaaatgaataa

SEQ ID NO: 23751 - DNA, 240 bp, Zea mays
gttccgtgtccgcgtccagtgtgtccgctactccgctccccctcagtcctcagttcctcacctagcggtagcgtgcgcgcgggagacgtagatggcggcttcggaggcggcagctgcggcggcaacaccggtgacgccgacagaggggacggtgatcgcgatccacagcctggaggagtggagcatccagatcgaggaggccaacagcgccaagaagctggtggtgattgacttcactgc

SEQ ID NO: 23752 - DNA, 239 bp, Zea mays
gaaacccgcggcgaagaagccggcggaggaggagcccgcggccgagaaggcgcccgccgggaagaagccgaagggtagaagcgggtccccgctggcaagtccgctgccaaggaaggcggcgagggcaagaggggcaagaagaagggcaagaagagcgtggagacctacaagatctacatcttcaaggtgctgaagcaggtgcacccggacattggcatctcctccaaggccatgtccat

SEQ ID NO: 23753 - DNA, 237 bp, Zea mays
aaaagtgattaaaaatggtggttcttgcagcttcaatcgtttcaaagtcgggaaaagcacttgtttcaagacagtttgttgacatgtctcgcataagaattgaaggattacttgctgcgttcccgaaactggttggaactgggaaacagcacacttatgttgaaactgaaaatgtgcgttatgtttatcaacctattgaaggattatatcttctacttatcacaaacaagcagagca

SEQ ID NO: 23754 - DNA, 237 bp, Zea mays
cacctgctctctctctctctccctttctttcccgcggcgacggtgacgacgaccgcgcgacgccgccgactccctactgcatcaggtgcctcggccttcgtcgtgctctccgccggcaacgagtatagacgggcgcgcatggccaccttcgagctgtaccggaggtccaccatcggcatgtgcctcaccgagacgctcgacgagatggtctccaacggcaccctcagcccggagctc

SEQ ID NO: 23755 - DNA, 241 bp, Zea mays
ggcaaggctgccgacctcacctactgggagagcgctgctcgtatgatcgccgatgtctccaagtctgacaagatcgttgtcgagaagtccaccgtccctgtcaagaccgctgaggctattgagaagatcttgacccacaacagcaagggcatcaactaccagatcctttccaacccggagttccttgcagagggcactgctattgaggacctgttcaagcctgacagagtgctcatcggtg

SEQ ID NO: 23756 - DNA, 242 bp, Zea mays
cccacgcgtccgcccacgcgtccgcccacgcgtccgcccacgcgtccggagaaacaagagctgtgcttctctgttgtctcattgctctggcagaagctcatagcttctcccgaaatgcagatgtctgcagaaagtacatcagctcaccaaggatggaggaaggttgtggatgcactttgtgatgtcgtttcagcctcaccaaccaaggcctcagctgctatcgttctccaggtcaagatatt

SEQ ID NO: 23757 - DNA, 243 bp, Zea mays
cccacgcgtccgcccacgcgtccgcccacgcgtccggattccagggccagcatgggcggttatatatcctcacaaaccgtgaggaaaattattgaaataaatccttacatgctggggacaatggctggaggtgctgctgattgccaattttggcataggaacctaggaaccaagtgtcgtctccatgagctttcaaacaagcgaaggatctctattgctggtgcttccaaactgttggctaac

SEQ ID NO: 23758 - DNA, 242 bp, Zea mays
gtcgagtgtaattcagcggcagagaaactgactattttgaatgcttttgatatcatctccctgtctaacgggtttgatctctctggtatatttgagaactcaaacaaggagtctaaattcatgtctaccaacacagctatgacaattatcaccaagctaatggaagttgcaaagagcttggatctgaaggttataacaaaaactggtgggttgttgaatatggaagctgccaaatcaggaat

SEQ ID NO: 23759 - DNA, 243 bp, Zea mays
cttcggacaagcccctgcgtctccccctgcaggatgtgtacaagattggtggtattggaactgtaccggttggtcgtgtggagactggtgtcatcaagcctggtatggttgtcaccttcggtccaactggcctgactactgaggtgaagtctgttgagatgcaccacgaggctcttcaggaggcccttcctggtgacaatgttggcttcaacgtgaagaacgttgctgtgaaggatctcaagc

SEQ ID NO: 23760 - DNA, 242 bp, Zea mays
ggaagcaggatcgagccgaatcctccggaactcgccgccggggccaaccgagctcacactattgatcgaggatgtcgtacgcctacctcttcaagtacatcatcatcggcgacaggcgtggggaagtcatgcctgctgctgcagttcacggataagcgcttccagcccgtgcacgatctcaccatcggcgttgaatttggcgcccgcatgatcaccatcgacaacaagcccatcaaactcca

SEQ ID NO: 23761 - DNA, 232 bp, Zea mays
cccacgcgtccgcccacgcgtccgcggacgcgtgggttcaagaccatctgaaaagcgtggaggggcttggatgaatgtagtcttttctcgaagtgcgcgtgctagctcgcaatggtttggctgctaggctgcctgttgcccatatagtgtgcaatcagactccaccagttggcgagaagcccagtctcatgaccttccgtgaggttgaaactgtgttccatgaatttgggca

SEQ ID NO: 23762 - DNA, 234 bp, Zea mays
ccttgatgttttgcgcaataacgtacaattccaaaacctgcttggtttggtgcaggctaatcctcagattttgcagccattgctgcaagaattgggtaaacaaaatccccaggttatgcagctaatccaggaaaaccaagcagagttcatgcggatgatcaatgaaccacttgagggagacgaagagaatgaaatgatgctggaccagatggcggatgcagctgagaccattgc

SEQ ID NO: 23763 - DNA, 236 bp, Zea mays
caccgaagaaggcttctctggttgcattagcttcttatgcttcagatcctgctgctggcaaggatgagtatgcccaatgggttgtggcaagtcagagaagcctgttggaagtcatggcagagttcccttcggcaaagcctccactaggagtcttctttgcagctgttgcccctcgacttcaaccaagatattattctatttcatcttcacctagtatggcaccaaccaggattcat

SEQ ID NO: 23764 - DNA, 237 bp, Zea mays
gggacacccagctgcggatgctggggatcttcaagttcatgctggccaacctgcgcggcaaggacgacatcttcgccttcggccacgacgtgatgaggagcaggtggctcaggctgagcgccgccgtgtcgcggacccgccgcatcacgctgcagaagatcgcgccccagtactgcacgtacttcggccgggtcagagagccatccccagcctacgcatgggtcaagtgcgagatgg

SEQ ID NO: 23765 - DNA, 228 bp, Zea mays
cgtccccgtccccgtccccttccggcgcgcgagctcgcccgagatggcaaacgcgagatcgggtgtcgctgtgaatgacgagtgcatgctcaagttcggcgagctgcagtcgaagaggctgcaccgcttcctaactttcaagatggacgacaagttcaaggagatcgttgtggaccaggtcggggatcgcgctaccagctacgaggacttcacaaacagcctccccga

SEQ ID NO: 23766 - DNA, 227 bp, Zea mays
gaacaagattaagaagggaacaaaaggagatgtttctgtactgaatcctactcttatgatttcagttcctgcaattttggatcgtatcagagatgcagtatttaagaaagttggtgagaagggtggcctgacaaaaaagctgtttgatttttcatataagcgaaatattgcagcaattgaagggagttggtttggatcttgggcaccagagaggatgttatgggatc

SEQ ID NO: 23767 - DNA, 227 bp, Zea mays
caaggagtccatcgtgtcccgcgagatgacccggcgctacatgacggacatgatcacccacgccgacaccgacgtggtgatcgtgggcgccgggtccgcgggcctgtcctgcgcgtacgagctgtccaaggaccccaccgtgagcgtcgccatcgtggagcagtccgtgtccccgggcggcggcgcgtggctgggcgggcacctgttctcggccatggtggtgcgca

SEQ ID NO: 23768 - DNA, 226 bp, Zea mays
ggacgcgtggcgtcgacatgccgctctggtagttgccagtatcccaactgccgaaaagtcaaggggctattccgtcatgggatgcagtgcaaaacgcgtgcttcaggagggtgtgtcctttgcaagaaaatgtggtacatgcttcaactccatgcccgagcttgcaaggattcagactgcaatgtgccgcggtgcagggatctgaaggagcaccttagaaggttgc

SEQ ID NO: 23769 - DNA, 228 bp, Zea mays
cccacgcgtccggatttggtcccatccccaacattttatgtgcagagatctttccaaccagggttcgtggcctctgtattgccatttgtgcctttacattctggatcggagatatcatcgtcacctacagccttcctgtgatgctgaatgctattggactggcgggtgttttcagcatatatgcagtcgtatgcttgatttcctttgtgttcgtcttccttaaggtcc

SEQ ID NO: 23770 - DNA, 230 bp, Zea mays
cccacgcgtccgagcagatgtaatggctattcctggtctttacagatttgttcaggagaccatcaagaaacaagtagcaagcatgtatttgtggccgaagacgctagaagtacctataatggatccctcaaaagcatcaaaaaggcctgttggaattctacttgtgaaggttgtgagagcccaaaatctgcggaagaaggatctgctgggtaaatctgacccatacgtga

SEQ ID NO: 23771 - DNA, 229 bp, Zea mays
gccgcaatggacgaagaggttggcgccgccgggcgacaacaggttggctgtccttagctcagataggagagtttgcttttgtgcttttgagtcgtgcctcccatctccatcttgttggggggaaaatgtatctactattactgggaacaattgcccttagcttggtaacaactcctcttattttcaaactaattcctatggtaatgcaccttcggcaccttatgtgttg

SEQ ID NO: 23772 - DNA, 232 bp, Zea mays
gatggccagtgcttatattggcaattttggcttcggtggtcggaagccaagcaatcatcagtggaacattctcaatcatcaaccagagcctgtccctgagctgcttccctcgagtgaaagttgtacacacatctgagaaaattcatggccaaatatacatccccgagatcaattggttgcttatgatcctctgcattgctgtgaccgttgggtttagagatacaaaacacat

SEQ ID NO: 23773 - DNA, 231 bp, Zea mays
cccaccgatccatttcagccgccgccgcgcgtacaagcaggagcagcaaggatgccggctggccacgggctgcgctcgcggacgcgcgacctgttcgcgcgccccttccgcaagaagggctacatcccgctcaccacctacctccgcacctacaagatcggcgactacgtcgacgtcaaggtgaacggcgccgtccacaaggggatgccgcacaagttctaccacggccgc

SEQ ID NO: 23774 - DNA, 245 bp, Zea mays
  unsure (1)..(245): unsure at all n locations
ccctcgtctcaaagtaaccaacgggcgaatggttttagaggttcgcccggtgatcgactgggacaagggaaaggctgtcgagttcctgcttcggtcgctctgcctaagcgactccgaagatgtggttcctatctacatcggagacgatcgaacagacgaagacgccttcaaggtactgcgagagcgaactngtggatacggaatcctagtctcgcaggtgcccaaggacactgaagccttctact

SEQ ID NO: 23775 - DNA, 244 bp, Zea mays
ctcctgcgcagagggctgcattcaatgatgtgtatattgcatatgaattgatggatactgatctgcatcaaattattcgttcaaatcaagctttgtcagaggagcactgtcagtattttctttatcaaattcttcgtggcttgaagtatatacattcagcaaatgttcttcaccgtgacttgaagcctagcaatcttcttttgaatgcaaactgtgacctcaagatatgtgattttgggcttgc

SEQ ID NO: 23776 - DNA, 244 bp, Zea mays
cggacgcgtgggctcctcggcctcctggcgtcccacccggtggcgccgatcgtgacgcttcaccacctcgacgtcgtgaagccgctgttcccggacgcgaggtcgcgcccctcggcggtgcggcggctgttcgacgggccggtgaagctggacacggcggggctgatgcagcagtccatctgctacgacagcgcgatccgctggacggtgtccgtggcgtgagggttcacggtgctggtggcga

SEQ ID NO: 23777 - DNA, 246 bp, Zea mays
gccgccgccgccgcgtccgcctcgcccagcgcacagccgccgcagcacatcgctatctcgatctcagccatggcggaggtggagcagcaacaggacacgccgaagctgttcaaccgctggaccttcgatgatgtccaggtgaacgacatctcgctgaacgactacctcgctgtgaacgcgacgaagcacgcgatgtacctgccgcacaccgcggggcgttactccaagaagcggttccgcaaggcg

SEQ ID NO: 23778 - DNA, 243 bp, Zea mays
tggagcgtgacatgactaacgtttcatctgaggttggtccagtccatgcgccaaggtttcccaagcctaaggaagaaggctggtggctggtgattggggacagctccacaaaccagttactggcaatcaaaagagtggcactccagaagagggcgagagtgaaacttgagttctctgctccggcagaggctgggagaaaggactacatgatttacttgatgtcagactcttacttgggctgcg

SEQ ID NO: 23779 - DNA, 241 bp, Zea mays
ccgcgcgctgttgtccatccttgtgcagcaaaaatgacggctggctacattgttggctcactggtcggatcctttgccattgcatacctgtgtgacacatttatctctgacaagaaggcatttggaggtagcacccccaagactgtttctgagaaggagtggtggcaagccacagacaccaagttccaggcctggcctcgcactgctgggccaccggttgtcatgaaccccatcagccgcc

SEQ ID NO: 23780 - DNA, 243 bp, Zea mays
cccacgcgtccgcccacgcgtccgcggacgcgtgggctagttgcaagcacagggtagagaaccattgcccaacctgtcgccaggaactgggaaacatcaggtgcctagctctcgagaaggtggcagagcaactccagcttccgtgcaagtaccagagcacgggatgcaccgagatccacccatacaagagcaaactgaagcacgaggagctctgcaggttcaggccgtacagctgcccgtacg

SEQ ID NO: 23781 - DNA, 236 bp, Zea mays
cccgttcgagctggccaatggccgggacatatggaccctgtccggccacgacgcgagcttcggcaagctcttcgacgacgtgttccgaggggtcggctccctcgtcgacgtcgccggcgggctcggtggtgccacccaaaccatcgcgaaggctttcccggacgtggcgtgcagcgtgctggacctctcacacgtcgtcgccaatgctcccaccgacaccaccgtgaagtacatcg

SEQ ID NO: 23782 - DNA, 230 bp, Zea mays
ctacatctgatctgttgcttgtgcagtctgatctttacaccttggttgatggctttgtcatccgcaacccatccagagcgaatccagctaacccttcaattgagcttggacctgagttcaagaaggttgccaatttccttgctcggttcaagtccatccccagcatagttgagcttgacagcttgaaggtttctggtgatgtctggtttggctctggaattacactcaag

SEQ ID NO: 23783 - DNA, 232 bp, Zea mays
cccacgcgtccgcaacgacaagatcacgtacactttccatgacgactctaagagagacaagcccagcagaggtgggcggtacaccgtgtaagctggacgtcaagaagggcgttgctttggattggaattggagagcggaggtgggattttcttctgggaccggcgccgactttcgtttgattcagcttttacacgaggcagttttcgccgctattacaatgttattttcctc

SEQ ID NO: 23784 - DNA, 228 bp, Zea mays
gttttggatgaaacaaaagatgtacttcttgagatatatgcaccatggtgtggtcattgtcaatcgctggaacctacttacaacaatctagccaagcatctacgtagtgttgactcccttgtggtagccaaaatggatggtactaccaatgagcatccacgtgcaaagtctgacggatacccgacgattctcttctatccagctgggaagaaaagctttgagccaatc

SEQ ID NO: 23785 - DNA, 123 bp, Zea mays
cccacgcgtccggaccaggctataaccatcataagaaagctggtgctatgaatgcattggtccgagtctctgctgtactaacaaatgctccatatttgttaaacttggattgtgatcactaca

SEQ ID NO: 23786 - DNA, 239 bp, Zea mays
ctgttctctctgctccaaggaacaggacgtgcaacagaactgctccagctgtggggcctgcatgggcaagtacttctgtaaagtatgcaagttcttcgatgatgatgtctcaaagggccagtaccactgtgacggatgtggaatatgtagaaccggcggcgtggagaactttttccactgtgataaatgtgggtgttgctacagcaatgtcttgaaggattcccaccactgcgtcgaaa

SEQ ID NO: 23787 - DNA, 138 bp, Zea mays
ggacgcgtgggattggcttcgcgctgaatacaattgctattttctaccgctcattagcagcaataacatttggaacaatggttgtcatgtttgtactttgggctttcatctcctttcccttggtgcttttgggaactg

SEQ ID NO: 23788 - DNA, 188 bp, Zea mays
atagatgcagtacggtcggaattccgggtcaccacgcgtccgggacctgagcaatcactgaccctgtttctcattggccccttccttgatggctttttgactaacataaatgtctttgcttttaattatacatctcaagttgtgtttttcatcgtcatgtcatgcttgatatctgtttcagtgaactt

SEQ ID NO: 23789 - DNA, 137 bp, Zea mays
ctgagccagagctaatgctaaacaaccgggtgtacacctgcaacaacgtccagtgcccgcacagtgactacagctatggattccttgaccggaatgcccgcaacagccaccagtacacctgtaagtacaacgatccg

SEQ ID NO: 23790 - DNA, 236 bp, Zea mays
aagattatgtgcatgtgcgcatccagcagcgcaacggcagaaagagtctgactacagtccagggtctgaagaaggagttcagctataacaagatcctcaaggatctgaagaaggaattctgctgcaatggtactgtagttcacgacccagagctaggccaggtcattcagctccagggtgaccagcgcaagaatgttgctactttcctaggtcaggcttggattgcgaagaaagag

SEQ ID NO: 23791 - DNA, 130 bp, Zea mays
gttttggatgaaacaaaagatgtacttcttgagatatatgcaccatggtgtggtcattgtcaatcgctggaacctacttacaacaatctagccaagcatctacgtagtgttgactcccttgtggtagcca

SEQ ID NO: 23792 - DNA, 146 bp, Zea mays
cccacgcgtccgccacgcgtccgcgaaggcgaccctccctccttcgctccttccgcgccgcctcccggccgtcgccgccatggtgaagtactcgcaggagccgggcaaccctaccaagtcggctaaggccatgggcagggatctga

SEQ ID NO: 23793 - DNA, 145 bp, Zea mays
gccagatctacgacgtcacccagagcagaatgttctatggacctggtggaccatacgccctattcgccggcaaagacgccagcagagccctagcgaagatgtccttcgagccacaggatctgaccggcgacatcactggcctagg

SEQ ID NO: 23794 - DNA, 163 bp, Zea mays
ccgcaccatccgctaccctgacccgctcatcaaggccaacgacaccatcaagatcgatctggagaccaacaaaattgtggacttcatcaagtttgatgttggcaacgttgtcatggtgactggcggaaggaacactggccgtgtgggtgttatcaagaacagg

SEQ ID NO: 23795 - DNA, 136 bp, Zea mays
gccaaaagaagctggaaatcgatgacgaccagaagctgcgtgccttttatgaccgaaggatatcccaggaggtcagtggtgatgctctgggtgaggagttcaagggttatgtcttcaagatcatgggtggatgtga

SEQ ID NO: 23796 - DNA, 219 bp, Zea mays
caatggcggccttgcgctatctcaggcaggttgctcacgaagataccgcccattctgtgataaccgggtggggacggcagcctgctgctctacgggctctgagccagaagctcaccagagggttcaatgaagctctgaatgggctcgctgacgacgggtggtctttgatcggaagtgacggggtggacgatgtctgcggctctgtcagttcatccccga

SEQ ID NO: 23797 - DNA, 199 bp, Zea mays
cccacgcgtccggcagaccagttcattgaggaagctgaacgaagtctccatgatgccatcatgattgtgaggagagcacttaagaactcgacagttgtgccgggtggtggtgctattgatatggaaataagcaagtatctcaggcagcatgcacgaacaattgctgggaagtctcagttctttgtaaattcatttgcta

SEQ ID NO: 23798 - DNA, 247 bp, Zea mays
cgccgaggcacctcatctccggcgaagggaaatggcgaccgttccaggggatctgatctggcagattgtgaggaagaacaactccttcctggtgaagcagtttggcaacggcaatgccaaggtgcagttcaccaaggagcccaacaacctctacaatgtacactcctacaagtactctggcttagcaaacaagaaaactgtaacgatccagccagctgctggaaaggactcggctgtggtcctctct

SEQ ID NO: 23799 - DNA, 188 bp, Zea mays
cccacgcgtccggagaattcttaattaaacatggagcgctccctgaagaacgtatacgtgcagtggaaactggaggctgccctcatgcggctattcgcgaagacatcagcataaatcttggtcctctggaggagctatcgaacttgtacaaagctgatttgctactctgtgaatctggaggagataac

SEQ ID NO: 23800 - DNA, 241 bp, Zea mays
cccacgcgtccgccaccattccttccccaactctgcaggctgctcgtcgccctccctccacgccggacgcgccccgatccagatccaggggcgtaacatggcatcaaaacgtatcctcaaggaattaaaggacctgcaaaaggaccctccaacgtcatgcagtgctggtcctgctggtgaggatatgttccactggcaggcaaccatcatgggtctcctgatagtccatatgctggaggtg

SEQ ID NO: 23801 - DNA, 247 bp, Zea mays
caacattgtggtcattggccatgtcgactctggcaagtcgaccaccactggccacctgatctacaagcttggaggtattgacaagcgagtgattgagaggttcgagaaagaggctgccgagatgaacaagcggtcattcaagtatgcgtgggtgcttgacaagctcaaggctgagcgtgagagaggtattacaattgatattgccctgtggaagttcgagaccaccaagtactactgcactgttatt

SEQ ID NO: 23802 - DNA, 249 bp, Zea mays
cccacgcgtccgctaagcgatgcaaaattttgcaggaggactaatacaactcaaccatggaaggcctcagccacttcagtatgctgtcaacgcagctttccttgcttctctatacagcgactatcttgaagctgcagacacgcctgggtggtactgcggacctaacttctacaccacagaagtcctccgcaagtttgccaggtcacaggtaaaagcattgttcttaatgctctcaaagtgcccaacgta

SEQ ID NO: 23803 - DNA, 249 bp, Zea mays
cttaactggaaagcaaaatacggtattgaagagatgtgccgcgaccaatggaactgggccagcaagaacccttatggctatggatcacctgactctatcaagcagaatggtcaccaaacaaacggatccgctgactcctccaagcagaatggccaccgcacaaacggttcaactgactcacccaagcggaacggccaccatgcgtatgggtctgctgactcacccaagcgcaacgggcactgcgttttt

SEQ ID NO: 23804 - DNA, 237 bp, Zea mays
cgaagaactccagggcagcagctcctgctgccaaagagtacgacgacgacgatgacgaggaggacgaggaacacacggaaaccttttgtggaagctgcggcggcctctacaacgcgaacgagttctggatcggctgcgacatctgcgagcggtggttccacggcaagtgcgtgcggatcacccctgccaaagcggaccacataaagcactacaagtgcccggactgcagctcgaaga

SEQ ID NO: 23805 - DNA, 239 bp, Zea mays
gcccttggcccgaatttccggcgcctctccgtggagcacattgtcccgtcgtatcggaggacggataaccggctgattctcctggactacgacggcaccgtgatgccggagaactccatcgacaggacgccgagcagtgaggtcatctctgtgttgaatcgtctgtgcgaggaccccaagaacagagtgttcatcgtaagcggacgggggaaggacgagctgagcaggtggttcgcccc

SEQ ID NO: 23806 - DNA, 237 bp, Zea mays
gccacagacaccaagttccaggcctggcctcgcactgctgggccaccggttgtcatgaaccccatcagccgccagaacttcatcgtcaagtccactgagtaggtttgggctggagaagctggttctgcgacttggtgccgcaatgaaacccagagttctttttcgaaggtcttaatcaattgtaataaaacgaaatacagtcaggatttttttgtgattttaacttgatctgtgagc

SEQ ID NO: 23807 - DNA, 241 bp, Zea mays
cctggactacgacggcaccgtgatgccggagaactccatcgacaggacgccgagcagtgaggtcatctctgtgttgaatcgtctgtgcgaggaccccaagaacagagtgttcatcgtaagcggacgggggaaggacgagctgagcaggtggttcgccccctgcgagaagctgggcatcgccgcggagcacggttacctcacaaggtggagcagggacgcgccatgggatacctccggattg

SEQ ID NO: 23808 - DNA, 242 bp, Zea mays
agggcgcgcgcgcgagcgggcgagcgagggcacagccgatcgaccgagagctagcgcgcgatcgcgaggtcttccgagatgatggtggcggcggctctgctggccttggccctggccgtgtcgaccgccgaggcgacggacatcaagaccacgacgacggacaacagggacgacgcggtggtgcagccgcagaccttcccgcccttcgaccgcctcggcggcggcgcgtccccggcgttcgg

SEQ ID NO: 23809 - DNA, 233 bp, Zea mays
cccacgcgtccgaagatgataagcagctggatgctgatatccaccgcaagtacatctatggtctccatgttgctgagtatatgaagaatctggctgacgaggagcccgagaagtaccaggctcacttcagcgagtacatcaagaaggggattgaagccgatgacatggaagctctgtacaagaaggtccatgcggccatccgtgctgatcctagcatggccaagtcaacaaag

SEQ ID NO: 23810 - DNA, 231 bp, Zea mays
ggctggaaatgtgaggacacgaactaatcgctcaggcggtgttcagggagggatatcaaatggtgaaattatttacttcaaagtggcttttaagccaacagcaactatcggaaagaagcaaaatactgtgtcaagggagcatgaggatgttgaacttttggcaagggggcgccatgacccctgtgttgtccctcgaggtaatgtctccaaaaatttcctaccttttatcat

SEQ ID NO: 23811 - DNA, 275 bp, Zea mays
cagtgtgattgctgtatgccccaagggaatgggcccatcagtcagaagactttatgttcagggcaaagagatcaatggtgctggtatcaatgctagctttgctgttcaccaggatgttgatggaagggcaacagatgtagctctagggtggtcagtagctttaggttctcctttcacatttgctactactctagagcaggagtaccggagtgacatttttggcgagcgaggtattttgcttggtgctgtccatggcatggtggaggctcttttca

SEQ ID NO: 23812 - DNA, 246 bp, Zea mays
ccacagaatacgcagtcaaactattctacagatgagcgaagttccgaatctggtaatatgcctgagcagcgtgcattactcgctgaatcaatgagacaagaggtgctgcaattggacaatgaaattgtttacaatgaagctataattgaggaaagggagcaagccattcaagatatccaacagcagattggtgaagtacatgaagtgttcaaagatcttgctacccttgtgcattcccaaggaatc

SEQ ID NO: 23813 - DNA, 304 bp, Zea mays
gacgcagagtacggtcggaattccagagagaccacgcgtcccaaacctggtgccacgcgtaccgcttgctggtgcactggcatactgtcacaaaaagcaggtcattcatagggacatcaagccagagaatttgctaatcgatatcgagggccggcttaaaattgcagattttggatgggcggctcgttcaaatgctaaacgccacacactctgtggcacaatcgattatctggcaccagagatggtagagaaaaaagctcatgaccatgctgtggacaactggacattaggaatcctgtgctat

SEQ ID NO: 23814 - DNA, 284 bp, Zea mays
acccacgcgtccggagacctggcgagacgcgtgggttctctcccaccctcctgctcctcctcccacggtccacccatttcgtcacccgctcaccaactcaaaccccctccgctctcaaaccctaaccctagccctagcccgctcccggcggaccgacgatgccgaagatggcggcggggcggcggacgaagaggagttccgcgccgaggtggaggagcgcctcatcaacgaggagtacaagatctggaagaagaacacacccttcctctacgacctcgtcatca

SEQ ID NO: 23815 - DNA, 245 bp, Zea mays
cccacgcgtccgcccacgcgtccggtttgaagattatttcttgaaacgtgaactgcttatgggaatctacgaaaagggatttgaaagaccatctcctattcaagaagaaagcattcctattgcgctgactggaagtgatattcttgcaagggcaaaaaatggcactggaaagactgctgccttttgcatttcggcacttgaaaaaattgatcctgaaaaagatgctattcaagttgttatactag

SEQ ID NO: 23816 - DNA, 238 bp, Zea mays
ccttttcccaaaggcaaccaaaccatctcgactcgtggggaagtttcgctctcgcccgcgtcgacttcctagggttcgaggaacgtccgtccgtccgtccggggaaggagcaggagggaggcggagatgatcgaggtggtgctcaacgaccgcctggggaagaaggtgcgggtcaagtgcaacgaggacgacaccatcggcgacctcaagaagctggtggcggcgcagacggggacgc

SEQ ID NO: 23817 - DNA, 272 bp, Zea mays
cccacgcgtccgagcactcggaggttcagtggcaggctcagataagagaatactgttcctatgtggggactacatggaggattatgaggtcatggtcccattccaggctctccaagctcttggctgccatgtcgatgccgtttgccccgacaagggagctggggagacgtgcccgacagccattcatgatttcgaaggtgaccagacctacagcgagaagcctggccacgattttactctgacagcgtcgtttggaagtgtggatgcttcga

SEQ ID NO: 23818 - DNA, 267 bp, Zea mays
accaacattgctgaaacatccttaactatagatggcatagtttatgtgatagacccggggttttccaaacagaaagtttacaacccaagaataagggtggaatcccttctggtgtcacccatttctaaggcaagtgctcatcagagagctggtcgtgctggacgaacacaacccgggaagtgttttaggctatacacggagaagagttttaatgaggatttgcaaccacagacatacccagaaattcttcggtcgaacctggcaaat

SEQ ID NO: 23819 - DNA, 262 bp, Zea mays
  unsure (1)..(262): unsure at all n locations
cccacgcgtccgatgtgtctgaggcggaaggtgtatacagcgccttggagaagcttggcatcgactgggaagaggttggaaagcagcttgagctggaaggcgtggactccttcaagaagagctttgacagcctactcgtgagcctgcaggagaagggcaacagcctcaagatggcgagtgtgtaaagctgagaagattgggtacctgcgagtgaacgattttactanatanaatgctagcttgctggctctcctcttagttt

SEQ ID NO: 23820 - DNA, 268 bp, Zea mays
cccacgcgtccggtgttggtgagacccttgagcagagggaggctgggtctaccatggatgttgttgctgcacaaacaaaagcaattgctgagaagatcaaggactggagcaacgtagttgttgcctatgaaccagtttgggctattggaactggtaaagttgccaccccagctcaggctcaggaagtgcacgcctccctgagggattggctaaagaccaatgccagccctgaggttgctgaatctactaggatcatctacggaggctc

SEQ ID NO: 23821 - DNA, 262 bp, Zea mays
atcttgcaaaggttgcttattggcttcttcagcataacctcagtgttacacttgcagcatgtgacaccttcagatctggtgctgttgagcagctgagaactcatgcaaggaggcttcagatacctatatttgagaagggttatgagaaagatccggcagttgtagcgagggaggctattcaggaagcaacccggaacaaatcagatgttgttctggttgacactgctggacgtatgcaggacaatgagccactcatgagggc

SEQ ID NO: 23822 - DNA, 264 bp, Zea mays
gcttcccggggcagctcaactcggacctccgcaagctggccgtcaacctgatcccgttcccgcgcctgcacttcttcatggtggggttcgcgccgctcacctccaggggctcccagcagtaccgcgccctgacggtgccggagcttacccagcagatgtgggacgccaagaacatgatgtgcgccgcggacccgcgccacggccggtacctgacggcgtccgccatgttccgcggcaagatgagcaccagggaggtggacgagc

SEQ ID NO: 23823 - DNA, 258 bp, Zea mays
ccccaatgaagttagtgagatctccatggcgaactcccgccataacatccggaagttggttaaggatgggtttatcatcaagaagcctcagaaaatccactctagatctcgtgcaagaagggcgcacgaggctaagcagaagggacggcactcaggatatgggaagcgtagaggtaccagggaggctaggctccccaccaaggtactgtggatgaggaggatgcgcgtgctgaggcgcctgctccgcaagtaccgcga

SEQ ID NO: 23824 - DNA, 260 bp, Zea mays
cccacacgtccgcccacgcgtccgcacaaggataccttggtgtactattttgggacatgggaaagctgtcagttatgtgaggttcttggatccagacacacttgtctctgcatcaaccgacaacacattgaagatatgggatcttaaccagactaattgcagtggattatctaccgattcttgccgcctgactctgaatggtcataccaacgagaagaattttgtagggctatctgttcatgatggatacataacttgtg

SEQ ID NO: 23825 - DNA, 259 bp, Zea mays
accgtactgagtatcagctgattgatatttctgaggatggaattgtgagccttcttacttcagatggcaacactaaggatgatcttagactcccaactgatgagactcttgtggcccagattaaggaagggttcgaaagcgggaaggatcttgttgtgactgtccagtctgcgatgggggaggagcagatctgcgcgttgaaggatgttggccccaagtaacttccttggctttggagacggaaccctactgtatctca

SEQ ID NO: 23826 - DNA, 258 bp, Zea mays
gtgcgacgtcctcatcccagcagcgcttgggggagtcataaacaaggataatgctaacgacataaaggcaaagtacatcatcgaggctgccaatcaccccacagatccagaggcagacgagatcctgtcaaagaaaggcgtcctcatcctccccgacatactggccaactctggtggcgtcacagtgagctacttcgagtgggtacaaaacatccaggggttcatgtgggacgaagagaaggtaaacgcggactgcgg

SEQ ID NO: 23827 - DNA, 172 bp, Zea mays
gtagcacaccactccgcgctgctgaggccggtacagcggcacagaggtgcgacgtacgacgacgacgacgcaggcgccacacatggcatcccagctctccgccgccgtgccccggttccacggcctccggggctacgccgcgcccaggtccgcggtggcagcgctgccgtcc

SEQ ID NO: 23828 - DNA, 247 bp, Zea mays
ggatccacgggtcaggcgacgtggttctcgactacgaggtaaaccccaggagcgacctccctccccttccccgggtgggcgtcgtgttcagcgccgggaggtccctgagccacgtcacgtggtacgggcgcgggcccttcgagtgctacccggaccgcaaggcggcggcgcacgtcggcgtgtacgagagcagcgtggaggagctgcacgtgccgtacattgcccccgtggagtgcggcgggcgggc

SEQ ID NO: 23829 - DNA, 244 bp, Zea mays
aagacacaacacaactcgtaggcagcgagcgtctctcctcttcctctcccacgcaccgcgccaaggaaggcagagagagatcgccgctcctcttctctccgtcggtggtgcggttgaccgccctcctcgagcgagatctcgctgcagtccctcgagatctggtcacagatctatccgacaagatggtgaagatctgctgcatcggtgctggctatgtcggtggcccaaccatggcggtcattgc

SEQ ID NO: 23830 - DNA, 249 bp, Zea mays
ccggctacaactttcgcgacgtctgcgacatcagaaaactgagctcgccccctcttgccttccctcctccgccggaccgctgctgtccgcctccaaccctccagttcgacgcaggcggcgacggcggcgcgccgagatgaaggtctccgtgaagacgctcaagggatctagcttccagatcgaagtggagcccaccgacaaggttgctgctgtgaaaaaggtcatagagaatatgcaagagcaggcttc

SEQ ID NO: 23831 - DNA, 247 bp, Zea mays
cagacggtgggcgagactgatgattctgatgaggatgagacggacgattctgatgagggtttatcttctacagaaggcgatgatgattcaagtgatgaagatgataccagtgacgatgaggaggaagacactccaactcctaagaagcctgaggtaggcaagaagagagctgctgaaagttccgtgctgaaaactcctctatctgataagaaagcaaaggttgccacaccgtcatctcagaagacag

SEQ ID NO: 23832 - DNA, 248 bp, Zea mays
ccccgcgtccggttgtgggtttcggaaacaagtacccgaagcgccctcatcacagaggcgcgtcgatacctcacaacggcgtcaagtatgggtgcaaaggaggttacaagtggagggacacaaagaaggctaaccctaacatccttgtcggagcaatggtggctggccccgacaggcgcgatggctacaaagatgtccgcacgaactacaactacacggagcctactctcgcagcgaatgctggtctg

SEQ ID NO: 23833 - DNA, 244 bp, Zea mays
ctcgtgaccaccgggatgtccgccatggagaccgacatcaacgcgccgccgccgcccgccccagctggcgagggatcctctgcagccggtccgtcctcctcccgcaagcccaacaagcgcttcgagatcaagaagtggaacgccgtcgcgctctgggcatgggatatcgtcgtcgacaactgcgctatctgccgcaaccacatcatggatctatgcatcgagtgccaggcgaaccaagccagcg

SEQ ID NO: 23834 - DNA, 241 bp, Zea mays
aaacgaattaccctcggtgccctccctctcggcggcggcggcgcaagtccccttatctccggcgcggcaaatggcaggcggcagggttgcacatgctaccctcaagggccccagcgtggtgaaggagatcttcattggactgaccctgggtctgatcgctggaggtatgtggaagatgcaccactggaacgagcagaggaaaactagatccttctacgacatgcttgacaagggccagatc

SEQ ID NO: 23835 - DNA, 243 bp, Zea mays
tctttatacaggagcaatacaaaccatgagcatgatcagccgcctcatccgcttgagggatcctacagtacccgaacgagtaaatgttgcactgtatgcagcgccagaatcacgctattgcccagcccgggtttacgaatatatctctgatgagaaaggtgacccaaagcttcacataaatgcacagaattgtcttcattgcaaggcttgcgacatcaaagatccaaagcagaacatcgagtg

SEQ ID NO: 23836 - DNA, 245 bp, Zea mays
aactcctgaaccagaagcgacttatcagctccttacgaatccagctcgcgtgatccctgcccaggagaagttcatcaagctccttgaaaacagccgatatgtacctgtgaaaccagcgccttctggattcatcctcctccgagacctgcagccgactgaggctgaggatcttgcgctgaccgatgcccccacaacagtcgcaggaagcaccggcaacactgcccctgctgcaggccaacaggggt

SEQ ID NO: 23837 - DNA, 194 bp, Zea mays
caatccttcaagcgcaactgcctcctcctcgtcgtccggtcgtgagaagggatggcgggccgtggcaaggctatcggcgctggcgccgcgaagaaggcaacgtcgaggagctccaaggccggactccagttccccgtcggcaggattgccaggttcctcaaggcgggcaagtacgcggacgacgtcggcgccgg

SEQ ID NO: 23838 - DNA, 214 bp, Zea mays
cgctcttgttgtttccgagcccaaaccccagcacgctccacccgcacctccgctcccatacaccgatggcccgcacgcagcagacggcgcgcaagtccaccggtggcaaggcgccgcggaagcagctggcgaccaaggcagcgcgcaagtcggccccggcgaccggcggcgtgaagcagccgcatcgcttctgcgctggcaccgtggcgctccg

SEQ ID NO: 23839 - DNA, 244 bp, Zea mays
cgttctttcagctaactacactgcacgcaatggccaccacggcgaccgacgcggcgccggcgcaggagcagcaggccaacggcaacggcgagcagaagacgcggcactccgaggtcggccacaagagcctgctcaagagcgacgacctctaccagtacatcctggacacgagcgtgtacccgcgggagccggagagcatgaaggagctccgcgaggtcaccgccaagcacccatggaacctgat

SEQ ID NO: 23840 - DNA, 252 bp, Zea mays
agacctggcgaagaaggataaggccccgcccccgtcgtcgaagcccgccaagtccggcggacgcaagcagaagaagaagaagtggagcaagggaaagctaaaggagaaggtgaacaacgcggtgctgttcgaccaggctacctacgacaagctgctctctgaggtgcccaagtacaagcagatcaccccctccatcctatccgagcgcctcaggatcaatggctccctggctcggagggctatcaaggactg

SEQ ID NO: 23841 - DNA, 255 bp, Zea mays
ggaggttgcagtgttatcagaatctcatgacctttgtattaatggggactgttttgaaatgctacaaagtactgaggctgttctccaggttatcccttatgtgaaggttttttcacgtgttgctccagaacaaaaagaacttgtactaactacattcaaaagtgttgggagggtgacactgatgtgtggagatggaaccaatgatgttggtgcactgaagcaggcacatgttggcattgctcttttgaatgctga

SEQ ID NO: 23842 - DNA, 246 bp, Zea mays
agtacaaggaacttgtgaacaagaacctgtgcaccgtatacacccagcaaatacgtagcggcaagggcgccgagtcgttcctgggcgagaagtactgcaccgacatcgggtcaagcacgagcagcatgggttcgctggagcggatggcgcacactgccgtgcacgtctgggtcggcaaggcgggcccgacgccttcgtcggaggcgtgcagtgccgtatacgggggtttccggaaccacacaaaag

SEQ ID NO: 23843 - DNA, 255 bp, Zea mays
ttcctgaacaatgccaagggagctacagtgggagatgctgttaagaagcttggtctctggggtctcttcactagaggacttcctcttcgtatcgtcatgattggtacccttactggtgctcagtggggaatttacgatgcattcaaagtgatggttggactcccaacaacgggaggtgttacacctgccccagcagcagaggctgaattgaaagccagtgcttgattttttttttctgtgttccctgagatcata

SEQ ID NO: 23844 - DNA, 246 bp, Zea mays
gaagctcccctctccctccctccctctctctctctctcttcgccgtccgaagctccgcacccaatctaatcgacacctcaccgagatgggccgcaagttcttcgtcggtggcaactggaaatgcaatggaaccacagatcaggtcgagaagattgtcaaaaccctgaatgaaggacaggttcccccttcagatgttgtcgaggtcgttgtcagccctcctaatgtcttccttcctgtggtcaagag

SEQ ID NO: 23845 - DNA, 162 bp, Zea mays
gcagaattttgatgatgtcttggtcccttctgaccatgtaagccggagttacaacgacacatattatgttgatggtcaaacagtcttaaggtgtcataccagtgctcatcaagctgagctgctaaggcatggacatacacactttcttgtaactggagatgt

SEQ ID NO: 23846 - DNA, 167 bp, Zea mays
attcgacatccgaacatcgtgtcccttgtgggcttctgcattcatgaggagaaccgtttcgttgtttatgagctgatggagagtgggtcgttggattcgcaacttcatgggccatcacatggttcagctctgagctggcatattcggatgaagattgctctcgacac

SEQ ID NO: 23847 - DNA, 232 bp, Zea mays
ggccaggagcagctagccgtcttcgatcgatccgttcgcatccccaacgcagttcggtttgtaaggtaggaaggagcgtgatggccaagacaagctcgttcaagctggagcaccccctcgagaagaggcaatctgaggctaaccgtatcagagagaagtaccctgacagaattccagtgattgttgagaaggctgagaggagtgatattcctgacatcgacaagaaaaagta

SEQ ID NO: 23848 - DNA, 232 bp, Zea mays
agggagggagggagacgggagaaccagggagcggaggcgtgcgtgctgcggcatgcggcctgcaggaccagagatcggggactgagctagggtctgggactgggaggcggagatgtcgacgccggcgaggaagcgcctgatgcgggacttcaagcggttgcagcaggacccgcccgccggcatcagcggcgcgccgcacgacaacaacatcatgctctggaacgccgtcata

SEQ ID NO: 23849 - DNA, 244 bp, Zea mays
gtgttgatgcttattctgccgctgctctgagggctagtccatatgcagttcctggcttgcgtgctagtgggtttatgggcagccaggttattctgccgcttgcacataccttagagcatgaagagttcttggaggttattaggcttgagggacacagcctctgccatgacgaagttgttctgtcacgagatatgtatcttctgcagttgtgcagcggtgtggatgaaaatgcagctggtgcatg

SEQ ID NO: 23850 - DNA, 150 bp, Zea mays
accgagttgtccatgggatcgatgtcttcgatccaaagttcaatatagtctctcctggagctgacatgtccatatactttccacataccgagaaggccaagcgactcacctctcttcatggttcaatcgaaaatttgatttatgacccgg

SEQ ID NO: 23851 - DNA, 196 bp, Zea mays
gttcttgcgcgtacgcgtacacagccccgatccgaatcgtcctcctcgcgagcctcgccgatcccccactcccctcccctcgcttcaagatgcagatctttgtgaagaccctcaccggcaagactatcaccctcgaggtggagtcttctgacaccattgacaatgtcaaggctaagttccaggacaaggagggcat

SEQ ID NO: 23852 - DNA, 227 bp, Zea mays
ccgatgcccatgcagccgcaggccatcgatgaccccggccgccggaatcaccacggagcagatccaaaagtatctggatgagaataagcagcttattttggccattttggaaaatcagaacctaggaaaattggcagaatgtgctcagtatcagtcacaacttcagaagaacctcttgtatctcgctgcaatcgcagatgcccaaccagagactgctgtaaaccgcc

SEQ ID NO: 23853 - DNA, 194 bp, Zea mays
gtcaatgatgcttttggcacggcacacagagctcatgcttcaaccgaatgagttaccaagtatttgaagcctgctgttgctggcttcctcatgcagaaggaacttgactaccttgttggagctgttgccaacccaaagaagccatttgccgctattgttggtggatccaaggtctcaagtaagattggtgtcat

SEQ ID NO: 23854 - DNA, 213 bp, Zea mays
ccccaatgaagttagtgagatctccatggcgaactcccgccataacatccggaagttggttaaggatgggtttatcatcaagaagcctcagaaaatccactctagatctcgtgcaagaagggcgcacgaggctaagcagaagggacggcactcaggatatgggaagcgtagaggtaccagggaggctaggctccccaccaaggtactgtggat

SEQ ID NO: 23855 - DNA, 200 bp, Zea mays
gagcttgcaaaggatactccaaggaagtgtggctgtgcaggtcaacagtggggtattaagtgtgtgcactgcattcttatctggtgagccagcgactaggctcagatcccaagaactgcagcagctcatcgctgcattgcttgaattcatggctgtctgcaagcgtgcaatccgtgtgcatttcagattgatgggggaag

SEQ ID NO: 23856 - DNA, 143 bp, Zea mays
acacagtgtcgtttgtgaccatgaacaaggttggtggcttcctgcagcggatggacctgtgccgcaaatacgcctttggcaagatgcttgtggtaggctctgagccccctttcaaggtcaaggggctctggctcttcaggggc

SEQ ID NO: 23857 - DNA, 220 bp, Zea mays
gactggcaagactatcaccttggaggtggagagctctgacaccattgacaatgtgaaggccaagatccaggacaaggagggcattcccccagaccagcagcgtctgatctttgcgggcaagcagctggaggatggccgcactctcgcggactacaacatccagaaggagagcacccttcaccttgttctccgcctcaggggtggtatgcagatctttgtg

SEQ ID NO: 23858 - DNA, 226 bp, Zea mays
cggacggtggggacgagaggcagcgaaggaaacagtagttcttcagttaggcaggagggcacaggaggagacagatggcgtcgaagaggatccagaaggagctcaaggatcttcagaaggaccctcccacctcgtgcagtgcaggtcctgttggtgaagatatattccactggcaggcaacaataatgggtccatctgatagcccatattctggtggagttttcct

SEQ ID NO: 23859 - DNA, 140 bp, Zea mays
gtttcaatctacaaatcccaagcatctgcccttgaagcccatgcagctcccaactgcaaggttctggtggttgccaacccagcaaacaccaatgctcttatcttgaaagaatttgctccatctattccagagaagaacgt

SEQ ID NO: 23860 - DNA, 222 bp, Zea mays
gttgctaccagtgaagttagtgtttctgtgtcacttgatccatcaaagatctggagtagggaactgatacagcaggaacttgaccatgtagttgaagagcttgagaaaatagcaattgttcgtctacttcagcagagggcgataatttcacttatcggaaatgtggagcaatcgtctctcatactagaaaagacgggacgtgtgctgagggaaagtggggtt

SEQ ID NO: 23861 - DNA, 219 bp, Zea mays
gtggcgcatacaattggccatgttgctgctacagtgagcatgtctaaggtggcagtgtcattcacacacataattaaaagcgcagaacctgcattcagtgttttggtgtcaaggttcttccttggggagacgtttccaattccagtatatctttctcttcttccaatcattggtggttgtgctctagctgctgtcacagagctgaactttaatatggtt

SEQ ID NO: 23862 - DNA, 221 bp, Zea mays
gggaactccagcccctctgccgaggacttgacagccattctggagtcagttggctgatgaagttgacaatgaaaagatggaactccttctgtcccaactgagcggtaaggacattaccgagctcattgctgctggcagggagaagtttgcttcagtcccatgtggcggtggcggtgtggctgttgcggcagctgcccctgctgctggcggcgctcctgcag

SEQ ID NO: 23863 - DNA, 222 bp, Zea mays
cccacgcgtccgcgtcttctttggcgcctcatcctcccccgcagcagaccgctccccggtctatcaggctgcctgtgttgccgccgctatggccgcgcttcctggcgccccgcagcggtacgccgtcgtcggggtcagttacggcggcttcgtagcataccacctcgcccacgcgtttccggcagcggtggagcggcttgtactagtcgcggccggtgtttg

SEQ ID NO: 23864 - DNA, 271 bp, Zea mays
ggggctgtgtttggcacacgacctgcacctaggccaacattgaacagtgcggacaagtctcgtttaaaacggaaacttgatatggatccagagtttggatacgcggagtagaaggaacacatgtttacatgcaccattcttttcttattggggatgttgatttttaaaataagattctgacacaatcaactgagatgttaccgtcatcgcctcacgaagaggaaaactgaagagagattattctaatttatcccgagtcacatagggtatt

SEQ ID NO: 23865 - DNA, 258 bp, Zea mays
tctttatggaagatgacgaagcccaagttaacgtgaagataaagcaagcattttgccctcccaaaattgttgaggggaatccttgtttggagtacattaaatacatcgttttcccttggtttggaaggtttgaggtggcccggaaggaaagcaatggcggtaacaagacatttacaagcatggatgaactaatttctgattatgagactggtgctttgcatcctgctgatgtcaaacctgcactggcaaaagcaataa

SEQ ID NO: 23866 - DNA, 189 bp, Zea mays
cccacgcgtccgctctactaatccagcccatttcgaactctctctagacgcttcctcggtctctctgttcaccgccgccccgtaccatactcctcttcgcgccgtagaaatggcgctgccgaatcagcagggcgtggattaccccagcttcaagctcgtcatcgttggcgacggtggaactggtaaaac

SEQ ID NO: 23867 - DNA, 265 bp, Zea mays
cccacgcgtccgcgctgcaataaatacaaccttttcacacattgaaggtggattcaaagcactgttaactgataggagcaaactaataatgggtattggaggagttactgcactggccgctggagtctatactactagggaaggtgcgagggttacatggagttacatcaataggatcttgggtcagccttcactgatccgtgaatcatcaatgccaaagttcccactaccaatgtctaggttactcaaaccaagttcagcatct

SEQ ID NO: 23868 - DNA, 178 bp, Zea mays
gatcaaatattccgcatatatcttaaaaagcttaagttggacaacaaaccatcattttattctcaaaggctagctgccttgacacctgggttcgcaggagctgacattgccaatgtttgtaatgaagctgctttaattgctgcgagaagtgaggaaactcagattaccatgcagcatt

SEQ ID NO: 23869 - DNA, 264 bp, Zea mays
atttttcgtcttgctttctgacagctgtgttccactacatacatttgattacatatataattatctgatgggaaccaatgtcagtttcattgattgcttcttcgatcctggcccacatggaactggaaggtatacgatggaaatgcttcctgaaatagaacagagggacttcaggaagggtgcccagtggtttgctataacacgaaggcatgctttattgattctggcagacaacctttactacaataagttcaagctgtactg

SEQ ID NO: 23870 - DNA, 196 bp, Zea mays
gagaagaatgtcctcatctttgaccttggaggtggtaccttcgatgtctccctccttacaattgaggaaggtatctttgaagtcaaggccacagctggcgacacccatcttggtggtgaggactttgacaacaggatggttaaccactttgtccaggagttcaagagaaagaacaagaaggatatcactggcaacc

SEQ ID NO: 23871 - DNA, 236 bp, Zea mays
cacaagaaaagcattaagaaagaagcatgctggacaatctcaaacatcacagctggtaacagggaacagattcaggccgtgattaatgcaaacataattgcacctctggtgcaacttctgcaaactgctgaatttgacatcaagaaagaagcagcctgggcaatttcaaatgccacttctggtggcacacatgatcagatcaagtaccttgttgcccagggttgcattaagccact

SEQ ID NO: 23872 - DNA, 258 bp, Zea mays
cccacgcgtccggcttcgtcttattgattggggtcttgcagagttctatcatcccaagatggaatacaatgctagagttgcttcaagatgctacaagggtcctgaactacttgtggatttgttagattatgattactcattggatttgtggagtcttggttgcatgttcgcagcaatgatattccgagtggaccctttctttagtggccaggatatttatgatcaattagtgaaaatagctgaggttcttggcacagg

SEQ ID NO: 23873 - DNA, 264 bp, Zea mays
gtcgaacaacgcctacattttccctggattcggcctcggtcttgttatctctggagccatccgtgtccacgaggacatgcttcttgccgcctcggaagcactagctgctcaggccacacaggagaacttcgacaagggatcaatcttcccgcccttcaccaacattagaaagatctctgcgcgcattgccgcagccgtggctgcaaaagcttatgaactcggtttggcgacccgtctgcctcccccaagggacctggtgaaata

SEQ ID NO: 23874 - DNA, 152 bp, Zea mays
aagaggatgggcgagagaagagacaaggctctcaaggagctcatggaccaggtggccacgaagcagccaaacagcatgtgccatggcaacaaggagaatttctgggagggccagggcttcaagttcatcgcgtctatgtcgatgctggcact

SEQ ID NO: 23875 - DNA, 264 bp, Zea mays
gatgatatgggcctccaagagaatcttctgagaggcatttatgcttatggttttgagaagccatctgcaattcagcagagaggaattgttcccttctgcaagggtcttgatgtcattcagcaagcacaatctggtacaggaaagacagcaaccttctgttctgggatcttgcagcagctggactatggcctggttgaatgccaggccctggtccttgctcccacccgtgagcttgcacagcaaatcgagaaagtcatgcgcgcg

SEQ ID NO: 23876 - DNA, 261 bp, Zea mays
gcaagacctggacagaagtggcacgtcttctacgccactgagtacccagagcaaccaatggttaaccttgagatgtgcatgactggtctggacaagaagaaagcttgtgtctttttcaagactaatgctgatgggaacacaacatgtgccaaggaaatgacaaagctctctggcatctctgaattcatccccgagatggagatctgcgattttgacttcgaaccctgtggctactccatgaatgcgatccatggctctgca

SEQ ID NO: 23877 - DNA, 254 bp, Zea mays
cggacctggcgagcaccggcgccctgctcgcgtcgatgctggcggcgccggacgagaacaatcacccgctgttcgccgccaaggacctcaccacgttctacctcgagaacggcccaaagatcttcccacagaaaaaggctgggttgctgacgccgctgaggaacctgctgggcctggtgcggggccccaagtacgacggcgtgttcctgcacgacaagatcaagagcctgacgcacgacgtcgaggtggcggac

SEQ ID NO: 23878 - DNA, 246 bp, Zea mays
cggacgcgtggcggacgcgtgggtctccgcacctctctccatctccctgctcctccgcctccttcttgatccagccaagccagggatcgccatgtcggactcggaggagcaccacttcgaatcgaaggccgacgccggagcgtccaagacctacccgcagcaggctggcaccgtccgtaagaacggcttcatcgtcatcaagaaccgcccctgcatagttgtggaggtttctactcaaagactggt

SEQ ID NO: 23879 - DNA, 247 bp, Zea mays
ttacatcggccgggtttgctccggtaccgctcagcaacctcgcagaagcacaagctgactgcctgttgaagcgcgtgcaggtccgaggattccatgtggagaagtgtggaatgggtctagcactctactggcagagcggcgagctcgtgtctgtctcggcatggcggtgctgatcatacggaccccatccatcaaccatcatgacacctacaccaatttgcaggcatgtttaaccctggtaatgtgc

SEQ ID NO: 23880 - DNA, 250 bp, Zea mays
ctcgggccaccaccgcatcaccggccatccggtcctcgaccgcgtcgtgcaggtgctctccgggaactgcctcaccggcctcagcatcgcctggtggaagtgtaaccacaacacgcaccacatcgcctgcaacagcctggaccatgacccggacctccagcacatgccgctctttgccgtctcccccaagctgttcggcaacatatggtcctacttctaccaacggaccctggcgttcgatgccgcctcg

SEQ ID NO: 23881 - DNA, 250 bp, Zea mays
gaggtattctcacgctcaagtacccgattgagcacggtattgtgagcaactgggatgacatggagaaaatctggcatcatactttctacaacgagcttcgtgttgcaccagaggagcaccctgtgttgctcactgaggctcctttgaacccaaaggccaacagggagaagatgacccaaattatgtttgagactttcaatgttcctgccatgtatgttgcaatccaagcagttctatcactctatgctag

SEQ ID NO: 23882 - DNA, 249 bp, Zea mays
cggcgccggcgtgctcgtgatctcaacccaaggcgtgcctccgctccggtcacccgtcgctccacacaaccatgtcgaggaggaagaccagggagcccaaggaggagaacgtcacccttggacccactgtccgtgaaggagagtatgtctttggtgtcgctcacatctttgcatccttcaatgacaccttcattcatatcactgatttgtctgggagggaaactctggttcggatcaccggtggcatga

SEQ ID NO: 23883 - DNA, 253 bp, Zea mays
caccggtgacgttggatcaaaagaacctgagaaagttcaacaaattatagtcgatgctggaatttacttgtcagggaggaccaacttctttcgaggaacacagaaacgagcagctcctgaggcttttaagttctttacaggttctccatgggtcatattaaaccggcaatttatagagtactgcattcttgcttgggagaatctccctaggattcttctcatgtacttcaacaatgtaatacaacctcaggaa

SEQ ID NO: 23884 - DNA, 255 bp, Zea mays
gtaccataatccaatcatcatcatatcggaaaacggaatggatcagcctggaaacctcacgcgcgaggagtacgtgcacgacgccgtgaggatcgatttctacaagaactacctgacggagctaaagagagggatcgacggcggcgcgaacgtgatcggctacttcgcgtggtctctcctggacaacttcgagtggctgtcgggctacacgtccaagttcggcatcgtctacgtcgacttcgcgacgctcaagcg

SEQ ID NO: 23885 - DNA, 248 bp, Zea mays
cggaccgtggacggacgcgtgggtctccgcacctctctccatctccctgctcctccgcctcctgcttgatccagccaagccagggatcgccatgtcggactcggaggagcaccacttcgaatcgaaggccgacgccggagcgtccaagacctacccgcagcaggctggcaccgtccgtaagaacggcttcatcgtcatcaagaaccgcccctgcagagttgtggaggtttctacctcaaagactggta

SEQ ID NO: 23886 - DNA, 245 bp, Zea mays
gattcaacatatgctgagagggaataccttgctgtcatgaaacgagcagaatatgaagtcataaaatctcagtggaagagtatctcagccacccaagctaaaagattcaccaagtttagggaaagaaaaggcctaattgacaaagatgtggtgagaacagataggtccattccctattatgaaggagatgacaatcagaatgttgtagttttacgtgatattctgttaacatattccttctacaa

SEQ ID NO: 23887 - DNA, 246 bp, Zea mays
gagaccaccaagtactactgcacggtcattgatgcccctggacaccgtgacttcatcaagaacatgatcactggtacctcccaggctgactgtgctgtccttatcattgactccaccactggtggttttgaggctggtatctccaaggatggccagacccgtgaacatgctctccttgcgttcacccttggagtgaagcagatgatttgctgctgcaacaagatggatgcatacactcccaaatac

SEQ ID NO: 23888 - DNA, 247 bp, Zea mays
gaagggatccctggacacacagctgcatggggcctcacatggatcagcgctgacctggcatatccggatgaagatcgcactcgacatggccaggggattagaatacctccatgagcactgcagtccaccagtgatccatagggatctgaagtcatctaacatacttttagattctgacttcaatgctaagatttcagattttggtcttgcagtgaccagtgggaatattgacaagggaagcatgaag

SEQ ID NO: 23889 - DNA, 236 bp, Zea mays
cccacacgtccgcccacgcgtccgcaagggtgttattaagaaggaggaatttgttaggataatcaccaaaactctgtatagtcttggatatgaaaaaagtggagcagttctggaggaggaatcagggattattttacataaccctatggtgaaacttttcagagaacaggtgattgatggaaattgggataatgcggtggttactatgaatacaattggccttcaagatgaaaaca

SEQ ID NO: 23890 - DNA, 241 bp, Zea mays
cccacgcgtccgcccacgcgtccgcccacgcgtccgatcagattcactggttttctattgtgaactctctcatgatcgtgcttttcctatcaggcatggttgccatgataatgcttcgcactctctacagagacatttctagatacaatcagcttgaaactcaagaagaagcacaagaggaaacaggctggaagcttgttcatggggatgtgttccgtcctccaacctactctgacttgct

SEQ ID NO: 23891 - DNA, 242 bp, Zea mays
gaacactcctagctgaagatctcgagtgcaacgcaacgttggcgcttggcggccagtagtagcagcaaacttagcgtcgctccttcctactagacgagagatcgagaaaccatggccaagctccaagtcactcctggcgccgcgttcaccgagtgcaatgaactcaacttccagggcctgtacatgtaccacacgcccctgggtcccaaggccaaccaagctgcgatcctagagagcaaggc

SEQ ID NO: 23892 - DNA, 242 bp, Zea mays
ggttaaatcatccaaggctctaaaagatgttcaacctgaggttgagagactacgacagaaagccgtctcaaagattttcgagtttgtcatccaaaagttctatgccttgagaaaaccaaagactaatattcagattctacagcagagtgttcttcttaaatacaagtacacgataaatttccttaaggaacatgctaaggagatatatgcagaagttcgtacggcgtatattgacaccatga

SEQ ID NO: 23893 - DNA, 241 bp, Zea mays
gcgcttcgccctctcgctccagccgcttcacagcgccgccgctcgcctctccgaccgccgcgagaatgccgttcaagaggttcgtggagatcgggcgcgtggccctggtgaactacggcaaagactatggccgcctcgtcgtcatcgtcgatgtggtcgaccagaacaaggcacttgtggacgcccctgatatggtcaggtgccagattaacttcaaacggctctcacttactgacatcaa

SEQ ID NO: 23894 - DNA, 243 bp, Zea mays
cgctcgcctccggctactcccgcggcaccggcctcggcgccgagatcatcggcaccttcgtgctcgtctacaccgtcttctccgccaccgaccccaagcgcaacgcccgcgactcccacgtcccggttctggctcccctccccatcggcttcgccgtgttcatggtgcacctggccaccatccccgtcaccggcaccggcatcaacccggccaggagcctgggcgccgccgtcatctacaaca

SEQ ID NO: 23895 - DNA, 256 bp, Zea mays
cccacgcgtccgcccacgcgtccgctactatagctcctcatctcattctcaagtgtgtagccgagagagcgccatggccagcctccaagtcactcctacttcggcgttcactcagtggaatgagctgaagttcgaaggcctgtacttgttccacaagtaccagggctcaggcgccaaccaaactcaggtcataagcaacaaggcgccgattggcatcggtgccaccgtagttaacaactggacagtgtgtacgggc

SEQ ID NO: 23896 - DNA, 260 bp, Zea mays
gttgtcacaggaacagccaagaaagagtccaaagaaaaaactcctaaaagcagcaacaagactaacaaatctggctcaaagccttcacgccaggtagaacccaactccagggtcccaaagatgccacctccaaaggacgaggagagtgaaggggaggaaggtgaaccacaggaagaccatgagagtgcgctgtgcggcgcatgtggcctaggttatgacgacttctggatctgttgcgacttatgcgagacatggttcca

SEQ ID NO: 23897 - DNA, 260 bp, Zea mays
atcctcttcctcgagttctcctcaaccaaattcaaggtcacagcggcgaacctctcggctatcatgtctggccgcggcaagggcgggaagggtctgggcaagggcggcgccaagcgctaccgcaaggtgctgcgcgacaacatccagggcatcaccaagccggcgattcgcaggttggcgaggaggggcggcgtcaagcgcatctccgggctcatctacgaggagacccgcggcgtgctcaagatcttcctcgagaacgt

SEQ ID NO: 23898 - DNA, 260 bp, Zea mays
gaagacccgccccggcccgtcccaggaagccatcaaggcacgcgccatccgactcctcaagcacaagcgcatttagaggttgctcatttgcctctcaggtacgaggagcaacgcaacatgttgtacaaccaaacctacaatctcgaccaagttggctttgctgccgatggcctcaaggatgctcagcagactatgaatgcaatgaaggcagcaaacaaggagctcaagggaatgatgaaaactgtcaaaattgatgaaat

SEQ ID NO: 23899 - DNA, 262 bp, Zea mays
cccacgcgtccggccggaccagatgctggcgttcgtgcggtcgcaccgcgtagatggtgcgcggccacaacatcttctgggagaaccaggacgcgacgccccggtgggtgaagaacctgacggcggacgacctccgcgccgccgtcaacacgcgcatccagagcctcatgacccgctaccgcggcgagttcgcgcactgggacgtgaacaacgagatgctgcactacaacttctacgagcagcggctggggcccaacgcgtc

SEQ ID NO: 23900 - DNA, 260 bp, Zea mays
cccacgcgtccgcccacgcgtccggtgttaatccacctgttatacatagagacttcaagagtagcaatattctcctggacaaggacttccatgcaagagtttcagactttggtctagccaaacttggatctgatagagctggtggccatgtctcaactcgagttttgggcacacaaggctatgttgcaccagaatacgcattgactgggcatttgactaccaaatcagatgtgtacagctacggtgttgtgcttttggaa

SEQ ID NO: 23901 - DNA, 261 bp, Zea mays
agagaccgagctccctgaagttgatgcacatggtgtggaccaagagctgaagcaccatctcctgaagaaatacagtggctatctaagctcgctcaagcaagaactgtcaaagaagaagaagaaagggaagctccccaaggaggctcgccagcagctccttagctggtgggatcagcactacaaatggccttacccctcagagactcagaaggtggcactggctgagtctaccgggcttgacctgaagcagatcaacaactg

SEQ ID NO: 23902 - DNA, 260 bp, Zea mays
cccacgcgtccgcccacgcgtccgcccacgcgtccgcacacgcgtccggaaaaagaagatcaaaagggatatcaaaatacttcagaatctctgtggaggtccaaacattgtgaagttgcttgatattgtcagagatcagcattcaaagactcccagtttgatatttgaattcgtcaacaacacagacttcaaagtcttgtaccccacattgacggattatgacatccgctactacatatatgagctactcaaggctctag

SEQ ID NO: 23903 - DNA, 262 bp, Zea mays
cccactcgctccagccgcttcaccgcgccgccaccgccaccgcgaggatgccgttcaagaggttcgtggagatcgggcgcgtggccctggtgaactacggggaggactatggccgtctcgttgtcatcgtcgatgtggtcgaccagaacagggcacttgtggatgcccctgatatggtcaggtgccaggtgaacttcaagcggctctcacttactgacatcaagattgacatcaaacgtgtccccaagaagacagccctgat

SEQ ID NO: 23904 - DNA, 255 bp, Zea mays
cacacgcgtccggtcttccaggtcgagtatgccaccaaggccgtcgacaacagcgggactgttgttgggatcaagtgcaaagatggcattgtcctgggtgtcgagaagctggtaacctcaaagatgatgctggaaggatcaaaccgaaggatccattcggtgcaccgtcactctggcttggttgttgctggtttagcagcagatggcaggcaaattgtttcaaggaccaaatcagaagctgccagttatgaaaag

SEQ ID NO: 23905 - DNA, 254 bp, Zea mays
gctattagataagatggatccctctcagagagcgaagtttgttcaggaagtcaagaaggtccttgattgatgataccaacacatccaacacaatgtgtgcatgtcacatctttttgttctagtacatacatagaaggatattgcttggtcttgattgatcatgtctgatttaagtcgactattatttcttggaattttcttttggacctggtgctatggttgatggatgtatattggatatgtgcgttctgcca

SEQ ID NO: 23906 - DNA, 253 bp, Zea mays
ggtaattgattacaagctgacttatcccagtgggacagccacggctatgttgataaatagtttccacacaactactggagctgagcttgcagacaagcaagtcaggtgtcttgggaagtacttgagcattagttttatatggaactgctttaaatggttcttcagcggtgttggagattcttgtggtttcgataatttcccttctttgggacttgcagcatttaagaatacctggggactggtatccagctga

SEQ ID NO: 23907 - DNA, 248 bp, Zea mays
acgtccgggagtgcggacgctggcggacgcgtggtccggcagttcttagatataatatagaagccgcatttaaacaagcacccgacgagtagagctctccactcaaaccatcctaagcctctactgtctcagttggggcctcgagcacaaggcccttggtgggctttgccagcaggtcggtgtactgctggaacggggccatggagaacttggtctggctccagaattcaggagtgaggaagccgtag

SEQ ID NO: 23908 - DNA, 257 bp, Zea mays
aaaccagatgttcgatttgttattcatcacagccttagcaagtctatggagacatactaccaggagagtggtcgggccggacgggatggattaccttcagaatgtattttgtattatcggcctggtgatgttccacggcagagttcaatggtgttctatgaaaactgtggcctgcaaaatctttatgacatcgtgcggtattgtcagtctaagaggagttgtcgtcatggtgcattctttcgccattttggagaggt

SEQ ID NO: 23909 - DNA, 243 bp, Zea mays
cccacgcgtccggctagctgaatcacaatggatcctaccaagttccgtccgtccagtagccacgacacgacggtgacgacgacgaacgctggcgctcctgtgtggaacgacaacgaggcgctgactgtggggcctcgcggtcccatcctgctggaggactaccacctgatcgagaaggtggcgcacttcgcgcgggagcgatcccgaagcgcgtggtgcacgccgcggggcctccgccaaggg

SEQ ID NO: 23910 - DNA, 250 bp, Zea mays
gcggaaggagtcggagggaaccgaaaactcagggtctcgaatttcctaggagcggaggcgatggctgggaagggaggaaaaggattgctcgccgcgaagacgacggcggccaagtcggcggagaaggacaaggggaagaaggcccccatctcacggtcctcccgcgcgggcctccagtttcctgttggacgaatccaccgtcagctgaagcaaaggactcaggcaaatggccgcgttggtgccactgcag

SEQ ID NO: 23911 - DNA, 246 bp, Zea mays
cccgcatcgcgcgcgccgtgatggccgcggcgtccaggcacctgacgcccgtcgcgcgggagctgggcggcaagtgcccctgcatcttcgacgccatgggcagcgcccgggacctgcagatctcggtgaaccgcatgatcgcgggcaagtggacgtcctgcgccggacaggcctgcatcgccatcgactacgtgctcgtcgaggagcgcttcgcgccatcctgatcaaggtgctcaagtcgacgct

SEQ ID NO: 23912 - DNA, 244 bp, Zea mays
ggacgtggtgttgactagattgatattttgttttctgcatcaacacaggagaatgacctgtcaaaatctattgactcatgtaacatggaggccagtgtagtcaagacttgggtaaatttcctcgaggatacatggcaacttcagttgtcatacaatgaacagaaggaaactaaaacgaatgacgagctggagagatgcacaagcagttttctgaagttgaccaagcatcatctttcctatttca

SEQ ID NO: 23913 - DNA, 245 bp, Zea mays
ccacgcgtccgcgctcctggcgcaccccttctcgctcctcatcctcctgggcctcctcgccgcatggagcttcctctacctcttccgcccctccgaccagcctgttgtcctcttcggccgaaccttttccgaccgcgagacgctgctggggctcgtcggcgcgaccttcatcctgcttttcttcacctccgtcgcgtcgctcatcatctccgggctgctcgtcggcggggccctcgtcgcggcgc

SEQ ID NO: 23914 - DNA, 248 bp, Zea mays
cccacgcgtccgggcatctactttggcaaacccaggggttttggaacaaatgacaagggagacgatattggcttcaacacagaagtttattcagcttctgagatcgatcgtattgcacgagttgcatttgaggtcgctcgcaagagaagagggaaactatgctcggttgataaagcaaatgtgctggaggcatccatgctttggaggaaaaaggtgactgcactagcctctgaattccctgacattga

SEQ ID NO: 23915 - DNA, 210 bp, Zea mays
atccagcgctcattcatcattgcctacctgatgaactaatgctcgagatttttacaagaatgagcccatatactttagggagggctgcatgtgtctgccgcaagtggaaatatactgcacgcaatcctactttgtggcgtgctgcatgcttgaaaacttggcagaggagtggaatggaggcaaactacatgatggttcggtcgttgtatg

SEQ ID NO: 23916 - DNA, 206 bp, Zea mays
aagtgagtgaaaatttggcatagtcacaaagttataggttattttgtccactactaagttgattatctttgtattacaatgagatgcagtagagttacattattttccgagcaagactgaagacccccaatttttcacctggagcagagtcgctggaatgtgcactttttgctctcgatgatataccattcgattctctagcattt

SEQ ID NO: 23917 - DNA, 208 bp, Zea mays
cggacgcgtggcgacgcggaaggcatggaaaaaatcgagaacctacagagccatgataataatgaaatctatgaaaaggctgtgaagcttcttgagacttactggatggaggaggaagatgatgcaatggctactgctggggaagctgctcctgctgtttttgactttagccaaggtggcaaccctcctggtggtggtttgaacctca

SEQ ID NO: 23918 - DNA, 221 bp, Zea mays
gcgtgcggagagaccgaagaagcgggagagatggctcgtaccaagcagactgctcgcaagtccacgggagggaaggctcccaggaagcagcttgccaccaaggctgcccgtaagtctgcccccaccactggtggagtgaagaagcctcaccgctaccgccctggaactgttgcactccgtgagatccgcaagtaccagaagagcactgagctgctgatcag

SEQ ID NO: 23919 - DNA, 221 bp, Zea mays
gagaattctccagtgtacccagttatctatgatagcaacaggactgtattatcattacctcctatcattaatggcgcacattcagctatcacccttgcaacaaggaatgtctttattgaatgtacagctactgaccttaccaaagcaaatatagttctgaatacaatggttaccatgttctctgaatattgtgagactaaatttgaagtggaacctgttga

SEQ ID NO: 23920 - DNA, 205 bp, Zea mays
gtcgcggcccagttcgggtacatcgtcaccagcgcccggtgcagggacacctggacgggattcaccacgcaggccttctcgggcctcggcaccttcttcaagctctcggcagcgtccgccgtcatgctgtgcttggagacttggtacttccagatcatcgtgctcatcgccggcctgctcaagaacccggagctctccctcgact

SEQ ID NO: 23921 - DNA, 207 bp, Zea mays
atgataaggagtgtctctcctttgccatcctcctctctttcagctaagtccctgctccctctctttttcttacattcaggtcctcgcagctcctctcttttttcttgtttctttcgatctgcgagctgtccaagtccagtactcttctttccctcaaggaactcttgcagccggcccctctggtttcctcgaattcatgttccccgg

SEQ ID NO: 23922 - DNA, 204 bp, Zea mays
cgagagcgtggtcctggtgaaccgaacatatcttacatatgctctcgttattatcgtgctccagagctcatatttggagcgacagagtatacaacttcaatagacatatggtcagctggttgtgttctagctgagttgcttcttggtcagccactgtttccgggagagagtgctgttgatcagttggtagagattatcaaggta

SEQ ID NO: 23923 - DNA, 202 bp, Zea mays
cgtctttcatggggccgcaacccagcaaacaagcagttcagaggcgacaacggcaaccagtggaacaacgggggcatgtactacgcggcgcccccgttctacaacggctacggttaccctgcggcggccccgttccctgatccaggcatgtacgctgctccagcctacggtgcctacccgttctatggcaatcagcagccag

SEQ ID NO: 23924 - DNA, 253 bp, Zea mays
tgtagcagtcagtacggtcggaatcccgggtgaacacggtccgaaggtgacctgttggggacagcaagatccatgtgaagctccagtactttgacgtctgcaaggaccgtaactgggcgaggggtgtccggagcaccaagtaccctggtgtcccttacaccttcttctcgcagagcaggggtgtaaggttactctgtaccaggacgctcatgtgccggacaactttgttcccaggatccagctcgctgatggc

SEQ ID NO: 23925 - DNA, 224 bp, Zea mays
acgaagaaaacgaccaaccaaatctggagttccaggccccgttgcagctgggagtggttttatactcgctgatgacatcaagtcttaggtgcttccattgatcaatgactcagggaaatatggagggatcatgatgtggttcaagtactatgatgatcaagatggctacaattcttgagtgaagagtgatgtttaggttgttgtctgtggtgtgtgacaatatc

SEQ ID NO: 23926 - DNA, 217 bp, Zea mays
cccacgcgtccgcttccagtgtccgccgtcgtgcgctcgctacccctctccctcgaggcctttgccggcgaagagcgcccagtcgcccaccaggatgaagtttgttgctgcctacctgcttgctgtcctcgctgggaactccagcccctctgccgaggacttgacagccattctggagtcagttggctgtgaagttgacaatgacaagatggaactc

SEQ ID NO: 23927 - DNA, 224 bp, Zea mays
ggtgggagttcctgttatcaatgttcatatatggtttgacagaaaactgaacaacacatatgaccaccttcttttcagcaggagttcacttttaagtgtctatgcagacatgtcagtaacctgcaagaatactatgacccaaaccgttcaatgctggagttggtctttgctcctgcagacgaatggattggtcgaagtgacactgaaatcatcgatgcaactat

SEQ ID NO: 23928 - DNA, 199 bp, Zea mays
cccacgcgtccgagagaactgcattgatcttgttggtaggattgctgatcgtggagcagaatttgtgccagcaagggaatggatgaggatttgttttgagctgctcgaaatgttgaaggctcataagaagggtattaggagagcaactgtgaacacatttggttatatcgcaaaggctatagggccacaggatgtgttg

SEQ ID NO: 23929 - DNA, 217 bp, Zea mays
ggcgctgggcatgacgttcggcgacaccatggtgatcgacgacccgctgacggaggaggcgtcgcccgcgtccgccgcgctgggccgcatgcagggcttctacatgctggcgtcccagaccggggcggcgcttatggtgtgcgccaacctgctgctcacgtcgggggcccacaacgggagcacgctcgccgtgctgggccgcgacgacaccggccag

SEQ ID NO: 23930 - DNA, 221 bp, Zea mays
ggtcccccacccctcagcgcgacgaaggtaagatgttcctgcggaggatcctgaccggcgggggcggcctggcggccctgagggcggcgcgcgccgtgaaggagacgacggggatcgtgggccttgaggtggtgcctaacgcgcgagaggttctggtagggctctacgagcgcacgctcaaagagatcaaggccgtccccgaagacgagggttaccgcaag

SEQ ID NO: 23931 - DNA, 227 bp, Zea mays
ggaactgcataaatcttgccaaagggaagatggttctgatgatcaaaagaaaggcacacaacttttggaagtctatgctattgaaatacaaatgtacactgaaacaaagaataataaaaagcttaaggaattgtatcaaagggctctttccatcaaatcagcgatacctcatccaagaatcatgggtataattcgcgagtgtggtggaaagatgcatatggctgaga

SEQ ID NO: 23932 - DNA, 214 bp, Zea mays
gtaagagttgtatcagttggtcgcaaagttgaagatctgcttgcagatcctgatagcaaagagtggctatccatatcgactgaactatgtggaggtacacatatcacaaacacaagagatgctaaagcatttgcactcttatctgaggagggtattgcaaaaggagttaggaggataacagccgtgactgctggatgtgccacccaggctatgg

SEQ ID NO: 23933 - DNA, 192 bp, Zea mays
ggacgtggtgttgactagattgatattttgttttctgcatcaacacaggagactgacctgtcaaaatctattgactcatgtaacatggaggccagtgtagtcaagacttgggtaaatttcctcgaggatacatggcaacttcagttgtcatacaatgaacagaaggaacctaaaacgattgacgagctggag

SEQ ID NO: 23934 - DNA, 214 bp, Zea mays
gggacctatgaagggtggaatcagataccaccatgaggttgatcctgatgaagttaatgccttggcacaattgatgacttggaaaacagcagtagctaacataccatatggaggagccaaaggtggtattggatgtagccctggagacctgagcatctctgagcttgagaggcttacccgagtttttactcagaaaatccatgacttgattggc

SEQ ID NO: 23935 - DNA, 216 bp, Zea mays
cccacgcgtccgggctgttgctcttccccaaccccgcgcgcagaggagcgataaaccctagtcttcgccgtcgtcgcaggaggacccgcgatgtcgcacttcgggaggtcaggcccgccggacatccgcgacaccttctcgctcctcgtcctcaacatcagcttccgcaccacggccgacgacctcttcccgctcttcgagcgctacggcaaggtc

SEQ ID NO: 23936 - DNA, 165 bp, Zea mays
gttggcttctcctccccctccggttcgggttcgggttcgtgaggatctccggggttcggtttcgtgggtgggcggatcgagatggcggcgtcggatgttgagtaccgctgcttcgtcggctgcctcgcctgggccacggacgagcactccctccagaacgccttc

SEQ ID NO: 23937 - DNA, 241 bp, Zea mays
cagctacaacagggtgcctagcctggggtaacgaactaattgacatgcatgagttgcaacaggggcatatactctaaacctgaagcttcctgcttctgaattgcgaggacatcacccaatttggaaaatagccacgataatatcagccatagtgttatttgttttggctgcttgccttcttctgtggtggaagcatggtagaaatattaaagatgcagtgcacggaagttggagatcaagg

SEQ ID NO: 23938 - DNA, 235 bp, Zea mays
  unsure (1)..(235): unsure at all n locations
cccctttgcaagtatagtctctctgctaagcgaacgnagcttcaagctagtctcggcggctctagaagacgatgggcaaggacgacgtgatcgagagctgcgctggcggcggcgagttcgctgccaaggactacacggaccctcccccggcgccgctgatcgacgcggcggagctggggtcctggtcgctgtaccgcgccgtgatcgccgagttcatcgccacgctgctgttcct

SEQ ID NO: 23939 - DNA, 239 bp, Zea mays
caagcaataagacggtgaggagggtccgtgttcggggaggtaatgtgaaatggagggctcttcgccttgatactggtaactactcatggggaagtgaagctgttacccgcaagacccgtatcctcgacgtggtctacaatgcatcaaacaatgagcttgtgaggacacaaacccttgtgaagagtgccattgtgcaagttgatgctgccccattcaagcagtggtacctcactcactat

SEQ ID NO: 23940 - DNA, 233 bp, Zea mays
cccacgcgtccgcaaatatacatggcaagagaacttttcaacctactcagaaaatccagtgaagagaaacaacttcctgggttcaggctactgaattggcacttctttttcacggcaatgctgtacacttatgggcgctttcttagtcggcagcttgtgaatacagtaacttcagatcacttgctttataaggtcgttagtggcctaataaagtatcagatgtttatctgtta

SEQ ID NO: 23941 - DNA, 237 bp, Zea mays
gcaccatgaggctctccaggaggcccttcctggtgacaatgttggcttcaatgttaagaatgttgctgtgaaggatctgaagcgtgggtatgtggcctccaactccaaggatgacactgccaaggaggctgctagcttcacgtcccaggtcatcatcatgaaccaccctgggcagattggcaacggctatgccccagtgctggactgccacacctcgcacattgctgtcaagtttgc

SEQ ID NO: 23942 - DNA, 232 bp, Zea mays
cggacggtgggttgacaagtacagcacacattctaaaaacctggggaaagcagaacagccttcacttgacacgaacttagaacatagcaaatatgcaaatttgaatgagcaacttgtggaagcaagccttcgactcaggcagatgagaggtgaagaacttgagggattgagtgttgaagaactccagcaattggagaagaatctggaatctggtctgcatagggtgcttcaa

SEQ ID NO: 23943 - DNA, 236 bp, Zea mays
gcgcgtcaggcggctgcggcccggtggaggaaatggaggactggatgaaggccgcgcgctccggatgcgtccgctggatcatcaagactacggcgatgttccggttcggcgggaagaccgcttacgtggccgtgaattacctcgatcgcttcctggcgcaacggcgagtcaatagggagcatgcgtggggtctgcagctgctcatggtggcgtgcatgtcgctggcgaccaagctg

SEQ ID NO: 23944 - DNA, 237 bp, Zea mays
agagaatccaaatgatgatggtcctgaaaataaccctcagtttactactgtttatgttggcaatcttcctcacgaggctaccatgaatgatgtgcacctgtttttccattcactgggggctggttcaattgaggaagtccgtgtaactcgtgataaaggctttggctttgtgaggtacagcacccatgaggaggctgcattggcaattcagatgggtaatggccaacttattggcgg

SEQ ID NO: 23945 - DNA, 239 bp, Zea mays
agtacatcaagtcccttccgtacgccccgggcgcccccttcaccggcatgtaccctcaggcgcaccctctcgccatcgacctgctgcagaagatgctcgtgttcgacccgtccaagaggatcagcgtcaccgaggcgctggagcacccgtacatgtctccgctctatgacccgagcgcgaaccctcccgcgcaggtgccgatcgacctcgacatcgacgagaacctcggcgtcgacatg

SEQ ID NO: 23946 - DNA, 238 bp, Zea mays
cggacggtgggcgccgtgctgcgagaaggcgcacacgaacaagggcgcgtggaccaaggaggaggacgacagtctggtggcgtacatcaaggcgcacggcgaagggtgctggcgctcccttcccaaggccgccggacttgtgcgctgcggcaagagctgccgcctccggtggatcaactacctgcggcccgacctcaagcgcggcaacttcacggaggaggaggacgagctcatcatc

SEQ ID NO: 23947 - DNA, 242 bp, Zea mays
cgctccgcctccactcctcgcgccgctgccgcatctcctctacaggtaagaaggagagaaagagggcgaaatggtgaagcacaacaacgtcatccccaacgggcacttcaagaagcactggcagaactatgtcaagacatggttcaaccagcccgcccgcaagcagaggcgccgcatcgcacgtcaaaagaaggctgtgaagatattcccacgaccaactgctggccctcttcgtcccattg

SEQ ID NO: 23948 - DNA, 229 bp, Zea mays
gtcctgctcattcactaaccaggtcattgcccaacttgaactgtggaaggagaagagctctggcaagtatgagaagaaggtgtatgtgctccccaagcaccttgatgagaaggttgctgctctccacttgggcaagcttggtgccaagctgaccaagctcaccaagtctcaggccgactacatcagcgtgccgatcgagggtccctacaagcctgcccactaccggtac

SEQ ID NO: 23949 - DNA, 218 bp, Zea mays
agggctccctgctttccctatgggagaaattgagcagacacgtatgtagaaggcttgtgaaaggggtccgttcaaccaggccacaaggtgatcttggcccactgcatcccttcactgctggagtgtatgttgcactaatgatggctcagattgaggtccttatgaagaagggccactcttactcagaggtaagtaatgagagcctgatcgaggccgtg

SEQ ID NO: 23950 - DNA, 227 bp, Zea mays
cggacgcgtgggcgccgtgctgcgagaaggcgcacacgaacaagggcgcgtggaccaaggaggaggacgaccgactggtggcgtacatcaaggcgcacggcgaagggtgctggcgctcccttcccaaggccgccggacttgtgcgctgcggcaagagctgccgcctccggtggatcaactacctgcggcccgacctcaagcgcggcaacttcacggaggaggaggac

SEQ ID NO: 23951 - DNA, 226 bp, Zea mays
cccacgcgtccgcccacgcgtccggccaaccgaagagctcgccgcaatcaagatccagaccgccttccgaggttacctggcaaggagggcactaagagcactacgaggccttgtacgattgaagtcattggttgagggtaattcagttaagcgtcaatctgcaagcactctgcgctgtatgcaaactctatcgcgggtgcagtcacaaatacgatctaggagagca

SEQ ID NO: 23952 - DNA, 230 bp, Zea mays
cccacgcgtccgatcccccacgacacctataagcaccaaccctagcccaaaaccccgcttccacttcacagcctctccgcctccgctcctcgcgccgccgccgcgtctcctcctgtacaggtaaggagaggaagagggcgaaatggtgaagcacaacaacgtcatccccaacgggcacttcaagaagcactggcagaactatgtcaagacatggttcaaccagcccgccc

SEQ ID NO: 23953 - DNA, 229 bp, Zea mays
aggctctgacctccacagggcgctttgagatgtggggtgatggcctgcaaaccagatccttcacatttattgatgaatgtgttgaaggtgtccttaggttaacaaagtccgatttccgtgagcctgtaaacattggaagcgacgaaatggtgagcatgaacgagatggcagaaatagtcctgagctttgagaacaagcagctgcccatccaccacatccccgggccgga

SEQ ID NO: 23954 - DNA, 214 bp, Zea mays
atgaggaattaggaaaggcattgttcaatgacttgccaaacccttttactgccgcgaggtaccacagcttggtcattgagcaagaaaccttcccacatgatgctttggaggctactgcatggactgaagatggacttatcatggctgctcgccacaagaagtacaaacacatccagggtgtccaattccacccggagagcatcatcacccctga

SEQ ID NO: 23955 - DNA, 231 bp, Zea mays
cccacgcgtccgcggagcgcgtgggctgtcgctctcgctctcagacgactgggccgccgccgcttggtgctgaggctttggttggtctcttcggcggcgacgagcacccaccagcagttctgtagaaatggctgatggtgaggacatccagcctcttgtctgcgacaatggcaccggaatggtcaaggctggttttgctggcgacgatgcaccaagggcggtttttcctag

SEQ ID NO: 23956 - DNA, 231 bp, Zea mays
cggacgcgtggcggacgcgtgggcggacgcgtgggcggacgcgtgggcgagctcggccaggaaactctgctgtatcttctcctcagcaattacctcatctacaacttgtatgatcaggcagaaaagcttagatcaaaggcacctcgttttgaagcacattccaaccaacaattctgccgatacttgttctacttgggcaaaattaggacaattcagttggagtacactgat

SEQ ID NO: 23957 - DNA, 237 bp, Zea mays
ccacgcgtccgcctcaagatattctcattttctcaaaatcagcaaagaagcgccagactacaggagatcacattgatgattctgagaaacttcgtcctgaggaactaaaccaacaaacaatcgaagctctggtcgcagagagtaacttgaaaatggagattcttccggttgatgatttggacattgcgttgcatgattttgtgaacaaggatgacaagatggcattttattcatgtt

SEQ ID NO: 23958 - DNA, 152 bp, Zea mays
cccacgcgtccgcttgagaacgtgtacatagatcccagcaacgtcgacgactacctggtcggctccatcacggcgccggcggggaccccaacgccggcgaggtgtactacaggctgatgtcgcggttcatgtcgaaccagagccggtacacg

SEQ ID NO: 23959 - DNA, 242 bp, Zea mays
ggccatattcgggttccacgtcaccgtaatgctccctaccggcgtggtgggctctagggccggcccgttgctggccgggtgcgggttcttcgaggcggtgatcaccggggccggtggccacgccgcgaccccccacaacatcgtcgaccccgtggtggcagcctccagcgtcgtcctcagcttgcagagcctcgtctcgcgggaggcggacccgctggactcgcaggtggtaacagtgacga

SEQ ID NO: 23960 - DNA, 225 bp, Zea mays
cagagctgagaagaagagccgcaagcatgctgaagcttggcatgaagcccatcactggtgtcagccgggtcactgtgaagaaaagcaagaatatgctttttgtcatctcgaagccagatgtgttcaagagcccaaactcggacacctatgtcatattcggcgaggcgaagatcggggacctcagctcccagctgcagacccaagctgcaaaacagttcaaggctc

SEQ ID NO: 23961 - DNA, 232 bp, Zea mays
gaaaaaggtgatcaacctcctttgtattttgcagctgatgatcttgaataccaggcagcatttccttctgagcggcttgggatgggcgccttcaggatagctttggaaagcatcttcaatgaaataaatgatcatccactgaagtatacatcttatgggaaacctaatccatttgtgttcaagaatgcagcaaacatacttgaaaaacttgttatgagtatgtatcctaatt

SEQ ID NO: 23962 - DNA, 235 bp, Zea mays
cccacgcgtccggaaactgacatacgagcagaggaaggccagtctcattgaaaggctcaaccaactcaactcctcgggcggcgcagatgacgacgatgaggatgacgagtaaagtttggtcccatcgaagtagtgctatcttatgcggcgatcagtatttgtgctatggcatttatcgctacctgtagtcgtgcaacatgcatttttgtttaagtttgtcgatgcgaacaaagtt

SEQ ID NO: 23963 - DNA, 234 bp, Zea mays
gccgccgacaactctctctaccgtccgataccccaagcaccagcgcggcggcggcgaccatggctgtcggaaagaacaagaggatctccaagggaaagaagggtggcaagaaaaagaccgtcgaccctttctctaagaaggattggtatgacatcaaggcaccgtcggtgttcagtgtgcgcaacatcgggaagactctcgtatccaggacacagggtaccaggattgcttctg

SEQ ID NO: 23964 - DNA, 227 bp, Zea mays
ggagaatcaccacccaggcctcggcgacgagcggtggcctttcgtgactcactttgttgggtgcaagccatgtgggagctatggggattacccagtggagcgctgcctcaggagcatggagcgagcgtttaattttgccgacaaccaggtgcttcggctatatggtttctcacacaaggggctggaaagcccaagatcaagagattcagggatcagacaactagacc

SEQ ID NO: 23965 - DNA, 148 bp, Zea mays
gtttctgcgttctccgggctatctgcctgtcttgctgcggcctgcggcggcggggtggagatggggatggccggggagaagttccagctggggacggtgggggcgctcagcctctcggtggtgtcctccgtctccatcgtcatctgca

SEQ ID NO: 23966 - DNA, 231 bp, Zea mays
ggcaccacaagctcctctgtggcgcgcggagtcggatgccgcggggggtggtgccggcgccggcgatgtcatgggcctcctcctccgggagcgcatagtcttcctcggcaacgagatcgaggacttcctcgcggacgccgtcgtcagccagctcctcctccttgacgccatcgacccggactctgacatccgcctcttcgtcaactcaccagggggatcccttagcgcaac

SEQ ID NO: 23967 - DNA, 228 bp, Zea mays
atggcattaacaagaaaagactatatcagtactcgaagtacgcatcaagcatcgctgctctatcattcagtaaggatgggcatctgcttgctgtggcatccagctacacttatgaagagggagaaaaaacgcatgaacctgacgctatatttatccggacagtgaatgaagtcgaggtgaagccgaagcccaaggcattggcagccccccagtagtgctgtgacctgt

SEQ ID NO: 23968 - DNA, 226 bp, Zea mays
ggaagtgatcctcaggcttctggagcatacatattccgccctaatggcacagatccaatcagtactgatgggcaggtttctctcacagttctgcgtgggcccatattggatgaagtgcaccagcagataaattcatggatttttcagattaccagggtttacaaggagaaggactttttggaaactgaatttatagttgggcccatatcagtagatgatggaaatg

SEQ ID NO: 23969 - DNA, 224 bp, Zea mays
cttcatgtggagctgtgtatgctaatcctatttatccgaaggtaaggtgtttgatgaagactgctggtcagatgaggattactgcaggaagaaggaggattggtatttagtttccaaaacactgtcggaacgagaagctcttgcttttgcagcaaaaacagggctggacgttgtaactgtttgtccgtcattagtatttggacccttgatgcagcctacagtaa

SEQ ID NO: 23970 - DNA, 226 bp, Zea mays
ggagctcctaagccgcgcgtcagggctcgccggggccaggcaactgatccacacagcattgcggagaggctccgaaggagaagatctctgacaggatgaagaatctacaggagctcgttccgaactccaacaggactgacaaggcatccatgcttgacgagatcatcgaatacgtcaaatttctccagctgcaagtgaaggttctcagcatgagcaggctgggcgc

SEQ ID NO: 23971 - DNA, 223 bp, Zea mays
cccacgcgtccgcccacgcgtccggcgtgttgggctgacgggatttagctgccgatgcgggaacatgtactgttcggtgcaccgctactccgacaaacatgactgtcagttcgactatcggactgcagcaagggacgcgattgccaaggccaatcctgtggtgagggcggagaagctcgacaagatctgaggcgggcattgggggagcgaaatggttgcaatc

SEQ ID NO: 23972 - DNA, 226 bp, Zea mays
ggagacggtgtcagccacactgtcccaatctatgaaggctatgccctcccgcatgccattcttcgtctcgatcttgctggtagggacctcactgattccctcatgaagatcctgactgagaggggttactctttcacaaccactgctgagcgggaaattgtccgtgacatcaaggaaaagcttgcatatgtcgcgctcgactacgaacaagaactcgagaccgcca

SEQ ID NO: 23973 - DNA, 240 bp, Zea mays
cccacgcgtccgattcctcgcgcggcgaccacccgattcgaagcgtgcggagagaccgaagaagcgggagagatggctcgtaccaagcagactgctcgcaagtccacgggagggaaggctcccaggaagcagcttgccaccaaggctgcccgtaagtctgcccccaccactggtggagtgaagaagcctcaccgctaccgccctggaactgttgcactccgtgagatccgcaagtaccag

SEQ ID NO: 23974 - DNA, 239 bp, Zea mays
atacgctccactccgtagtgccttccagcgcgacgaaatcatcgagttcgtgaaggaggcagggcgtggtggaaagggaaaccttcctctgaacgatgcacctacagtagtcgcgtccgagccgtgggacggcaaagatggagaggtcattgaggaggatgaattctccctcgacgagctcatgggcgacactcctcagcaaacgatgagttgtgattctgatggttcttggactgatc

SEQ ID NO: 23975 - DNA, 239 bp, Zea mays
tgctggattaattgtcacatggattactgatcctatgcatggaaacaccatcaaggccccttgtggcctgaagactcgtccattcgactcaattctggctgaagtgcgcgcattcttcgacgtgcatgatcaagaaggaagtcacccaggaggcatccaccttgaaatgactgggcagaacgtgaccgagtgcattggtggatcacggactgtgaccttcgatgaccttagtgaccgct

SEQ ID NO: 23976 - DNA, 235 bp, Zea mays
tggtgttaagaggtgtgttgaacagatcaacaaggccaacagaggtgaaataagccaggacgaattgcaagaaagacagaacaaagctatgcaagacccagagatccagaacattcttaccgaccctatcatgcgacaggttctaatagatttccaggagaacccaagtgcggcccaggagcacctgaagaaccccggggttatgcagaagattcagaagcttgtaagtgctggg

SEQ ID NO: 23977 - DNA, 234 bp, Zea mays
gatgaatgaatatcgagatcgtgttgtcctgccggctgcatcaaagaagtttgggagacagattaatacctgcttgaaggttatggatatgactggcctcaagctgtctgcactgagccaaataaagatgttgacgatgattactactgttgatgaccttaattatcctgagaaaacggaaacttattacattgtaaatgctccatatgttttttcagcgtgttggaaggttgt

SEQ ID NO: 23978 - DNA, 216 bp, Zea mays
cagatcctgagatccggcaccggccccaagccgataaagggccagaaggtcaccgttcactgcaccggctacgggaaggatcgtgatctgtccaagaaattttggagcaccaaggaccctgggcagcagccattcagtttcagcattggtcagggttcagtgatcaaaggatgggacgagggagttatgaccatgcaagtgggtgaagttgctcgt

SEQ ID NO: 23979 - DNA, 233 bp, Zea mays
ggcaagacagactacagggccaggataaggctgattaaccaagacaaaaacaagtacaacacacccaaatacagatttgttgtgcgatttaccaacaaggacatcactgcacaaatcatatctgctagtatagcgggtgatatggttcttgcttctgcctactctcatgagttgccacgatatggtcttgaagttggtctgaccaactatgcagctgcctactgcactggact

SEQ ID NO: 23980 - DNA, 231 bp, Zea mays
gctagctgacctccaatccacgataaggcaagataagctagctaggaaggcaagggatccgatggacaagtacgagcccgttcgcgagatcggggcgggcaacttcggggtggccaagctgatgaggaacaaggacacgagggagctggtggccatgaagttcatagagcgaggaaacaggatcgacgagaacgtgttccgcgagatcgtgaaccaccgctccctccgcca

SEQ ID NO: 23981 - DNA, 233 bp, Zea mays
gtacaagggcccaaccctacttgaggctttggacttgatcaatgagccgaagaggccttcagacaagcccctgcgtctccccctacaggatgtgtacaagattggtggtattggaactgttcctgttgggcgtgttgagactggtatcatcaagcctggtatggttgttacctttggtcctagtggccttactactgaggtgaagtctgttgaaatgcaccatgaggctctcc

SEQ ID NO: 23982 - DNA, 234 bp, Zea mays
gaaaactcaccttgttcccccagggacccctaggtcgatctttgtgtatttccgcggtttattctacgacactgcaaatgatcccgagggtggttactatgcaaggggcgcccgtgcatcagtctgggagaacttcaagaacaacccgctcttcgacatctcaacggaccacccacccacgtactacgaggacatgcagcgtgccgtcttctgcctgtgcccgctgggctgggg

SEQ ID NO: 23983 - DNA, 236 bp, Zea mays
atccagcccattaaccctcgttcctgtcgcgcaccacgacctccacttcacatctcccccggcggcggcgcggtcagttgaacaatggcggactccaaggccacctcggcggtcaccctccgcacccgcaagttcatgaccaaccgcctcctggcccgcaagcaattcgtgcttgaggtgatccaccccggccgcgccaacgtctccaaggcggagttgaaggagaggcttgccaa

SEQ ID NO: 23984 - DNA, 227 bp, Zea mays
cccacgcgtccggaaaggtgttccattgagaattgagattggtccaaaagatctggcaaacaaacaggtgcgtgttgtccgccgggacaacggtgcaaaggttgacatccctgtgaccaatttggttgaagaggttaaagtgttactggatgagattcaaaaaaatctgttcaaaacagcccaagaaaagagagatgcctgtgttcatgtcgtgaacacttgggatg

SEQ ID NO: 23985 - DNA, 228 bp, Zea mays
cccagatctgttccttctctcttccacgccgccgccgccgccgccgccctcgaattttcgaatcctcagcaacaatcggccggccgccatgagggagatcctccacatccagggcggccagtgtggcaaccagatcggtgccaagttctgggaagtggtgtgcgcggagacggcatcgacgccaccggccgctacggcggcgactccgacctgcagctcgagcgcgtc

SEQ ID NO: 23986 - DNA, 228 bp, Zea mays
cgctcaagggatcgaagggagcggtctcgctcaagggaacgccgaagggagcggtctcgttcaagggaccgcaggagaggtctcgctcaagggaccgccggagggagcgctcacgctcaagggaccgcagaagggagcgctcacgctcaagggaccggaggggcagttcaccccatggcagaaggcatagagatcggtccaggtcacccaccagcaatgggaaccata

SEQ ID NO: 23987 - DNA, 221 bp, Zea mays
atcgaagacggcgagcaacgaggtcatggagacgggggaccccgacgtgggagagacctgcaaggacctgggcgaggtgaagaagctgttccagctggcgctcctctgcacgaagcggcagccctcggagcggccgacgatggacgacgtggtgcgcgtcctggactgcctggtgaacccggagccgccggcgcagccgcagcagcaggagcagaaggcgc

SEQ ID NO: 23988 - DNA, 229 bp, Zea mays
cccacgcgtccgggtgcatggcatccggctagggtctcctatacggttgcccgtgctggtcagaatgggtaccaccaccgcactgagatgaacaagaaggtgtacaagatcggcaaggctggacaagagacccacgatgcctccacagagtttgacaggactgagaaggacatcactcccatgggtggcttcccccattatggtatcgtgaagggtgactacctgatga

SEQ ID NO: 23989 - DNA, 220 bp, Zea mays
atagaattgctcgagtggaacatgtggatcatgctcggaagtccgcacaccactgtatagagacgctcctaacatcccagacaaaagcgtatgactaccttccatacttctactcgagggtttttgagtacgagggaagttcgaggaaagtctggtggcagttttatggcgacaatgtcggcgaacagtcgaagtagggaactttgatccaaaggttgcg

SEQ ID NO: 23990 - DNA, 223 bp, Zea mays
atggacactgtcgttgatgctgggatgtacgatggagccttgggtattatttcagcaatctcagcactgaaggttttgaaagttacggggaaactccagaggttaacgagaccagtggaggtcattgcattcagcgatgaggagggcatcagattccagacaacttttctgggaagcgctgctgtagctggtacactacctgaatcaattttacaagtatcag

SEQ ID NO: 23991 - DNA, 226 bp, Zea mays
cttgacattccgccagcagctgaagcccttaatggtgttaagatggagttggttgatgctgcgtttcctcttctgaagggagttgttgctacaactgatgttgtggaagcctgcactggggtcaatgtggccgtcatggttggtggattccccaggaaggagggaatggaaaggaaagatgttatgtcgaaaaatgtttcaatctacaaatcccaagcatctgccc

SEQ ID NO: 23992 - DNA, 157 bp, Zea mays
gcctgcccgaggtggccaactactggaagcaggtgatcaagatcaacgactaccagaagagccggttcgtgaaccgcgtcgtgtcgtccatgttcaacaccgttgccggcaagaagatcgccgtcctcggcttcgctttcaagagggcaccggcgac

SEQ ID NO: 23993 - DNA, 224 bp, Zea mays
gctggaattatgtgtggccaatttggtgtacctttctgggagttcttttttgcaactttgattgggaaggccatcatcaagactcatattcagacgctgtttatcgtgtccttatgcaacaaccagctcctgtatcttatggaaaaggagctaatctggatattcggtcacatcccggggttctctgccaccctaccatctgtgattgcaaactccatgctgga

SEQ ID NO: 23994 - DNA, 193 bp, Zea mays
cccacgcgtccgcccacgcgtccgaagatatatctaagaggtatcatgttcacttgtatacaaatgggactgtatgtgatctcacagatattccccgggagacagaggttagatttgtctgctcggagcctactgtgctgattagttcagtcaaggagatctcttcctgcaaatatgttgtaacaattcagag

SEQ ID NO: 23995 - DNA, 220 bp, Zea mays
caacgaaaaaccttacttcaacgaggcgggatacgacaaatttgtgggcaaggctgatggagagaagaactccatcacgtacaatgagaatgccttccttctgtcatgcaaatccatgatgtatgttttacgcaagcctccaaagcattttgagacgttggtcaaggagcatttcacctgccgtgcaccgcacatcgtggatgcctgcgaggcttatctt

SEQ ID NO: 23996 - DNA, 195 bp, Zea mays
aagaggcaatgctagcctgccctttcgatgaggaggtacatacacgctggcgatggaccgcgcttgtgtgtcgcgttcagtttggcttttgccaagcagtagggtagcttcccgtgtcggtaattatatggtatgaaccatcaccttttggctctaaaaaaaaaaaaaagtaaaaaaaaaagggcggccgctcta

SEQ ID NO: 23997 - DNA, 225 bp, Zea mays
ggcactcagtactcgtcttcactggacttgctccggctcttcgcctatggcaccttgaaggactataagaataattcgggatcccttccagcattgttgcctgatcaggtccgaaagctaaagcaactcagtgtgctaactctggcagagtccactaagatactaccatatgatcagctcatgcaagagttggatgtttccaacgtaagagaactcgaagatttt

SEQ ID NO: 23998 - DNA, 207 bp, Zea mays
ggcggatgcctctcacctggaccggattctcgtccgccgccttcgccgaactcggcgccatcgtcaggctctcgctctcttctggtgtcatgctctgcttggaattgtggtacaacaccatacgggtgctcctcacaggaaacataagattgcagatttccacttgacgcccttcgatatgcctaacatcaatggttgggagatgat

SEQ ID NO: 23999 - DNA, 215 bp, Zea mays
gtgagccctacagaagaatggtgatggaaacaatcgagaaggtggtagccaacttgggtgcatcagatattgatgctcgtctggaggagctgcttattgatggtatcttgtatgctttccaagagcagactagtgatgacgcaaatgttatgctaaatggttttggagctgtgggtaatgcacttggacagagagttaagccctaccttcctcag

SEQ ID NO: 24000 - DNA, 216 bp, Zea mays
gttttggctttcggtactaggtgtatttgaatggtctggtaacaacccggtgccaccagaagtatggctactgccatatctcctcccatttcacccagggaggatgtggtgtcattgtcgaatggtgtatttgccaatgtgctacatttatgggaagaggtttgttggccgaatcacaccacttctgttggaattaaggaaggaacttttcaaaga

SEQ ID NO: 24001 - DNA, 218 bp, Zea mays
  unsure (1)..(218): unsure at all n locations
gtagattttagaaaataatctactcgaaggtcttccccagaaattatctccatttgtgctcctgcatcttggttgaggattggtcttttaatcttgtcccacgccttagaagtcggcactatctcggtttggaatgataatccatggagtgcaccgaagtccananntggatgtagcccccgaccttcaaatggattttttaaggataatccattcga

SEQ ID NO: 24002 - DNA, 246 bp, Zea mays
cccacgcgtcccccacgcgtccgcccacgcgtccgcccacgcgtccgcccacgcgtccgcccacgcgtccgcaaacggaccaggctatgtgatttctggtgacatagcaaaattcatcgtgtcacagcatgccaatcagagtttaagactgtttaagatggaagatgtaagcatgggcctatgggtcgagaagttcaattcaacaaatcctgtccaatattcccacagctggaagttctgccagta

SEQ ID NO: 24003 - DNA, 239 bp, Zea mays
  unsure (1)..(239): unsure at all n locations
ggcaaagatcatgtcgttctcgcagcacgggacacgcgcggtctgcatcctttcagcaaacggcgccatatcaaatgtgacgcttcggcaatctgccacttcgggtggaacggtgacatacgagggtcgtttcgagatactgtctctgtccgggtcgtttcttctgtcagagaacggtggccagcgcagtcgaactggtgggctcagcgtttcgctagcaggccccgacgngtgtgtcc

SEQ ID NO: 24004 - DNA, 246 bp, Zea mays
tgacaactttgaccaaataggtcttgcccagaagctggagaagcatgaattgcttgagatgaggaggattgctgcctacatttacaagaaggctggcaggtggaagcaatccattgctctatcaaagaaagataacatgtacaaggattgtatggagacatgctcacaatctggtgaccgtgaactgtcagaggacttgcttgtgtattttatcgagcagggtaagaaagaatgctttgcttcttg

SEQ ID NO: 24005 - DNA, 247 bp, Zea mays
gagcttaccactgctacccaggtacagggtgactacatgccaattactcgcggtgagaagcgctctgtagaggttgtgaaggtcacagatgagatgaaggcgtttgcggcctatggcaagctccgccttgagcggatgaacaagaagcacctcggtgcccgccagaagaaggcagctgaggcagagaaggaagacaagaagtgaagcagccaaactttgtagcctgttttgttctgttcagtcatag

SEQ ID NO: 24006 - DNA, 247 bp, Zea mays
ggaacaccaccgcgcaggcgcagaaggccgacctggacaggctcaagaagatgctggccagcatgtgcttcaagctctacagcatgaagggggacatcgccgtgtggcagaagtccgccgacgcctgctacgacaagctcaccccggtcaccacgcccgccaagtgcgacgacagcgtcgaccccgacgccgcctggtacgtgaccatgcgctcctgcgtcacggctcccagccccaagtacaggaa

SEQ ID NO: 24007 - DNA, 241 bp, Zea mays
gcacgctggccgactacaacattcagaaggagagcaccctccacttggtgctgcgtctcaggggcggcatgcagatcttcgtgaagactctgaccggcaagactatcacccttgaggtcgagtcttctgataccattgataatgtcaaggccaagatccaggacaaggagggcatccctccggaccagcagcggctcatttttgccggcaagcagctcgaggacgggcgcacgctggccga

SEQ ID NO: 24008 - DNA, 243 bp, Zea mays
acgccgccgcttcgttctctaaccttggctcccgctccctccgcagagcatctcaacaccgccttgaggaccccccaactcgccggctgcagccatggtgaaatattcgacggagccaaccaaccccaccaagtcaaccaaggccatgggccgtgacctacgtgttcacttcaagaacacccgtgagacagcttttgcccttaggaagttgtcactcaccaaggccaaaaggtaccttgagga

SEQ ID NO: 24009 - DNA, 239 bp, Zea mays
cccacgcgtccgggacaccgtccagcagctggctaggacgtgcacgaccatcatctgggtggcatccgcgctgcacgcggctgtcaactttggccagtacccatacgccgggtacctcccgaaccggccgacggtcagccggcgcccgatgccggagccaggcagccacgactacaagaagctgggagcggggcagaaggaggcggacatggtgttcattcgcaccatcaccagccagt

SEQ ID NO: 24010 - DNA, 242 bp, Zea mays
atccatgtagatggtcataacttgtatgaatcagcaaagaggctcagactacgagagcttccagcttttgctctggaacacttgccaaatcggaattccttgatatatggtgacctttatggtatctccaaagaagcatccaccatatatagggctactcttcgttacgaaggtaagcaactgcatacctttttgcttcagtgaggcattgctttgcattgcaagtctgatttccgttcacc

SEQ ID NO: 24011 - DNA, 259 bp, Zea mays
cggacgcgtgggcgtgagtagtcgaccaaccccgtcgatccggctgcggcgcggcgtgctagatcgctaccgaccatggtggtggaggagatcgccgagggggtgaagaacctcaccgttaccggagatgcggcggcttcaggcggagaggggcagaggaggggcggcggcggcagcagcaaccgcatccaggtgtccaacaccaagaagcccctcttcttctacgtcaacctcgccaagaggtatatgcaacagcacg

SEQ ID NO: 24012 - DNA, 240 bp, Zea mays
cggacgcgtgggaagaagaaggcagcatcaagcgctaccagtggcggcagcagcggccctgcaaccaaaggcatccgtgcgagcactggaggcccaatgcctcctgccaaggcaggtcgtctcactaacaatgcttgcgtgtcttctctcccagctcccaccacattgacccagtctccctcccacgcgtcatacgccaacacctccccgtcccgcacctcatacgccaatacctcccca

SEQ ID NO: 24013 - DNA, 237 bp, Zea mays
gctagggttccgtcctcgatccgatccgccgagtgcacaccacctttccccactccgatcgaatcgatggccgccgagggcgagaagaagatgataaccctcaaaagctccgatggcgaggagttcgaggtggaagaggcggtggcgatggagtcgcagaccatccgccacatgatcgaggatgactgcgccgacaacggtatccctcttcctaacgtcaactccaagatcctatcc

SEQ ID NO: 24014 - DNA, 228 bp, Zea mays
gaagccttccacagacaaactgaacctgtgattgagtattactccaagagaggcttagtggtgaacctgcccgcagagaaaccaccaaaggaagtgactgctgaggttttgaaagccctctcttgatgaagtgtccactcttcagtttcagcatgacatcgaccaaaaatcccattgccccagtttcttcaaaatttatacttaggccaacaacatggggtttttatt

SEQ ID NO: 24015 - DNA, 235 bp, Zea mays
gaaccggcgatccggcggctggcgcgcaggggcggcgtgaagcgcatctccgggctcatctacgaggagacccgcggcgtcctcaagatcttcctggagaacgtgatccgcgacgccgtcacctacaccgagcacgcgcgccgcaagaccgtcacagccatggacgtcgtctacgcgctcaagcgccagggccgcaccctctacggcttcggcggctaggctatgccggtcgcgc

SEQ ID NO: 24016 - DNA, 238 bp, Zea mays
caaggatgttgagcttgagaagcaggttgacaagataaaaaaggatattgaagcacaaagtagccagaaagcagcactagagtatagggccaacgatgcagagaagaaggtggaagtactgaatgaaaagcttaatacaatccaaaaggaaagtgatgagaaaaaacgcaaaatcaagaagacagaacgtgctcttaaagtcgctgaggaggaattaatgaggttgcagttagaagta

SEQ ID NO: 24017 - DNA, 220 bp, Zea mays
aagtggaaggaagcaggcggccaccatggtgaagggacgcacgggacagcgcgtcaggctctacgtccggggcaccatcctcggatacaagaggtccaagtcgaaccagtacgagaccacgtcgctcattcagatcgagggggtgaacaccaaggaggacgtcgcgtggtacgctggcaagcgcatggcgtacatctacaaggctaagaccaagagcagc

SEQ ID NO: 24018 - DNA, 237 bp, Zea mays
gaagaagttgagctttaagaggaacgtggtgtcattgtcatctgagctcaagggtgtgaggagcaagcttgcttcctaggagcagttgtttgtaagggaatctcaaactagaaagcttgcggagacaaaaacaaggagcatggaagaggaagtaatcaagctgcagaaatgcttataggacaaggatgaacaactgcattcattcacaagtagcacagaacaggaacccaactgaac

SEQ ID NO: 24019 - DNA, 234 bp, Zea mays
cgtcccgcctcggcactcgacggccgccggcacacaccgcgcagtctcgagacaggaaccggaggaacgaggatggaggatgactcgccgctgacgaagacgatgaagggtgcggtgacaggactcgccgcggggaccatctggggcaccgtcgtcgccacctggtacgacgtgccccgtgtggagcgccacgtcgcgctccctggccttatccggacgctcaagatgtgcggc

SEQ ID NO: 24020 - DNA, 237 bp, Zea mays
cacactctctttccgagctctctcgctgtctctcacccagccgccaccatgtcaggcctctacaaccagggcttctcccctgcaagaaccctctccccccagattaggagcaaccccgacgctgatagccagtacttggccgagcttctcgccgagcaccagaagttggggccattcatgcaggtgctgccgatatgcagccggctgctcaaccaagaaatcatgcgggtgtcaagc

SEQ ID NO: 24021 - DNA, 86 bp, Zea mays
catagagtccatcgtgtcccgcgagaagacccggcgctacatgacggacatgatcacccacgccgacaccgacgtggtgatcgtgg

SEQ ID NO: 24022 - DNA, 220 bp, Zea mays
ggcgaagtgaatgaccatgtatcagctcctagtgcatcaatgattacagtggcaaaaattgttgatggatatctcgcagaggttgcgaaggacccaaatataccggtctacaagtttttcagtctcgctgagacagtctcggccaattcaaggccagtccatgacgggctatatcgcgccattgatatgtatctgaaggagcacccaagcttgggcaaga

SEQ ID NO: 24023 - DNA, 223 bp, Zea mays
gttgtttcagctgaagatgcttccagctccatgtaccaacttgcgttttggtggaatccagtttatcacaaactgtgaatcagttcatgaattctggtgacagtgtgctgcatctgtcttacgaatatggagatgatgatgagcttcgtgagcttccttgcacacacttctttcatgttcaatgtgtagataaatggcttaagataaatgcggtgtgcccact

SEQ ID NO: 24024 - DNA, 216 bp, Zea mays
gtctcgagaacatcctgaaggttggcgaggcagagaaaaaccttggtgcaggtgatgtcaatgtctatgcacagatgattgatgatgctgagggcctggacaagattgagaacctgcagagccatgacaacaccgagatatatgagaaggctgtgaagatgctggaatcctactggctggaggaggaagatgatgccatgccctcaggcgacaatc

SEQ ID NO: 24025 - DNA, 220 bp, Zea mays
gaccaaagcagagctgcttgcttctccacgccttgtgcttccacagagcaaccagttctcagaagcaatgtccgcacccctggtggacgccgagtacatggccgagatcgagagggcacggcgggacctccgcgctctcgtcgccagcaagaactgcgcgccgatcatgctccgcctcgcgtggcacgacgccggcacttacgacgccaagaccaacaca

SEQ ID NO: 24026 - DNA, 222 bp, Zea mays
cccacgcgtccgccctagtgcagatagaataaaccgcatgagaggtgaaatcaatcaggtccgtagtgttatgattgataacattgataaggttcttgaaagaggtgatcgtttggaactgctggttgacaagactgcaaatatgcaaggaaatacagttcgattcaagagacaagctcggcggttcagaaacactgtttggtggagaaatgtcaaactcac

SEQ ID NO: 24027 - DNA, 221 bp, Zea mays
cttcatgtggagctgtgtatgctaatcctatttatccgaaggtaaggtgtttgatgaagactgctggtcagatgaggattactgcaggaagaaggaggattggtatttagtttccaaaacactgtcggaacgagaagctcttgcttttgcagcaaaaacagggctggacgttgtaactgtttgtccgtcattagtatttggacccttgatgcagcctacag

SEQ ID NO: 24028 - DNA, 212 bp, Zea mays
cggacggtggtcaggacgcgtggggccagttggaatcacaacttgggtggtcactgttggagctatcaagaaaacagtttcacgtctactcatcctttctatctcaatgggttatggtgttgttcgtccaactttgggaggtctcacttccaaggtgttgctactcggacttacatattccgggtgtctgagttgctggacattgcataaaa

SEQ ID NO: 24029 - DNA, 211 bp, Zea mays
cccacgcgtccgcatcaccacaataggcttacatgacctgcgttcacgtttgggtatcattccgcaagatccgacactctttcaaggaaccataagatataatctagaccctcttgggcaattctctgatcaacaaatatgggaggttctaggcaaatgtcagcttcttgaagctgtccaggagaaggagcagggattggactcacttgtt

SEQ ID NO: 24030 - DNA, 219 bp, Zea mays
cggacgctggacgcgacgcgtgggttcacggcccccttcacgcgcgaggactacgagccgttcgacatgagggccgtgtggaccgccatggaggagtgccaccgcctgggcctggccaaggccatcggcgtgtgcaacttctcctgcaagaagctcgagaccctgctctccttcgccaccatccctccggtggtcaatcaggttgagatcaacccggtg

SEQ ID NO: 24031 - DNA, 235 bp, Zea mays
ttatcagagaaacaagagctgtgcttctctgttgtctcattgctctggcagaagctcatagcttctcctgaaatgcagatgtctgcagaaagtacatcagctcaccaaggatggaggaaggttgttgatgcactttgtgatgtcgtttcagcctcaccaaccaaggcatcagctgctatcgttctccaggccgagaaggacttgcagccttggattgctagagatgacgaacaag

SEQ ID NO: 24032 - DNA, 230 bp, Zea mays
cccacgcgtccgcgacgtgtggtgcgcgaccgcctcgacttctactacttccaggggcaggacaagtacttcgactcacgcgtggagcgctacggctccaccgtggtgcgcatgaacgtgccgccgggccccttcatggcgcgcgacccgctggtggtggcggtcctggacgccaagagcttccccgtgctcttcgacatggacaaggtggagaagaaggacctgttcac

SEQ ID NO: 24033 - DNA, 235 bp, Zea mays
gccgccaccaggtgcagagtctttcgtcatctcttctccggcgaagaacccccagtcgcccaccagatcacttgttaaactttgttgaggggtgatggcggtttctttcgcaaacctcagctccgaggcagggcttaaaaagcttgatgagtaccttctcactcgcagctacatcactggctaccaagcttccaaggatgacttggctgtctacacttcgttttcgtctgctccc

SEQ ID NO: 24034 - DNA, 236 bp, Zea mays
gacagttcataagcaaggtagtgccctcggcaggtcgattgatctaacaaagttcgcttgctatgatgagctgattgctgaactggatcagatgtttgacttcgatggtgagctgaagagtccatgcaaaagttggttagttgtctacactgacaatgaaggcgatataatgctggttggtgatgacccctggaatgaattctgcgatatggtccacaagatcttcatctacacga

SEQ ID NO: 24035 - DNA, 228 bp, Zea mays
agcacgtcatcaagccagtcatccccgagcagtacctcgacgagaagacaatcttccacctcaacccgtctggccgcttcgtcatcggcggacctcacggcgacgctggcctcactggccggaagatcatcatcgacacctacggtggctggggagcccacggcgggggcgccttctccggcaaggacccgaccaaggtggaccgcagcggggcctacgtcgcgaggc

SEQ ID NO: 24036 - DNA, 231 bp, Zea mays
cccatggcgccgtggacgccagggtcttctacctcaagatgaagggggactaccaccgctacctcgccgagatcaagaccggcgccgagcgcaaggacgccgcggactccacgctcgccgcctaccaggccgcgcaggacatcgccgtcaaggagctgccgcccacgcatcccatcaggctcggcctcgccctcaacttctccgtcttctactacgagatcctcagctcgc

SEQ ID NO: 24037 - DNA, 229 bp, Zea mays
ggcatgggcggcctgcaggtgcgcctcggcaacaacgggcagagcggcggccgctgggtggacatcgctccccggcctggggcgctcatggtcaacatcggtgatcttctgcagctcgtgaccaatgaccggttcaggagcgtggagcaccgggtgccagccaacaagagcagcgacacggcgagggtctccgtggcgtccttcttcaacacggacgtgaggaggtccg

SEQ ID NO: 24038 - DNA, 233 bp, Zea mays; identical to SEQ ID NO: 23273

SEQ ID NO: 24039 - DNA, 233 bp, Zea mays
ctcccagatcctgcggctgttcagcgagtctgcagagagcattaccggactcaagggggagatggaggaggcgaagaagctgcttggcaggaagaataagcacctcggccagttgtggtaccgctccctcacactgcgccatgtgctatcccttttggatcaggtcgaggatgttgccaaggttcctgctcgaattgaaaacttaatggcagagaagcagctgtatgctgcag

SEQ ID NO: 24040 - DNA, 236 bp, Zea mays
cccacgcgtccgggacaaggagggcatccctccagaccagcagcggctcatctttgctgggaagcagcttgaggacgggcgcacgcttgccgactacaacatccagaaggagagcaccctccacttggtgctgcgcctcagaggaggcatgcagatcttcgtgaagaccctgaccggcaagactatcaccctcgaggtagagtcttcagacaccatcgacaacgtcaaggccaaga

SEQ ID NO: 24041 - DNA, 224 bp, Zea mays
ggacctggcaatttttagtccctccattttattccactttagtctataaattgcaaaatatggacactataactctattttagtttccatatttgacaatttagtgactaaagtggaataaattggagagactaaaaattagtctctaaaaccaaacacccccttagtaggtgtttggtttctagggactaatgtttagtcccatcattttattctattttagt

SEQ ID NO: 24042 - DNA, 226 bp, Zea mays
cccacgcgtccgcccacgcgtccgcccacgcgtccgtatcaccattgatattgctctgtggaagtttgagaccaccaagtactactgcacggtcattgatgcccctggacaccgtgacttcatcaagaacatgatcactggtacctcccaggctgactgtgctgtccttatcattgactccaccactggtggttttgaggctggtatctccaaggatggccagacc

SEQ ID NO: 24043 - DNA, 225 bp, Zea mays
ctccttttgctcggaacgcacacaccgcccgtccccgatctccgatcccctcgtcgatccaaagatgcagatcttcgtcaagaccctcactggaaagactatcaccctcgaggtggagtcttctgacaccattgacaacgtcaaggccaagatccaggacaaggagggcatccccccggaccagcagcggctcatctttgctggcaagcagctcgaggacgggcg

SEQ ID NO: 24044 - DNA, 227 bp, Zea mays
cccacgcgtccggaagaatcttataatttggcttgcattctcactctccccccataccaaagaaaaggatatgggaagttcctgattgctttctcatacgaactttccaagaaggaaggtaaagttgggacaccggagcgccctctctctgaccttggtctgctcagctatagaggttattggactagagtgcttctggaaattctaaagaaacataagggaaacat

SEQ ID NO: 24045 - DNA, 241 bp, Zea mays
cccacgcgtccgcccacgcgtccgcagactaaggttggtaaataccaccttctggtgtgtggaactacaccttgtatgattcgtggttcacgtgaaatcgaagagacgttgttggagcaccttggagttaaacgaaatgaggtgaccagtgatggtttattttctgttggagaaatggagtgcatgggttgctgtgtgaatgctcctatgattgctgtggctgactactcgaaaggctcag

SEQ ID NO: 24046 - DNA, 234 bp, Zea mays
caccagctttgaccgccgcctcccttcccctccgctacagctcctccccaccccactcccccgcaggagcggcggcggcggcggcgaggtcgtaccccacatcggcgagcggcgagagcaccgcggaggcaaaggcaagatgttcgggcgcgcgccgaagaagagcgacaacaccaagtactacgagatcctcggggtgcccaagtcggcgtcccaggacgatctcaagaaggc

SEQ ID NO: 24047 - DNA, 220 bp, Zea mays
cggacctggtgacgggaggaggaattcgcgccggtaaagaacgccagcgggcaacgagtgacacccctgatagcgcgaactcatgctgctccgcctccacagcagatgggtagtcgctgctggcggcttcttgacgcactctgtgcccttgtatatgacaggcgtcgaagtttctccgctctcctcctacgccggagagaacctggaagccatctgccgt

SEQ ID NO: 24048 - DNA, 238 bp, Zea mays
actgacccttcatggtctagttcagcactatatcaaattaagtgaggcagagaagaaccgaaagttgaacgatcttttagatgcactcgacttcaaccaagttgtgatatttgttaaaagtgttagtagagctgcagaactcaacaaattgctctgcgagtgcaatttcccctcaatctgtatacattctggaatgacacaggaagagaggttgacacggtacaagaacttcaaggaa

SEQ ID NO: 24049 - DNA, 236 bp, Zea mays
cccacgcgtccgcccacgcgtccgcccacgcgtccgcccacgcgtccgaagaagctggctggtgatccgaaccttcactttgttgaagctgttgctcttaagcctccggaagttaccatcgacatggctatgcagcagcagcatgaagctgagcttgctgcagcagctgcacaacctcttcctgatgacgatgatgatctgattgagtagaaaggatcatgagtcttgaacttgag

SEQ ID NO: 24050 - DNA, 233 bp, Zea mays
aactccacagcttgcgcccgcaattgcactcgtctccgcctcctcgtcctccaccaccgccgtcacggcgctccccatgaatgggcagcgggcgtcgtccgcctgcctcgggggggttgatgctgctgagacaggccgaggcggcccggccgtcgttcgccgtgcgcgccgcggcggaccccaacaggccgatctagatccccggcagcacccctccgccgtggctcgacggc

SEQ ID NO: 24051 - DNA, 228 bp, Zea mays
gcgaggtgaatgtacaagaggagctgagtgcccttatcgtcatgagatgcctgaaactggggagttatctcagcagaacattaaagatcgctactatggagttaatgatccagttgcactgaaacttttgagcaaggcaggtgagatgccatccctgacaccaccagatgatgagactataaggaccctctacattggcggactcgatagcagaataaccgagcagga

SEQ ID NO: 24052 - DNA, 231 bp, Zea mays
cccacgcgtccgaaagcctgttactaaactgacaccaatggcgatgagttccgtggccaccgcattccttgtttccagtcatggactacgagtcacttccgcacttctgcaagagagaagggtcaggttcatccagcgactcgctggatggagtagattgctactcctacgaccaccctttccaccagcagctgtacaactacatgaagcagcagcaatctctgaatcagg

SEQ ID NO: 24053 - DNA, 232 bp, Zea mays
  unsure (1)..(232): unsure at all n locations
catcgttcatcggatccagtcttctcccgggatctcctccggctataaatttccggccccaattcacccaatccagatgcgcaaacatcgaatcgtctcgctcgtggctgccctactcgtgctgcttgccctcgccgccgtttcctccacgcgcagcnacaaaaggagtccgtggctgacaacgccgggatgttggcaggcggcatcaaggacgtgccggcgaacgagaacg

SEQ ID NO: 24054 - DNA, 231 bp, Zea mays
aggacatgcgccacagcacagcgtcaaggacgaggaagggtacccggccttcgcgctcgtcaacagggtcaccggcgaggccatcaagcactcccagggcgagggccacccggtcaagctggtgccctacaaccccggctaccaggacgagtcggtgctgtggacggagagccgcgacgtcggccacggcttccgctgcgtccgcatggtcaacaacatctacctcaactt

SEQ ID NO: 24055 - DNA, 233 bp, Zea mays
gaacttctcgcagcaggtgctgctccgcaatggtgagaaggtcacgttcgacgagcctaacccgtttgccactgaaggggaggaagctgcttccgttgcttaccgctaccgccgctggaagcttgatgaggagacaagcttggttgctcggtgcgaggttcatgccgtgagcgttgatctacgcggcgagcgccagttccttacactcaacgccctcaacgagttcgatccca

SEQ ID NO: 24056 - DNA, 234 bp, Zea mays
gctgtttggtcactgcagtgagggacgggatgaacctgatcccatacgagtacgtaattgctcgacaagggaatgagaagatagatagtattctaggccttggtccggcttcaaggaagaagagcatgcttgtcgtgtcagagttcatcggctgctcgccctccctgagcggtgctatccgtgtgaacccttggaacatcgattcagtagccgacgcaatggactacgcgctgg

SEQ ID NO: 24057 - DNA, 224 bp, Zea mays
gaagcgagcagagacggcttttgaaccgggcgatgcaggccaaggctcggatccacgctgacccggtccatgagtttgaccaattcgactgcttgcacgattctcttgtgctgctgatcctgaacaagctcgaggacgtgcgttcactcggcaggtgctctgccgtgtccaagcgattcagtggcctggttctcctcgtccatgatgtgcgtgtcaagatcgac

SEQ ID NO: 24058 - DNA, 225 bp, Zea mays
gtcttgtgttgttcggagcgggcagcagcacacagccccatcccaatcctagtcgatcttcttcccctcctcaaggaagaaaagaagctgaaccatggggaagagaaagtcagctgctaagccacctcctaagaagcggatggacaagcttgacactgtcttttcctgcccattctgcaaccacgggagtagtgttgagtgccgaattgacatgaagaatctgat

SEQ ID NO: 24059 - DNA, 228 bp, Zea mays
aagatactcactgccttccatcctgaaatcgaggagctcgtctacagcgacgtcgagaactccgagcacaagttcgtgctgaaagacaagaagaagccgatcatcttctcgatggcgcgtctcgaccgcgtgaagaacatgacaggccttgtcgagatgtacggcaagaacgcgcgcctgagggagctggcgaacctcgtgatcgttgccggtgaccacggcaaggag

SEQ ID NO: 24060 - DNA, 240 bp, Zea mays
ggtcgaaagcggcgagcgaattagaagatgctggacaagctgtgggacgacgtggtggccgggcctcgcccggagacgggcctcgagaagctccgcaaggccaccaccgcccgtccgctcgtcatcaacaaaggctctacagcgacgagaccaggagcaaccaccgctagatcgggcgagatggatggacagtgaagaggccatgtttgctggtccttgtggttatctaaaacgcacgca

SEQ ID NO: 24061 - DNA, 226 bp, Zea mays
gaaagaaggaagacggagcgcactgatgttgctatatgtagagttgagcagctctgcccattcccctatgacatcatccagcgcgagttgaagagatatccaaatgctgagatcgtgtggtgccaggaggagccgatgaacatgggagcgtacagctacatcaacccccggctgctgacggcaatgaaggctctgggccgtggtggcatcgaggacatcaagtacg

SEQ ID NO: 24062 - DNA, 206 bp, Zea mays
ccctcgcgccgccgccgccgtgcccagcgctcgagctcctcgcctgccgcgagctcgcgccgcaacgccaccatgaagttcaacatcgcgaacccgtctaccgggtgccagaagaagctggaaatcgatgacgaccagaaactacgtgccttttatgaccgaaggatctcccaggaggtcagtggtgatgctctgggtgaggagtt

SEQ ID NO: 24063 - DNA, 188 bp, Zea mays
ggaggctccgcccacgcgtccgggcttctcctccccctctgaccaagtcctcctcgggttagggttccgtagggtgttgtggaggggcgatgggcggcggctgatgttgagtagcgttgcttcgtcggcgggcttgcctgggccaccagcaacgagtcgctggagaatgccttcggctcctacggcga

SEQ ID NO: 24064 - DNA, 220 bp, Zea mays
gaaaaattccaagggtggctgatgatcttcctctctatgacattctaaatgagttccagaaaggtcacagccacatggctgtggtaattaaacgaacaaaggaagcaggagtacccactgaaaagcaaaagagcacaactgccgattataaaataaaccccaaagatgctcgtgctgatggctcatccccttcttatggtagcactgccgtaagtcgtag

SEQ ID NO: 24065 - DNA, 208 bp, Zea mays
cccacgcgtccgaagtatgctttacaaacttcccaagtaatactgctttccgaggttttggtggtccacaaggcttgttgattgcagagaattggattcaccatatagctacagaactccaacgaagtcctgaagagataaaagaacttaattttcacaatgatggagttgtgctacattatggccagttgctccagaattgtacaat

SEQ ID NO: 24066 - DNA, 229 bp, Zea mays
cccacgcgtccgcgcacacacacgcaaccagatctcccccaaatccagccgtcggcacctccgcttcaagatgcagatctttgtgaaaaccctgactggcaagactatcaccctcgaggtggagtcgtctgacaccattgacaacgttaaggccaagatccaggacaaggagggcatccccccagaccagcaggggctcatcttcgctggcaaacagtttgaggacggg

SEQ ID NO: 24067 - DNA, 218 bp, Zea mays
gtgcatgcttggtgatgcccagcatgttgaggaggccgagaagatgggacttgactacatggatgttgaggctctcaagaaaatgaacaagaacaagaagcttgttaagaggcttgccaagaagtaccatgctttcttggcatcagaggccatcatcaagcagattccccgtctccttggtcctggtctcaacaaggcaggcaagttcccgaccctgg

SEQ ID NO: 24068 - DNA, 225 bp, Zea mays
atcgaagaccgtggtgaccacgcgtccgcgacctggcgccgacggcatcttcgagcgcaccgtggcccctgcaaagtacgcgctggggaagtcctccgacgtgtacaagagctggaatttcaacgagcaggctctcccagcagacctcgtcaagagaggtgtggctgtgccggaccagtcgagcccctacggtgtccggttgctgatcaaggactacccttacgc

SEQ ID NO: 24069 - DNA, 233 bp, Zea mays
gtctgttgagatgcaccacgaggcacttcaggaggctcttccgggtgacaatgttggcttcaacgtgaagaatgttgctgtcaaggatctgaagcgtgggtttgtggcctccaactccaaggatgaccctgccaaggaggctgccagcttcacctcccaggtcatcatcatgaaccaccctgggcagattggcaacggctatgcccctgtgctggactgccacacctcccaca

SEQ ID NO: 24070 - DNA, 233 bp, Zea mays
cgaacctaaggaagctgagaaaccagcagaggaagaggaggctccaaagcctaagccaaagaatccccttgatttgcttcctccgagcaagttgattcttgacgattggaagaggctgtattctaacacgaaaaccaacttccgtgaggttgctattaaaggtttctgggacatgtatgacccagagggctactccctgtggttctgtgactacaagtacaatgacgagaaca

SEQ ID NO: 24071 - DNA, 227 bp, Zea mays
agcagctagggttccgtcctcgatccgatccgccgagtgcacaccacctttccccactccgatcgaatcgatggccgccgagggcgagaagaagatgataaccctcaaaagctccgatggcgaggagttcgaggtggaagaggcggtggcgatggagtcgcagaccatccgccacatgatcgaggatgactgcgccgacaacggtatccctcttcctaacgtcaact

SEQ ID NO: 24072 - DNA, 228 bp, Zea mays
gaagaaccactcggtgatcatcaccaagaagctgctggacttctacacgggcttcgagggcgtgtcgacgctggtggacgtgggcggcggcgtgggcgccacgctgcacgccatcacgtcccgccacccgcacatctccggggtcaacttcgacctgccgcacgtcatctccgaggcgccgccgttccccggcgtgcgccacgtgggcggggacatgttcgcgtccgt

SEQ ID NO: 24073 - DNA, 215 bp, Zea mays
cacacgcgtccgcggacgcgtgggggttcgagagtctcactgacaagagcaagctcgatgcgcacctgagcttttcatccaccttgtcccagacaaggccacgaacacgctctccatcatcgacagcggcatcggcatgaccaagtccgaccttgtcaacaacctcggtaccatcgccaggtccgggaccaaggagttcatggaagcccttgctg

SEQ ID NO: 24074 - DNA, 214 bp, Zea mays
aaagattccactgttttctgctgctgggctccctcacaatgaaattgctgctcagatttgtcgtcaggctggtcttgtgaagacattggagaaaggaaagcatgctgagggtggtgaagatgacaactttgctattgtgtttgctgctatgggagtgaacatggaaacagctcaattcttcaaacgtgattttgaagagaatggttccatggag

SEQ ID NO: 24075 - DNA, 176 bp, Zea mays
cccacgcgtccggcagctcattggtgcggtggattactgccacagccgaggtgtgtatcaccgggacttgaagcctgagaaccttctgttggatgagaatgagaacctcaaggtctcagattttggactgagtgcactttcagaatccaaggggcaagatggcttactccacacca

SEQ ID NO: 24076 - DNA, 225 bp, Zea mays
cccacgcgtccggctcggcgtccgctcctgcatctacgtcggccactccgtctccgcggtcatcggcgcgctcgcctccatctccaggcctgacctcttcaccaagctcgtgctcctctccgcgtccccaaggtacctcaatgatgtggactactatggcgggtttgagcaagatgagcttgatgagctgtttgaggcgatgcgatcaaactacaaggcctggtg

SEQ ID NO: 24077 - DNA, 140 bp, Zea mays
cccacgcgtccgcccacgcgtccgggaggtcgccgtgctgcgagaaggcgcacacgaacaagggcgcgtggaccaaggaagaagacgaccgtctggtggcgtacatcaaggcgcacggcgaagggtgcttgcgctccctt

SEQ ID NO: 24078 - DNA, 218 bp, Zea mays
acaacccagtcgctcaaaaccctagagctctcgcctgctcgcctccgccgccggagcgagctccccatcttcatccgtcaaccatggcgacccagatcagcaagaagaagaagttcgtcagcgacggtgttttctacgccgagctcaatgagatgctgacgcgggagctggcggaggatggctactctggcgtggaggtgcgcgtcacgccgatgcgc

SEQ ID NO: 24079 - DNA, 234 bp, Zea mays
ggcaggacatggtgttcacggtgtacggcgaccactggcgcaagatgcggcgcatcatgaccgtccccttcttcaccaacaaggtggtggcccagaaccgcgccgggtgggaggaggaggcccggctggtggtggaggacgtgaggaaggaccccgaggccgcggccggcggcgtcgtgctccgccgccgcctccagctgatgatgtacaacgacatgttccgcatcatgttcg

SEQ ID NO: 24080 - DNA, 237 bp, Zea mays
cacccgcgacgagcacccaccaggcatagagagagatggcaagtctaaccggcctcaccgcgaaccctaatccgaacaagtcattcgagatactgccgaacccaggtgactctgtctccagcctcagctttagtcccaagagtaatctgcttgtggcaagctcctgggataaccaggtgaggtgctgggagattgttggtggtaacagtcagccaaaggcgtccatttctcatgatg

SEQ ID NO: 24081 - DNA, 236 bp, Zea mays
ggaagatctatcgacatcaacagatattctgggtacgatgaactgaagcatgacgttgcccgtatgtttggaattgaggggcagctcagcgaccagaacagagttggctggaaactggtttatgaagatcacgagaaggatgtcctattagttggtgatgacccatgggaggacttcgtgaactgcgtgcggtgcatcaggattctttcgccgcaggaagagaggcaaatgaggct

SEQ ID NO: 24082 - DNA, 140 bp, Zea mays
gtacttattgagaaagatgaaagcctggataagtttgacccagcaaaactgaagaaacttcgcccaagtttcaaggagaatggtggtaccgttacagctggaaatgcttctagtataagtgatggggcggctgcattagt

SEQ ID NO: 24083 - DNA, 169 bp, Zea mays
ggcgctccggtggtcccgcttctccggggagtgcgcgtcgtgcctgtgccggatggagcccctggtcgtgggcggcacggcggtgcagtaccggggcctgtccaagacggctctggcgatcatcttcgcgctgtgctcgcggatggtgtgccgcatctacggcgaggag

SEQ ID NO: 24084 - DNA, 173 bp, Zea mays
cactcggcgccagcgacgccatcaacgagtttggctgggacaacaagcacgccggcatcaacgtcctcatctccaaggaggtcctcatgggcaaggacgagttcttccggtcgttccgggagaacgccgacaacttcatctgcagcctcctgccgggcatcttcgggcaacca

SEQ ID NO: 24085 - DNA, 227 bp, Zea mays
gttaagatggagttggttgatgctgcgtttcctcttctgaagggagttgttgctacaactgatgttgtggaagcctgcactggggtcaatgtggccgtcatggttggtggattccccaggaaggagggaatggaaaggaaagatgttatgtcgaaaaatgtttcaatctacaaatcccaagcatctgcccttgaagcccatgcagctcccaactgcaaggttctggt

SEQ ID NO: 24086 - DNA, 231 bp, Zea mays
gctaagacttcatgaatcaagaggggtgaatcaaattgataacgattttacccgtgcggcaagggaaagatgtcagtatcactgcatcctccaagatgatcggatatgctcttcaggacccatcaataagagagatggctgagcaaattgcaagtgaccctgtgttcaaccagatggttgaacagcttcagaaaagtgctcagagcatcttgggaatgcccttatgatcct

SEQ ID NO: 24087 - DNA, 230 bp, Zea mays
aggatgcagactggatgcttgtcggtgatcttccctgggattattttacctctatctgccggaagctcaaaatcatgaggggctctgatgctgttggaatagctccaagaaccatagagcagacaggtcagaacaaataagcttggtctttgcctgcacccacgcaagaaatctgagctagctggaaggccatgttgaaggcttaaatagttgctcggaattatcaaaag

SEQ ID NO: 24088 - DNA, 235 bp, Zea mays
gttccccaacctctcgtctgctgcctgcctgcctgcctgcctgcaaaaaggagtttgtcatggcgtctaagcgcatcctcaaggagctgaaggacctgcagaaagacccccccacatcatgcagtgcaggtcctgctggtgaggacatgtttcattggcaagcaacaattatgggaccacctgacagtccctatgctggtggtgttttcttagtgaacattcatttcccgccaga

SEQ ID NO: 24089 - DNA, 235 bp, Zea mays
cagagatgaaggaaaaggacattgatcccctgaccgataaagatgggaactcacatgtctgcaaagtttgtttcgaatctgcagccgctgcagtattgcttccttgccggcatttctgcttgtgcaagccttgctcgcttgcctgctcggagtgccctctgtgccgcacaagaatcgcagacaggataatcaccttcacgtgagctgcgttctagcttcaggtcattctgaagca

SEQ ID NO: 24090 - DNA, 217 bp, Zea mays
ctgacatctgtcttccagggctctcagacgtcattggatgttataaaagcggcaaagcactacaagctatttcagcgtgcgacccatgtctactctgaagcaaggagggtttatgctttcagggatactgtctcttcaaaactcagtgaggaaggcaagcttaagaaacttggtgatcttatgaacgagagccattacagctgcagcgtgctatacg

SEQ ID NO: 24091 - DNA, 222 bp, Zea mays
gctgtcgctgtctctgtcgtcgtcgacgtcgactcgattgctttggcatctgcaggctggcggtgaagagcaaggaggcggagaagcccgccaagggcaggaaagggaaggccggcaaggaccccaacaagcctaagagggctcccagcgctttcttcgtgttcatggaggaatttcgcaaggagttcaaggagaagaaccctaagaacaagtctgtcgctg

SEQ ID NO: 24092 - DNA, 225 bp, Zea mays
cccacgcgtccgagctcgccgacagatacgacatcgccggcgtcatcgactgggacggcctccccgcgcggctcgacggcgccgcggcggtgccgcgcgccgggacgcccgtgctcaggctcggcctgcacgagttcgtggaggtggtgttccagaacacggaggaggagctgcagtcgtggcacctcgatggatacgacttctgggttgtagggtacggcgatg

SEQ ID NO: 24093 - DNA, 225 bp, Zea mays
cccacgcgtccgcccacgcgtccgcccacgcgtccgcggacgcgtccgcccacgcgtccgccaacatgggtgggttcgctgcttctctagtgaagtaccccgtgtgggtgatgaatgtcgtccctgttaactccgaccgggacaccctcggggcaatatacgagcgagggttcatcggcacgtaccaggactggtgcgaactttctcgacgtatccaagaacata

SEQ ID NO: 24094 - DNA, 223 bp, Zea mays
ccccgagctcagcttagctccactccagctccaatcacagtcgtgaccagagcgcgagagctagctagagggccgtgaaaatgccgatcaataggatcgccctggggagccaccaggaggtgtaccacccgggcgccctcaaggcggcgttcgctgagttcatctccaccctcatcttcgtcttcgccggccagggctccggcatggccttcagcaagctgac

SEQ ID NO: 24095 - DNA, 218 bp, Zea mays
ggagaaggtggctaagactgtagatgtggaagagctcactgttgaggagcgtaaccttctgtctgttgcatacaagaatgtgattggggctcgccgcgcttcatggcgcattgtttcttccattgaacaaaaggaggagtcccgtaagaacgaggagcatgtgaatcttatcaaggaatatcgtggcaagatcgaggctgaactgagcaatatctgtg

SEQ ID NO: 24096 - DNA, 220 bp, Zea mays
agatgcttgtggatttgagcaatctaatttggggaaaaggggtagagatgaaccatgttcatctggcccaacatccaaagcttgccgtgaaaaaatgaggagggacaagctgaatgacaggttcctggaattaagttcaattatgaatcctggtaaggaagcaaagttagataaagcaaatatattgagtgatgcagcccgtatggtggcacaacttaga

SEQ ID NO: 24097 - DNA, 195 bp, Zea mays
cccacgcgtccgacgtcgggttgcttgggtcgacaaggatcgggagccgacgggtcatacagatctcagctggcttcatgatctttttctccatgctggggaaatttggagccttgttcgcttccatcccgttcaccatctttgcggccgtgtactgcgtcctgttcgggctagttgctgcggtggggctgtcct

SEQ ID NO: 24098 - DNA, 217 bp, Zea mays
cccacgcgtccggacggacgattctgatgagggtttatcttctgaagaaggcgatgatgattcaagtgatgaagatgataccagtgacgatgaggaggaagacactccaactcctaagaagcctgaggtaggcaagaagagagctgctgaaagttccgtgctgaaaactcctctatctgataagaaagcaaaggttgccacaccgtcatctcagaag

SEQ ID NO: 24099 - DNA, 224 bp, Zea mays
cccacacgtccgcccacgcgtccggagagttttttgacttgggaaagcctggagtcagtgcgtagaaacaaagttggcttgaaaggtcctatggctacacctattggaaagggtcatcgatctttgaatcctacattaaagaaagaaccttgggtccaatgccaatgtcaggccttgcaacagcctccaagctacaagaccagatacgatgatgtaaccttgtg

SEQ ID NO: 24100 - DNA, 224 bp, Zea mays
cttcctctcccatgggctatcagaatgaaggttgcactgggagcagcaaagggtctggctttccttcatgaagaagcagaaagtccagtcatttatcgtgattttaaaacatctaatatactactggatgcggagtataatgcaaaactctccgattttgggcttgcaaaagacggacctgtaggtgataaaactcatgtctctactcgagtaatgggaactat

SEQ ID NO: 24101 - DNA, 223 bp, Zea mays
cagctctttcaatgcttgcttcagtaccactaggagaactatttttcttccatatgatattaatccggaagggcataacaacttatgaatatgttgtggccatgagggctcagagtgaacctcctggaccttctgtcaatgatgaccaacaaagcttggcatcttctccaatgagttctgcaccaacagcttttagtgggagctcgtttgcacggcactacaa

SEQ ID NO: 24102 - DNA, 216 bp, Zea mays
cttcccgagcaggaggcggacaaggtaagcagcaatcgcaggaaccctagcgccgccgcacccgcagaatgggtatcgacctcgtcgccggtgggaggaataagaagaccaagcgcactgcgcccaagtctgacgatgtctacctcaagctcctcgtcaagctctaccgtttcttggtcaggaggaccaagagcaatttcaacgctgtcattctca

SEQ ID NO: 24103 - DNA, 208 bp, Zea mays
gaagtttcggtcttattaccttggcacacataatggcaggaggctaacatggcaaacaaacatggggacggctgacatcaaagtaacatttggaaatggaagcaagcatgaattgaacgtatcaccataccagatgtgtgtcctcatgctgtttaactcagcagatgtcttgacttaccgtgaaattgagcagtctacagcaatacgg

SEQ ID NO: 24104 - DNA, 208 bp, Zea mays
gagtgatattcctgacatcgacaagaaaaagtacctcgtccctgcagatcttacagtcgggcagttcgtgtatgttgttaggaagagaatcaagctcagtgctgagaaggctatcttcatatttgtgaaaaacacccttccaccaacagctgctctgatgtcttcaatctatgaagagaacaaggacgaggatgggttcctctacatg

SEQ ID NO: 24105 - DNA, 212 bp, Zea mays
gaaggagatgcggattcttatggtcggtctcgacgccgccggtaaaaccaccatcctctacaagctcaagctcggcgagatcgtcacaaccatccccaccatcggtttcaatgttgaaactgttgagtacaagaacattagcttcacggtctgggatgtcgggggtcaggacaagatcagacctctctggaggcattacttccagaacacac

SEQ ID NO: 24106 - DNA, 253 bp, Zea mays
aaacacgcgtccgcggacggtgggtttttgtaggctaagtttgcgctggataacctcgaggtccctgttgggtgtgtgattgacggaggacggaaaagtgatttcctctgggagcaacaagacgaatgccactcggaatgctaccagacatgctgagatggaagctattgacgtcctgcttcgggagtggcagagcatgggtcttgatcagccacaggtcgcggagaaatttgcaggatgcgacctttatgtc

SEQ ID NO: 24107 - DNA, 245 bp, Zea mays
gttggtgggttcatttcggaagccatacagggggttggtggaatagtggaactggcaccaggatacttgcccgtggcatacagtatggtaaggaaagccggtgggctctgcatcgctgacgaagttcaggcaggagtcgcgcgaactgggagccacttctggggattcgaagggcatggtgtcatcccggacatagtcaccatggccaagggtatcgggattggcatacccataggagctgtcgt

SEQ ID NO: 24108 - DNA, 242 bp, Zea mays
tgatactgttatgtctgaggttgaaagattgttgtcttcggaacagaaggctacagattatcgaacaccagatgatggagctgcaccagatcatcggccaactaatgcttgtataagaattgtagcctatctctctcgtgttcttgaggttgcattcagtgcccttgaaggcctcaacaaacagtcctttttgactgagctgggaaatcgcttgcataaggggctgcttaatcattggcaga

SEQ ID NO: 24109 - DNA, 200 bp, Zea mays
gggtgatatggttcttgcttctgcctactcgcatgagttgccacgatatggtcttgaagttggtctgaccaactatgcagctgcctactgcactggccttctgttggctcgccgtgtgctcaagatccgtggtttggatcaggagtacgagggcaatgttaaggccactggtgaggacttctcggtggagccagctgatg

SEQ ID NO: 24110 - DNA, 238 bp, Zea mays
cccacgcgtccgatctggacaacaggcagcttctcatcaaatcagaccctggtgaagttgttaaacctgaccaattcaaggcgattaacgatgaggggatgccaatttaccagaggcctttcatgaaggggaagctgtacatccatttcacggtggagttccccgactcgctggcaccagagcagtgcaaggctctcgagacagtacttccaccaaggccttcatccaagctgacaga

SEQ ID NO: 24111 - DNA, 237 bp, Zea mays
cacagttcccatataggcagccatcggctacacagcctcgcctccgtaagcagagtgtgtcgttggaagagagacgacggcggccatggcgacctccttccaggggacgaccaccaagtgcaccgcctgcgacaagacggtgtaccttgtggacaagctcaccgccgacaaccgcatctaccacaaggcctgcatccgctgccaccactgcaagggcaccctcaagctcgccaacta

SEQ ID NO: 24112 - DNA, 235 bp, Zea mays
atttcaaactgaacgataactttgagaaagaaatttctccccagtttcatgacagcatcaagagacttgtaagcgacgaaacggagaaggtcaagggtttcccattggactcaacagtccctttcagagaaagattgaagatattggcagggttagttaacccagatgacatgaacctgagttctgcggagaggaagcttgttcaggcttacaatgaaaagccagtcctctcaag

SEQ ID NO: 24113 - DNA, 234 bp, Zea mays
agaagctatccatgtcataagttgtggctacgaggacaagactgaatggggaactgagattgggtggatctatggttctgtgacggaagatattctcactgggttcaagatgcacgcacgaggctggcggtcgatctactgcatgcctaagcggccggccttcaagggatcggctcccatcaatctctcagaccgtctgaaccaggtgctccggtgggctctcggttcagtgga

SEQ ID NO: 24114 - DNA, 240 bp, Zea mays
cacttgacaggggtggagtacagggacgaccccaccatcctcgcgtgggagctgatgaacgagccccgctgcaccacggacccctccggcgacacgctgcagcgctggatggaggagatgtcggcgtacgtcaagtccatcgacaagaagcatctgctcaccgtcggcaccgaggggttctacgggccgacgagcccccaggagaagctggacgtcaatccgggcacgtggaaggacaac

SEQ ID NO: 24115 - DNA, 244 bp, Zea mays
tgaatccagtggggcaccagtccacaaactggattcaagtgtggcatcaactatcagccaccctctgttgtccctggaggtgacctggcaaaggtccagcgtgccgtgagcatgatcagcaacaacaccgccgttgccgaggtgttctcacgcatcgaccacaagtttgaccttatgtacgccaagcgcgcattcgttcactggtatgtcggtgagggtatggaagagggtgagttctcagaag

SEQ ID NO: 24116 - DNA, 237 bp, Zea mays
gaagacattgggatcaggccacccaagggagtcatattatatggcgaacctggaactggaaaaactctactcgccaaggctgttgccaattcaacatctgcgactttcttgcgtgttgtcggtagtgaacttattcaaaagtaccttggggatggtcccaagctagtcagagaattgtttagggtggctgatgaactttctccctcaatagtcttcattgatgagattgacgcagtt

SEQ ID NO: 24117 - DNA, 234 bp, Zea mays
caacaatgtccttgctgctaatgcatgccagtttaagaatgtcgttgctattgtagaccctccacgtgttggccttcaccctactgtgatcaaggcattgaggacgcatccacgtattcgacgtctagtgtacatttcctgcaaccctgacagtctagtcgccaacgggatcgagctttgcacaccaacacccgagaaacaagagaagaacaaaggcaaccgagggtggcggtc

SEQ ID NO: 24118 - DNA, 231 bp, Zea mays
cccacgcgtccgcttgctccttcaagacctgggagtggtatggttgttgctgtgaagaagcttaaaccggaaggttttcaaggacacaaggaatggctgacagaggttgattaccttggccaacttcaccacaagaatcttgttaaactcattggttattgctcagatggtgacaaccggcttctggtgtatgaatttatgcccaagggaagtttggagaaccatctcttt

SEQ ID NO: 24119 - DNA, 234 bp, Zea mays
ggtgaagatggttcccactaagcccatggtggtggagaccttttctcagtatcctcctcttggtcgatttgctgccaagaagaaatgatctatctggctggtgctgtgcttgcttgttggttacctcgtggaagcttaaaatatctcgtcttgttgacatccttgcagttgtcgcgtgaacaagtaatctatgatggcaatgtttgcctggtcatgaagtattattactttcgg

SEQ ID NO: 24120 - DNA, 238 bp, Zea mays
acacaatccgccgtgcgcacgccgtgcatcccatcaccgccgtgcagatggagtggtcgctctggtcccgagacatcgagcccgagatcgtgccactctgcagagaattggggattggaattgtggcttacagtccaattggccgtggattttttggtggaagaggagtgacacagcaagtttcttctgaatctagtctgcaaaggcatccaagatttacaacagaaagcttggagaa

SEQ ID NO: 24121 - DNA, 137 bp, Zea mays
cggcctattcctgagaagaagtggtaccttacaccttctgtcatctcattgatgggtggcctgcttcccttcggtagcatcttcattgagatgtactttgtgttcacatcattctggaactataaggtgtattatgt

SEQ ID NO: 24122 - DNA, 220 bp, Zea mays
ggagaaagctgtattatctatccagaagaacttcaggtgctggaaaaaacgtaaagaattcctgaagatgcgaaataatgttgtcaggatacaggcccgggtgcgagctcatcaagaaagaaacaagtacaaggaattgatttcaagtgtcggaatccttgagaaggtgatgatacggtggtaccataaaggtgttggtctgcgtggattcaattctggg

SEQ ID NO: 24123 - DNA, 221 bp, Zea mays
acacacgcgtccacacacgcgtccgcggacgctgggtttacaaaatctcagaagacacatcatccagccaaaacgctaaagtggagatgtatgcaacgttcggcgggcttcttatgctgctcaggggtgacccttccactgccgctagctttgagcttgatcagaggctctttctgctcatccgcaaggtgtaaaactgtggttgctgaccacttaggtgt

SEQ ID NO: 24124 - DNA, 223 bp, Zea mays
atggagatagatgaatgcgaggagacgactatgcatgatgtgaacaacatcgaggaagagatgcgcaggaagcaagctcacgctgcccaggaggcgtacgaggaggacgacgagatgccgggcggagcccagagagtgcagtgcgcgcaacagtaagcagactatcatcaaggcaattgggaggggtggtgcccttaaagcatgggagtgatctctggttttg

SEQ ID NO: 24125 - DNA, 228 bp, Zea mays
cccaaacccttttcctctttccctcgccccaagaacttcatctcatctccaggcgccccttttgcgcttgcgcaggaggagctcacggggacagtgggcggagagctcgatcgctgcaccactacttcactggaggtccgcccactcccatggaggagatcacccaacactttggagttggcgcaagagccacggccatggccacggccagcaccaccatcatcacca

SEQ ID NO: 24126 - DNA, 217 bp, Zea mays
cccacgcgtccggttcaaaagccaacccctccatcctctgcagagagactaaaagatatcgctgctggtattcaaagtagtaaatcaaacaattacaaaagatctgaaggccagaactgtggaaatttccttacggaccgtccgtcgaccaaggtgcaagcagctccaggtggcgactcttcactcggttatctttttagtggcagcaaagatggca

SEQ ID NO: 24127 - DNA, 220 bp, Zea mays
ggaatagtggaactggcaccaggatacttgcccgtggcatacagtatggtaaggaaagccggtgggctctgcatcgccgacgaagttcaggcaggagtcgcgagaactggaagccacttctggggattcgaagggcatggtgtcatcccggacatagtcaccatggccaagggtatcgggaatggcatacccataggagctgtagtaacgacgccagaga

SEQ ID NO: 24128 - DNA, 222 bp, Zea mays
gccaaagatgcagatctttgtgaagactctgacggggaagaccatcactttggaggtggagtcctcggacaccatcgacaatgtgaaggccaagatccaggacaaggagggcatccccccggaccagcagcggctcatcttcgccggcaagcagctcgaggacggtcgcacccttgccgactacaacatccagaaggagtccaccctccacctggtgctccg

SEQ ID NO: 24129 - DNA, 216 bp, Zea mays
cagtatcttgcaaatgttgccctgaaaataaatgtgaaggttgggggaaggaatactgtgcttgttgatgctttggcaaggagaatcccccttgtcagtgacatagcgactattatctttggtgctgatgtgacccatccccatcctggggaagattctagtccttccattgcagctgtggttgcttctcaagactggcctgaggttacaaagtat

SEQ ID NO: 24130 - DNA, 228 bp, Zea mays
gaaacaacgtgttgctattgccaggacccttctgagggacccatctaacttactgcttgatgaagccactagtgcgcttgatgctgagagtgaacattatgtcaagagcgtcatcacaaaagttagtcgagattcaaaggctaaaagaactgtggtaatcatagcacacaggctatctacaattcaaacagctgatagaattattgtgatggaaaatggtaatattgt

SEQ ID NO: 24131 - DNA, 212 bp, Zea mays
cgtctgccccgtcgacaagtccgtgcgctcgcacatgaacgtgcccttcaccctggccaagggcccggacttcgagaagcagttcatcgccgaggcggccaaggagggcatggtgcagctcaaggggcacaggtctgtcggcggcgtccgcgcctccatctacaatgccatgccgctcgcaggcgtcgaaaactcgtcgctttcatgaagac

SEQ ID NO: 24132 - DNA, 214 bp, Zea mays
catcagctatcgtatttacaaaagcatatggccaacattctaacacttttagcagattctattgatggcgagggagatgattctatggtattgacaatggagacttttgagcaccttggattttttttgcagctctctgaaggaactccattaagccaagcagctaccttttttgcgaattcggatccagacatgcccgctgctcctgtacctg

SEQ ID NO: 24133 - DNA, 212 bp, Zea mays
cgtccctagaaatagaagcagctcctccgcggggcggcgaactactagccatcgccaaaaccctagccccgatccggtcgatgagcactacttcttggcatggcgggcacccctagccaggcaagcctcctgctccagaagcagctcaaggatcttgcgaagaaccccgtggatgggttctccgcacggcttgtagacgatagcaacgtctt

SEQ ID NO: 24134 - DNA, 209 bp, Zea mays
aggatttccaatcacatatagatatgcgcttcacgcgggacagattggtggagcttcatttctggatgctcggagtcatacatgagccatattactcgtattcgcggatcatgatgaccaagttcttcatatttggaaactttttcgatgacctttacgacaactatggcaccacagaggagagcgatgtcttcaccgcagccatggaa

SEQ ID NO: 24135 - DNA, 214 bp, Zea mays
cgcagttcttcaagaacgcttgcccgcacgcctagagctacgcctacgacgactctacgtccaccttcacgtgcgccaccggcatcagctacgccatcacattctgcccgagcaccaccagcggcaaatactccggcgagaacccgcaggccgcgggcgtgcagcccacgaacggctcgatggtctacctcggcggcgagcaactcgccacctc

SEQ ID NO: 24136 - DNA, 216 bp, Zea mays
gtcttctgtttttgtcgcatcaacacttcttgagaacggagggaccctgaagagcgcaagtccagcttctcttctgaaggaagctatacatgttatcagctgcggctacgaagacaagaccgactggggaaaagagattggctggatttacggatcgatcacagaggatatcttgactggatttaagatgcactgccatggctggcggtctattta

SEQ ID NO: 24137 - DNA, 218 bp, Zea mays
cccacgcgtccgcgccgatgaaggaggagaccgccgacgtcgagttcatccagaagaggaacgccccctctcctgctgagccagagctaatgctaaacaaccgggtgtacacctgcaacaacgtccagtgcccgcacagtgactacagctatggattccttgaccggaatgcccgcaacagccaccagtacacctgtaagtacaacgatccgatcact

SEQ ID NO: 24138 - DNA, 222 bp, Zea mays
catcgagcagtgggtgacggagtacctggccatctactaccccaacgacggcgtgctgcaggccgacgtggagctgcaggcgtggtggaaggaggcgcgcaaagtcgggcataccgacctcaaggacgagcactggtggcccaagatgcagacggtgccggagctcgtgaaggcctgcaccaccatcatctggatcgcgtcggcgctacacgccgccgtcaa

SEQ ID NO: 24139 - DNA, 245 bp, Zea mays
catttaagccagaatcccaacttgatgagggagataatgaatatgccagcgatgcaaaatctcatgaataaccctgatttaatacgcaatatgattatgagcaacccacaaatgcgcgagatcatggatcggaatcctgatcttgcccatgtgctcaatgacccaagtgtcctccgccaaaccctcgaagctgctaggaaccctgaaatcatgagagagatgatgcggaacacagacagagctat

SEQ ID NO: 24140 - DNA, 237 bp, Zea mays
ctcttccaacagctacgccatcaagaagagcccttggcagcgttgatcaactcatctgcaaggcactcagcaatggttttgatgttcctgaaagcgctctccctggcaccagtggtgaggaggtagatggcctggttcacccttctcaggggtgagatatccacagcctgccttctcacaacaccagcagaaccaatacgggtggcatcctcacgtggtccactgttgataatggcg

SEQ ID NO: 24141 - DNA, 234 bp, Zea mays
cccacgcgtccgcgccggggacggggaagacgacaacgtgctcgctccttgccgacgccgcagctccgccacgtcaacatcggcgacctcgtccgcgagaagagcctccacgacggctgggacgccgacctcgagtgccatgtcatcaacgaggacctggtgtgcgacgagcttgaggacatgatggaagaaggtggcatactagtagattaccacggatgtgatttctttcca

SEQ ID NO: 24142 - DNA, 230 bp, Zea mays
  unsure (1)..(230): unsure at all n locations
cggacggtnggcgagacgcgtgggcggacgcgtgggcggacgcgtgggcggaccgtgggtcgacagcgcgtcggttgtccaaaagttacttgagcatggaagcactacccagataaaggaattggctggtcagcttattggacgtgtccttgctcttagtcttcagatgtatgggtgccgggttatacagaaggctatagaagttgttgatttggatctgcagactaaaa

SEQ ID NO: 24143 - DNA, 234 bp, Zea mays
ctgcaaatctcctctcatacttctccaccggatccctgtaagattcccggagatgtcggacgaggagcaccagttcgagtccaaggccgacgccggcgcctccaagacctacccgcagcaggccggcaccatccgcaagaacggctacatcgtcatcaagggacgtccctgcaaggttgttgaggtctccacttccaagactgggaagcatggccatgccaagtgccactttgt

SEQ ID NO: 24144 - DNA, 241 bp, Zea mays
gccacttgctgctgtgaagtactcccgtgggacgttcatctttcctggtgcacagccagccccccacaggagcttctctgaggaagttgctgcacttaaccgctactttggcggcctgaaatctggtggtaatgcttatgtgattggagatccagcaagacctggacagaagtggcacgtcttctacgccactgagtacccagagcaaccaatggttaaccttgagatgtgcatgactggt

SEQ ID NO: 24145 - DNA, 230 bp, Zea mays
ctcatggcgccgccgcagccaaagtcgggccttttcgttggcatcaacaagggtcatgtcgtcaccaagcgcgagctgcctccccgcccgtgccaccgcaaggggaaatcaacgaagagggtgtctatggtcaggggcctgatcagagaggttgctgggtttgctccttatgagaagcgtatcactgagcttctgaaggttggcaaggacaagcgtgccctgaagcttgc

SEQ ID NO: 24146 - DNA, 226 bp, Zea mays
gacaagcttctactttggttacaccttgatgttctgtcttggattgggaatactttgcggtgctgttggatatttgggctccaccctatttgtgaggaggatctacagaaatatcaaatgcgactaaacttggtctaggctgctagcatgtcttgtcacaatatggtgcagagtaataccttgagcttctgattgacttcggaaattacacaggaggttgctctcc

SEQ ID NO: 24147 - DNA, 241 bp, Zea mays
atattatgtatgatataatctataaggccatgatagatgtaggactagatggtacatatgatccacaggtttacctgatttttttctgccttggtaaccgtgatgccgaggacactacttgctcatctagtggaccattctcaaccagtaacccacagataaatacaattatgctgcagcttggatatccaatcaggaccaagctcggtataataggagattcatggtgtatgtgcactcg

SEQ ID NO: 24148 - DNA, 242 bp, Zea mays
cccacgcgtccgcctgcctctcctcctccagagctcgtcgccaccggccaccgccaccctcgatcacgccgtccgtcgaggtaaggtcagcatggtgagggtcagtgtgctcaacgatgcgctcaagtccatgtacaacgctgagaagatcggcaagaggcaggtcatgatcaggccgtcgtccaaggtcatcatcaagttcctgacggtcatgcagcgccacggctacattggagagttcg

SEQ ID NO: 24149 - DNA, 238 bp, Zea mays
cccacgcgtccgggccacggcaccatcgtcttcgtcgccaactcatggatctacccgcagtccaagtaccgctacaaccgcgtcttcttctccaacgacacgtacctccccagccagatgccggcggcgctgaagccctaccgcgacgacgagctccggaacctgaggggcgacgaccagcagggcccgtaccaggagcacgaccgcgtctaccgctacgacgtctacaacgacctcg

SEQ ID NO: 24150 - DNA, 236 bp, Zea mays
cccacgcgtccgccggaactcaagacgttctaaaggagttgggattgcacactgaaatttaataatttggtctacctgctgggattatcggcaatttacaagtacattgagttttacgacgttatgtctgttccaatggcaattgctctgtctggtcaaccgctgcttggacaagcagtgatggttaaaccatctgaggctgaaaagaacttagttcagtcaaatgcgacatcagg

SEQ ID NO: 24151 - DNA, 235 bp, Zea mays
ccacgtcctcctccggctactcgctcgttccgccccggcgtcccgccctcagccgccgccgtcgccccctccctcggttcgcctcgtcgtcgtcatgggcaaggcctccaaggacaagagggacatctactaccggaaggccaaagaggaaggctggagagctcgcagcgccttcaagctcctccagatagaccaggagttcaacatcttccatcgagtgaagcatgtggctgac

SEQ ID NO: 24152 - DNA, 235 bp, Zea mays
gtggaagtttgatacactttgtgatctttatgatacactcaccatcacccaagctgttattttctgcaatactaagagaaaggtggattggctcactgaaaaaatgcgtacaaataacttcaccgtatcagctatgcacggtgacatgccccaacaagaaagggatgccattatgggtgagttcaggtctggcgcaactcgtgtgctaataactacagatgtttgggctcgagga

SEQ ID NO: 24153 - DNA, 240 bp, Zea mays
gaaaaaatgaggagggacaagctgaatgacaggttcctggaattaagttcggttatgaatcctggaaaacaagcaaagttggataaagccaatatcttgagcgacgcagcccgtatggtggcacaacttagaggtgaggcagaaaagcttaaagaatcaaatgagaagctgcgggagaatatcaaggacctgaaggaggagaagaatgagctccgcgaagagaaagtgaggctgaaggta

SEQ ID NO: 24154 - DNA, 207 bp, Zea mays
  unsure (1)..(207): unsure at all n locations
atttcttttgctggttccgtttcggttntttcggttcgacccatgcttcctgttcctgatgcacgatgtcatgttggcggatacggtgaccaacgttatcgtgccgtctttcgatgtctagtccctgctgcccatcatctgctcgacgtacgatgccaagatcgacaccctcaagaacgcgcacctctccgatatctgcatcagcac

SEQ ID NO: 24155 - DNA, 230 bp, Zea mays
ccaacacatccaacacaatatgcgcatgctacatgttatttttcaagtacatacatagaaggatattgcttggccttgattgatcatgtctgatctaagtcgatcattattttcttgaaacttcctttcggacgtggtgctatggttgatgaatttggatgtgtgcgttctgccaggtgtaagcccaaaggtttatacagaccgagttaaggttaggaagagcacgagtg

SEQ ID NO: 24156 - DNA, 224 bp, Zea mays
ctcttccaacagctacgccatcaagaagagcccttggcagcgttgatcaactcatctgcaaggcactcagcaatggttttgatgttcctgaaagcgctctccctggcaccagtggtgaggaggtagatggcctggttcacccttctcaggggtgagatatccacagcctgccttctcacaacaccagcagaaccaatacgggtggcatcctcacgtggtccact

SEQ ID NO: 24157 - DNA, 230 bp, Zea mays
ggacacgcgcggtctgcatcctttcagcaaacggcgccatatcaaatgtgacgcttcggcaatctgccacttcgggtggaacggtgacatacgagggtcgtttcgagatactgtctctgtccgggtcgtttcttctgtcagagaacggtggccagcgcagtcgaactggtgggctcagcgtttcgctagcaggccccgacggccgtgtcctgggtggctgtgttgccgga

SEQ ID NO: 24158 - DNA, 233 bp, Zea mays
ggcttctgaagagggcccaagctgagaatgaaggaaaaactgttgagtcgaagaaaccaattgttgtgaagtatggccttaaccatgtgacttacctcattgagcagaacaaggctcagcttgttgtcatcgctcatgacgtggatccgattgaactggttgtgtggcttccagccctgtgcaggaagatggaggtcccttactgcattgttaaaggaaaggctcgccttgga

SEQ ID NO: 24159 - DNA, 254 bp, Zea mays
agccgctccactacaagggctccaccttccaccgcgtcatccccgagttcatgtgccagggcggcgacttcacccgcggcaacggcaccggcggcgagtccatctacggcgagaagttccccgacgagaagttcgtgcgcaagacaccgcccccggtgtgctctccatggccaacgccgggcccaacaccaacggctcccagttcttcatctgcaccgtcgcgaccccttggctcgacggcaagcacgtcgtct

SEQ ID NO: 24160 - DNA, 250 bp, Zea mays
gcggccaaggagagcccgcaagaggcgactatgagggccaagtggaagaagaagcgcatgaggaggctgaagaggaagcgccgaaagatgaggcagagatccaagtaggctgatggggattgtggatggtggtgtcggcatagttgtgttacgtttcttcgatgcgtgagttcatggagagatgtcacatcctagttcgtcgtcaccgtttgccatgggtccaatggctcgtcttggaaacctgcacttc

SEQ ID NO: 24161 - DNA, 250 bp, Zea mays
gccgcatgaaggtcttcgaggacaacttcgtacaggagcgcaagaaggtgatggctcagactggtgagatccggtgcgccatggatcacatcctcgaggccgagaggaagggcgagatcaaccacgacaacgtcctctacatcgtcgagaacatcaacgtcgcagcgatcgagacgacgctgtggtcgatcgagtggggcatcgccgagctggtgaaccacccggccatccagcacaagctccgggagga

SEQ ID NO: 24162 - DNA, 247 bp, Zea mays
cccacggtccgatcatgctttgtggtatggttcggatgtggctgttaaagttttctccaagcaagaatattcagaagaagtgatactgacctttcgacaagaggtatcccttatgaagaaattgcgccatcctaacatactgctcttcatgggtgcggttatgtctccacaacgcctttgtattgtatcagagtttctcccccgtggaagcttgtttcgcttacttcaaaggagcgctaccaagttg

SEQ ID NO: 24163 - DNA, 247 bp, Zea mays
cccacgcgtccgatgcgtccgtggtattcgcctattacaaggatggtgccactaatccgacattcctctatttctctcatggtcttaaggagatcaagtgctaggcttgcggcgagattagttacccatgttgggtactatctatgtactattgttatatccacaactatagttgtcctggttgaattgaactcaaaagggtttgtttgagaaaaaactgtccaagattggattgcttgttaaagct

SEQ ID NO: 24164 - DNA, 245 bp, Zea mays
gaccagtacagcctcgcctcccgcgacggcaaggtctgcctcgtgcgcacggaccgtgatgacgacgcgcacactggatcaaggacatgaagtacagcaccagggtgaaggatgaggaaggctaccctgccatcgtcctcgtcaacaaagccactggagaggctctcaagcattcccttggccagtcacaccctgttcttctgacccgccataatccagactccctggacgagtctgtcctgtgg

SEQ ID NO: 24165 - DNA, 240 bp, Zea mays
cgacgtcgtcataactggcgcctctatgagtcggcggactgctgccgctgcggcgtccaacaacctggtggtgtcgttcggcgagatgctgatcgacttcgtccccgacgtggccgtgctgtcgctggccgagtcgggcggcttcgtcaaggcacccggcggcgcgcccgccaacgtcgcctgcgccatcgccaagctcggcggatcctccgccttcgtaggcaagttcggcgacgacga

SEQ ID NO: 24166 - DNA, 249 bp, Zea mays
  unsure (1)..(249): unsure at all n locations
ccacggtccgcccaaggcgaggagcggagcnagaggagggcccttctgcttgttacaccgctttgcaagatgtcgtccccgagcaagcgccgcgagatggaccttatgaagctgatgatgagcgactacaaggtggagatggtgaacgacgggatgcaggaattcttcgtcgaattcaagggcccggccgaaagtatctaccaaggtggtgtctggaaggttcgggtagaactgcctgatgcataccct

SEQ ID NO: 24167 - DNA, 249 bp, Zea mays
ccatgccacagtgaagacttccactggggagaagcctgttcgtgagcttgttgctgatgatgagtggctcaatggcgaattcatcacaactgtccaacagcgtggtgctgcaatcatcaaagcgagaaagttctccagcgctctctcagctgctagctctgcttgtgaccatattcgtgattgggttcttggaacccctgaggggacatttgtttccatgggtgtgtattccgatggttcatatggtgt

SEQ ID NO: 24168 - DNA, 252 bp, Zea mays
atacatatctcctagaaagcaagcagcgtcgagtttctccaggtccgaatcagtgatccgatcgcaagaagcaagcaacaatgtcgccggcgcgcacagcagcagcaacgtcttcgacccgctgtcgctggacttctgggcgtcgttcgccgacccgttcggcgtcgtccggccgctggcggagcagtgccccgtcctcaccaacgtgcgcgtcgactggacagagaccccgatgcgcacgtgttcagggcc

SEQ ID NO: 24169 - DNA, 254 bp, Zea mays
acaaccctcaaggccaagcaagctaatactctgtactggtctcctgctgggcgcttcatagttcttgctggactgaagggtttcaacgggcagctggaattctacaatgttgatgaactagagacaatggcaacaggagagcattttatggcaacagatatcatgtgggatccaactgggagatatctcgcgactgcagttacctcagttcatgaaatggagaatggctttcaaatatggtccttcagtggcaa

SEQ ID NO: 24170 - DNA, 252 bp, Zea mays
gaaaaaatcccaaaaatcaccacttgattggagatggcggcgcaagggcaggcggcggctggatccgcgtccgagtctggcggctcaccggctgcctcagctgctgcagcggcggcggctgcgttcccggcgacttctctctacgtgggtgacctgcacgagagcgttcaggacgcacagctcttcgacgtcttcagccaggtcggcggcgtcgtctccgtgcgcgtctgcagagacatcaactcccgcaag

SEQ ID NO: 24171 - DNA, 241 bp, Zea mays
caacagcaactatcggaaagaagcaaaatactgtgtcaagggagcatgaggatgttgaacttttggcaagggggcgccatgacccctgtgttgtccctcgagctgttcctatggtggaatccatggctgcgctggtcctgatggaccactcatggcgcatattgcccagtgtgagatgtttccgctgaaccttgccctacaagagcccattggctctgctagcagtgcatctgaactgtca

SEQ ID NO: 24172 - DNA, 246 bp, Zea mays
aaactccagcgtctctgggtactggattgcatttcagataagggtttgcaagtggtggcctccagttgcaaggacctacaagaactcagggtgtttccatcagaattttatgttcctggtgcttctgcagtgacagaggagggacttgttgcaatatcgtcaggctgcccaaaactgacctctttgctgtatttctgtcaccagatgaccaatgaagcgctaattactgtagctaataactgccca

SEQ ID NO: 24173 - DNA, 246 bp, Zea mays
cccacgcgtccgcccacgcgtccgcatacatctggcacagcaaggctagcaaccccttcgttaacttgaagaaggaatacaagggcatcttctggcaggaggacatcatccccttcttccagaacgtgaccattcccaaggattgcgacaccgtccagaagtgctacatctacctctctggacaggtgaaggagaagcttggcaagatcgacccctactttgccaagctcggtgacgccatggtca

SEQ ID NO: 24174 - DNA, 242 bp, Zea mays
ccacggtccggatgtacacgacgacctggatgtgttccttcataccgagacccagggaaacaaatatttggttgtgagcattacaaaagaaactgcaagcttgttgctgcatgctgcaataagctattcacttgcagattctgtcatgataaagttagtgaccatacaatggacaagtatcttcactacaaccattcattttatcgtccacacctttcctgctgagggatgctttcaaggat

SEQ ID NO: 24175 - DNA, 241 bp, Zea mays
cccacgcgtccgcccacgcgtccggtgccctcactgtgccagagctgacccagcagatgtgggactccaagaacatgatgtgtgctgctgaccctcgccacggtcgctacctcacggcatctgctatgttccgtgggaagatgagcaccaaggaagtggatgagcaaatgctgaacgtgcagaacaagaactcttcctactttgtggagtggatccctaacaatgtgaagtcgagtgtgtg

SEQ ID NO: 24176 - DNA, 243 bp, Zea mays
tcctctgtggctgtgcctcaccggctgtacaagctgccggtgaagacgatggtgtacccggagcctgggttcgagcaccagcacaggcagggcgacacgagctacgcacagatgttcacggacgtgggcgtgtactacgccccggggcggtgctgaggggggaggagttcaacggcgcggaggctgtgcacaggctggagcagtggctgatcgagaaccacagctaccagccgcagtacgcgg

SEQ ID NO: 24177 - DNA, 242 bp, Zea mays
gatctcgagtgcaagcaacgttggcgcttggcggccagtagtagcagctaatttagcgtcgctccttcctactagacgagagatcgagaaaccatggccaagctccaagtcactcctggcgccgcgttcaccgagtgcaatgaactcaacttccagggcctgtacatgtaccacacgcccctgggtcccaaggccaaccaagctgcgatcctagagagcaaggccaagatcggcatcggtgc

SEQ ID NO: 24178 - DNA, 243 bp, Zea mays
aatgaacacgagcgccggcgctgcccgtccaaacccgcagactcattccactacggatcgatcaacgtcacgcagaccttcgtcctcaagaacgagcagcccctgagcatcagcgggaagcgccggaggacgatcaacagggtgtcgtactcgcctccggagacgccgctgaggctggccgacctccacaacctgaccggagtctacgcagccgacttccccgcgacgcccagcgacgacgac

SEQ ID NO: 24179 - DNA, 240 bp, Zea mays
cccacgcgtccgcccagacccagcagctattgtggtcgtccctcagccgcgtcgcaccgcatcgcattctacgattcgaagctctctctgctcgcagccatggcgaagaattacccaaccgtgagcgccgagtacagcgaggccgtcgagaaggccaggcgcaactccgcgccctcatcgccgagaagagctgcgcgcccctcatgctccgcctcgcgtggcactccgcggggacgttcg

SEQ ID NO: 24180 - DNA, 242 bp, Zea mays
acccacgcgtccgcttttggtcgaccctatggatgaattggctatccagaatctgagctcctacaaggataagaaatttgtggacattagcaaggaagatttggatttaggtgataacaatgaggaaagagagaaggagataaagcaggagttcagccaagcctgtgactggataaagaatcgcttgggtgacaaggttgcacgtgttgacatatctaatcgtctcaggtcatcgccatgtg

SEQ ID NO: 24181 - DNA, 238 bp, Zea mays
gatctctctccctcttaaaccctctcaacaagtgcgggaggatgtcagagccgtccaaggtaatccacatccgcaacgtcgggcacgagattgccgagtctgatctccttcagctgctgcagccgttcggcatggtctccaagatcgtcatgttgcgtgccaagaaccaagctcttctgcagatggaagacctccatgcttccgtgagcgcgctgcaatattacacttctgttcaacc

SEQ ID NO: 24182 - DNA, 223 bp, Zea mays
gcgtcgcgtcgcatcctacgatccaaagctctctctgctcgcagccatggcgaagaactacccgaccgtgagcgccgagtacagcgaggctgtggagaaggccaggcgcaagctccgagccctcatcgccgagaagagctgcgccccgctcatgctccgcctcgcgtggcactccgcggggacgttcgacgtgtcgtcgaggaccggcggtccattcggcacg

SEQ ID NO: 24183 - DNA, 238 bp, Zea mays
ctcgagccctcgcccgctcagtcacaaagcctcagatctcagtcgcctgcgccgccgcttcgttcgtgtggaggggagaagacaggaaatggcggcgactgagggcgtgctcttggggatgggcaaccccctcctcgacatctccgccgtcgtcgatgacgccttcctgacaaagtatgacatcaagctgaacaatgctattctcgctgaggagaagcacttgcctatgtatgacgag

SEQ ID NO: 24184 - DNA, 230 bp, Zea mays
cccacgcgtccgcttcgttcgtctcgtttgttgttgcccatctgtgtttttgattgcaaggtcgctctgtgtcagttgttagtgctgtgttcatcctcggctccagcagacccatgcatcaaccagcatggactgtggatcgatggatgctgttactcctgtcaggatttgttctaagttaatcctaaggaaaaaatggtgcttcttggtgctgcaaaatggttgtgctc

SEQ ID NO: 24185 - DNA, 233 bp, Zea mays
ccaagacccactgaaccctcgccgtttcgtcgcacccaccaacacgagagatgagctccggcggcgcggacaagcccggcagtggcggcggcgcggtgaagacgccgtcggacttcctcaagtccatcaggggccgccccgtagtcgtaaagctcaactccggcgtcgactacagaggtatattggcttgtctggatggttatatgaacatcgcaatggagcagaccgaggag

SEQ ID NO: 24186 - DNA, 220 bp, Zea mays
caaggctggttaggcccaaaaattgtggacatatttgctgactatgctgatttttgtttcaagacttttggcaatcgagtcaagaactggttcacattaaatgagccaaggatagtagcattccttggttatgataaagggcttaacccccctaaccggtgcacacaatgcactgccggtgggaactcatcgacagaaccttacattgttgttcataaca

SEQ ID NO: 24187 - DNA, 233 bp, Zea mays
cggacgcgtgggcggacgcgtgggcactcgcgtcgacgactgggctaccggcgcctccaccctccgcctggagtccttcgccgtcgacgagcgcacaccagggtacagtacgtattgctcgtgatttgtgtaactacggagcaagctgcatacagcacaagatagaagatgggtatccttgagaggatcaaggagattgaggccgagatggctcggactcagaaaaataaagc

SEQ ID NO: 24188 - DNA, 190 bp, Zea mays
ggctgctgaagagcgtgctgcagctgccaaggcttctggcaagaagaaagaatctgggaagtcatcagttttacttgatgtgaagccatgggacgatgagactgacatggccaagctcgaggaagctgttaggagtgtccagatggaagggttgctctggggcgcatccaagctttgtccagttggatag

SEQ ID NO: 24189 - DNA, 197 bp, Zea mays
atgaaaatcggtacggttttgttcattttaaggaacggtccatggttatgaaggctctgaagaacactgagagatatgaacttgatggtcagctgttggattgttcacctgcgaaacctcctgctgataagaaggatgatactggatcatctcctactgcaaaaggacgtccattacccccaagttatgccccactt

SEQ ID NO: 24190 - DNA, 232 bp, Zea mays
cggacgcgtgggaaaccctagcccttgcgccgccgcctcctccgccacccagcgctcgagctcctcgcgtcatgcgagcgcgcgccgcaacgccaccatgaagttcaacatcgcgaacccttccaccgggtgccaaaagaagctggaaatcgatgacgaccagaagctgcgtgccttttatgaccgaagatatcccaggaggtcagtggtgatgctctgggtgaggagttca

SEQ ID NO: 24191 - DNA, 216 bp, Zea mays
ctgcaagtatcacgggtgatattattcttgctgctgcatattcccgtgagctgccacgatacggtctagaagttggtctgaccaactatgctgcagcctactgcactggtcttcttttggctcgtcgtgttctcaagatccgtgatttggatcaggagtatgagggcaatgttgaggccactggtgaggacttctctgtcgatccagcggaagaga

SEQ ID NO: 24192 - DNA, 229 bp, Zea mays
caagatccaggacaaggagggcatccccccggaccagcagcggctcatcttcgccggcaagcagctcgaggacggtcgcaccctcgccgactacaacattcagaaggagtccaccctccacctggtgctccgcctccgcggtggcgccaagaagcgtaagaagaagacgtacaccaagcccaagaagatcaagcacaagcacaagaaggtgaagctctccgtgctgcag

SEQ ID NO: 24193 - DNA, 218 bp, Zea mays
cccacgcgtccgaaatactccaaggcccttgagtccttttatgagaagtttgatccagatttcattgatattaggacaaaagcacgtgaggtgttgcagagggaggacgatctaaatgaaattgtgcagcttgttggtaaagatgcgctggcagaatctgacaagattacactggagacagcaaagctactgagagaagattatttggcacaaaatgc

SEQ ID NO: 24194 - DNA, 215 bp, Zea mays
cttgctcagcaaagtcgggttggggaggctggttgccaaaactgaggatgagtatgtgagcatagcgttggattttggcatcagatgtgaatgccttgcaagaactgaggatgaccctgagggagctgatgatgaagtcgcccgtctgcgagggagagagattcacccggggcctggaagctgcatacatggacatgtggcgcaggtattgtgac

SEQ ID NO: 24195 - DNA, 210 bp, Zea mays
gtgtctctcaactacgcgctgttctcgccagagtcccaggatgtgattgacccaaacactggactggtttacactaacatgttcgacgcccaggtcgattccatcttctttgcgctcatggctctgaacttcaagactttgaagatcatgatcactgagtcagggtggccaaacaaaggggcggtcaaggagactggagccattccagac

SEQ ID NO: 24196 - DNA, 257 bp, Zea mays
ctccgacccccttcctctctccctccgccgccgctgcgcacgcagggaacaagcgacatgggcgtctacacctttgtgtgccgcaacaacggcggcgagtggaccgccaagcagcactccggcgagatcgaggcttccgccgctaccccatatgagctgcagcgccgcctcgtcgctgccgcctccgcggccgactctgcctacggcgtccagtcgtccttctccatggtcacccccagctccgccgtgttccaggt

SEQ ID NO: 24197 - DNA, 258 bp, Zea mays
gtggccatcgacggcaaggacatccggacgctgaacctgaagtcattgcggctcaagatcggcctcgtgcagcaggagccggtcctcttcgcatcgagcatcctagacaacattgcgtacggcaaggaaggcgcgagcgaggaggaggtggtggaggcggcgaagacggcgaacgtgcacggcttcgtcagccagctgcccgaaggctacaggacggcggtcggcgagcaggggatgcagctgtcaggcgggcagaag

SEQ ID NO: 24198 - DNA, 256 bp, Zea mays
attttcagaccaatctctactggacatagttggttgtaaggaacatcggttactagcgcgtgaggctgttcgcaagtctttggtacttctgaaaaatggcaaggatcagaataagccattccttccattggccaaagatgcaaaaagaatactggttgcaggaacacatgctgatgatattggatatcaatgtggtggctggacgatagcatggcatggagacagtggaaaaataactcttggtacgagcatattg

SEQ ID NO: 24199 - DNA, 257 bp, Zea mays
aacgaaagccctgtttatctcctattaaatcctacaatcaacctctcccaaaaagatctccctgtgactatctatgagagtgagttgcatgtcatcgatgggattcctcagctcatcttcgtcagatcaaattatacaattgaggtaagtgtccccccttgtgtttgtctagctatatatgatttttttaacattagtatgcttgatcaaagactgtagaggctgagaggatatctgtggaccatgttgcccatctc

SEQ ID NO: 24200 - DNA, 258 bp, Zea mays
ctacaacaagttttacgaggctttctccaagaacctcaagcttggcatccacgaggactcgcagaacaggaccaagatcgccgagcttctgagataccactccaccaagagtggtgatgagctgaccagcctcaaggactacgtgaccaggatgaaggagggacagaatgacatatactatatcactggtgagagcaagaaggcagtggagaactcccccttccttgagaagctgaagaagaggggctatgaggttct

SEQ ID NO: 24201 - DNA, 260 bp, Zea mays
ggtgaggtcaagcaggcagagtctgcacctcctattccgaaaaaggctgctccttctaaggagccaaaggcaaaggatgtcaagaaggaggctccaaaggaggcccccaagccaaaggtggttgaggcaccagcagaagaggaagcaccaaagccaaagccaaagaatcctcttgacttgctgccaccaagcaagatggtccttgatgactggaagaggctatactcaaacacaaagactaacttccgggaggttgccat

SEQ ID NO: 24202 - DNA, 255 bp, Zea mays
cccacgcgtccgctgatggctgcagatatttcgcaaggagccattcttttatggccatgacaaccatgaccaacttgtgaagattgcaaaggtccttggaacagatgggctgaattcttatttgaacaagtaccacattgagctggaccctcaacttgaagctcttgttggaaggcatagtagaaaaccctggttgaagttcatgaatggtgataaccaacatctagtatcacctgaggccatagattttctcga

SEQ ID NO: 24203 - DNA, 255 bp, Zea mays
cccacgcgtccgcccacgcgtccggccaataaggtaaggggtgacgaaaatggctccaacgaccgccaccaaggacgacagtggctacggcgacgagcgccggcgcgagctgcaggcgttcgacgacacgaagctgggggtgaaaggtctggtggactccggcgtcaagtccatcccgtccatcttccaccacccgccggaagccctgagcgacataatttctccggcgcctctgccgtcgtcgccaacctccgg

SEQ ID NO: 24204 - DNA, 225 bp, Zea mays
cttgcttactatgtaactgccccatcaagtttggctgatgtccttgcaaatccattccatgcactgttttatgtggtcttcatgctgtcagcttgcgctctgttctcaaaaacgtggattgaagtttctggttcatcagcaaaggatgttgctaagcagctcaaggaacaacaaatggtgatgccaggacatcgtgagtcaaacttgcagaaggaactgaacgat

SEQ ID NO: 24205 - DNA, 252 bp, Zea mays
gaatgttaatggctggcacacatacttttggattgctttccttccccttattcttctgttagccattggcactaagctggagcatgtcatagctcagctagcccatgatgtagctgagaagcacacagcggtcgagggcgatgtgatcgtaaaaccatcagatgaacacttctggttcggcaagcctagggttatcctttacctgatccacttcatcctctttcagaatgcgtttgagattgcgtttttctt

SEQ ID NO: 24206 - DNA, 235 bp, Zea mays
atgcagtacttggagagaagagagtgtgagtacgaccagaagatatccattgatttctacaaggaaggagatcccttgaaaccagctgtgacaggcgtcttagtgttcgtttccactccagatccaattggcaacaagtactatcttggccctgctcctttgcaggatatggcaatgcaaattgctacagccaatggccctactggctataatagggattacctgttctcaatgg

SEQ ID NO: 24207 - DNA, 253 bp, Zea mays
ctccagcagaacaagatcctcaaggtcatccgcaagaatcttgtcaagaagtgcgttgagctgttttttgagattgcggagaacaaggaggactacaacaagttctatgaggccttctccaagaacctcaagcttggcatccacgaggactccacgaacaggaccaagattgctgagctcctgaggtaccactcgaccaagagcggggatgagctgaccagcctcaaggattatgtgaccaggatgaaggagg

SEQ ID NO: 24208 - DNA, 254 bp, Zea mays
cccacgcgtccgcccacgcgtccgcccacgcgtccgcccacgcgtccgatggggggttttgtcaagacccacaagagcaatgcatacttcaagcgtttccaggtgaagttcaagagaaggcgcgctggcaagacagactacagggccaggataaggctgattaaccaagacaaaaacaagtacaatacacccaaatacagatttgttgtgcgatttaccaacaaggacatcacagcacaaatcatatctgctag

SEQ ID NO: 24209 - DNA, 254 bp, Zea mays
gtggcggcgtccggcagcccctggtacggccccgaccgcgtcaagtacctcggccccttctccggcgagcccccgagctacctcaccggcgagttccccggcgactacggctgggacaccgccgggctgtccgccgaccccgagaccttcgccaagaaccgcgagctggaggtgatccactcccgctgggccatgctcggcgcgctcggctgcgtcttccccgagctgctctcccgcaacggcgtcaagttcgg

SEQ ID NO: 24210 - DNA, 254 bp, Zea mays
ctttgatgcgttttctgaaggctagagaatggagtgtgcctaaagcttataaaatgctaatggattgcttaaactggagagtacagaatgagattgacatcgtgttagctaaacccattctgccatctgatatatatagagttattcgggacacgttacttgttggattgacagggtactccaagcagggacaacctgtttatgcatttggtgtgggtcttagtactttcgacaaggcctcggtgaactactat

SEQ ID NO: 24211 - DNA, 254 bp, Zea mays
gattcttcagcgtctcgcttgccggccccgaatcgcagtcgccgcccggatccgaggaaacaagtcgtcgtcttgctccaccgtccgcccgccgccatgagcttcatcttcggcaagaagaagactcctgctgagctgctgcgggagaacaagcggatgctggacaagtccatccgggagattgagagggagaggcagggcctgcagacccaggagaagaagctcatcaacgagatcaagaaggtggccaagca

SEQ ID NO: 24212 - DNA, 250 bp, Zea mays
cgtcgcttccagccgccgccgcgtccgcctcgccaagcgcacagccgccgcagcacatcgctctcttgatctcagccatggcggaggtggagcagcaacaggacacgccgaagctcttcaaccgctggaccttcgatgatgtccaggtgaacgacatctcgctgaacgactacctcgctgtgaacgcgacgaagcacgcgatgtacctgccgcacaccgcggggcgctactccaagaagcggttccgcaa

SEQ ID NO: 24213 - DNA, 171 bp, Zea mays
aagacccaacaagcctaagagggctcccagcgctttcttcgtgttcatggaggaatttcgcaaggagttcaaggagaagaaccctaagaacaagtctgtcgctgcggtggggaaagctgctggcgacaggtggaaatccctgagcgagtcggacaaggctccctatgtagc

SEQ ID NO: 24214 - DNA, 248 bp, Zea mays
ctggcatcaacccagctaggagccttggcgctgccatcatctacaacagggatcacgcctggaacgaccattggatcttctgggtcggccccttcattggcgctgccctggctgccatctaccaccaggtgatcatcagagccatcccgttcaagagcaggtcttaagctgccgtggccgtgccgagacatgccagtccgaagaacgggcgtcttcctgtgatgtcttcttgtctgcccacgcctagt

SEQ ID NO: 24215 - DNA, 248 bp, Zea mays
ctccgcttcccgctccgatcgacctgctccctccccaccaccgagcccatggcggaccagctcaccgacgaccagatcgccgagttcaaggaggccttcagcctcttcgacaaggacggggatggttgcatcacgaccaaggagctgggcactgtcatgcgctcgctggggcaaaatcctacagaggctgagctccaggacatgatcaacgaggtcgatgctgatggcaacggcaccatcgatttccc

SEQ ID NO: 24216 - DNA, 177 bp, Zea mays
caagatatgtgattttgggctagcaagggttgcatttaatgactctcataccacagttttctggacggactatgttgctactagatggtacagagctcctgagctgtgtggatctttctttagtaagtattcaccggctatcgatatgtggagcatcggttgcatttttgcggagat

SEQ ID NO: 24217 - DNA, 222 bp, Zea mays
gttccagctaaccctgaaagaaggactgaccgttttcagggatcaggagttctcttcagatcttggctgacgtacggtaaaacgtattgctgatgtctccaaacttagaaactatcaattcacacaggacgccgggcctatggcacatcctatccgtccccattcttatatcaagatggacaacttctatactgttacggtttacgagaagggtgctgaagt

SEQ ID NO: 24218 - DNA, 216 bp, Zea mays
tggccatgtcgactctggcaagtcgaccaccactggccacctgatctacaagcttggaggtattgacaagcgagtgtttgagaggttcgagaaagaggctgccgagatgaacaagcggtcattcaagtatgcgtgggtgcttgacaagctcaaggctgagcgtgagagaggtattacaattgatattgccctgtggaagttcgagaccaccaagta

SEQ ID NO: 24219 - DNA, 170 bp, Zea mays
ctcctcgcattttccttgcaaccgattgcctatccccctcccaaccaaagaccgatggcgcccaaggccgagaagaagcccgcggcgaagaagccggcggaggaggagcccgcggccgagaagacgaccgccgggaagaagcccaaggcggagaagcgggtccccgcggg

SEQ ID NO: 24220 - DNA, 206 bp, Zea mays
  unsure (1)..(206): unsure at all n locations
gtttcttccccggaagtgcttccgagaataaatttttcttatctgattgtctaaaacctataattggtgtaatggtatcgtagtggttggttgagcattgagtgactcatattttgtcaggtctatgtgttatcgttaaacttttaacggtcattctatttcaaaagttttgcattttgcanaaaaaaaaaaaaagggcggccgct

SEQ ID NO: 24221 - DNA, 216 bp, Zea mays
cgattaatgatgaggggatgccaatttaccagaggcctttcatgaaggggaagctgtacatccatttcacggtggagttccctgactcgttggcaccagagcagtgcaaggctctcgagacagtacttccaccaaggccttcatccaagctgacagacatggagatagatgaatgcgaggagacgactatgcatgatgtgaacaacatcgaggaag

SEQ ID NO: 24222 - DNA, 163 bp, Zea mays
aaaggttcggtggagtcaagtttggggaaatggagcgtgattgcctcctcgcccatgggtcagctgccaacctgcatgagcgcctcttcatgctgagtgacttctcccagatgcacatctgccagacgtgcgagcgcgtggctaatgttgtcatgaggtctgt

SEQ ID NO: 24223 - DNA, 203 bp, Zea mays
gggtattggagcagcatggcttgagtacgacaaatcttcagattcctgaggttttacacagctggagtttctgctgttacctttcctagtcttgactttctacactatactgatttcattaatgcatgtccacaaaaatgatgaatgccaaaatggctttggttgccaacatactttaccaatttgcccccttttaactacaa

SEQ ID NO: 24224 - DNA, 204 bp, Zea mays
gtccggagaactggacaagtggagttgatcttggccgccttcttgatctcttggagctagatctgatcacaacaagtgaagggctacaagctgccttggaagaacaaaggattactctagctgccgctgcggctgcagccactaattcaactgccacagaatcgtcacctgttgctggccctcaagaggatgataaaatcgaca

SEQ ID NO: 24225 - DNA, 208 bp, Zea mays
cgccaaccccgacgagggtcgcatggtgggccactactggctccgcgacccggccctcgctcccaactccttcctccggaacaagatcgagaccgcactcgacaaaatcctcgccttctcccaagatgtcatctctggaaagattctttccccatctggtcgtttcacttcaattctctctataggaatcggagggtcagctttgggc

SEQ ID NO: 24226 - DNA, 215 bp, Zea mays
cccacgcgtccggtgatttaagggactggcatgagtttccacagtggaagccccagggtttggcacgtgtcgtcccaacactggaacctgaaggagttgaccttctatcgaaaatgcttcagcttgatccttcaaacaggatatcagctttagctgcgatggagcatccctactttaacagccttgacaagtcccagttctagccgttgtactat

SEQ ID NO: 24227 - DNA, 219 bp, Zea mays
ctgttcggcgcgaacccgccggtcctctacgtgctccactacctggggaggaagccgtggctgtgcttccgggactacgactgcaactggaacgtggagatcctgcgggagttcgcgagcgacgtcgcgcacgcccgctggtggaaggtgcacaaccggatgcccaggaagctccagagctactgccttctgaggtcgagcctgaaggccgggctggag

SEQ ID NO: 24228 - DNA, 249 bp, Zea mays
cttcgggcctgcagcctccaccatccacgtgacacccgaggaaggtttcagctacgcaagctacgaagctatgaacttcgaccccagctcactggtctacagcgatgtgatcaggagggtcctggcaggcttctctccttcggacttctcggtcgcagttaccatctttggtggccgtgggttcgccaaatcatgggcgacgggtgcagacatcgattcctacatgtgcggtgatcctgtagagcaaga

SEQ ID NO: 24229 - DNA, 245 bp, Zea mays
aaagatatttgttggtgggcttccgtcaacactaacagaagacgaattcaagagtttctttgcaagatatgggactgtggtggaccaccagattatgtttgatcatgaaaccaaacgttcccgaggctttggatttatagtttttgcttctgagcaagttgtagatgatttgttagcaaatggaaatatggttgaccttgctggttcaaaggtggagatcaagaaagcagaaccaaagaaatcct

SEQ ID NO: 24230 - DNA, 242 bp, Zea mays
gcggggatgttcctcctggtggtgagttcatccaggctgcagctcttgtgagccaaccagctctttactctaaggaactgctggagcaacgtgctgctggtcctgcgatgatgcatccatctgaagcagttactaaaggtccaagatgggccgacctatttgagcctggggtgaagcatgcactgtttgttggcataggaatacagatcctgcaacagtttgctggcatcaacggcgttctc

SEQ ID NO: 24231 - DNA, 244 bp, Zea mays
ctttcaggccctgcactgcgagaagaagtaccttcgcatccaggatgatactttgactgggaacgcatcgtccgtggacatcgccaccaaggagaacatggagtctctgatatcgatcggccaggagctgctcaagaagccagtggcgagagtgaacatcgacacagggctgtacgagtcctgcgacggtgagggcacaaatgcacagtcgctagctgacttcgccaagcaactctctgcgagc

SEQ ID NO: 24232 - DNA, 245 bp, Zea mays
gagatccggtctgatgtttctgaagtagttgcagctgacgagtttgagtacaaggatccagttgatggctctgtgtccaagcaccagggcatccgatacctcttcggagatggttcacgactggtgttccgtctatccggaaccggttctgttggtgccaccatccgtgtctaattgggcaatacgagaagggttcctccaagaccggcagggattcacaggaggcccttgctccactggttgat

SEQ ID NO: 24233 - DNA, 236 bp, Zea mays
ggtgaagccgccgccgctgcagtgtccatagccaccgcagagactgagatggggggttttgtcaagacccacaagaccaatgcgtacttcaagcgtttccaggtgaagttcaagagaaggcgcgctggcaagacagactacagggccaggataaggctgattaatcaagacaaaaacaagtacaatacacccaaatacagatttgttgtgcgatttaccaacaaggatatcagagc

SEQ ID NO: 24234 - DNA, 239 bp, Zea mays
tggcttagcattaacaccattgtttatccaatcacatctgttccgcttatcgcctattgtgtgcttcctgctatctgtcttcttaccaataaatttatcattcctgagattagtaattatgctggaatgttcttcattcttctttttgcctccattttcgcaactggtatattggagctcagatggagtggtgttggcattgaagattggtggagaaatgagcagttttgggttattgt

SEQ ID NO: 24235 - DNA, 237 bp, Zea mays
ccagaaaggagggcattccaccggaccagcagcgcctgatctttgctggcaagcagctggaggatggccgtaccctcgccgactacaacatccagaaggagagcaccctccacctggtgctccgcttgcgaggtggtatgcagatctttgtgaagaccttgactggcaagaccataaccctggaggttgagagctccgacactatggacaacgtgaaggcaaagttccaggacaaag

SEQ ID NO: 24236 - DNA, 243 bp, Zea mays
cccacgcgtccgcaccgctgcttcaagaaaccaccgagagcccaaccgcacaggcaggagagagagcagggagccagggacagtagcgtggggccggggagcaaagatggaggggaaggaggaggacgtgcgcctgggcgccaacaagttctcggagcggcagcccatcggcacggcggcgcagggcgccggggccggggacgacgacaaggactacaagggaccccgccggcgccgctgttc

SEQ ID NO: 24237 - DNA, 239 bp, Zea mays
caatgcctaggtggaatatggacctgtttcctagtcatatttcttgacgcttattttttttttcgcaggccgagaaggacttgcagccttggattgctagagatgacgaacaaggtcagaagatgtggagagtcaaccagcgtatagtgaagcttatagctgagcttatgaggaaccatgacagccctgaagcgttggtgatactcgctagtgcctccgaccttctacttcgtgctacg

SEQ ID NO: 24238 - DNA, 233 bp, Zea mays
ggaggacaaggagggtagtggaagccttttggtccgcaacatcccattaagcgtcagagcggaggatcttcgagttccttttgaaaggtttggccctgttcgggatgtttacattccaaaggactattactctggggagcctcgaggatttgcctttgtagagtttgttaatccttacgatgcctctgaagcccagtatcacatgaatcgccaagttttctttggtcgggaaa

SEQ ID NO: 24239 - DNA, 224 bp, Zea mays
cggacgcgtggcgagacgcgtgggcttgtacaagcagttcgtaaatctgctggagacaaagaaaaaccattggaggaactgcatatagtcgttgatgcagggaatggtgctggtggtttttttgtggataaggtactcaaaccattaggagctgttaccactggaagtcaattccttgagcctgatggtttgtttcccaatcacattcccaaccctgaggacaa

SEQ ID NO: 24240 - DNA, 237 bp, Zea mays
cgcagtcactcccgggccgccgccgccgccgcctccgcgaaaaaccctagcaggcttcgccgctatcactccaaggggcgcgaccatggtggccacaaagaagacgaagaaatccacggacaacatcaataacaagctgcagcttgttatgaagagggcaagtaaactctcggctacaagaccgtcctcaggactctcaggaactctaagtcgaagctagtgatcatcgctaacaac

SEQ ID NO: 24241 - DNA, 236 bp, Zea mays
cactatcccaaaaccgtagcgccctcgcctgctcgccgccgccgtcgttgcgagctccccatcttcctccgtcaaccatggcgacccagatcagcaagaagaagaagttcgtcagcgacggcgtgttctacgccgagctcaatgagatgctgacgcgggagctcgcggaggacggctactccggcgtggaggtgcgcgtcacaccgatgcgcacggagatcatcatccgcgccacg

SEQ ID NO: 24242 - DNA, 236 bp, Zea mays
cccacgcgtccgcctgttcaagcctgacagagtgctcatcggtggccgggagacccccgagggcaggaaagccgtccaggctctcaaggatgtgtatgctcactgggttcccgaggacaggatcctcaccaccaacctgtggtccgctgagctctccaagcttgccgccaatgcgttcttggcacagaggatctcctctgtcaatgccatctccgctctctgcgaggcaaccggag

SEQ ID NO: 24243 - DNA, 238 bp, Zea mays
ggcgagaagggcgtgggcaagtccgggaagccgctccactacaagggctccaccttccaccgcgtcatccccgagttcatgtgccagggcggcgacttcacccgcggcaacggcaccggcggcgagtccatctacggcgagaagttccccgacgagaagttcgtgcgcaagacaccgcccccggtgtgctctccatggccaacgccgggcccaacaccaacggctcccagttcttcat

SEQ ID NO: 24244 - DNA, 239 bp, Zea mays
cccacgcgtccgggcaggacccgcagagaaggacggtaactggcggcatgataaaggaacttctcatttctttcaagagggcaactggacagaagccccagaggatcatattctacagggatggtgtcagtgagggacagttctatcaagtattgctgtacgaacttgatgccattagaaaggcctgtgcgtccctggagcccaactaccagcctccagttacttttgtcgtggtacag

SEQ ID NO: 24245 - DNA, 218 bp, Zea mays
ccacgcgtccgcgcgctgtatgtgtacgcgcagaagacgctcccgccgaagaagaagaagccggtctccaagaagaagctgaagagggaaaagctgaagcagggggtctcggcgccaggggagtgaacagacagggatgccgccgatcggcccgtcctgagcccgccccctatttacatgattgtcgaagaaaaaagatacacctgcatgagccgcgg

SEQ ID NO: 24246 - DNA, 238 bp, Zea mays
ctcctcataacctggtactactgataggtgtatccaatttatcgatccacttgcttccagttcatgggatatgtttgctgatgagaagacttttattacccctgttcagtgcaaaattttgttgaggcaatttaaggctgatacttaatatacagtgactcatgccttatctgctcaggtagcaaataagatgaacaacaactggctaccacctccatgggcacttgctgcaatggct

SEQ ID NO: 24247 - DNA, 240 bp, Zea mays
ctatctcaagatgaagggtgattactacagataccttgctgagttcaagactggagctgagagaaaggacgccgctgagaacacgatggtggcatacaaggctgcccaggacattgctctggctgagcttgctccaactcaccctattaggcttggactggcacttaacttctcagtgttctactatgagattctgaactcacctgatcgcgcctgcagtcttgcaaagcaggcttttga

SEQ ID NO: 24248 - DNA, 242 bp, Zea mays
gctggctcacttctccaggtaaggaaagtgttcgtcctcatggcgccgccgcagccgaagtcgggcctcttcgtgggcatcaacaaggggcatgtcgtcagcacgtgagagctggctgtacgctcgtgacaacggaattggagagcaacgaagagggtgtccatggtcaggggcctgatcagagaggttgctggctttgctccttatgagaagcgtatcaccgagcttctgaaggttggcaa

SEQ ID NO: 24249 - DNA, 236 bp, Zea mays
gtaaggattgtcttatttcttatttcagctacaccggcgaagatggttttgagatctctgttccgtcagagaatgcagtggatcttgcagaggccatcctagagagatcggaaggcaaggtgcggctgaccggcttgggcgcccgtgacagtctccgactggaggcaggcctgtgcctgtacggcaacgacatggagcagcacatcacgccggtggaagccggactctcatgggcg

SEQ ID NO: 24250 - DNA, 236 bp, Zea mays
gaagaaagagaccaagttttcaagccggatccacttgagaatatgtcttgaaggtggatatcatgtcttggatgagtcaacacattacagtagtgatttaaggccaactgcaaagcccctgtggaaacctagcattggcattcttgaactgggtatattgacagcacagggcctgttgccaatgaagaccaaggatgggcgtggcacaactgatgcatattgtgttgcaagtacgg

SEQ ID NO: 24251 - DNA, 233 bp, Zea mays
caaccagccagtcagaagaggaaccggggagcggcagctgcagcggccgagggcggacacgcgaggcatggatagataccaaagggtagagaagcctcggaatgacacgccaatcagccagaatgagatcagaatcactactcaggggaggatgaggaactatatcagctatgggatgtcgctgcttgaggaaaatggacatgatgagattagtatcaaggccatgggacggg

SEQ ID NO: 24252 - DNA, 200 bp, Zea mays
cccacgcgtccgcggacgcgtggggcgctgatcgtgagattcagcggacgttgatggagctccttaaccaattagatggattcgatgagctaggaaaggtaaaaatgatcatggccacaaaacgacccgaagttctggacacggcgcgcccgcgccccggacgcctagacaggaagactgaaattcgccacccaacgagc

SEQ ID NO: 24253 - DNA, 161 bp, Zea mays
caccaaccggcagctcagcgtgacgcaccccgtgcacaagctcctcctgccgcactaccgtgacaccatgaacatcaactccaacgcgcgccagatgctcgtcaacgccggcggcatcttcgagaccaccgtcttcccgcgccagtacgcgttcgagatgt

SEQ ID NO: 24254 - DNA, 231 bp, Zea mays
gtacaagctgcgagttgagaatgtttacaagtcctacaatcgtctccagagaagttggcccaccaggataccagcagggagtgtttatgagtcctaaaaccatctcaagagaagtctgtcctccaggatttgggtctggagagaaccagggcaacgacactacatggtacaaacagagcgcgtttacaagtcctacaaccatctcgagagaagtcggtccgccagggtatg

SEQ ID NO: 24255 - DNA, 223 bp, Zea mays
ctcgccgtctgccttctgcgcctccatttcggcctctgtcccttgcaagttcaatctcacctccaaccatgggtaaagagaagtcccacatcaacattgtggttattggccatgtcgactctggcaagtcgaccaccacaggacaccttatctacaagcttggaggcattgacaagcgtgtgatcgagaggttcgagaaggaggctgctgaaatgaacaagcg

SEQ ID NO: 24256 - DNA, 224 bp, Zea mays
cggacgcgtgggcagacgcgtgggcggacgcgtgggcttcgacgacaggaacctcgtcgttctttatcagaacattttcaagggacactgtcagaaccccaagtggctttcgcctgcagcgcaggaccttctcaagaggatcctccaaccgaatccgatgaagaggatcaacgtcgcggggatcagggagcacgagtggttcaagaaggactacgtgcctgctg

SEQ ID NO: 24257 - DNA, 204 bp, Zea mays
ccccgcgtccgatcggatcacacctcggcaacgggagcaagatgcccaaggggtacgcggtgacggtgctggtggtggcgctgatcttctcggcgagcttcagctggtcgtggggcgcgctgtactggaccatccccggcgagatataccccgtggaggtgcggtcggcggggcagggcgcggccgtggcgctcaacctggggc

SEQ ID NO: 24258 - DNA, 248 bp, Zea mays
cttctgggacatacacaaggtgtaactgctgttacctggcctgaacggaaaacgatatattcagcatcttgggatcattctgtgaggcagtgggatgttcaaacagtgaaagaaacatggaatatgttttgtgggaaggccttgaattgcttggactgtggaggtgagggttcttcattgattgctgctggtggctctgatcccgtgttgagggtatgggaccctcgcaaaccgggaacattagcgcc

SEQ ID NO: 24259 - DNA, 246 bp, Zea mays
cccacgcgtccgatttgctaaagatgactgaatggacagaagaaaggccactacgtgttgttactggatttggatatctaggcaataagttcttaagagagaaaggttttaagcatgttcgttttttatctgccgatggagctcttgagtcatatcctcctatgggtatggctgatgctattgtggatctcgtgagtagcggaacgaccttgcgtgagaataacctaaaagaaattgatggtggag

SEQ ID NO: 24260 - DNA, 250 bp, Zea mays
gctggctgcaggtgctcgtggccgattcggaagccttggcgcatcctctggctgaaccctgggccgagctactccgttccgttcagcagaaaggaggctactctcatgtcatagcttcatccacatcattcgggaagaatttgcttccacgtgctgcggctctccttgatgtgtcccctgttactgatgtcaccgctgtaaaggagccacacgtctttgtgaggccaatttatgctggacatgcactttg

SEQ ID NO: 24261 - DNA, 143 bp, Zea mays
cccacgcgtccgcccagccgtcgtctgctgcggactccgcctccagtttggtctgtttcttgcaagttgatcttgtggtagttcccccaactgtcaccatgcagaacgaggagggtaagactgtggacctctatgtccccagg

SEQ ID NO: 24262 - DNA, 286 bp, Zea mays
gtacgccgcagtacggtcggaattccgggtcaccacgcgtccgggacggtggccaagagtggtgatgagctgaccagcctcaaggactacgtgaccaggatgaaggagggacagaatgacatatactatatcactggtgagagcaagaaggcagtggagaactcccccttccttgagaagctgaagaagaggggctatgaggttctgtacatggttgatgccattgacgagtatgctgttggtcagctcaaggagtttgagggcaagaagcttgtctctgccacca

SEQ ID NO: 24263 - DNA, 162 bp, Zea mays
gtccgtgctcgaccgaatcttgttgagagtacttctgggagtcgggatcttcagatggtgaaaattggtctccgtgtccttacaaggcctatgccagagaggctaccacatatctacagaactctgggagagaacttcaatgagagagttttgccttcaatc

SEQ ID NO: 24264 - DNA, 246 bp, Zea mays
tgcctcgagcaggcatcgagcacgatggcaccatgcccagtgattcctcggttggcgtcgcacatgatgccttcaacacgttcttcagcgagactggttccggcaagcatgtgcccagggccatcttcgtcgaccttgagcccactgtcatcgacgaggttcgcactggctcgtaccgccagctcttccacccagagcagctcatctcggggaaggaggacgcagctaacaactttgcccgtggcc

SEQ ID NO: 24265 - DNA, 167 bp, Zea mays
gaagaaagagaccaagttttcaagccggatccacttgagaatatgtcttgaaggtggatatcatgtcttggatgagtcaacacattacagtagtgatttaaggccaactgcaaagcccctgtggaaacctagcattggcattcttgaactgggtatattgacagcac

SEQ ID NO: 24266 - DNA, 250 bp, Zea mays
ggctcacttctccaggaaagtgttcgtcctcatggcgccgccgcagccgaagtcgggcctcttcgtgggcatcaacaagggccatgtcgtcaccaagcgcgagctgcctctgcgcccgtcccaccgcaaggggaaagcaacgaagagggtgtccatggtcaggggcctgatcagagaggttgctggctttgctccttatgagaagcgtatcaccgagcttctgaaggttggcaaggacaagcgcgctctg

SEQ ID NO: 24267 - DNA, 249 bp, Zea mays
gcagtcatcactttctgatgttaacaagttggtcaaggagatccggtctgatgtttctgaagtagttgcagctgacgagtttgagtacaaggatcctgttgatggctctgtgtccaagcaccagggcatccgatacctctttggagatggttcacgactggtgttccgcctctctggaaccggttctgttggtgccaccatccgtgtctacatcgagcagtacgagagggactcctctaagaccggcag

SEQ ID NO: 24268 - DNA, 240 bp, Zea mays; identical to SEQ ID NO: 22988

SEQ ID NO: 24269 - DNA, 239 bp, Zea mays
agtttccaactgagacactcaaggattatgaggagtggactattgatctggggaagctgcaccttgggatgccctttgcacaaggtgcctttgggaagctctacaggggaacatataatgggatggatgttgctattaagcttttggagcgacctgaggctgaccctgagaaagctcaactgttagagcagcagtttgtccaagaagttatgatgcttgcaacactgaggcacccgaat

SEQ ID NO: 24270 - DNA, 241 bp, Zea mays
attctgcagcgccactcgctcctcgccgcgcccccttcgctcagcggcgacgcctcgggcgttcctaccctgccccctctccggacccccacgccgtcggcgaagcagccgggcaagagcccgatccagaccccgcgagcaatccttgatatacctgatggctatgattgatgagcctctgtacccaattgctgtactgattgatgacttaagaatgaggacatccagttgcgtctaaact

SEQ ID NO: 24271 - DNA, 235 bp, Zea mays
ggtgaagccgccgccgctgcagtgtccatagccaccgcaggagactgagatggggggttttgtcaagacccacaagaccaatgcgtacttcaagcgtttccaggtgaagttcaagagaaggcgcgctggcaagacagactacagggccaggataaggctgattaaccaagacaaaaacaagtacaatacacccaaatacagatttgttgtgcgatttaccaacaaggacatcaca

SEQ ID NO: 24272 - DNA, 215 bp, Zea mays
cccacgcgtccgcagaaactgtgatccagagggtcctcttatgctgtatgtttcaaagatgattcctgcatctgacaagggcaggttctttgccttcggtcgtgtcttctcagggaaggttgctactggtatgaaggctcggatcatgggtcccaactatgtccccgggcagaagaaggatctgtatgtcaagagtgtccagcgtactgttatct

SEQ ID NO: 24273 - DNA, 230 bp, Zea mays
cactattcctttctgctgagctcaggaaatcccctctggtctccccgtcccccattccacccgccgccgccgacgcgccgcgcctgttcaagatgaatgtggagaagctcaagaagatggcgggtgctgtgcgcactggaggaaagggcagcatgcgcaggaagaagaaggcagtccacaagaccgcaaccaccgatgacaagcggcttcagagcacgttgaaaagaatt

SEQ ID NO: 24274 - DNA, 229 bp, Zea mays
caggcggagggggatcgatgcgcccgagagcgcgatgccgtatggcaaggaagccaaggaggcgctgctcaaacttgtccaggggaagagcttgaaggtctacgtgtacgacgaggaccggtacggtagatgcgtcggagacatctactgcgacggggtatttgtgcaggagcaaatgctgaagaagggtttcgcgtggcactacaccgcctacgatcaacgcccggag

SEQ ID NO: 24275 - DNA, 226 bp, Zea mays
ccccaccgcccccgatccaccattcctcctccggatttcgcagtcagcggtggtgaaggtagcgggcgcggaggaagatggggctcgcgttcgggaagctcttcagccggctcttcgccaagaaggagatgcggattctgatggtcggtctcgacgccgccggtaaaaccaccatcctctacaagctcaagctcggcgagatcgtcacaaccatccccaccatcgg

SEQ ID NO: 24276 - DNA, 230 bp, Zea mays
ctattatgttgcccctgaggtgcttcaaaaatgttatggcccagaatctgatgtatggagtgctggagtgattttgtacattttgctatgtggtgtacccccattttgggcagagagtgaagcagggatcttcaggcagattttgcgaggcaaacttgatttggaatctgaaccatggccaagtatctctgatagtgctaaggatttagtccgtaagatgcttatccgcg

SEQ ID NO: 24277 - DNA, 219 bp, Zea mays
cccacgcgtccgggcaatgtctgtctgaacattctgcgtgaagattggaagcctgttctcaacatcaacaccgttatttatggcctgaatcttctttttacgcaaccaaacgacgaggatcctttgaaccacgaagctgcagctgtcctccgtggcaacccaaagatgtttgaggcaaatgtgaaaagagccatgaccggaggctacgtaggccaacac

SEQ ID NO: 24278 - DNA, 221 bp, Zea mays
aagatacttcaacgtgattggatcagacccagagggacggctaggagaagctccaaggccagagctacgcgagcatggacggatatccggtgcttgctttgatgcagctttgggaatcattccagggctaaaggttcgtggaaccgattactccactgcagatggaacttgcgttagagactacatcgatgtcacagatcttgtagatgctcacgtaaaag

SEQ ID NO: 24279 - DNA, 222 bp, Zea mays
ggatccccgtgccctgcagctgcgaccccgtgggcggccaacccgtcgtgcacttcacctacgtcgtgccggccgggggctccgtgtccggcatcgcggaggagttcggcaccacggaggagacgattctcacgctgaacaagatgcccgacgccaagtcccttctcgccggccaggttcttgacgtgccactccgagcttgtagttctgccattagcagca

SEQ ID NO: 24280 - DNA, 219 bp, Zea mays
gcctcgggtcaaaccctaagcagggagttgatttatccgctgcagccatgagtaagttgcagtctgagtctgtcaaggatgccatctcccagattgttggggatgccaaggagaagaataggaagttcactgagactgtggaacttcagattggtctgaagaattatgatccacagaaggacaagcgtttcagtggctctgttaagttgccccatatcc

SEQ ID NO: 24281 - DNA, 221 bp, Zea mays
caacttctttgcagagaatgaacagattgctttctgcccagcgattattgttcctggaattcactattctgatgataagctgctccagacgagaatcttctcctatgctgatacccagaggcaccgccttggtccaaactatctgatgcttcctgtgaatgcaccaaaatgtgcccaccacaataaccaccatgatgggttcatgaacttcatgcacaggg

SEQ ID NO: 24282 - DNA, 221 bp, Zea mays
ataagaataacattcaaggaacaatcccttctgagcttggcaacttgaagaatctaataagcttcgacttgtacaagaacaacatttcggggacaatacctcctgcccttggaaagttgaagtcccttgtattcttgcgtctcaatggcaatcatttgactgggcccatcccaagggaactcgctggaatatctagtctcaaagttgttgatgtttcaagt

SEQ ID NO: 24283 - DNA, 219 bp, Zea mays
ggacctggtttcccatctctctctgcgccgtcccgtgctccctccgctagagtctcccaattccttccccacctcctcggtcgtcgcctcccccagagagcaggagccgcctcgtccctgccggtcccgacccccatcccgtccgcgtccaacgccatgaatcccgagtacgactacctcttcaagctgctcctcatcggcgactccggtgttgggaag

SEQ ID NO: 24284 - DNA, 220 bp, Zea mays
gcagagcggaatgattacattcatgctcttgtcgcatactttgacgtgtcgttcaccaaatgccataagctgatgggcttctcaacaggcccgagatcgaaagccactcactggaagcaaactgttctctacctggaggatgttataactatctgtcagggggaaagcctgagtggttccatgacagtcacacccaataagagtaccctcgagatatcga

SEQ ID NO: 24285 - DNA, 218 bp, Zea mays
ggagggcatcccaccggaccagcagcgtttgatcttcgctggcaagcagctggaggatggccgcacccttgcggattacaacatccagaaggagagcaccctccacctggtgctccgtctcaggggtggcatgcagatctttgtgaagacactcactggcaagacaatcacccttgaggtggagtcttcggataccattgacaatgtcaaggccaaga

SEQ ID NO: 24286 - DNA, 216 bp, Zea mays
aggaagaagtcggtgacgcggtccgtcaaggccgggctgcagttccccgtcggccggatcgggcgctacctcaagaagggccggtacgcgcagccgtgggcactggcgcccccgtctacctcgccgccgttctggagtacctcgccgccgaggttctggagttggcagggaacgcggcgaaagacaacaagaagacgcgcatcatcccgcgccacg

SEQ ID NO: 24287 - DNA, 210 bp, Zea mays
ctggattgtacagcaggagctatcttgagaaccaaatggctgtagcccttggtggcagggttgctgaggaggtgatctttggccaagacaacgtgacaacaggagcttccaacgacttcatgcaagtgtcgcgtgtcgcaaggcagatggtcgaaagatttggattcagtaagaagatcggccaagttgcaatcgggggaccgggtggaa

SEQ ID NO: 24288 - DNA, 212 bp, Zea mays
ggtggatgggtgccagttgcagcaatggatgctattgctaaaatcgtcgaagttgcaccaatcagggtttatgaagttgcaaccttttataccatgtttaacaggactaaggttggtaaataccaccttctggtgtgtggaactacaccttgtatgattcgtggttcacgtgaaatcgaagagacgttgttggagcaccttggagttaaacg

SEQ ID NO: 24289 - DNA, 213 bp, Zea mays
tgttgaaatgcaccatgaggctctccaggaggcccttcctggtgacaatgttggcttcaatgttaagaatgttgctgtgaaggatctgaagcgtgggtatgtggcctccaactccaaggatgaccctgccaaggaggctgctagcttcacgtcccaggtcatcatcatgaaccaccctgggcagattggcaacggctatgccccagtgctgga

SEQ ID NO: 24290 - DNA, 213 bp, Zea mays
tctcaatgaggtgtttgaaacatttgttgaatctactcttgtacaaccaacatttgtccttgactatccagttgagatatcaccattggcaaaaccacatcggagtcatgttggccttactgagcgattcgaacttttcatttgtggtcgtgagattggcaatgcgttttctgagctcacagacccaattgatcagagaagccgttttgaaaa

SEQ ID NO: 24291 - DNA, 216 bp, Zea mays
gcattggggaagggaagacaggctgcaaagactgagatagaaaagttgaaactttcggagcttacctgccgggaaggcattgttgaagttgcaaagataatttatggagtgcatgacgaagcgaaggacaaagcttttgagttggagttgagctggatctgtgatgaatcgaaccgtcagcatcagaaggttccaaatgaactgttggagcaggcc

SEQ ID NO: 24292 - DNA, 217 bp, Zea mays
cccacgcgtccgctctggtttaattcagttctgaatcggagttcagaatggggtaccattcaattcattggtactttacatcggcgcttccccgttccatgatagtggcataccctctctgcatggttggtgctcttcttgatagaaggatagtaccatacatgtttccggtcttcttatttgttgtgctctattcaaaacttccacataaggaact

SEQ ID NO: 24293 - DNA, 236 bp, Zea mays
aggagggcatccctccagaccagcagcggctcatctttgctgggaagcagcttgaggacgggcgcacgcttgccgactacaacatccagaaggagagcaccctccacttggtgctgcgcctcagaggaggcatgcagatcttcgtgaagaccctgaccggcaagactatcaccctcgaggtagagtcttcagacaccatcgacaacgtcaaggccaagatccaggacaaggagggc

SEQ ID NO: 24294 - DNA, 234 bp, Zea mays
cccacgcgtccggccggcgacgacttcaccctggccgacctctcccacctgcccaactcccactacatcgtcaactcctccgacaggggcagaaagctcttcaccgccaggaagcacgtcgccaggtggtacgacaagatctccacccgcgactcgtggaggcaggtcatcaagatgcagagggagcaccccggcgcgttcgagtgatcggtcggtggtctacgcggtgatgca

SEQ ID NO: 24295 - DNA, 236 bp, Zea mays
gtcctcacatgatcatgcatcagtacccaatgattcagactcatctaatgcttctgcttccttacatgaatatgcattagcaggtcagtcatctagctctacttactataacaagcacacattatccaccgatgtgattcttattcctgctaatttgaatgtgttattatgctcaattatcagatctcgtgtacgctccgcgttgtaaacacgtagaacaattctcctacattgtt

SEQ ID NO: 24296 - DNA, 232 bp, Zea mays
atcacaatgatcagcgtgctgccgatagaagtggcaacatactgccgggcactgtggtggactcgaagatttgccatccaaccgagtttgatttctacctgtgcagccatgctggcattcagggaacaagccgtcctgcccattatcatgttctgtgggatgagaacaaatttacggctgatgggttgcaaactctcaccaacaacttgtgttacacgtatgccaggtgcac

SEQ ID NO: 24297 - DNA, 232 bp, Zea mays
cggacgcgtgggcatcactagcatcaaaatcagtttctcagttgtctggacacaccttattccattatgaaggacctgaagtgcatgaatctggatcagtaagcgatcgaagtgatgtttacagcttcggtgtagttatgttggagcttctaacaggacgtaaaccttatgacagttcgtatccacgagctgaacaacatctagtacgatgggccacttctcaactctatga

SEQ ID NO: 24298 - DNA, 233 bp, Zea mays
gtctgcagaaggcagttgcgaaccagcccatcagtgttgcaattgaggctggtggcagagcatttcagctctacaactcgggtatcttcacaggaacctgtggaacagcgttggaccatggtgtcacggccgtcggctacggcacagagaacggcatggcctactggatcgtgaagaactcttggggcagcagctggggcgagtccggctacgtcaggatggagcgcaacatc

SEQ ID NO: 24299 - DNA, 231 bp, Zea mays
cccacgcgtccgcccacgcgtccgacgggccccatcccgcgcgacgacgcgcgcgacgagatcaacaccgtcgacctctcccacaacaggctcaccggcgacccctcccacctgttcgccgccggccggcccatcggcaaggtggacctgtcgtggaactacctcgacttcgacctcagcaggctggtgttcccgccggagctcacgtacctggacctgtcccacaacctc

SEQ ID NO: 24300 - DNA, 228 bp, Zea mays
tccatttaggacatgcgagcacaggttcgacctggtgtacacaacatttcaggaagcatggattctgaatgacggatgatagcttaagcccataacagcctttggggtttgggcagaagcgcacttgggagttgatgaaggcatgtcctgaggcttcagcttcagtaaatttacggctttcaattcggtgtcttcttcgtcaaagaagactcggtagatgtatggttt

SEQ ID NO: 24301 - DNA, 227 bp, Zea mays
gcagctctccggttttgcgttcactgccaatggctgggtgcagtcttatgggtcaaggtgcgtcaagcctccgatcatctacggtgacgtgagccgccccaaccccatgaccgttttctggtcgaagacggcgcagagcatgacgtctcgcccaatgaaggggatgctgactggcccagtcacaatcctcaactggtccttcgtccggaatgaccagccgaggtttt

SEQ ID NO: 24302 - DNA, 230 bp, Zea mays
cccacgcgtccgtgctgatgattattggaagaaatcaaagttgcctcatgcaacaatatttaaaccacatcatccatatactagtaccctacgagatgtttttaaagagttaccagaaaatgcattgagtttactagaaactcttctgtcggtggagccctacaagcgtggtactgcatcaggtgctctttcctctgagtttttcaggacaaaaccttatgcgtgcgaac

SEQ ID NO: 24303 - DNA, 222 bp, Zea mays
ctacgagaagatcgtgcgcgacacctgccgcgagatcgggttcacctccgacgacgtgggcctcgacgccgaccgctgcaaggtgctggtgaacatcgagcagcagtcccccgacatcgcgcagggcgtgcacgggcacttcacgaagcggcccgaggagatcggcgcgggcgaccagggccacatgttcgggtacgccaccgacgagactcccgagctgat

SEQ ID NO: 24304 - DNA, 221 bp, Zea mays
aagaggactacaacaagttttacgaggctttctccaagaacctcaagcttggcatccacgaggactcgcagaacaggaccaagatcgccgagcttctgagataccactccaccaagagtggtgatgagctgaccagcctcaaggactacgtgaccaggatgaaggagggacagaatgacatatactatatcactggtgagagcaagaaggcagtggagaac

SEQ ID NO: 24305 - DNA, 225 bp, Zea mays
cggcttgtgacacccttgaccctccagaggaagcgtgctagaatcgctgacaagaagaagaggataactaagaagaagtctgaggctgctgagtaccagaagcttcttgcccagaggctgaaggaacagaaggaccgccggatcgagagcttggccaagaggaggtccaagctttctgccgccgtcaaggcttctgctgccacctctgcttaagaatattcagtg

SEQ ID NO: 24306 - DNA, 123 bp, Zea mays
gcagcagcactagcaagaaccacacctcttcccttcgcctgtgatcatgtcgtcttgctgcggctgcaagtgcgggtgcggctccagctgctcctgcggcagcggatgcaacggctgcggtat

SEQ ID NO: 24307 - DNA, 223 bp, Zea mays
gttcgggctgatgtcttgagagaaaacactgaagcagttttcgcggcttgtgatgctgcccatggacgatgggctaagctactaggtgttcgtgctggattacatcccaggttaaggcttgaagaattcttgatcatctacagcataacagaagaatttatagctgctacagaaaagattggaggcaggttgggttacaacattcgtggaatcctacaacaac

SEQ ID NO: 24308 - DNA, 120 bp, Zea mays
gtgtggagactggtgtcatcaagcctggtatggttgtcacctttggtccaactggcctgactaccgaggtgaagtctgttgagatgcaccacgaggcgcttcaggaggctcttcctggtg

SEQ ID NO: 24309 - DNA, 245 bp, Zea mays
cttatgttccggccactgagggattgcttgaactagtactgcgtaatagattgcaagactggcttgttgaaaaattaattgaaggccacaagtcgactggccgcgatgatctaggacaagggcctatccatctgtgttcttgcttgggctaatacttgggccattcacttattttctttgtcaggattctccttggatttccgtgattcttctggttggacagctttgcattgggccgcatactg

SEQ ID NO: 24310 - DNA, 244 bp, Zea mays
gacatttcagagcatgggttcgcggtttccatcccaccagctaagcaatggcttgtatgtctcgggccgacctgagcaacctaaagagaagtctccagtcatttgctcctcggctatgccgtacactggtggggacataaagaaatctggggagcttggaaagatgtttgatctccatagaaaatctggtccattgggtaatcaaacttcaaggaatacttcctttggtggtgctgcctccaac

SEQ ID NO: 24311 - DNA, 246 bp, Zea mays
cccactcgtccgcccacgcgtccgtttctaatgctgataatgaccgcaaatacccagcgccacgtggcagacttcttcaagcttctgaaactgaacgcacctgaatggccatatgcagtgttgggggccattggttctgtcctctccggatttattggcccaacttttgccattgttatgggtgaaatgcttgatgtgttctactacagggaccccaatgaaattgagaagaaaaccaagctatat

SEQ ID NO: 24312 - DNA, 246 bp, Zea mays
aaaagtttctgattttggacttagcacactgtctcagaatggagcaggacttcttcacacaacatgtggaacaccaaattatgttgctcctgaggtgctaggtagcaatggatatgatggatctgcagcagacatttggtcatgtggtgtcattctctatgttttaatggctggttaccttccctttgaggagaatgaccttccaagtttgtatgaaaagataactgcagctaagtactcatgccc

SEQ ID NO: 24313 - DNA, 118 bp, Zea mays
gagcactcgccgccactcaccagcaaattcccaagccgccccttcccccatctctttcgcgccccatttgatcgattcctgatggcgcccaaggccgagaagaagcccgcggagaaga

SEQ ID NO: 24314 - DNA, 242 bp, Zea mays
ctctccctgacgacctaatcaagagaggcatggcggttgccgacccgtcgagcccgtacaaggtacggctgctggtggaggactacccgtacgcgtcggacgggctggccatctggcacgccatcgagcagtgggtgacggagtacctcgccgtctactaccccaacgacggcgtgctgcgggcggacgtggagctgcaggcgtggtggaaggtagcgcgcgatgtcgggcactccgacctc

SEQ ID NO: 24315 - DNA, 241 bp, Zea mays
cccacgcgtccgattttgcagaaaaggaacttatccccatgaaaatcaggctcaaaggaaagtgccctttaactccagaagaggtaggttttattctacgtgccatgggatttgacaatagaacacgcatttaccttgcctctggcgagctctttggagggaaacgtttcatgaagccattcaagaccatgtttccacgcttagagaaccacagcacagttggacctggaaagctggaaga

SEQ ID NO: 24316 - DNA, 241 bp, Zea mays
accgttgccggcaagaagatcgccgtcctcggcttcgccttcaagaaggacaccggcgacaccagggagaccccggccatcgatgtctgcaagggcctgctgggtgacaaggcccagatcagcatctacgacccccaggtgacggaggaccagatccagcgggacctagccatgaacaagttcgactgggaccacccgatgcacctgcagccgacgagcccgacggccgtgaagcaggtga

SEQ ID NO: 24317 - DNA, 240 bp, Zea mays
gcaggatgtcgcaccgtaagttcgagcacccgaggcacggctccctcggcttccttcccaggaagcgctcctcccgccaccgcggcaaggtgaagtcatttcccagggatgaccccaagaagccttgccatctcactgccttccttggctacaaggctggcatgactcacattgtccgtgaggttgagaagccaggatccaaactccataagaaggaaacttgtgaggctgttaccatca

SEQ ID NO: 24318 - DNA, 243 bp, Zea mays
gatgtctttacctcgtcccgtggctccaccaagacactcggtaacttcgtcaaggcaacctttgattgtctgatgaagacctacggcttcctcacccctgagttctgggccgagaccaagtatgccaagaccccgttccaggagttcaccgacctcttggctaagccgacaaagggtcttctgatcgatgctcccaccgagacagtggaagcttgaacgtcttagtttactgttcccaagtgt

SEQ ID NO: 24319 - DNA, 241 bp, Zea mays
acgctgccgggacctggccttaaagaacttgtttctaagttcattccggaagttattggcaaagagattgagcagtctacctccagcatcttcccacttcaaaacgtcttcatccgcaaggtgaagatactcaaggcccccaagtttgatctcgggaagttgatggaggttcatggcgactacaaagaggacgttggtgtgaagcttgagaggcctgtcgagggtgatgaggctatgcagg

SEQ ID NO: 24320 - DNA, 237 bp, Zea mays
agctgatgtaacacatgctctacagcaaccagctggaagaaagcttgatggtggaggtgttgcaagcggtgggctacgagaactaataccgtgcattgcaaggacttctgttgctgttggtgttgatggtattttcatggaggtacatgatgaccccttgaatgcaccatgcgatggcccaactcaatggccgttgcgcaatctggaagagctgttggaggaattaattgcaattgc

SEQ ID NO: 24321 - DNA, 246 bp, Zea mays
cccacgcgtccgttcatgctttcctcatatgcccctgtaatctctgctgagaaggcttaccatgagcagctctctgttcctgaaatcaccaatgccgtctttgagccctcaagcatgatggccaagtgtgacccaaggcatgggaagtacatggcttgctgcttgatgtaccgtggtgatgttgttcccaaggatgtcaatgctgcagtcgcaaccatcaagaccaagagaactgtccagtttgtg

SEQ ID NO: 24322 - DNA, 239 bp, Zea mays
ggcgcgtgccggatcgcgtgcgacgcgtttgcgcggcccgagtactgctgcagcggcgccttcgcgtccccggcggcgtgccggccgacggcctactcgcaggtgttcaagaccgcgtgcccgcgctcttacagctacgcattcgacgatcccacctccacattcacctgcggcggcggcccggactacaccgtgacattctgccccggcgccaccccaagccagaagtcgacgaccat

SEQ ID NO: 24323 - DNA, 240 bp, Zea mays
agcagctcgaggacgggcgcacgctggccgactacaacattcagaaggagagcaccctccacttggtgctgcgtctcaggggcggcatgcagatcttcgtgaagactctgaccggcaagactatcacccttgaggtcgagtcttctgataccattgataatgtcaaggccaagatccaggacaaggagggcatccctccggaccagcagcggctcatttttgccggcaagcagctcgagg

SEQ ID NO: 24324 - DNA, 237 bp, Zea mays
ctcagatggtgacaaccggcttctggtgtatgaatttatgcccaagggaagtttggagaaccatctgtttagaagtgtgtgcttcatctctatggctctgctttgttaagacccagtttcttataactttcttgttcattccctttaaccatgcaatatttctcctgtttaggaggtgctgatcctttgtcatgggcaataaggctcaaagttgccattggagctgctaggggcttg

SEQ ID NO: 24325 - DNA, 239 bp, Zea mays
gctatgaatgcccttagtgggacttacacaatgagggggtgcgagcaaccattaatcattagatttgctgatcctaagaggcctagacctggagaatcaaggggtcgccctgcatttggaggtcctggtttcagtcctcgatcggatgcagcacttgttatcaggccaacagccaatcttgatgaatctaggggtcagcatatgcttcctgaatcttggcgtccatcaagtccaaggcc

SEQ ID NO: 24326 - DNA, 241 bp, Zea mays
gttctctggtacttcataacagaccatttgctgttatgaagaatttggaactgctgttcagattacatcttacaaaaactgataaaaccttgttctgcatctgcaggtacgtgttcgggctatcccatatccccaggctagaagattggccagtcatgccggtggagcacataggcttcatgctcatgccacatggattcttcaactgctcgcctgcggtcgacgtgcctcccagctcgtc

SEQ ID NO: 24327 - DNA, 239 bp, Zea mays
cccccactcagaaaacccagccgccgccgcatcggcctcccaggtaagcagtagcgtccaccccagccgccgccatgaagcgcaacccccgcgtcacgagctcccgccggaagtgccgcaagcgcacttcacggccccgtcctccgtccgccgcgtgctcatgtccgcggcgctatcgacggagctccgccacaagtacaatgtgcgttccatcccgatccgcaaggacgacgaggtgc

SEQ ID NO: 24328 - DNA, 232 bp, Zea mays
cccacgcgtccgatccttgcataaggtggttgagtctgaggacattgctgagaatactgggcttgggttccctcacacgtctcattgccttgcgtctggcgacattatgatttcttgccttggggacaaggaggggaatgcagctggcaatggcttcctgctgttggattcagagtttaatgtcaaaggacgttgggaaaagcgaggtcacagtcccttgtttggatatgac

SEQ ID NO: 24329 - DNA, 236 bp, Zea mays
acgagtacctggctggcgacgagttcaccctggccgacctctcccacctcccgaactcgcactacatcgtgaacaccgagagaggaaggaagctcttcactaacaagaagaacgtggccaagtggtacgagaagctctcgaagcgcgagacgtggaagcaggtcgctaagatgcagaaggaacatcctggtgcgttcgagtgattgcttgtcttggggggagctgcgagtgcacca

SEQ ID NO: 24330 - DNA, 232 bp, Zea mays
catcagctatcgtatttacaaaagcatatggccaacattctaacacttttagcagattctattgatggcgagggagatgattctatggtattgacaatggagacttttgagcaccttggattttttttgcagctctctgaaggaactccattaagccaagcagctaccttttttgcgaattcggatccagacatgcccgctgctcctgtacctgctgctttggtacatgatt

SEQ ID NO: 24331 - DNA, 230 bp, Zea mays
cccacgcgtccgcatcagtgtttccaatgaggctttcttccaccaattccttgcagtgcgagccatggatcctctggatgtcctgagccagaaccctgattcagtattcggaaagttctgtagaagtaagtaccttttgcttgtgcatcaaaaaatggaaggttctttcttcggcaacatggatcagaggaactacgtcatgagcggtggccatccaaggacacctttct

SEQ ID NO: 24332 - DNA, 216 bp, Zea mays
ctttgtttttgtttgcctaggtaatagtagatggttcgcaagggcatgctggcacagttccaatgaaattgcgccgtgatccgatggttgcagctgcagagctcgttgtgactctggaacgcctctgtaaagagcccaacagtttgctgacctacgacgaggagtgcagctgcttcactgaggagtccctggccggcctggtgtgcaccgtcggcg

SEQ ID NO: 24333 - DNA, 226 bp, Zea mays
actagttctagggtcgtttgccgagaagcactacgccgatctcgcctccaagcccttcttccagggcctcgttgactacatcatctctggccctgtggtggccatggtctgggagggcaagagcgtcgtcacaactggccgcaagatcattggcgccactaaccccctggcttctgagcccggcaccatccgtggcgactttgctgtcgacattggcaggatgtca

SEQ ID NO: 24334 - DNA, 228 bp, Zea mays
cggacgcgtggcggacgcgtgggcggacgcgtgggcggacgcgtgggcttgccggtcccgaataaagagcagcagcgcaagaggctcggtagagcgagaagaaggcaatggcggccgagagcttccttttcacctcggagtccgtgaacgaggggcaccccgacaagctgtgcgaccaggtgtcggacgccgtgcttgacgcatgcctcgcgcaggaccccgacagca

SEQ ID NO: 24335 - DNA, 224 bp, Zea mays
cccacgcgtccgcgttggactaccatttcaagtatgagcaagatgccggctcctccgtgtattcattctttggcttcaatgggacagctggtgtctggaggatctcagcgatcgatgatgctgggggctggaaggaccggacgacagtggaagatatggacctggctgtccgtgcgatgctgcagggatggaagttcctttacgtcggcgacattaaggtcaag

SEQ ID NO: 24336 - DNA, 228 bp, Zea mays
caacaaggcagcagcacaagcaagaaccacacctcctcccttcgcctgtgatcatgtcgtcttgctgcggcggcaagtgcgggtgcggctccagctgctcctgcggcagcggatgcaacggctgcggtatgtaccctgacgtggagaccgccgccaccagcagcgtcaagaccacggtcctcgccgcgccgaccaccaaggccagcgccggcggcttcgaggcggcca

SEQ ID NO: 24337 - DNA, 228 bp, Zea mays
gggaaaagataatacaggaattcaaagatggctacaccaaggttcttatatcaaccgatgttcttgctcgacgttttgaccaagcacaggttaaccttgtcatcaactacgacatgccaatcaaatttggtacaagagatgaacctgattatgaggtgtacttgcacagaattggcagagctgggcgctttggccggaaaggtgctgtgttcaacttgctgtgtggtc

SEQ ID NO: 24338 - DNA, 232 bp, Zea mays
cccacgcgtccggaaagtggtaaatcctccgtccttatggatgtaaaaccatgggacgatgagactgatatgaagaagctggaggaggctgtccgcagtgtccagatggagggtctgacttggggagcatcaaagcttgtgcctgttggatacggcatcaagaagatgactatcatgttgacaattgtcgacgatcttgtgtccatcgacactctaattgaggaccacctta

SEQ ID NO: 24339 - DNA, 108 bp, Zea mays
gcagacggatttactgtcatattcaacaaagccagagatgagaagaagggtgggaatggtcaagacacagactcaccttccaaggaccccaggactgagagggtggag

SEQ ID NO: 24340 - DNA, 108 bp, Zea mays
cccacgcgtccgccaaaagtagggatgaacttttccttaacttagtcatggagtttgttccagagtcactttatcgcgttctgacacactacatagacatgaagcaga

SEQ ID NO: 24341 - DNA, 107 bp, Zea mays
gtgcaacatttgggctctctgcatgttgtgtgtatgggggatcaccttatcgtcctcaagaaatggcattgagaagaggtgtggatattgttgttggaactcctggt

SEQ ID NO: 24342 - DNA, 108 bp, Zea mays
gcgtggagcccagttgtcaggagggcagaagcagcgagtggcgatcgcccgtgcaattgtgaaggaccctaggatcctgcttctggacgaagcgactagtgcgctgga

SEQ ID NO: 24343 - DNA, 106 bp, Zea mays
aaaaccctagccctcgcgccgccgccgccgtgcccagcgctcgagctcctcgcctgccgcgagctcgcgccgcaacgccaccatgaagttcaacatcgcgagcccg

SEQ ID NO: 24344 - DNA, 105 bp, Zea mays
gacaacgtcaaggccaagatccaggacaaggagggcattccaccggaccagcagcggctgatcttcgccggcaagcagctggaggatggtcgcaccttggctgac

SEQ ID NO: 24345 - DNA, 101 bp, Zea mays
ctcgcgccaccgtcgccgccgctgcagcgagccaccgccctgccgtcgcctgaggtagacaccaagccaccgccatggggcgtatgcacagccgcgggaag

SEQ ID NO: 24346 - DNA, 217 bp, Zea mays
gatagctaggacccgtctctgtacccagagaatccactcatcatctgggagaatgcacgggcagctgcccagcaggaagggtttgaggtaaagaggaaaggggataaggagtttgttgcaaacattcggctggagatgaactacagccctgagaagttcaagttatcacagccgcttatggaggtgcttggggtggaggtggacactcgtgcacggg

SEQ ID NO: 24347 - DNA, 216 bp, Zea mays
cacagcacaggcagctcgagagagagagagagagaaagatgtcgtggttcgggcaccaccaccacaaccagccggctcccccggcgtcgggccccaaccaggtgttcaagatcttctgccgcgccaacgagaactactgcctggccgtccgcgacgcgccgtcgtgctggccccggtcaaccccaaggacgaccaccagcactggtacaaggacat

SEQ ID NO: 24348 - DNA, 219 bp, Zea mays
aacacaccccaatgctgcactcattggggaagaggttgctgcaaagaagcaaacccttaagaatgtcacaaactacattactgatatcatctgcaagcgtgcagatcttggttacaactatggtgttatccttataccagaaggcctgattgatttcatcccagaggttcaaaaactcatcgcggaattgaatgaaattttggcacatgatgttgttga

SEQ ID NO: 24349 - DNA, 189 bp, Zea mays
cccacgcgtccgaccggagcaggtagaacgctgcacaatccccttcgccgccgccaagatggtgaacgttcctaagaccaagaagacgtactgcaagaacaaagagtgcaagaagcacacactccacaaggtgactcagtataagaagggcaaggatagcctgtctgcccagggaaagcgccgttatga

SEQ ID NO: 24350 - DNA, 222 bp, Zea mays
gtgatgagttcttttcctttattgttgactgtaaagatcccaaggcatgtactgttctgttgaggggagcaagcaaggatgtattgaatgaagttgagagaaacctgcaggatgccatgtccgttgcaaggaacattttgaaaaatccaaaactccttcctggaggtggcgctacagagctgactgtatcagcaacactgaagcaaaagagttcttcagttg

SEQ ID NO: 24351 - DNA, 224 bp, Zea mays
caaagaattgaggacgcagggggctttgttatgtgggctgggacatggcgagtgggtggtgttcttgctgtctctcgcgcatttggtgataaactcttgaagcagtatgttgtcgctgaccctgaaatcaaggaggaggtggtcgacagctcccttgaattcctcatccttgctagtgatggactctgggatgttgtcactaatgaggaagctgttgccatggt

SEQ ID NO: 24352 - DNA, 229 bp, Zea mays
tttggagggaaaaggcctcgcgggtcgcaaaccgctctctgttgatttgggatttgggaagcgctcgagttttcaggtaaaccatagtttagtgacccatggctcgtactaagcaaactgctcgcaagtccactggagggaaggctcctaggaagcaacttgccaccaaggctgcccgtaagtctgcacccacaactgggggagtaaagaagcctcatcgttaccgccc

SEQ ID NO: 24353 - DNA, 230 bp, Zea mays
gcaccatgaggctctccaggaggcccttcctggtgacaatgttggcttcaatgttaagaatgttgctgtgaaggatctgaagcgtgggtatgtggcctccaactccaaggatgaccctgccaaggaggctgctagcttcacgtcccaggtcatcatcatgaaccaccctgggcagattggcaacggctatgccccagtgctggactgccacacctcgcacattgctgtca

SEQ ID NO: 24354 - DNA, 215 bp, Zea mays
agatcgagatcctggacgacggctacaagtggaggaagtacggcaagaagtccgtcaagaacagccccaacccaaggaactactaccggtgctcgacggaagggtgcaacgtgaagaagcgggtggagcgggacaaggacgaccccagctacgtggtgacgacgtacgaggggatgcacaaccacgtcagccccagtacggtgtactacgccagc

SEQ ID NO: 24355 - DNA, 216 bp, Zea mays
gttgcctttgaatgtgcacttcaatcacacccaaacatgctcatcttaagcgaggaggtagcattgtcaaaactcacactgatggaaattataagcaagatttgtgatggagtacaagcaagggcaaaattagggaaatatcatggtgtgcttgttattcccgaaggacttatagaaagcattccagaaatgtatgctcttattcaggaaatcaat

SEQ ID NO: 24356 - DNA, 221 bp, Zea mays
cccacgcgtccggcctggcttcgggatgccctgaactcagggccgtcgacctgtgcggctgtgttcttataacagatgagagcgtggttgcgctggcgaacggctgccttcacctgcgctccctgggtctctactactgccagaacatcacggaccgcgccatgtactccctggccgccaacagccgcgtgaggagtcggggccggggctgggacgcgaca

SEQ ID NO: 24357 - DNA, 98 bp, Zea mays
tgctcttttgctcctccgccagcttcatggtggacgacatgcccatcagggacttccgcgacctggagagcaagggggtggcgttccccaagagccag

SEQ ID NO: 24358 - DNA, 222 bp, Zea mays
aaatccccatagctttcctggacagagttaaggaagacttcaccaaaaagtatggaggcgggaaagcagctactgctgcagcgaacagcttgaacagggagtttggatcaaagcttaaagagcacatgcagtactgtgtggaccaccctgaggaggttagcaagcttgccaaggtgaaggcccaagtctccgaagtcaaaggagttatgatggaaaacattg

SEQ ID NO: 24359 - DNA, 226 bp, Zea mays
cccacgcgtccgactgatcagaggggaagattgatgatgacaactgaaagactgaatcagtccactgacagaattaaagagagccgaagaactatgttggagacagaagaacttggtgtctcgattcttcaggaccttcaccaacagaggcagtcactactacatgctcatactactttgcacggagttgatgataacattggcaagagcaagaagatcctggctg

SEQ ID NO: 24360 - DNA, 231 bp, Zea mays
ccccaagaagacagccctgatcaaagcgatggaggaagctgatgtgaagaccaagtgggagaacagctcatggggcaagaagctgattgtccagaagaggagagcatcgctcaatgactttgataggttcaaagtcatgctggcgaagattaagaggggcggtgctatcaggcaagagctcgccaagctgaagaaggcgtccacggcttaaggagtctctttccgtgaatg

SEQ ID NO: 24361 - DNA, 210 bp, Zea mays
cccacgcgtccgtgcacagccagaccaggctaggatcttagcacttaatccttcatacttcttgaagaacggtggccactttgtcatttcaatcaaggctaactgcatcgactccaccctgcctgctgaggccgtgtttgcagcggaagtggagaagctcaaggcggatcagttcaagcccgcggagcaggtgacgttggagccctacga

SEQ ID NO: 24362 - DNA, 213 bp, Zea mays
atcaggcaaggatatcaatgctcttgagcagcacatcaagaacctcctcagcccgtccacaccgttcttcttcaacaccctgtacgacccctaccgtgagggtgctgactttgtgcgtggataccccttcagcctcagggagggtgcccacactgctgtctcccacggcctgtggctgaacatccctgactatgatgcacccacccagctggt

SEQ ID NO: 24363 - DNA, 213 bp, Zea mays
agttgtacgagagacacctgtaggttgatcaggttcccgatgctatctggtatggagccatggagctcgttgttggccaggcccaagccagacagctctgtcagtttcccgatgtgtgcggggatagttccagacaacatgtttaatcgattctgtgatggattgcgggatttccccgtttaatcggttgtcgcggagatcaacgaacgagac

SEQ ID NO: 24364 - DNA, 215 bp, Zea mays
  unsure (1)..(215): unsure at all n locations
gttgctctagatccgttcatcctggtggttttgtgaggtcgaaagcggcgagcgnattagaagatgctggacaagctgtgggacgacgtggtggccgggcctcgcccggagacgggcctcgagaagctccgcaaggccaccaccgcccgctcgctcgtcatcaacaaaggtacttactgagctatactgctgatcgtgtcggggatcgggatgaa

SEQ ID NO: 24365 - DNA, 219 bp, Zea mays
gacctacaagatctacatcttcaaggtgctgaagcaggtccacccggacatcggcatctcttccaaggccatgtccatcatgaactccttcatcaacgacatcttcgagaagctcgccggcgaggctgccaagcttgcgcgctacaacaagaagcccaccatcacctctcgggagattcaaacctctgtccgccttgtccttcccggcgagctcgccaa

SEQ ID NO: 24366 - DNA, 221 bp, Zea mays
tgaaaggttcagtgggtccacgcttgaagtgaggggcataacggttgaaactggcgagtgggctgttgttgggggcaccggccagtttgctatggcgaacggcatcatctccaagaagttacacgagcagagaagcgacgggaacgtcatagagcttagtgtccatgctttctgcccgctgctcaaagggaaaaggggcggtgctgtgacaaaggttgggc

SEQ ID NO: 24367 - DNA, 220 bp, Zea mays
gtaaagcttgtacaagagacaagagcataaataaagtaggtgtgtgtcacaactctcaccttgtatacggcgccaggcacggccatgctgccgcaggcttccaagaagagcctgtgctcgtcctcggtccatttctccctctgcttggatatcgtgtatggcttgcgtgcctaaacggcaagtggccaaaagtgtgaccttgggtgagaggaaaagaaaa

SEQ ID NO: 24368 - DNA, 220 bp, Zea mays
agcaccacaagaagaaacataggtccctagaatctcgtggcgcagactttgatgccgagcggcgcctgtactctcatgcgttcaagaagtcctcatcacttctgagccgcttaatgaagcacaagtttgggtgggtgttcaacaagcctgttgatccagtcacacttggtttgcatgattattttactattatcaagcacccaatggatcttggcacaat

SEQ ID NO: 24369 - DNA, 215 bp, Zea mays
cgacggggcggacgcgtgggtcagccggccgaaccccataactgttttctgatgcaagacggcacagagcatgaccgctcgtcccatgaagggaatgttgactggtccagtcacaatcctcaactggtcatttgtcaggaacgatcagcctaggtttgagacatgctaccaaatagctcttgcaataaaaaaggaggttgaggatcttgaggctg

SEQ ID NO: 24370 - DNA, 212 bp, Zea mays
  unsure (1)..(212): unsure at all n locations
ggacggtncggacgcgtggtgcaaattgcactttctctccggatcatcgtattctcaacagcgccgagccacaacacgatgtactcatacaaagacgcagataggcgtcgggagtgggtcgctcatcttcaggctggtgcaggcattgttgccgacagtagcccagatgacgaacaacgtgaatgcgagaataaggctgctgcactagctcg

SEQ ID NO: 24371 - DNA, 216 bp, Zea mays
gcatgtgaaccgtactgagtatcagctgattgatatttctgaggatggatttgtgagccttcttacttcagatggcaacactaaggatgatcttagactcccaactgatgagactcttgtggcccagattaaggaagggttcgaaagcgggaaggatcttgttgtgactgtccagtctgcgatgtgggaggagcagatctgcgtgttgaaggatgt

SEQ ID NO: 24372 - DNA, 219 bp, Zea mays
ggtggacgtgtggttttgttcgaaagaacagacattgctgataatgcttgtcgaagagaacttgagaggcaagaatatcttgtttctaggcatcctgagttccgttacaagaccgaatttcagagtcatgaacctgagtttgactacctaaaaagtttggaaatagaagagaagattaacaagatcaagtggtgccaaacaaccaacaatgcactcttt

SEQ ID NO: 24373 - DNA, 217 bp, Zea mays
gttcaaacttctgtaaataatgtcatcgatgatgtactcggttcctgtgaggtattcgaggaaaagcaagtaggcaatgaaaggttcaacatatttagtggctgcccttctggccagacagcgactattgttctccgtggtggtgcagaccagttcattgaggaagctgaacgaagtctccatgatgccatcatgattgtgaggagagcacttaaga

SEQ ID NO: 24374 - DNA, 216 bp, Zea mays
cgaagagactctgtcttccactgcccagaccacgattgagattgactcgctgtatgagggcatcgacttctactccaccatcacccgtgccaggtttgaggagctcaacatggacctgttcaggaagtgcatggagcctgttgagaagtgcctgagggatgccaagatggacaagagcaccgtccatgacgttgtacttgttggtggctccactag

SEQ ID NO: 24375 - DNA, 213 bp, Zea mays
cgttcagttcagttcatccgtgttcttgtttgcgaggtcgagagagactgagagaggatgtcgtgctgcggaggcaactgcgggtgcggctccggctgcaagtgcggcaacggctgcggagggtaagccccgtccagtccgcgttgcgctcggacggagtcagatctgacggatgaacatgtgtgtgtatatatgtggtttccggccctgatc

SEQ ID NO: 24376 - DNA, 213 bp, Zea mays
acccacgcgtccggctggcccatcgggctgggcatccccacggcactcatgttcctggcatgcgtgctcttcttcatgggcacgcgcctatacgtgcgggtgacgcccgaggggagccccttcaccagcgtcgtgcaggtgctatcggccgcgctcaagaagcggtcgctgaagcagcccaaggacccgaagcaggacctcttcgacccgccg

SEQ ID NO: 24377 - DNA, 212 bp, Zea mays
atcaagtgggcttctcgctgggacacctacttgttaatgatagatgatcaaattcactggttttctattgtgaactctctcatgatcgtactcttcttatctgggatggtggcaatgattatgctccgcaccctttatagagatatctctaggtacaatcagcttgaaactgaagaagaagcccaagaggagacaggatggaagcttgttca

SEQ ID NO: 24378 - DNA, 214 bp, Zea mays
tgctactacacactttgagacaactgtgacagatgttctcagtatgtacacagcaattactggaaagaccgttgatctcagtgtggacctgagcgctgccagcgcagctgaagaatactagagattttcctattagagataccatactctaaagaagaacggtgttaacacaggccctgcctggtggcttgccaggtttagatctatgctgcag

SEQ ID NO: 24379 - DNA, 211 bp, Zea mays
agcaagtgaagctcccaaatactggtggaagactaataattgcatcagatggaatatgggacgctctgtcctcagagagtgctgctcaggcgtgccggggattacgtgcagaactggctgcaaaacttgttgttaagcaagctctgaagacaagtgggctgaaagatgacaccacatgtgtggttgtcgacatcatcccatctgatcattg

SEQ ID NO: 24380 - DNA, 252 bp, Zea mays
tgaaatctgagaaggaaaatgcagagatcagattgtctgaccctctgcaataccaatcaattgttgatgctgagtggaacattatttatgacaaactggataaatgtgtgaaaagtggagcaaagatagttctgtctcggctagctattggtgatcttggaacacagtattttgcagatcgagacattttctgtgctggccgtgtcactgaagaagatttgcaacgtgttgctgcagcaactggtggaactg

SEQ ID NO: 24381 - DNA, 249 bp, Zea mays
gaagctcgtctctgccaccaaggagggcctgaagctggacgagagtgaggatgagaagaagcgcaaggaggagctcaaggagaagtttgagggcctctgcaaggtcatcaaggaggtgctgggcgacaaggtggagaaggtggtggtctccgaccgcgtggtggactcgccctgctgcctggtgaccggcgagtacggttggaccgccaacatggagcggatcatgaaagcccaggcgctgagggactc

SEQ ID NO: 24382 - DNA, 253 bp, Zea mays
ccgaaccccaaaccctagcttcgctcgttgcagcggcgagccggcgatggcgaagtctctgcgatccaaacgcgagaagcggcttcggacgttgcgccgggagatagcggaccgttctacgacaagaaggaggccgccaagctcgccgcgcaggccgccgccctagctgctgccccgctcccggtccgcgggcccccgccatcccaggatgccggcagctcccgcgcactgagctcggcctcggctatggatg

SEQ ID NO: 24383 - DNA, 238 bp, Zea mays
agccctcaaatgagaagtctgatgtttacagcttcggtgtaatcttatgggagcttatgacattgcagcagccatggagtaatttaaatccagctcaggtcgttgcagcggttggtttcaagggacaaaggcttgagatcccaagcagcgttgatccgaaagtggcggcagtaatcgagtcctgctgggtcagggagccctggagacgaccctcttttgccagtatcatggaatccct

SEQ ID NO: 24384 - DNA, 246 bp, Zea mays
ttacccgcaggtacgtccgaattccgggtccgcggacgcgtgggcggaccgtgggcggacgcgtgggcagtgacgaggttccagggcggcggcgcgttcaacgtgatcccggactccgtggcgatcggcggcacgtttcggtgcgtctccagcgagggcttcatgcggctgaagcgtcgcatcgaggaggtgatcgtttcgcaatccgcggtgcaccgatgcgccgcgtccgtggacttcggcgcc

SEQ ID NO: 24385 - DNA, 252 bp, Zea mays
agcaaatgcagcatccttgcaatgagtgcaagggttctggagagaccatcagcgataaggatagatgcccacaatgcaaaggtgataaagttgtgccggagaagaaagttcttgaaatggtagttgagaaaggtatgcagaacgggcagaagatcacattccctggcgaagctgatgaagcgcctgatactgccactggagatatcatctttgttctccagcagaaggagcatcccaagttcaagagaaagg

SEQ ID NO: 24386 - DNA, 246 bp, Zea mays
cccacgcgtccgaattaccctcggtgccctccctctcggcggcggcggcgcaagtccccttcatctccggcgcggcaaatggcaggcggcagggttgcacatgctaccctcaagggccccagcgtggtgaaggagatcttcattggactgaccctgggtctgatcgctggaggtatgtggaagatgcaccactggaacgagcagagggaaactagatccttctacgacatgcttgacaagggccag

SEQ ID NO: 24387 - DNA, 248 bp, Zea mays
tgtgttgttcggagcgggcagcagcacacagccccatcccaatcctagtcgatcttcttcccctcctcaaggaagaaaagaagctgaaccatggggaagagaaagtcagctgctaagccacctcctaagaagcggatggacaagcttgacactgtcttttcctgcccattctgcaaccacgggagtagtgttgagtgccgaattgacatgaagaatctgattggcgaacatcttgtagaatctgtcag

SEQ ID NO: 24388 - DNA, 246 bp, Zea mays
ggctccatcaccagctcagccagcagctgcaccaccagtgcagtcatctgccgcctctgcaaggcctaatgcaaatcctctgaacctttttcctcagggtgtcccaagtggtggggccaatccaggtgttgttccagctgcaggatctggtgcccttgatgccttgcgacagcgtccacagtttcaagcactgcttcagttggtccaggctaatcctcaaatcttgcagccaatgcttcaagaact

SEQ ID NO: 24389 - DNA, 244 bp, Zea mays
cggacgcgtggtagaccttagaactgcaaaagatggagagtatgttaaggttactggggttgttacttgtggaaatttgccccttgagtcctcattccaacgggtgccacgatgtgtgtacacttcaacttgcttgtacgagtacaggggttgggactcgaaagccgcaaacgccacacaccgacggtttacttggggtctcaggtcaatggaacggcacgcggtggacttctacatctccgat

SEQ ID NO: 24390 - DNA, 246 bp, Zea mays
cccacgcgtgggctcgtcctgcgggcggcggacaggctgggcctcggcggcgtgtacacgcacctgggcgtgatgctgcagctggaccacaaggtgtcgccgttcctcaaggagaccctggacctctcgtgctaccacaacctggaggcgcacctgcacctgctggacggcttccgcggctccggcgcggggttcgagccccgcgggagggaccccgcgctggtgaacaagtccaccgacttcctc

SEQ ID NO: 24391 - DNA, 247 bp, Zea mays
gcgaatcacctcgagcctctaactgagcagcaaatgctgggtttgaccaacctccagcaatcttcccaacaagcagaggatgcgttgtcacagggcatggaagcactgcagcaatctttggcagagactttggctggatctctcggtccagcaggttcttcaggaaatgtggcaaactacatgggtcagatggccatggccatgggcaaactcgggacgctagagaattttcttcgccaagccgaca

SEQ ID NO: 24392 - DNA, 189 bp, Zea mays
aggaaagggttcgtactcatggcgccgccgcagccaaagtcgggccttttcgttggcatcaacaagggtcatgtcgtcaccaagcgcgagctgcctccccgcccgtgccaccgcaaggggaaatcaacgaagagggtgtctatggtcaggggcctgatcagacaggttgctgggtttgctccttatgag

SEQ ID NO: 24393 - DNA, 238 bp, Zea mays
gaaggccaaggtggcggactttggattggtccggcttgcaccagctgatgggaagtgtgtctccgtagagacaagacttgctggcacttttgggtaccttgcaccagagtatgcagtcactggacgagtgaccacaaaagctgatgtcttcagctttggtgtcatcttgatggaactgattacaggacgcaaggcgcttgatgagactcagcccgaggatagcatgcatttagttaca

SEQ ID NO: 24394 - DNA, 239 bp, Zea mays
cccacgcgtccgtgtctttagaggagttgtgaagatgagacgtggtctcacggcacgaataattgacgagacaaactcaatgacagatgtctatactgctttctatgagttttcttcattgatagagtcaaagattgatgacagtgatccaaatgctgctctaacacagagacgtgtggattcaataaagcaaacttgcaaatcatctggtttggtaaatcaaagggggtaccatttgg

SEQ ID NO: 24395 - DNA, 113 bp, Zea mays
ggccttgatatcactccgaagatcctcattgttaccaggctgttgcctgatgctgctgggactacgtgcggtcagcggctggagaaggtcattggtactgagcacacagacat

SEQ ID NO: 24396 - DNA, 109 bp, Zea mays
ggctgctccagctgctacggttgctgctactgatgatgctgatgtgtacagtcaggcagcttcaaaccttgtatctggcaacaatctagaacagactatccaacaaatt

SEQ ID NO: 24397 - DNA, 106 bp, Zea mays
cccacgcgtccgatgacgccaactcctcctacggccgctccccctactcccgccgcctctccgacttctccagctccgacttcacgctctcgatccacgacccgca

SEQ ID NO: 24398 - DNA, 112 bp, Zea mays
tgaagcacgccaaggaggtgaacgccatggacccgctgctgaagccgaagcaggacaggtacgcgctccgcacgtcgccgcagtggctcggcccccagatcgaggtcatccg

SEQ ID NO: 24399 - DNA, 110 bp, Zea mays
cccacgcgtccggatgagaagaaagttgtttcatctactggtgcactgtgcttgtcagagatcccgaagaaactggtggtaattggagcaggttatattggccttgagat

SEQ ID NO: 24400 - DNA, 109 bp, Zea mays
ggacgagaacctcaggagggagctgttcgggctgccgtccaggtacagggactctgtgcgtgctatccgcccgggactgcccctcttcctctacaactactccacgcac

SEQ ID NO: 24401 - DNA, 106 bp, Zea mays
  unsure (1)..(106): unsure at all n locations
cggancgtacagcaaaccgctctttgttgccccagccatgaacacgttaatgtggaacaacccattcacggagcggcatcttcacacaatcaaccaactgggcata

SEQ ID NO: 24402 - DNA, 103 bp, Zea mays
  unsure (1)..(103): unsure at all n locations
cgacgggcngagacgcgtgggcaagcctagctgacacatctgcgaacataattttcggtgctgtcgttgatgaccgttacactggtgagatacatgtgacaat

SEQ ID NO: 24403 - DNA, 103 bp, Zea mays
gtgcgtcaagtacctccccgtgtacacagtgccgacggaggagcggttcctggtgcggaggatcgggcccagggacttccacatgttccggtgcgtggcgaag

SEQ ID NO: 24404 - DNA, 103 bp, Zea mays
gagttacttccaatcgtgtacactccaaccgttggcgaggcctgccaaaaatatggatccatatttagtcgccctcagggtctttatatcagtttgaaggaga

SEQ ID NO: 24405 - DNA, 103 bp, Zea mays
tgacaaatacatatcaaatattgcaaatatgctaaatttcaaagataacaatataaacaatgaggggatgcttcgtacagttcttgatgttggttgtggagtt

SEQ ID NO: 24406 - DNA, 247 bp, Zea mays
ctaatgggcaaccaattgttccttgcggccttattgcttggagcttgtttaatgatacatataatttcactcgtggtaatgagaacttgacagtggacaagaaagacatctcctggaagagtgatagggagcataaatttggtaaagatgtctatccgagcaacttccagaatggtgcacttaaaggtggagcaacacttaacccaaagatcccgttgagtgagcaagaggacctcattgtttggat

SEQ ID NO: 24407 - DNA, 244 bp, Zea mays
cccacgcgtccgctcaggtgttggcaaatcttcattggtgcatctcttactgaaagattctgcagtggctcgaccagcccaaacaattgggtgtgcagttggtgttaaacatattacttacagtagcccagggagttcatctaatagcgtcaagggtgatgctgaaaggaacttctttgttgagctttgggatgtttctggacatgagcgctacaaagagtgccgttcacttgtttattcacaa

SEQ ID NO: 24408 - DNA, 216 bp, Zea mays
cttcagtaagcaaattaagtcccgcggagaagtacattcaggtcgtatccattgaaggccacgagttctggttcatgggttttctaatgtacgacaaggctgcaaccactcttcaagaagccttggctagcgcacgtgagttgcaaccgtgaagacaccggggtaaatggtgtttcttccggttacatcagtttccacatcttgagttcaggctgg

SEQ ID NO: 24409 - DNA, 237 bp, Zea mays
cggcatagctacatttacaatgatgttgttaggaagagtgatcctcagaaagtttgggtggggagttgcagctacaatcacgcctgcagtgttactcctcacaggagttgggttcttctcactgattttgtttggtgagccattgactcctcttatgaccaagtttgggatgacacctttgcttgcggcagtctatgttggagcaatgcagatcattttcagtaagagtgcaaaata

SEQ ID NO: 24410 - DNA, 223 bp, Zea mays
gctgactggcccagtcacaatcctcaactggtccttcgtccggaatgaccagccgaggtttgagacttgctaccagatcgctcttgcgatcaagaaggaagtcgaggatctcgaggctggtggtattcaggttatccaaatcgacgaggctgcactgagagaagggctgccgctccgcaaggctgagcatgcattctacttggactgggctgtccactccttc

SEQ ID NO: 24411 - DNA, 245 bp, Zea mays
cccacgcgtccgcccacgcgtccggcctcgggtcaaaccctaagcagggagttgatttatccgctgcagccatgagtaagttgcagtctgagtctgtcaaggatgccatctcccagattgttggggatgccaaggagaagaataggaagttcactgagactgtggaacttcagattggtctgaagaattatgatccacagaaggacaagcgtttcagtggctctgttaagttgccccatatccct

SEQ ID NO: 24412 - DNA, 241 bp, Zea mays
atcagctggtatctgtggctttttgtaatcttattcctgctgctgaatataaatggatggcacacatacttctggttggctttcttgcctctatttctgttacttattgttggtgccaaactagaacacattatcactcggttggctcaagaggcagcgatatcattatcaaataatacagaggaagttccgaaaataaagccatgcaaggaccatttctggtttcacaagcctgagctag

SEQ ID NO: 24413 - DNA, 245 bp, Zea mays
cccacgcgtccgcccgatcccgctcgctcgccgccagttgtcccgcagctcggatcgtctcatacctcggcgaaaatgagagagatcttgcacatccagggagggcaatgtggcaaccagatcggtgccaagttctgggaggtcgtgtgtgacgaacacggcattgacactacaggtcggtacactggcacttctgaccttcagttggagcgcgtcaatgtctactacaatgaggcctcctgtgg

SEQ ID NO: 24414 - DNA, 238 bp, Zea mays
ggggacagccatggcctccgggtgatatcaagcaaatatctacacctgtacgtgtgcaaggccttgagaaagtgagggtcattgctgtaggtgcattccataatttggcactaacggaggatgtaattttgtgggcatggggtaataatgagtatggtcagctggggactggagatacccaaccaagatcacaaccgatacgtgtcgaagggctatctgatctctcactggttgacat

SEQ ID NO: 24415 - DNA, 237 bp, Zea mays
ctctaaaatttcccccactcgccagtcgcagcagcacctgtagcagccatggacgccagcggagccggtagcattgggaagaagggggcggccgggcgcaaggcaggcggccccaggaagaagtcggtgacgcggtccgtcaaggccgggctgcagttccccgtcggccggatcgggcgctacctcaagaagggccggtacgcgcacgcgtgggcactggcgcccccgtctacctcg

SEQ ID NO: 24416 - DNA, 235 bp, Zea mays
caagctgctcgtcgtcaccgacggggacaagggatgcaggtacttcaccaaggacttcaagggcagcgtgcccggcttcaaggtcgacaccgtcgacaccaccggcgccggcgacgccttcgtcggctccctcctcgtcaacgtcgccaaggacgactccatcttccacaacgaggagaagctccgcgaggctctcaagttctccaacgcctgcgtggccatctgcaccaccaag

SEQ ID NO: 24417 - DNA, 224 bp, Zea mays
ggcagcgtagtccatggccatgatgatgtgtctccagcttgagaaggccgaggtccaaatggagctccaccagttccactgagttttgcttaagtcttctggatggcacactcctgtcgtaccacaaatcagaaccaatgcgtcaataggcaccgtagttgataataatatctgccacccaacagaatttgatttcttcgtgtgcatccatgctggggccaagg

SEQ ID NO: 24418 - DNA, 233 bp, Zea mays
cccacgcgtccgcaccaagccatcccatggacccatccacttccgcgccccgtccaagatcctgtggcgcaccatccgcgggatgattccgcacaagaccaagaggggggaggcggctctggcgaggctcaagacgtacgagggcgtaccgccgccgtacgacaagactaagcgcctggtcatccctgacgctcttaaggttctgaggctgcaaccaggacacaagtactgcc

SEQ ID NO: 24419 - DNA, 234 bp, Zea mays
ggacaacaggcagcttctcatcaaatcagaccctggtgaagttgttaaacctgaccaattcaaggcgattaacgatgaggggatgccaatttaccagaggcctttcatgaaggggaagctgtacatccatttcacggtggagttccccgactcgctggcaccagagcagtgcaaggctctcgagacagtacttccaccaaggccttcatcaaagttgacagacatggagatagt

SEQ ID NO: 24420 - DNA, 212 bp, Zea mays
gcgaggactcgcggccggcgcacggcaggttctcctagatctccggcatcatcagtaacaaatggctgacggtgaggacattcagccccttgtttgtgacaatggaactggcatggtcagagctggttttgctggtgacgatgcgccaagggctgttttcccaagcattgtcggacgcccccgtcacactggtgtgatggtttgcatggggc

SEQ ID NO: 24421 - DNA, 227 bp, Zea mays
aaaatccccattcgttccccttctcgcctccacgagccttcacaaattgccctctcagctcttctcctaatctcactctagccctagccaaatcccagacccatcccagccctagcgacaccaaccagctcgccagcgaccatggggaacccggagaagctgatgaatcagatcttcgacctcaagttcacctccaagtcgctgcagcggcaggcgcgcaagtgcga

SEQ ID NO: 24422 - DNA, 235 bp, Zea mays
cccacgcgtccgcccacgcgtccgctgggaagcgatactcctcaaagcaactagttaacaaacaaagaaaagctggtcgtgaaataggtctggtgattgatttgacaaataccaccaggtattattcaccagctgaatggacgaagcaaggtactaagtatgcgaagattgcatgcaaggggagagatgcggtacctgacaatgaatctgttaataagtttgtctatgaggcaat

SEQ ID NO: 24423 - DNA, 224 bp, Zea mays
gatactaatgatcggattgacattgttgccctttcagcaaaagtacccattcttttctacgacgaggttatcttgtatgaagatgagttagctgacaatggtatctcatttcttactgtgcgagtgagggtaatgccaactggttggtttctgcttttgcgtttttggcttagagttgatggtgtactgatgaggttgagagacactcggttacattgcctgtt

SEQ ID NO: 24424 - DNA, 237 bp, Zea mays
gcttactgggcgcacagctttgctcaagatctggaaagagcatgcagagaccattacagccgaagtgttgggctattgggtttggcctgaatttcagagtcattgctctttctcctggcttcagaaagctttcttcggagcactttgtttcttcttataacagggcttctagaagggcaatatttctcgactacgacggcacacttgtgccccagtcgtcaatcaacagagctccaa

SEQ ID NO: 24425 - DNA, 237 bp, Zea mays
gacatgatcaccgccggcacggacacgacggtgatctcggtggagtgggcgatggcggactgctgaggaaccccagagtgcaggagaagctgcaggaggagctggaccgtgtcgtcggccgcgaccgggtcctgtcggagacggacttcccgaacctgccttacctgcaggccgtcgtcaaggagtccctgcgcctgcacccgccgacgccgctgatgctcccccacagggccagcg

SEQ ID NO: 24426 - DNA, 119 bp, Zea mays
  unsure (1)..(119): unsure at all n locations
tgnacacgcgtccggtcgaccccgcatacgtacactccaagcgccaagccaccggctaccaagcctccaacgatcaagctgagcccgccgacgtacaccccttctcgcaagcctccgag

SEQ ID NO: 24427 - DNA, 226 bp, Zea mays
ggcagcgagggcggcaaggactactggatcgtgaagcctcccaacgtgtgcaacgcggagtactcgtgcccggaggccaccacctgctgctgcgtctccgagtaccgcggcaaatgcctcgcctacggctgctgcgagctggagaacgccacctgctgtgaggaccactcgtcctgctgcccgcacgactaccccgtctgcaacatccgggacgggacctgccgta

SEQ ID NO: 24428 - DNA, 155 bp, Zea mays
gcacgcaccaaaaaaaaaagaaagctataattttctttttttcttttcttctttcgtgtttgaaacccattatcaggcttttgcttttgatattctatatctatctaatattataaagctatttcactggtttgatttacatacctcagccaggt

SEQ ID NO: 24429 - DNA, 236 bp, Zea mays
agagcacacacacgcaaccagatctcccccaaatccagccgtcggcacctccgcttcaagatgcagatctttgtgaaaaccctgactggcaagactatcaccctcgaggtggagtcgtctgacaccattgacaacgttaaggccaagatccaggacaaggagggcatccccccagaccagcagcggctcatcttcgctggcaaacagcttgaggacgggcgcacgcatgctgacta

SEQ ID NO: 24430 - DNA, 204 bp, Zea mays
cttctgagccaccttatacggaatatgtgtccactcgttggtatcgtgcccctgaagttcttcttcaagctactgtttataatgctgcagttgacatgtgggcaatgggtgccattatcgcggactattttcactgcgacctctttttcctggatcaagtgagccagatgaactttacaaaatctgtagtattatggcccccaa

SEQ ID NO: 24431 - DNA, 225 bp, Zea mays
ctgggaatggagattccagtcgagaagattttccttgcgcagaagatgatgatctacaagtgcaacattgctggcaaacctgttgttactgctacccagatgctcgagtcgatgatcaaatctcctcggccgacacgtgctgaggccactgacgttgcaaatgccgttcttgatggaactgactgtgtcatgctcagcggagagagtgccgctggagcctacccc

SEQ ID NO: 24432 - DNA, 228 bp, Zea mays
catatcgtgaacccgccgccgacgcagcagcaggagacgcgccaaggagagcccgcaaggaggcgactattagggccaagtggaagaagaagcgcatgaggaggctgaagaggaagcgccgagagatgaggcagagatccaagtaggctgatgaggattgtggatggtggtgtcggcatagttgggttacgtttcatcgatgcgtgagttcatggagagatgtcacat

SEQ ID NO: 24433 - DNA, 238 bp, Zea mays
ctgttctcaggttggcctgtgcacttttgatggcactcacggtgttagcgctggaattcgtagcgtagtggatgacaaagctgggaaatcaaatggtggtctcaagagtgatccaatgtgcaatgcctgtgagatggctgtggtatggatgcagaaccaactggcccagaacaagacacaggagctcatcctgacctacattaatcagctttgtgagcgtcttccttctcccatggga

SEQ ID NO: 24434 - DNA, 237 bp, Zea mays
gtttttgattttagccgccgccgctgctcatctcacatccctcgagaagacgcctgctcctcgccgatcgatacgatggccgtcttctccgacctccacaccgccgacggcctcaagtccctcgaggctcacctcgccggcaaaacctatgtgtctggtgactccattactaaggatgacattaaggtcttcgccgcggtgccgtcgaagcctggcgctgagtttcctaatgccgcc

SEQ ID NO: 24435 - DNA, 237 bp, Zea mays
ctcatcttttctcgtttagaacctctaaaatttcccccactcgccagtcgcagcagcacctgtagcagccatggacgccagcggagccggtagcaaggggaagatgggggcggccgagcgctaggcaggcggccccaggaagaagtcggtgacgcggtccgtcaaggccgggctgcagttccccgtcggccggatcgggcgctacctcaagaagggccggtacgcgcacgcgtgggc

SEQ ID NO: 24436 - DNA, 146 bp, Zea mays
ctcacgcgtccgcggacggtgggtgccttccactggatactgtcaaggtatgagtgatctgctgtcaccttttgttgtaatatatgaggatgatgcagatgccttttggtgctttgagatgctactgagaaggatgcgtgaaaatt

SEQ ID NO: 24437 - DNA, 234 bp, Zea mays
ctccaagctcagctgagctccacttcagctctaatcacaggcgtgatcagagcgcgagagctatctagatggccgtgaaaatgccgatcaataggatcgccctgtgtagccacctatgaggtgtaccacccgggcgccctcaaggcggcgttcgctgagttcatctccaccctcatcttcgtcttcgccggccacggctctggcatggccttcagcaagctgaccggcggtggt

SEQ ID NO: 24438 - DNA, 232 bp, Zea mays
gaagatcgtctctcagattatcaagcgcaaagattcacacctgtataggcatctgcagaagttgcaggctgaggactgtttctttgtgtacagaatggtggtagttctcttcaggagagagctcacttttgagcagactgtgtgcttgtgggaggttatgtgggctgaccaggcagctatacgagccgggatcgggaggtccacctggggaaggataagactgcgtgctccc

SEQ ID NO: 24439 - DNA, 235 bp, Zea mays
gagagcttgttccgtccaggcaaccaaaaagcaagttgccccgccgcgcagaggaagaagagagcagaggaggatggctcgtacgaagcagaccgcccgcaagtccacgggaggcaaggccccccgcaagcagctcgccaccaaggcggcgaggaagtcggcgccgacgaccggcggcgtgaagaagccccacaggtacaggcccggaaccgtggcgctgcgcgagatccgcaag

SEQ ID NO: 24440 - DNA, 231 bp, Zea mays
  unsure (1)..(231): unsure at all n locations
cccacgcgtccgcggacggtgggcgaccgtggncagcgacgcgtgggtagcgaagaagtgaggagaaggttatacaagcactagtgcaagagcacgaagaaggctttcacaaagtatgctctcaaatatgaaaatgatgctggcaagaaggaaattcagctgcagcttgagaagatgaagaaatatgcttctgttatccgtgtcattgctcatacccagattaggaagatg

SEQ ID NO: 24441 - DNA, 233 bp, Zea mays
gcggcggacgtacagtttcttctgtgaccctgacgctctgggagagaacctgtacacgattataaagttcggccttgttcaatacatgattctcaagacactatgcgctctcttggcgttggtcttggagccttttggagcctatggagatggcgaattcaagtggaattacggatatccttacattgccgctgtcataaacttcagccagacatgggcgttgtattgccttg

SEQ ID NO: 24442 - DNA, 239 bp, Zea mays
cccacgcgtccgtgcaaaagggtggcgtggcaaaactcgtttcaaccctgccggcagcaagacttacgtgagatagtacagccattcaccaccctcaactctcctggaaggcaggggcactcagagcggtgcacatgttgatataatggggaacttcgctttgatcgaggacatcatcaggatagctgccggggcaaccggtgaggaaattggtggcgaccaggtttattcagatatat

SEQ ID NO: 24443 - DNA, 229 bp, Zea mays
cagaatcatccccagcttcatgctccaaggaggtgacttcactctcggggacgggaggggtggtgaatctatctacggcttgaagtttgcggatgagaacttcaagatcaagcacactggtccaggccttctgtccatggccaatgccgggagagatacaaacggatcccagtttttcatcaccacagtgacaacaagttggttggacgggaagcatgtggtgtttggc

SEQ ID NO: 24444 - DNA, 228 bp, Zea mays
catttttgtggagtttggaatttactggatgcacagagagttgcatgacataaagccactatacaaacatctgcatgcgacccaccatatttacaacaaggagaacacctggtctccgtttgctggactcgcgtttcacccactggatggtattctgcaagcgataccgcatgtgcttgcgctcttcctcctcccaacgcacttcaggacgcacatcgctctcgtgtt

SEQ ID NO: 24445 - DNA, 228 bp, Zea mays
gttggtttatcaggatctcctatctggcgacgagctcctgtcggattcattcacctacaaggagctcgagaacggcgtcctgtgggaggtcgagggaaagtgggtcacccaaggtcctgttgatgtggacattggtgccaatccatccgccgagggtggtgaggacgaaagcgttgatgacacagctgtgaaggtggttgatattgttgacacattccgtctacagga

SEQ ID NO: 24446 - DNA, 225 bp, Zea mays
cccacgcgtccggaatcatcactttttctgggaatcgatgcaaccagaaggtggtggcttacctgagggaggtgtgctatagcagattgaaaaggattttggcttgtttactaattttagggaagagtttattcgttcagccttacaactattggggtatggttgggtttggcttgcttgtaagtttctttctattttctttgaagtacagacaccaccggttca

SEQ ID NO: 24447 - DNA, 227 bp, Zea mays
ggactcccagctaaggcaatgctgcagaaaatgcgaatgtttagtacgtactttgaacgagatatacgcagcgcagtcggaatgggtgatagcagatgaccagctaagggtggacattagggcagcagtggaggagacagtgatgccagtttacgcctctttaattgccaagttgaagtcttctcctgaaactgggcgggatttgtacatcaaatacactccagagg

SEQ ID NO: 24448 - DNA, 228 bp, Zea mays
cccacgcgtccgcgcacgcgtccgggcccccgtgccgaggcccggcgccctgggcaagcagggggtggcgctgcggatatcggcggacagcgcggcgttcgtggggtgcaacttcctgggcgcgcaggacacgctgtacgaccacctcggccggcagtactaccgggactgctacagcgagggctccgtcgacttcatcttcgggaacgcgctctccctctaggaggg

SEQ ID NO: 24449 - DNA, 230 bp, Zea mays
cgcctctcgcgcatcctaccaggagggtgggagacccaggcagcggaggtgtgcgaactcgcttcgcaccacgcgctgcggcctgcgggggagagctcgaggcctgagctagggtctggtggcggagatgtcgacgccggcgaggaagcgcctgatgcgggacttcaagcgccttcagcaggacccgcccgccggcatcagcggcgcgccgtacgacaacaatatcatgc

SEQ ID NO: 24450 - DNA, 232 bp, Zea mays
aagagattgagtatgaccgtactggtcgaataatcaaaggacaggatgtatctcttcccaagagcaaatatgaagaggatgtgttcattaataatcacacgagcgtgtggggttcatggtggaaagatcatcaatggggctacaagtgctgcaagcagactatcaagaatagttactgtactggcttggctggaatagaagctgccgaggcatcagcagatctaatgaaggc

SEQ ID NO: 24451 - DNA, 247 bp, Zea mays
tgcacgacgcagctttcagttttgttttgcttgatggcacctggagcaattctgctgcagtgtacagaaggttgaaggagagatggactgcagtatggggagcatgaagctctaccttgtattgcactatgtacacttagtgcctcagtgatgcataaactacgaccgcagcctgactgggatcgtacctgcactgcagcagctgcagctggcgtcctctgggagttgagctcgcggcctgaggtca

SEQ ID NO: 24452 - DNA, 238 bp, Zea mays
ttcaggacggacctttcaattttgttttgcttgatggcacctggagcaattctgctgcactgtacagaatgttgaaggagagatggactgcagtatggggagatgaagctctaccttgtattgcactatctacacttagtgcctcagtgatgcataaactacgaccgcagcctgcctgggatcgtacctgcactgcagcagctgcagctggcctcctctgggagtttagctcgcggcc

SEQ ID NO: 24453 - DNA, 239 bp, Zea mays
ctgaagctcacatccggcataacatgggaggcctgtcggtgcagaacgcactgaggaacaagaggctcttcatcctagaccaccatgaccatttcatgccgtacctcgacgagatcaacgagctggaggggaacttcatctacgccagcaggaccctaccgttcctgaaggacgatggcacgctgaagcccctggccatcgagctgagcctgccccaccctgacggccagcagcgcggc

SEQ ID NO: 24454 - DNA, 238 bp, Zea mays
cccacgcgtccgaaaacctcttgtcggaattcagtgccagttacttactctagtttatggtaatcccaagtaagccttctgagccgacaccgccgtttacttccatggacagcccttttacagcggctaggtaccacagcttggtcattgagaaagaaaccttcccacatgatgctttggaggctaccgcatggactgaagatggactcatcatggctgctcgccacaagaagtacaa

SEQ ID NO: 24455 - DNA, 239 bp, Zea mays
cccacgcgtccgctgaattcatggtgaatggctcactaaggaatgttcttttaaggaaagacagaatgcttgatcgccggagaaaacttacaattgctatggaagcggcgtttgggatggaatacctgcactccaaaagcatagtgcattttgatctgaaatgcgacaacttacttgttaacttgagagatcctcagaggccaatttgcaaggttggagactttgggttatcaaggatc

SEQ ID NO: 24456 - DNA, 231 bp, Zea mays
gaagattgtcatggatacctgccgcaacattggctttgtgtcatacgatgctgggattgacgcctaccactgcaaggtgctcgtgaacattgatcagcagtcccctgatattgctcagggtgtgcatggccacttcaccaagcgccctgaggagattggagctggtgaccagggacacatgttcgggtatgctacctattagacccctgagttgatgccgctcagccatgt

SEQ ID NO: 24457 - DNA, 230 bp, Zea mays
ctcacgcgtccgggcgatcaagaggtttcaggtgaggaacatcgtggaacatgcggccatcatggacgtccagtaagcatgcgtctatgatggctacgtcctcccgaagctgtacgccaaggtgcaccactgcgtctcgtgcgcgatgcacgctcgcatcgtccgcgtccgattccgtgagaagcgcagggaccgcaagccgccggagcgcttcaggctcattcaggata

SEQ ID NO: 24458 - DNA, 232 bp, Zea mays
cccacgcgtccgctctctcgcatccgcagcctctcgagctctactccatcgcctcgatctcgaagcgcacagcagcagtcaggcggccatggacgccagcgcacacggagccggcgggaaggcgaagaagggcgcggccgggcgcaaggccggcgggccgaggaagaagtcggtgacgaggtccgtcaaggccgggctgcagttccccgtcggccgcatcgcgcggtatctg

SEQ ID NO: 24459 - DNA, 227 bp, Zea mays
cacaagtttcgtgggtagaggaggcactagatactgtgccagatcggggtctggtagtggcagttgggtgattacgacggagtgggatgggcctcctcgacaagctgtgggacgacaccgtcgcgggcccgcacccggacaccggcctcggccgcctccgcaagcagcccgcgcaggacgccgccgttaagatcagtgatccggccggggacgctgcagcgctcgtg

SEQ ID NO: 24460 - DNA, 235 bp, Zea mays
ggcggcgggtgggacggcgaagccgtggtgtatgcgcaccgcacgcgggagctagtgcgacttccgcggggcgtcgcgctgcgcgtgacgctaggcccgctccagtatgaggtgttccatggtgccccgctccgcgacgtcgtgccgggggcctcgatccctcccgtcgggctcgctggacatgttcaacgccaggggcgccgttgaggagtgcaacatgatcagcgatgctggc

SEQ ID NO: 24461 - DNA, 233 bp, Zea mays
catttatgaactatcaggagagcatcaggagatgtgtgtgcattgtctatgacccatctagatctagtcaaggcgtgctagctctcaaagccttaaagcttacagactcgtttatggatctttaccgtaacaatggtttaactcgggagaagttaagggagaagaaattgtcctgggttgatatttttgaggagataccaataagagtttccaactcagcgcttgtcagtgcc

SEQ ID NO: 24462 - DNA, 232 bp, Zea mays
ctcgctggcgtggtgggcgtacacgttcccgatgaccggcgcgtccgtggcggcgatcacgtacgcgacggaggtggacaacgtgctgacccgggcgctctgcatcgggctgtcgggcatctccaccgtcaccgtcgccgggctcctggtaaccacggtgttccacgccttcgtcctcagggatctcttccccaacgacgtgtccatcgccatcacgaggaagaagcccaag

SEQ ID NO: 24463 - DNA, 231 bp, Zea mays
cccacacgtccgcccacgcgtccgctgcccgtatttgccggcatgtactgtctcttcttcgcatatgttggtggcgttggcctgagcctccttcagttctgcaacctaaacagctttaggaccaagttcatcatggggttcgctttcttcatgggcctatcggttcctcagtacttcaacgagtacacagccgttgcaagctatggtccggtgcacactggcgccagatgg

SEQ ID NO: 24464 - DNA, 229 bp, Zea mays
cgttgcacatagttgttcacgactgtgcctctgtagatttctggaacagttcaatccagtggtttcgcatacagcctgaaggaagcaagaaagaaattatttgatgcaccacaaaaccagcatatgctccagaaccacatgatgtgggccggtacacccaagctgaagtcaaatctggtggccaaacatcaatcacaaaaattgctggttcagtagatcctggtttgac

SEQ ID NO: 24465 - DNA, 230 bp, Zea mays
tcttgccttggggacaaggaggggaatgcagctggcaatggcttcctgctgttggattcagagtttaatgtcaaaggacgttgggaaaagccaggtcacagtcccttgtttggatatgacttctggtaccagcctcgccacaagacgatgatcagttcgtcatggggagcccctgcagcgttcaggacaggtttcgatcttcaacatgtccaggatggcctgtatggaag

SEQ ID NO: 24466 - DNA, 253 bp, Zea mays
gtagagatagtctcgccttttgctcagttggatattccactgattggccaagtgagtgaaaaattggcatagtcacaaagttgtaggttatttcgtccgctactaagttgattatctttgtattacaatgagatgcagtagagttacattattttccgagcaagattgaagacccccaacttttcacctgggccagagtcgctggaatgtgcactttttgctctggatgatataccattcgattctctagcat

SEQ ID NO: 24467 - DNA, 243 bp, Zea mays
cactgccattgaaatggctaaaggtgaaccccctctggcagatattcatcccatgagagttcttttcatcatacctcgtgaaaatcctccgcagcttgatgagcatttctcgaaaccaatgaaagagtttgtctcactatgtttaaagaagaatccagcagagaggcctagtgccaaggagcttcttaagcatcgtttcataaaaaatgcccgaaagactcgaaagcttgtggagcgaataag

SEQ ID NO: 24468 - DNA, 244 bp, Zea mays
tgacgctggtgatcacgcgtccgtgcccatgctgttgctgagtgctgttggctgcggcactccttacacggaccttcaggtctctcttgcctctgcgacggtcgtcttctgcgacaacgtgagcgctgtctacatggcagctaatcccgttcatcatcgccgcacgatgcacattgagatcgacatccagtttgttcgcgaaaaggtagcactggggctagttcgggtggtccatgtcccctct

SEQ ID NO: 24469 - DNA, 246 bp, Zea mays
attcctcccatctcccaagacctcctcagacccgagaagcgcactgcggccatggacgccaccggcactggagctggagggaaggcgaagaagggagcggccggtcgcaaggccggcgggccgaggaagaagtcggtgacgaggtccgtgaaggccgggctccagttccccgtcggccgcatcgggcgctacctcaagaagggccgctacgcgcaggacgtcggcagcggtgcccccgtctacctc

SEQ ID NO: 24470 - DNA, 218 bp, Zea mays
cccacgcgtccgatctgtttgttgggtcacagatggtccctgatcgctggaaggctgccgggcaggaccgacaacgagatcaagaactactggaacacgcacatccggcggaagctgctgagcagggggatcgacccggtgacacaccgccccatcaacgagcacacgtccagcataaccatatcgttcgaggactggggccaggggaaggcgctcaa

SEQ ID NO: 24471 - DNA, 208 bp, Zea mays
ctcaagatgaagggtgattactacagataccttgctgagttcaagactggagctgagagaaaggacgccgctgagaacacgatggtggcatacaaggctgcccaggacattgctctggctgagcttgctccaactcaccctattaggcttggactggcacttaacttctcagtgttctactatgagattcggaactcacctgatcgcg

SEQ ID NO: 24472 - DNA, 243 bp, Zea mays
ggtccatattgggtaaacttcctggattgggagcacgttttgggacctatgaacttttaacagccttctataaagatcgaagggaggacaactatgtctattattctgaggctatgaaggctggcatagctgctggtgctgtagaggctgttttctgcacaccatttgaacttttcaaacttcgaaaccaagttagttctgtgattccttcaaaagctatgggccctgcaaatgttgctcaag

SEQ ID NO: 24473 - DNA, 245 bp, Zea mays
caacaaggcagcagcacaagcaagaaccacacctcctcccttcgcctgtgatcatgtcgtcttgctgcggcggcaagtgcgggtgcggctccagctgctcctgcggcagcggatgcaacggctgcggtatgtaccctgacgtggagaccgccgccaccagcagcgtcaagaccacggtcctcgccgcgccgaccaccaaggccagcgccggcggcttcgaggcggccaccgagggcggcggctgc

SEQ ID NO: 24474 - DNA, 238 bp, Zea mays
cgcgtctcccttcccagatccatcgactcgctcggaccgcccctcccgtcgtccccgttcgaaggtgcggcagccggcaggcgagcgatttcattcgacatgaatcccgagtacgactaccttttcaaacttctgcttattggtgattctggtgttgggaaatcatgcttgcttctcagatttgcagacgattcttatttggacagctatatcagcacaattggggttgatttcaaaa

SEQ ID NO: 24475 - DNA, 239 bp, Zea mays
caagcaccagcgcggcggcgggggcggcggcgaccatggctgtcggaaagaacaagaggatctccaagggaaagaagggtggcaagaaaaagaccgtcgaccctttctctaagaaggattggtatgacatcaaggcaccgtcggtgttcagtgtgcgcaacatcgggaagactctcgtatccaggacacagggtaccaggattgcttctgagggtctgaagcacagagtctttgaggtt

SEQ ID NO: 24476 - DNA, 242 bp, Zea mays
cactcatcttttctcgtttagaacctctaaaatttcccccactcgccagtcgcagcagcacctgtagcagccatggacgccagcggagccggtagcaaggggaagaagggggcggccgggcgcaaggcaggcggccccaggaagaagtcggtgacgcggtccgtcaaggccgggctgcagttccccgtcggccggatcgggcgctacctcaagaagggccggtacgcgcatcgcgtgggcac

SEQ ID NO: 24477 - DNA, 225 bp, Zea mays
ggacgaggagggcaaccctgcgttcgccctcgtcaacaaggccactgggctcgccatcaagcactccctcggccagtcccacccggtgaagctggtgccgttcaacccggagtaccaggccgagtcggtgctgtggacggtgagcggcgacgtgggcatgggcttccgctgcatccgcatggtgaacaacatccgcctcaacttcgacgccttccacggcgacaa

SEQ ID NO: 24478 - DNA, 224 bp, Zea mays
ggtggatttggtcagccactcggatcaagctggggaatcacttttgacaatgttctgggaccatcaagacgctgtcttgtgctgctctttcaaggaaaagcctgtgtttactttcggcaaccagatgggagttgacatgttagaaacgactttagtcgctctgcaagatctcacccttgacaagatctttgacgagcctggtagaaaggcactacatgcggagg

SEQ ID NO: 24479 - DNA, 226 bp, Zea mays
gagctggggtccccggcgaacaacatgccctgtgggcataggttccactcttcttgcatcctgccatggcttgagctccacagctcttgccccgtgtgccggttcgagctgccgtctgaagagacgaaagatctgaacgagcctagcgatgtgcacagaagaacagagagcacccgagagaacgacagcgagagcggtaacagcgcgtggccccttgtcccttggt

SEQ ID NO: 24480 - DNA, 223 bp, Zea mays
cccacgcgtccgcagggctctccggaggctgaggacctcttgtgagagggccaagagaactctgtcttccactgcccagaccaccattgagattgactcgctgtacgagggcattgacttctactccaccatcacccgtgccaggtttgaggagctcaacatggacctgttcaggaagtgcatggagcctgttgagaagtgcctgagggatgccaagatggac

SEQ ID NO: 24481 - DNA, 190 bp, Zea mays
cccacgcgtccgtgactcttctggtttattgcaaaatacaggagagaatgatccgacaactagaacttttgttaaggtttacaagtcaggatcagtggggagatccttggacatcacccggttctctaattatgctgaacttcgagaggaactgggtcagatgttcggcattaagggtcagtgggacgac

SEQ ID NO: 24482 - DNA, 221 bp, Zea mays
gctacaagacagtggagctgaacaggcctgaggtcgagcagctgcggttctggtgtcagtactggattttgctcgcgtttctcaccgtactggagagagttggggaaagtttcgtatcatggttgccaatgtatagtgaagcaaagctcgcatttattgtgtacttgtggtatccaaagacacgggggactgcctatgtatacgagtcattcttcaagcca

SEQ ID NO: 24483 - DNA, 222 bp, Zea mays
ccacgcgtccgcttcaccaaggatggcttttactggtgatgccttaattatccgggcatgtggaaggactgacttccagggaggaagttctgagcagttgtatcagtcagtgcattcacagattttcacattgccaaaggatacactactttatcctgctcatgactataaaggtttcacggtaagtactgttgaagaggaggctgcctataatgctcgact

SEQ ID NO: 24484 - DNA, 222 bp, Zea mays
atttattgtttgcggtgctacatatgttccaatctaccgtggccaaaaggatatttcttgcccatactgtggatcccggtttgctccttccatcgaagggcagctttgtaccatatgtgagcttgccatagttggggcagacgcctcaggcctggtctgctcccctacgcagatgaagtagacgatgttatcttacctcctgctgtccgcatcttcagcagc

SEQ ID NO: 24485 - DNA, 223 bp, Zea mays
gaagcacttgattcaaacgatccgaaaggttgataggagcagatcccttgaaattcttttcagcaggcattgtcccatatggtatggctatggaggtcggcttaaattcctggagagatttgcttatatcaacacaacaatttatccactcacatcaatcccgctcctcctgtactgcatattgccagcagtttgtcttctcactgggaagttcatcatccca

SEQ ID NO: 24486 - DNA, 221 bp, Zea mays
ggagtaagacgtgtttgggttggacaaaacagtctcatgtctactcctgctgtatctgctgtcatccgtgaaagagttggtgcagatggatcaaaggctactggtgccttcatcttgacagcgagccataacccaggtggtcctaaggaggacttcgggatcaaatacaacatgggaaatggtgggcctgctcctgaatctgttaccgacaagattttctc

SEQ ID NO: 24487 - DNA, 222 bp, Zea mays
ccgagacctgccccggcgagcggcagctgcgctccccggccggcagcgtcctcgcgtgcaagagcggctgcgaggccttccgcaccgacgagctgtgctgccgcaacatgtacaacagcccgcacacctgccgcgcctccaagtactcggagttcttcaagcgagagtgcccgcacgccttcacctacgcgcacgacagcccctcgctcacccacgagtgcg

SEQ ID NO: 24488 - DNA, 222 bp, Zea mays
cccacgcgtccgcccacgcgtccgcccacgcgtccgcctgacagcaaggttgcttgcgagacctgcaccaagaccaacatggtcatggtctttggtgagatcaccaccaaggccaatgtcgactacgagaagattgtcagggagacatgccgcaacattggtttcgtgtcgaacgatgtcgggcttgacgctgaccactgcaaggtgcttgtgaacattgag

SEQ ID NO: 24489 - DNA, 200 bp, Zea mays
gagatatcacgggagctttatgagttctgcctggaccagagctatgcagatcgtaacctgatcgcaaagtggaaaaagccaggttacgagcgcctttgctgccttcggtgcatacagacacgtgaccacaactttgcaacgacttgtgtctgccgggtccccaagcatctgagggaggagcaagtgatagaatgtgtcca

SEQ ID NO: 24490 - DNA, 220 bp, Zea mays
gttttaggagacctgcgccgctcctccggccacgcgagcacgccgaaatggtcgcccacaggttccatcagtaccaggtggtgggtcgcgcgctgccgaccccgaccgatgagcaccccaagatctaccgcatgaagctctgggccactaacgaggttcgcgccaagtcgaagttctggtacttcctgagaaagctgaagaaggtgaagaagagcaatgg

SEQ ID NO: 24491 - DNA, 219 bp, Zea mays
ggagactggtgtcatcaagcctggtatggttgtcacctttggtccaactggcctgactaccgaggtgaagtctgttgagatgcaccacgaggcgcttcaggaggctcttccgggtgacaatgttggcttcaacgtgaagaacgttgctgtcaaggatctcaagcgtgggtttgtggcctccaactccaaggatgaccctgccaaggaggctgccagctt

SEQ ID NO: 24492 - DNA, 208 bp, Zea mays
gcggacacggaggcgaaggaggaggagcagcagcagcaggcggcgccgatggagcggcatcccactcagtgcttgcaaccatggctaggggattgaagaagcacttgaagaggctcaatgcgcccaagcattggatgctcgacaagcttggcggagcttttgctcccaagccatcttctggacctcacaagtccagggagtgccttcc

SEQ ID NO: 24493 - DNA, 214 bp, Zea mays
aacccgcacaacggcacgattctcctcctccgtccgcgtactctcggtttcggcgatgtcggggcgcggcaagggcggcaaggggctgggcaagggcggcgccaagcgccaccgcaaggtgctgcgcgacaacatccagggcatcacgaagccggcgatccgtcagctggccaggaggggcggcgtcaagcgcatttctgggctcatctacgag

SEQ ID NO: 24494 - DNA, 215 bp, Zea mays
cccacgcgtccgcttatgttttgggaaacaaggcgttcagactttggagtgtcaatgtcacatcatgttgctactgtcgtcctgattgttctctcttacgtgttcagatttgctagagttggctctatagtattggcaattcatgatgcaagtgatgtttttctggaagtagggaagatgtccaagtacagtcattgtgattggcttgccaatgt

SEQ ID NO: 24495 - DNA, 219 bp, Zea mays
cccacgcgtccgcttttcaaccattgctggaacagttggttatattccaccagaatatgcatacactatgaggctgacgatggctggcaacgtctatagctttggagtcattttgcttgagctgctgacaggaaaaaaatcggtcagtaatggcactgagttagccaagtgggctctcagtctttcaggcaggcctgatgaaagggcgcatatctttga

SEQ ID NO: 24496 - DNA, 242 bp, Zea mays
cccacgcgtccgcccacgcgtccgcggacgcgtgggggcaagaggcagcgataagaagagaaagagctcttgcatatgcattttcacatcagtggaagagcacatcaagatctgcgaacccaatgtttgtagacccaaataacttgcagtggggctggagctggttggagcgctggatggcagcaaaaccttgggagggacgcaatggcaccgacaaggagagcaacattgatcgcggctcc

SEQ ID NO: 24497 - DNA, 213 bp, Zea mays
cccacgcgtccgcctccccctccggttcgggttcgggttcgtgaggttctccggggttcggtttcgtgggtgggcggatcgagatggcggcgtcggatgttgagtaccgctgcttcgtcggcggcctcgcctgggccacggacgaccactccctccacaacgccttcagcacctacggcgaggtcctcgagtccaagatcatcctcgatcggg

SEQ ID NO: 24498 - DNA, 176 bp, Zea mays
ttgctgtgcttggtagcagcgatggtgtcaagggcaccatctttttcacccaagagggagatggccctaccgctgtcaccggaagtgtctctggcctcaagcctggcctccatgggttccatgtacatgcacttggtgacaccaccaatggatgcatgtcaactggaccacactac

SEQ ID NO: 24499 - DNA, 231 bp, Zea mays
cggacggtgggcctatacggttgcccgtgctggtcagaatgggtaccaccaccgcactgagatgaacaagaaggtgtacaagatcggcaaggctggacaagagacccacgatgcctccacagagtttgacaggactgagaaggacatcactcccatgggtggcttcccccattatggtatcgtgaagggtgactacctgatgatcaaggctgctgtgtgggaccaaagaga

SEQ ID NO: 24500 - DNA, 241 bp, Zea mays
cggacgcgtggttcctgtcaaggaggttcacaaaatagcagtactagatattaggttagctaatgctgctcgtcatgctgggaatattctagtgtgcaaggagggagaaggtggcaactacaagctgattccaattgatcatggttattgcttgccagagaagtttgaagatgttacatttgagtggctctactggccccaagcccgtgagccattcagtgatgaaaccattgaatacatc

SEQ ID NO: 24501 - DNA, 216 bp, Zea mays
gagaaagtcagatgttggataaggcattttatgaggaggaagtcaagaggctatgcttgtcctttgagcagcagttccactacgctgttttcttcgcttacatcaggctccgcgagcaggagatcaggaacctgatgtggatctctgaatgtgtcgctcagaaccagaagtcccgggtccatgacagtgtcgtcttcatattctgagaaccccggc

SEQ ID NO: 24502 - DNA, 108 bp, Zea mays
gggagaacacgaagataagcaactgcatcatcgacatgaatgccagggttggaacgaacgtctccataacaaacaaagagggcgtccaagaagccgaccggccggacg

SEQ ID NO: 24503 - DNA, 239 bp, Zea mays
cccaagacctcctcagacccgagaagcgcagtgcggccatggacgccaccggcactggagctggagggaaggcgaagaagggagcggccggtcgcaaggccggcgggccgaggaagaagtcggtgacgaggtccgtgaaggccgggctccagttccccgtcggccgcatcgggcgctacctcaagaagggccgctacgcgcacgacgtcggcagcggtgccccggtctacatcgcggcc

SEQ ID NO: 24504 - DNA, 230 bp, Zea mays
gatcaagcggaccaaggcggagaagaagatcgcgtacgacaagaagctgtgcagcctgctcgatgagtacaccaaggtgctcatcgccctcgccgacaacgtcggttccaagcagctccaggacatccgccggggcctcaggggcgactcggtggtgctcatggggaagaacacgctcatcaggcgctgcatcaaggtgtacgccgagaagaccggtaaccacactttga

SEQ ID NO: 24505 - DNA, 238 bp, Zea mays
ggacggatctgcgcttccagagccatgccgtgcttgctctgcaggaggcagcagaggcctacctggttggtctcttcgaagataccaatctgtgcgcgatccatgccaagcgcgtgaccatcatgcccaaggacattcagctggcaagaaggatccgtggcgagagggcgtaagtctgtcgacgggaggaagaactctgcgctcgttttgtgtgttcgctctctcacctgtaagtttg

SEQ ID NO: 24506 - DNA, 179 bp, Zea mays
cccacgcgtccgcccacgcgtccgcccacgcgtccgcccacgcgtccgcaccatcctcaccgtcatgggcgtctccaagtccacctccaagtgcgccaccgtcggcatccagggcatcgcctggtccttcggaggaatgatcttcgcgctcgtctactggacggcggcatctccggagg

SEQ ID NO: 24507 - DNA, 232 bp, Zea mays
cggacgcgtgggcgtcccgctccgcgagctgcttgttccgcttcggcttccccacgaactgcatccccttgaactccaccacggccctgaactcgttcgtcttgaggtgcttcgtcttgtacctgggcggggtgtggccggcccgcatcagcagcgtctgcagcaggctcttggggttcatcccgtcctttatgaggttgctcttgtcatcgtcctcggggctccggagcct

SEQ ID NO: 24508 - DNA, 219 bp, Zea mays
gggcatccctccggaccagcagcggctcatttttgccggcaagcagctcgaggacgggcgcacgctggccgactacaacattcagaaggagagcaccctccacttggtgctgcgtctcagaggtggcatgcagatcttcgtgaagacacttactggcaagacgatcacccttgaggtggagtcctcagacaccattgacaacgtcaagggccagatcca

SEQ ID NO: 24509 - DNA, 235 bp, Zea mays
ggttgctctagatccgttcatcctggtggttttgtgaggtcgaaagcggcgagcgcattagaagatgctggacaagctgtgggacgacgtggtggccgggcctcgcccggagacgggcctcgagaagctccgcaaggccaccaccgcccgtccgctcgtcatcaacaaagacgcggacggcggcagctacaagcgggcgcagtcgatgccgtcgaccccgacgacgccggtgacg

SEQ ID NO: 24510 - DNA, 165 bp, Zea mays
cttcgccacaaggactgcaagtcgaacctatctgaatttgatgatcttgcgggccaccctggattcgacaaacaggggacacgcttcaagcgtctcattaaggaccagaataatcacaaggacctcgaggagggaatcaaccgcctagttctttgctctggaaag

SEQ ID NO: 24511 - DNA, 162 bp, Zea mays
agcacgcgtccgagcacgcgtccgcggacgcgtgggcgacggatccaagagagagggattgcttgaaaactattctgcacagggtatatgggaagttcatggtacaccgtcctttcatccgcaaagcagtgagcaacatattttaccagtttgtctttgaga

SEQ ID NO: 24512 - DNA, 161 bp, Zea mays
cgcttccttccctagcgccgacgcccaccagacgagatggccccgaagaaggacaaggccccgccgccgtcgtcgaagccggccaagtccggtggtggcaagcaaaagaagaagaagtggagcaagggaaagctaaaggagaaggtaaacaacgcggtgct

SEQ ID NO: 24513 - DNA, 183 bp, Zea mays
tcttattctcaaagaagacgatatcattggtattcttgagacagatgatgtgaaggacatgaagcctctcaatgaccgtgttctcatcaaggttgcagaagccgaagacaaaactcctgggggccttatcctcactgaaacaactaaagagaagccgtccataggaacggttgtagctgttgg

SEQ ID NO: 24514 - DNA, 236 bp, Zea mays
tgttgactttggtgaatccgatgatgaaaaacctgagaaactggaagcattgattgctgctgttaacagcagtgatagcagtcacattgttcatatccctcctggtgaaaatgccctctctgatgtcctcctaagcactcctatatttactggtgaagaaggtggaagcggttttgctgcttccgcagcagctgccgcagctactggagcatctggatttgaatttggtgtggacc

SEQ ID NO: 24515 - DNA, 159 bp, Zea mays
cccacgcgtccggcccggtcagtgaagatcaagaggagcaaggatgttgtcaagttcaaggtccgctgctccaagtacttgtacaccctctgcgtattcgatgctgagaaggcaaacaagttgaagcaatctctccccccaggcttgagcgtccaggag

SEQ ID NO: 24516 - DNA, 230 bp, Zea mays
cccacgcgtccgcgacatcgtcccttcgtccccacgagcaaccgataatccgccggcgttgagatgttggtttatcaggatctcctatctggcgacgagctcctgtcggattcattcacctacaaggagctcgagaacggcgtcctgtgggaggtcgagggaaagtgggtcacccaaggtcctgttgatgtggacattggtgccaatccatccgccgagggtggtgagga

SEQ ID NO: 24517 - DNA, 135 bp, Zea mays
gacaaatggtagagtgaggcgggcagacagagaggacagcattaggcgaactgtttatgtctctgaacttgaccatactgtgacagaggagagacttgctgatatctttaccacctgtgggcaagttgttgattg

SEQ ID NO: 24518 - DNA, 130 bp, Zea mays
ggaattgtggaaagtgtcggtgaaggagtaactgatgtgcagcctggggatcatgtcattccttgctaccaagcagaatgcaaggaatgcaagttttgcaagagcggaaagaccaacctctgtggtaagg

SEQ ID NO: 24519 - DNA, 152 bp, Zea mays
cgtaactgaatttctggaatgcttatatgttaactatgattttgatggtgctcaacagaaactcatagagtgtgagcaggttatactgaatgatccattcctgggaaagcgcattgaagagggaaattttgtcagtgttcctttgagagatg

SEQ ID NO: 24520 - DNA, 233 bp, Zea mays
cccacgcgtccggaagacatctactacccacggtccaagtaccaaggcaacatcgacggcgcatactttgggacaacgttccctcatctgttcctgatgacatacgagcacctcaagccacagaagctctcgcagcgctatgttcctcgtgtctttggcttcaagctccacaagccatgaacctcatgtatttgtcttttaaactcctcaagacgtggcactgggggcatgcg

SEQ ID NO: 24521 - DNA, 227 bp, Zea mays
cggacggtgggcccgcagctcccatcctctcgctcgccaggagaagcagccgccgttgctgctgccgcgtccacagaatggggggtttcgtgaagacccataagaccaatgcgtatttcaaacgtttccaagtgaaattcaagagaaggcgggctggcaagacagactacagggccaggataaggctgattaaccaagacaaaaacaagtacaacacacccaaatac

SEQ ID NO: 24522 - DNA, 227 bp, Zea mays
ctgagattcgtgatcttatggatgcagctgatatcgacaacaatggaacaattgactacattgaattcatcgctgcaactttgcatctcaataagctggagcgcgaagaacatctcgtggcggccttttcatatttcgacaaagatggtagtggctatatcacagtggatgaactacagcaagcttgcaaagagcataacatgccggatgcttttcttgatgatgtc

SEQ ID NO: 24523 - DNA, 123 bp, Zea mays
cccacagcagatcgacgagctccctgaatccttctccggtggatgggttgggttcttttcctatgatacggttaggtatgttgagaagaagaagctaccgttctccagtgctcctcaggacga

SEQ ID NO: 24524 - DNA, 180 bp, Zea mays
atttcgtcttcggccagtccggcgccggcaacaactgggccaagggccactacaccgagggcgccgagctcatcgactccgtgctcgacgtcgtgcgcaaggaggccgagaactgcgactgcctccaagggttccaggtctgccactcgctgggaggaggtacaggttcaggaatgggca

SEQ ID NO: 24525 - DNA, 223 bp, Zea mays
gctctgggggaatcgaagaagagtgataatgccttgatgtatgtcaaaattgatgatcagaaacttgccattggaaccctctctgttgacaagaacccacacattcaatttgatctgattttcgataaagagtttgagctgtcgcacacatcaaaaactaccagcgtcttcttcactggctacaaggttgaacagccattcgaggaagatgaaatggatcttg

SEQ ID NO: 24526 - DNA, 177 bp, Zea mays
ctgacgccaatcccatccaggtggtcgtggacgcgattatcaacagtggaccacgtgaggatgccacccgtattggttccgctggtgttgtgagaaggcaggctgtggatatctcacccctgagaagggtgaaccaggccatctacctcctgaccactggtgccagggagagcgcct

SEQ ID NO: 24527 - DNA, 167 bp, Zea mays
gaagactacgagagactccgtgaatcagttgatatgcacgacaactttgaccaaataggtcttgcccagaagcttgagaagcatgaattgctggagatgaggaggattgctgcctacatttacaagaaggctggcaggtggaagcaatccattgctctatcaaagaa

SEQ ID NO: 24528 - DNA, 224 bp, Zea mays
ctagaagacgatgggcaaggacgacgtgatcgagagcggcgctggcggcggcgagttcgctgccaaggactacacggaccctcccccggcgccgctgatcgacgcggcggagctggggtcctggtcgctgtaccgcgccgtgatcgccgagttcatcgccacgctgctgttcctgtacatcacggtggccaccgtgatcgggtacaagcaccagacggacgcgt

SEQ ID NO: 24529 - DNA, 148 bp, Zea mays
cacgagcaaccgataatccgccggcgctgagatgttggtttatcaagacctcctatctggcgacgagctcctgtcggattcattcacctacaaggagctcgagaacggcgtcctgtgggaggtcgagggaaagtgggtcacccaaggt

SEQ ID NO: 24530 - DNA, 96 bp, Zea mays
cccacgcgtccgggcccgacgaccccggcgggcctgatcgcggcggcggtggcgcacgcgttcgcgctgttcgtggcggtgtctgtaggcgcgaac

SEQ ID NO: 24531 - DNA, 95 bp, Zea mays
gaagattgtcaccccagaataatccacagagatataaagtcctctaatattttgctggataataacttcgaagcactggttgctgattttggtct

SEQ ID NO: 24532 - DNA, 96 bp, Zea mays
accttgtgaagaagtgtgttgagctcttctttgagattgctgagaacaaggaggactacaacaagttttacgaggctttctccaagaacctcaagc

SEQ ID NO: 24533 - DNA, 96 bp, Zea mays; identical to SEQ ID NO: 24532

SEQ ID NO: 24534 - DNA, 90 bp, Zea mays
tgcccaacttgaactgtggaaggagaagagctctggcaagtatgagaagaaggtgtatgtgctccccaagcaccttgatgagaaggttgc

SEQ ID NO: 24535 - DNA, 81 bp, Zea mays
agtgaacattcatttcccgccagattaccccttcaaacctccaaaggtttctttcaagacaaaggtcttccatcctaatat

SEQ ID NO: 24536 - DNA, 86 bp, Zea mays
ggtaaattatcccaaacatgctacctgatggctcttgactcatgctacagacagttctgcaacaagtatgagaagattgcgggtaa

SEQ ID NO: 24537 - DNA, 254 bp, Zea mays
gcaaaccgaacgaacccaaccgaagcgagagctgagcaaggcagaggcggcgtgaccggcgatggagcggctgcagcggatctttggcgcctccggcatggggcagccgccgacggactcgccgctgctcgattcctccgagcaggtctacatctcctccctagcgcttctcaagatgctcaagcacgggagggctggggtgcccatggaggtcatgggcctcatgctcggcgagttcgtcgacgactacaccg

SEQ ID NO: 24538 - DNA, 250 bp, Zea mays
atctgctggggcaaggaggttttgggtttgttcacaaaggagtgctaccagatggcacagaggttgccgttaagcagttaagagatggcagtggccagggagagcgcgagttccaggctgaagttgagattatcagcagagtacatcacaagcatcttgtatccttggtcggctattgcatttctggagcccacaggttgctcgtctacgagtttgttccaaacaatacattggaattccacttacatgg

SEQ ID NO: 24539 - DNA, 236 bp, Zea mays
gaggacgctggtgaccacgcgtcccgacgtggattttaggggctagaaacaggcgacgacaggttaggacttgtttttttacaccaatccagccctggattagcaatgatttttatgcagctcttgtttgttacgaccactcatggcaccatttatgcatacatctgaactatttatgctgttgatatgtttctagtgtggcaatgatttttttacatatagatgcttaccaaaag

SEQ ID NO: 24540 - DNA, 171 bp, Zea mays
ctgaatgtaaaccaagtccttacaaggtgtcttttcgctggactgtgtttccatgcataccaacaggtgtcttacatgattttggcgatggtgtctcctgtcactcattctgtgggcaactgtgttaaacgtgttgtggtcattgtaacatcagtgctgttcttcaggaca

SEQ ID NO: 24541 - DNA, 243 bp, Zea mays
agctgactgacaaatcagatgtgtactcttttggtgtggtgctgcttgaggtgatttgtgcgaggccggttatcgacccgactcttccaagggacatgatcaacctcgcggagtgggctatcaagtggcaaaagagaggagagcttgatcagattgtcgaccagcgcattgctgggacagtcaggcctgatacactgaggaagtttggagagacggtggagaaatgccttgcagagtatggtg

SEQ ID NO: 24542 - DNA, 244 bp, Zea mays
caccgctatatatcccggcgccccttcctccctcccccgtccttccctccgcctccgcccccgcccactcctggcttccaccactcctgtcacctcttcccgcgccgacgcagccgccatggaccccgtctccacatgggggctaaccccgctcgcgggcgccgacccggagatctacgacctcctggagcgcgagaagcggcgccagcgtcgcggcatcgagctcatcgcctccgagaacttc

SEQ ID NO: 24543 - DNA, 244 bp, Zea mays
ctatcatgtagataagccaagcaaagaaaaagaccggtgttattgctccaaaacgttttgttcagagagtgaagaaacagaatgagttgtttcgcagctacatgcaccaggatgcacatgagttcttaaatttccttttgaatgaacttgttgatattctggaaaaagagtcaagtgctgctaaggactcaccccaatcgtcgtctcctgaaaaagctccaaatggcccagttcaacctttagc

SEQ ID NO: 24544 - DNA, 236 bp, Zea mays
cggaccgtggtttccgccttgcaacgccagagatggagtatggcaggatgaacatcggaagcaggccatcgaaaagaaagccgagtgcgggcatcgagtcgctgcgcgcaatcccttggatcttcgcttggacgcagactcggttccacctgccggtgtggctgggtttcggcgcggcgttcaagcatgtcttgcacaaggacatacggaatctccagacccttcaggagatgtac

SEQ ID NO: 24545 - DNA, 244 bp, Zea mays
gcatccttctgaagtgcaacatgagtgcatccctcaagctattcttggaatggatgtcatctgtcaagcaaaatctggaatgggtaagactgcagtttttgtcctgtcaactcttcagcagattgatcctgttgctggccaagtagctgcacttgtgttgtgccacacagagaattagcttaccagatttgccatgaatttgagaggtttagcaaatacctgcctgaattaagagtagctgttt

SEQ ID NO: 24546 - DNA, 245 bp, Zea mays
cggacgcgtggtgctggtgcccttctccaaagtgggaagacaggacttatttcgtcggttggcaaccttacggctccagtagaagaatggactgttggtggaacagcattgacatcactgatggatgttgagaggaggcacggcaagttcaagccagtgatcaagaaggctatggtggaactcgatgctgcacctttcaagaaatatgcatcggtgagggatgagtgggccatccaagacagata

SEQ ID NO: 24547 - DNA, 238 bp, Zea mays
gaagaagattaaaaagacaccaatagtcgtcgggaactgtactggctttgcagttaataggatgttctttccatacactcaatcagcactcttttatgttgatcttggtatggatgtttataagattgatcgtgcttgtaccaaatttggaatgcctatgggtcctttcagactggcagatctggttggttttggtgtggctgtggccactggtatgcaataccttgaaaatttccca

SEQ ID NO: 24548 - DNA, 235 bp, Zea mays
ggcggtgtctgtgggcgcgaacatctccggcgggcacgtgaaccctgccgtgaccttcggcgccttcgtgggcggcaacatcaccctgttccgggggctcctgtactgggtggcgcactgctggggtccaccgtggcgtgcttcctgctccgcttctcgacgggcgggcaggccacgggcaccttcgggctgacgggcgtgtcggtgtgggaggcgctggtgctggagatcgtga

SEQ ID NO: 24549 - DNA, 235 bp, Zea mays
gagcattttccggatgatgctccattgatttcctctagctttcgtgtcataccacttgatatgaaaacagatggtgtatcctctggtaggacactagatttggcatctagtcttgatgtgggttctgctgcaccccaagcctcaggggatgcatctccagatgactgtaatttgagatatgtgctgacaatcgcctttcaattcccttatgagacgcaccttcaggacagtgttg

SEQ ID NO: 24550 - DNA, 232 bp, Zea mays
gttggacccaagaccattcatgttcctactggggagaagctttctgtttttgatgcggccatgagatacaaatctgagggccatgctactataatcctcgctggtgctgagtatggaagcggcagttctcgtgattgggctgctaagggtccgatgctcctgggagttaaagctgtaattgccaagagctttgagcgtatccacagaagcaacttggtggggatgggaatca

SEQ ID NO: 24551 - DNA, 237 bp, Zea mays
tccagaattggcacttgccctgcggttgtctatggaagaagagcgggcaaggcaagaggctattgcaaaaaaggctgctgaagatacttctaatacagaacataacaatgtcccaagctcaaacagtgattctgttatggctgaaggagaacctgcctcaaatgctgctgctggtgacaaagaacaaccaaaggatgatgacgatctactacagcaggcacttgcaatgtcaatgga

SEQ ID NO: 24552 - DNA, 240 bp, Zea mays
  unsure (1)..(240): unsure at all n locations
cccacgcgtccgatcctggattggtgcctgttaccactgcacagggggaggaacttcgtagacaaattggtgctatgtattacattgaatgcagttcaaagacacagcagaatgtcaaggctgtgttcgatgctgccatcaaggtagtaatccagcctccaactantataagagataagaagaagaaaaaatcacgcaaaggatgttctatgatgaacatcttcggtggaagaaaaatgc

SEQ ID NO: 24553 - DNA, 111 bp, Zea mays
cgaggtcctgtacatggttgatgccattgatgagtatgctgttggtcagctcaaggagtttgagggcaagaagcttgtctcggccaccaaggagggtctgaagcttgatga

SEQ ID NO: 24554 - DNA, 107 bp, Zea mays
gctgcatatggtctacccatggttgccacccgaaatggtgggcctgtggacatacatcgggttcttgataatggaattcttgttgacccccacaatcaaaatgaaat

SEQ ID NO: 24555 - DNA, 226 bp, Zea mays
gagtggcgtgacatgctgtctgaggttcccgggtcagctcaactctgatctgcgcaacttgccgtgaacctcatcccattccctcgtctgcacttcttcatggtcggctttgctccgctgacctctcgtgggtcgcagcagtaccgtgccctcacggtccctgagctgacccagcagatgtgggatgccaagaacatgatgtgcgcggccgacccccgtaacggcc

SEQ ID NO: 24556 - DNA, 228 bp, Zea mays
ggtggctgatgatctttctccttcaattgtctttattgatgagattgatgctgttgggacaaagaggtacgatgctcattctggtggcgagcgtgagattcagagaaccatgttggagttgttaaatcagctggatggttttgattcaagaggagatgttaaagttattctagcaacaaatcgtattgagagtcttgatccagccttgcttcgcccaggtcgaattga

SEQ ID NO: 24557 - DNA, 223 bp, Zea mays
gacccacgcgtccgcggaccgtggcggacgctggggttggccgtgtcgcgaataggatcaaggatgggaagtttacacgaaacggactggagtattcattgcctatcaacaatggacctaacagccttcatggtgggttgaagggatttgataaggtcgtgtgggatgtcgtggagcacaaagatggcgaatgcccttcaataacttttcagtaccacagcag

SEQ ID NO: 24558 - DNA, 222 bp, Zea mays
gaaacaatcaaccagcaacactcttctcttataacatagtacagcgaaggtaactcacatggcaacttccatgggttgtctcgtcttgctctgccttgtttcttctctccttcccagtgccgtccttggccacccatggggtggcttgttcccacagttctatgaccattcgtgccccaaggcgaaggagattgtgcagtccattgtggcacaggctgtggc

SEQ ID NO: 24559 - DNA, 226 bp, Zea mays
cgacgagttcggccgcatgctcgtcgctatcctccgcgacaacggcgtcgacgacggcggcgtcgtcttcgactccggcgcgcgcaccgcgctcgccttcgtcaccctgcgcgccgacggggagcgcgagttcatgttctaccgcaatcccagcgctgacatgctcctcaccgccgacgagctcaacgtcgagctcatcaagagggctgcggtcttccactacgga

SEQ ID NO: 24560 - DNA, 227 bp, Zea mays
cccacgcgtccggcccatggtcaggttcaggcaggcggccacgttctacggcgtgctcctccgcaccatcaccgtcggcggccagcggctcggcgtggcccccgcggtgttcgccgcgggctcggtactagactcccgcacggccatcacgcgcctgccgccgacggcgtaccaggccctgcgctccgcgttcaggagcagcatgaccatgtaccgctccgccccac

SEQ ID NO: 24561 - DNA, 226 bp, Zea mays
gcctaacatattctgtgcatacgttctgctctcgattcttggccagttcgccatgcacatattcttccttatcacggctgtcaatgaagcatcaaagcatatgccagaggaatgcattgagcctgactcagacttccatccaaaccttgtgaatacggtttcgtacatggtgaacatgatgatccaggtggcaacctttgctgtaaactacatgggccacccattt

SEQ ID NO: 24562 - DNA, 232 bp, Zea mays
cccacgcgtccgcccacgcgtccgcccacgcgtccgggaggttctgggtgacaaagttgagaaggtggtggtgtctgatcgcgttgtggactcaccgtgctgccttgtgactggcgagtatggctggaccgccaacatggagaggatcatgaaggcacaagccctgagggactcgagcatggcgggctacatgtcgagcaaaaagacaatggagatcaacccagagaaccct

SEQ ID NO: 24563 - DNA, 234 bp, Zea mays
tctaattctcctcgcgagcccaaaccctaaacctaaacctttcacccgccgccgccgccaccaccagcactgccactccgccaccaccgtcccgaagccccctcccagcgccatcgacttcatctcggattgaagcaatgtcgtcggacgatgaggtcagggaggagaaggagctcgacctctcctccaacgacgttgtcaccaagtacaaggctgccgccgaaatcctcaaca

SEQ ID NO: 24564 - DNA, 218 bp, Zea mays
cggacggtcggcggacgcgtgggtgcaaattgcactttctctccgcaccatcgtattctcaacagcgccgagccacaacacgatgtactcatacaaagacgcagataggcgtcgggagtgggtcgctcatcttcaggctggtgcaggcattgttgccgacagtagcccagatgacgaacaacgtgaatgcgagaatcaggctgctgcactagctcggg

SEQ ID NO: 24565 - DNA, 225 bp, Zea mays
gactttttggctcccatactttatgtcatggaggatgagtctgaattattttggtgctttgcttccctgatggaacgtctaggtgccaattttaatcgtgaccagaatggcatgcatgctcagctacttgcattatccaagggagttcagtttcgaccagatcatgcttttatgggaagttctgtggtcccattatttgtcagaacatttccacttgtacttgtg

SEQ ID NO: 24566 - DNA, 230 bp, Zea mays
ctgaaagctgaaaccgctccacgccctccccctccgcgcagagccagccaagccaaccagccagtcagaagaggaaccggggagcggcagctgcagcggccgagggcggagcacgcgaggcatggatagataccaaaggctagagaagcctcggaatgacacgccaatcagccagaatgagatcagaatcactactcaggggaggatgaggaactatatcagctatggga

SEQ ID NO: 24567 - DNA, 242 bp, Zea mays
ggaccgtggcttcatacaggacaagaaaataaaagagatactgtccccaaactgcaagtctgccaagagactgaaagcattggtggcgttcacttcggcgacaactgaacagaacaaagaagcggatcaaattgggatcaaaatgtatgcctgggacgatttcttgaaagtggggaaggataatcctcgtcaaccttgccctccgcaagcaagtgacatctgcatccggggaaaatccctct

SEQ ID NO: 24568 - DNA, 237 bp, Zea mays
caattgatctttcgcctattgttccactgcaagcatgttagtcgccagctgtgtgcagcatggcaaatacaacaagcattccggtctgtcaagattctagggacaccaattctgcggtcatcaattctttgtcgtagcatgctcaagtttgtaaatagccttttgcattatctaacatttgaggttcttgaaccaaattggcatctgatgcatgaccgccttcaaacagcaaggagc

SEQ ID NO: 24569 - DNA, 240 bp, Zea mays
ctccttcaaggacatcctgcagctgtacgagggcggtatcaagctgcccgacatccccgccctcgaggagttccgcaagcagttcccgctacagatggtcaaggacctcatgcccgccggcggcgactacgtcctcaagctccccatgcccaaaatcatcaaagaggacaagaaagcttggatgagtgacgaggagttcgcaagggagaccctcgccggcgtgaaccccttgatcatcag

SEQ ID NO: 24570 - DNA, 242 bp, Zea mays
gacctctgaggctaaatctgatggagggattttacttccagtatcagttcagacaagaccacaaggaggggaaattgttgcggttggagaagggagaagttttggaagtaaccgcattgagatcagtgttccggttggtgcacaagttgtctactcgaaatatgcaggcacagaattgaaattcaatgacgccgaccatctcattttgaaagaagatgacataattggtattcttgacagtg

SEQ ID NO: 24571 - DNA, 239 bp, Zea mays
aaagatatcgctgctggtattcaaagtagtaaatcaaacaattacaaaagatctgaaggccagaactgtggaaatttccttacggaccgtccgtcgaccaaggtgcaagcagctccaggtggcgactcttcactcggttatctttttagtggcagcaaagatggcaagtgatgtacacctgctgttagtgttcgccatgatcatgggagaaggtttctgcttaacaaaggaaaaaggga

SEQ ID NO: 24572 - DNA, 238 bp, Zea mays
cccagttcagttgcctgcaactgtcatttcacagactgcacagaagttgggatatggaacgagcttgttcaaaagatttcaagctgccggttttccagtgcaaatgcttaaaatccaatatcgcatgcatccagagattagtacattcccttcaaaagaattttatgaaggggtactacaagatggggagggcctgagcaggaaacgtccatggcattcctacagctgcttcggaccg

SEQ ID NO: 24573 - DNA, 239 bp, Zea mays
gccgtctttcaaccaccatccgctgcctttctcacccaagcgcgcacgtgcgcgcgctcagcatgtccgtcctccgtgacatcctgaaccacggatccgtgagccccaacaagatcagccgaggggaacagcagcggaatggcatccagagcccatcgtaccggtgcgtggccgcaggcatcctcaactggcaagcggacgtggagaggtgcatagagtgggaagcccacagccgccgc

SEQ ID NO: 24574 - DNA, 233 bp, Zea mays
cattggtgtttcaatacatgatgcccatcgccgggttcataattgggccgagtactattctgtcagggaacatctagcacctgagttcgcattcagaagaaggtatagcacaaagagcgatgtctacagcttcgggcttgtactgttggagcttttaactggccgctcagtttttcatgttgcgacacaatgtggcccgaggagcgcagttatatgggctaaaccaatgctta

SEQ ID NO: 24575 - DNA, 234 bp, Zea mays
cccacgcgtccggggctccctgctttccctatgggaaaaattgatcaaacacgtatgtggaaggtgggtgacagggtccgttcaaccaggccacaaggtgatcttggcccactgcatcccttcactgctggagtgtatgttgcactaatgatggctcagattgaggtccttaggaagaagggccactcttactcagagataattaatgagagcctgatcgagtccgtggactcg

SEQ ID NO: 24576 - DNA, 240 bp, Zea mays
tgagaaggcattctttgatgactacaaagaggcccacctcaagctctccgaactggggtatgctgatgcttaaatggtccatatcctggagcgggacacaaactgctgcctgtatggactcgtgcgattcagggtgaaccatcagattgtctagtgtcttctttgtaataaatttatctgttcttggtactttgtctatggttgaatcggaacccattttccgtttgcctagattcttaa

SEQ ID NO: 24577 - DNA, 235 bp, Zea mays
ctggaatgtactatctacgcacacgagctgctgctgatgcaatcaagtttaccgtcgataccacacttctaaaggagaatgggaatgggatgaatgatggaaagcccacagaggacgacgtagaagctaaaatggcacaaatggtctgttcttttaacaaccgggaagagtgtctggcgtgtggaagctagattggagctccatctggacactgcacttatttgtgaccacaggc

SEQ ID NO: 24578 - DNA, 231 bp, Zea mays
gcagcgcaagaggttggtagagcgagcgagaagaaggcaatggcggcggagagcttcctgttcacctcggagtccgtgaacgaggggcacccagacaagctgtgcgaccaggtgtcggacgcggtgctggacgcctgcctggcgcaggaccccgacagcaaggtggcctgcgagacctgcaccaagacgaacatggtgatggtgttcggcgagatcaccacgaaggcgagc

SEQ ID NO: 24579 - DNA, 245 bp, Zea mays
gcagcccccaactacccccagcctcggaaggaaccttccagaagcgcaagactctaaaggccgtcgccttcccattcttcctcgccgcgggggtcgcctgagatcacataaacaatggtgaaggctgttgctgtgcttggtagcagcgatggtgtcaagggcaccatctttttcacccaagagggagatggccctaccgctgtcacgggaagtgtctctggcatcaagcctgtcctcaaggggtt

SEQ ID NO: 24580 - DNA, 225 bp, Zea mays
gtggaccacgccctcgccagcggcagccgagaaggacgccagcgcgtccgtgttctccaagatcaacaggttcgaggaggagctgcgcgaggcgctgcccagggagatggaggccgcccgcgtggccttcgagaccggcgccgcgccgatcgccaacaggatcaaggagagccggtcgtacccgctgtaccgcttcatccgcaaggacctcggcgccgtgtacct

SEQ ID NO: 24581 - DNA, 209 bp, Zea mays
ggaaacctctcaaaccctagccgcctcctgcaagtttcagagctcaggaatctgcgccatggcgagtgagacggagaccttcgcatttcaggctgagatcaaccagctgctctcactcatcatcaacaccttctactccaacaaggagatcttcctccgcgagcttatctccaactcttccgatgcgctggacaagatcaggttcgaga

SEQ ID NO: 24582 - DNA, 252 bp, Zea mays
cccacgcgtccgccgctcctgagtcctgtccaccctgccaccgccgacgccgcgccgccgcagcaattgtcaccgtcgctatggcccgtatcaaggtgcacgagctccgggggaagagcaagacggacctgcaggcgcactcaaggagctgaagtctgagctctccctcctccgcgtaccaaggtcaccggcggcgcacccaacaagctctccaagatcaaggtggtgcgcacctcgatcgcgcgcgtgctc

SEQ ID NO: 24583 - DNA, 223 bp, Zea mays
cccacgcgtccgcccgatcccgctcgctcgccgccagttgtcccgcagctcggatcgtctcatacctcggcgaaaatgagagagatcttgcacatccagggagggcaatgtggcaaccagatcggtgccaagttctgggaggtcgtgtgtgacgaacacggcattgacactacaggtcggtacactggcacttctgaccttcagttggagcgcgtcaatgtct

SEQ ID NO: 24584 - DNA, 246 bp, Zea mays
gggcagctgtggctcctccatttcctttcaaaggaaaatctttggcgtaagtatcctagtttttttatgcattcaagatcataaaagtgctaactgtttctttgctgttttaacagtgggattttaccagcaattgatgtcataagcaagaatgctattgttgggatattttacttcgttggatttggcttgttctgccttgaatcacttctgagcatcggtgtcattcagcaagtctacatgtat

SEQ ID NO: 24585 - DNA, 250 bp, Zea mays
cagtaacatcgatgccaactttttgaagattgtttcaagcgctattattgacaaatacattggagaaagtgctcgtttgattagagaaatgtttggctatgcacgtgatcaccaaccatgcatcatcttcatggatgaaattgatgccattggtgggcgaagattcagtgagggaactagtgctgatcgtgagatccagcggacgttgatggaactccttaatcaattagacggttttgatgagctcgga

SEQ ID NO: 24586 - DNA, 248 bp, Zea mays
gcagcccccaactacccccagcctcggaaggaaccttccagaagcgcaagactctaaaggccgtcgccttcccattcttcctcgccgcgggggtcgcctgagatcacataaacaatggtgaaggctgttgctgtgcttggtagcagcgatggtgtcaagggcaccatctttttcacccaagagggagatggccctaccgctgtcaccggaagtgtctctggcctcaagcctggcctccatgggttcca

SEQ ID NO: 24587 - DNA, 243 bp, Zea mays
ccacgcgtccgcccacgcgtccgcccacgcgtccgcccacgcgtccgatcgccaggtccgggacgaaggagttcatggaagcccttgctgccggcgctgatgtgtccatgattggccagttcggcgtcggtttctactctgcctacctcgtcgccgatagagttgtcgtgaccaccaagcacaacgatgacgagcagtacgtgtgggagtcccaagcgggcgggtcgttcactgttactcgtg

SEQ ID NO: 24588 - DNA, 245 bp, Zea mays
gtggagtccaagatcgccgcgtggcaggtcgccgaggtggccaaggtcaacaaccgcttcaagcgcgaggaggtcgtcatcaacggctgggagggcgaccaggtcgagaaggccagcgcgtggctcaagaagtacgagaggaagcttgaggagaagcgtgccaaggcgatggagaaggcgcagaacgaggtggccaaggcgcggcggaaggcggaggagaagcgcgcgtccgcggaggccaagcg

SEQ ID NO: 24589 - DNA, 245 bp, Zea mays
gtgggcttcttctggctggtgaaccacggcgtggcggaggagctgatgggcggcatgctccgcggggtgcgccagttcaacgagggccccgtggaggcgaacaggcgctctactccagggacctggctcgcaacctgcgcttcgcctccaacttcgacctcttcaaggccgctgcggccgactggcgcgacacgctcttctgcgaggtggctccgaacccgccgccgcgggaggagctgccggag

SEQ ID NO: 24590 - DNA, 172 bp, Zea mays
gtggagtccaagatcgccgcgtggcaggtcgccgaggtggccaaggtcaacaaccgcttcaagcgcgaggaggtcgtcatcaacggctgggagggcgaccaggtcgagaaggccagcgcgtggctcaagaagtacgagaggaagcttgaggagaagcgtgccaaggcgatgg

SEQ ID NO: 24591 - DNA, 98 bp, Zea mays
attcacctacaaggagctcgagaacggcgtcctgtgggaggtcgagggaaagtgggtcacccaaggtcctgttgatgtggacattggtgccaatccat

SEQ ID NO: 24592 - DNA, 178 bp, Zea mays
ccttcccattcttcctcgccgcgggggtcgcctgagatcacataaacaatggtgaaggctgttgctgtgcttggtagcagcgatggtgtcaagggcaccatctttttcacccaagagggagatggccctaccgctgtcaccggaagtgtctctggcctcaagcctggcctccatgggt

SEQ ID NO: 24593 - DNA, 241 bp, Zea mays
cgagtgtgtacactggaggagctccaagaagcaaccgacaatttcagttcctccaacctaatcaagactagtcctcttgcacaggattataatggtcagcttcaagatggttcacgagtactggttagatgtttgaggctgaagccgaagtactcctcccagagccttgtccaatacatggagattatttctaaacttcggcaccgtcatttggtcagcatcattggtcattgcattgtca

SEQ ID NO: 24594 - DNA, 197 bp, Zea mays
cccacgcgtccgcccacgcgtccgatgacctatgaggtccgtgagggtgatgatataagcgctggtgacaatgtaacagtgcaggtaactctggagcgtgacatgactaacgtttcatctgaggttggtccagtccatgcgccaaggtttcccaagcctaaggaagaaggctggtggctggtgattggggacagctc

SEQ ID NO: 24595 - DNA, 243 bp, Zea mays
agcaccaagacatgtcctggaccgtgtgggaccgctggacggtaactggcaacatgacgctgagggagctcctggagtggctgaaggagaagggcttgaatgcgtacagcatatcatgcggggacctcgatggctgtacaactcccatgttcccgagacacaaggagcggctggacaagaaggtggttgatgtggccagggaggtggccaagttggaggtgccttcctaccgccgccatctgg

SEQ ID NO: 24596 - DNA, 238 bp, Zea mays
gcatgactggtctggacaagaagaaagcttgtgtctttttcaagactaatgctgatgggaacacaacatgtgccaaggaaatgacaaagctctctggcatctctgaaatcatccccgagatggagatctgcgattttgacttcgaaccctgtggctactccatgaatgcgatccatggctctgcattctcaaaaaccatgtgaccccgaggacggtttcagctacgccagttacgagg

SEQ ID NO: 24597 - DNA, 235 bp, Zea mays
cacagagcgtcagagcccgatcccgatccagcgaggcggcgaccctccctcctccccttgcttcgctcgtccagccctgaccacccgcatccccgtcagtcatggcagcggcagcaggcggaggcgcggtgcgtgcgctgtcccagaaggagcaggacatacagatgatgctcgccgccgacgtccaccttggcaccaagaactgcgattttcagatggagcgctatgcctttaa

SEQ ID NO: 24598 - DNA, 167 bp, Zea mays
cccacgcgtccgggtctgcagcccccaactacccccagcctcggaaggaaccttccagaagcgcaagactctaaggccgtcgccttcccattcttcctcgccgcgggggtcgcctgagatcacataaacaatggtgaaggctgttgctgtgcttggtagcagcgatg

SEQ ID NO: 24599 - DNA, 93 bp, Zea mays
cggacgcgtgggctcaactggtttctgtgctggtggctgtgctgctattgtggactcagggacttcattgcatgctggtccaactaccatagt

SEQ ID NO: 24600 - DNA, 236 bp, Zea mays
ggagagcactctccacctggtgctccgcctcaggggtggcatgcagatttttgtgaagacattgactggcaagactatcaccttggaggtggagagctctgacaccattgacaatgtgaaggccaagatccaggacaaggagggcattcccccagaccagcagcgtctgatctttgcgggcacacagctggaggatggccgcactctcgcggactacaacatccagaaggagagca

SEQ ID NO: 24601 - DNA, 238 bp, Zea mays
gtcaacagactggtgaagaggatgctcagcttactccgctcttgcgccttggagctggagcatgtgctggtatcatagctatgtctgctacttacccgatggatatggttaggggaaggatcactgttcagacagacaaatctccctaccagtaccgtggtatgtttcatgcactgggtacagtctaccgtgaagaaggctttcgtgctctatacaaagggtggcttccatctgtaat

SEQ ID NO: 24602 - DNA, 235 bp, Zea mays
ggaccttcggcgcccgttcaggatccacatcttcccgagcgagttcttggttgacctcttcccccttcggaccacctccaaggctcttggtgtagcttgccactctcaccaatcaagttttcatgtctgatctcgacattcagatcccaactgccttcgatcccttcgctgaggccaatgctggggactctggtgcggcacagggtcaaaggactacgttcacgtgcgcatccag

SEQ ID NO: 24603 - DNA, 110 bp, Zea mays
ctcggcttcgccttcaagaaggacaccggcgacaccagggagaccccggccatcgatgtctgcaagggcctgctgggtgacaaggcccagatcagcatctacgaccccca

SEQ ID NO: 24604 - DNA, 76 bp, Zea mays
atggtggacgacatgcccatcagggacttccgcaacctggagagcaaggcggtcgcgttccccaagagccagccga

SEQ ID NO: 24605 - DNA, 171 bp, Zea mays
aaaaggatgaatttgttgtgctggctaccgatggggtttgggacgtgctatcaaatgatgaagttgttaatactgtcagccgagtcacatctcgggcctctgcagcacgatttttagtcgaatcagctcaccgtgcttggcgaactcggttccccacttctaaagttgatg

SEQ ID NO: 24606 - DNA, 238 bp, Zea mays
gacctccacagccgccagctcgccgtctacgggcgcgagaccatgaagcgcctcttcggctccgacgtcctcgtctccggactgcagggactaggcgctgagatcgcaaaaaaccttgtccttgcgggtgtcaagtccgtaaccttgcatgatgatggcaaagttgagctatgggacttgtcaagcaactttttcctctcagagaaggatgttgggcaaaatcgcgctctagcttgtg

SEQ ID NO: 24607 - DNA, 178 bp, Zea mays
  unsure (1)..(178): unsure at all n locations
ggaccacatggtgccgcccgtgtggtaccaggcggagaacaagggcatggtgaggacggaggacggccggtgggtgctgccgccgcggcagagggtgctcgacgaccacccggaggacactgaccatcacctccagcggcgcngtctcaccgcgtgaagctcagcaatactctaatag

SEQ ID NO: 24608 - DNA, 246 bp, Zea mays
ggacaacaggcagcttctcatcaaatcagaccctggtgaagttgttaaacctgaccaattcaaggcgattaacgatgaggggatgccaatttaccagaggcctttcatgaaggggaagctgtacatccatttcacggtggagttccccgactcgctggcaccagagcagtgcaaggctctcgagacagtacttccaccaaggccttcatccaagctgacagacatggagatagatgaatgcgagga

SEQ ID NO: 24609 - DNA, 242 bp, Zea mays
ggaaggtgaagaaacattcgattcatcattccttggccatgctgatgaagttgtggaggaaagaattgctgacgatgatgttattctggtgaaaggcacaaagaacaccagcgcggtctctataatacttaggggcgcaaatgactacatgcttgatgagattgaacggtccttgcatgatgccctgtgcattgtgaagagaaccctggaatcaaatatggttgttgctgggggtggtgcag

SEQ ID NO: 24610 - DNA, 171 bp, Zea mays
caagaggggcgagagcgggggcacgtgctgcgtcatagcccttctccgaaagggtagactggttgtctccaatattggagactgtcatgtggtgctcagccgagcagggaaggcagaggtgctcacctctgaccatcgggcctcccaggaggatgagaagcagagatttga

SEQ ID NO: 24611 - DNA, 174 bp, Zea mays
ggttgctgctcttttgtctgctggagcaaatccaagcttggttacagatcctactcatgatgtccctggtggacaaactgctggtgatctggctgctggacaaggttatcatggcttagctgcatatctttctgagaaagggctgactgctcattttgaggctatgtcactgtc

SEQ ID NO: 24612 - DNA, 151 bp, Zea mays
cccacgcgtccgcgccttgcgttgcgccgttgcctgggtcgcggatgcgtcggagccccgagtcgaataaaagaggcagcatcctgtcttgcatttgctgctgcgccatgtgttaacagcctgtgtaataaacactgttgctttcgtgtgt

SEQ ID NO: 24613 - DNA, 175 bp, Zea mays
cccacgcgtccggttgatcggtggctccggtttgacgctacggctctggatgttgctcaaatatactgcttaagagaacgtctagcatctgctattcttttcaaagtgaaacatccacaagatgttctacctcctgcgcttggagcgtcaatgtatgccatcacatgcatccttt

SEQ ID NO: 24614 - DNA, 168 bp, Zea mays
ggagttttgacttctggtcgtgttcgtcttctgctccataggggcactccctgcttccgtggttatggcaggcgtaatggtgagcgcaggaggaagtctgtccgtggttgcatcgtgagccaagacctatctgttatcaacttggtgattgtgaagaagggtgagaat

SEQ ID NO: 24615 - DNA, 233 bp, Zea mays
atgaaccatctaacattgaggttagcaaagagaaattccagtgcttgagacgtggctgctggttaaatgatgaggttattaatctgtaccttgaattgttgaaggagcgagaaaaaagagaaccaaacaggtttctgaaatgtcatttctttaatacattcttttataagaagcttgcttgtggaaaaaatggttatgattacaaatctgttaaaagatggacctcccaaagg

SEQ ID NO: 24616 - DNA, 200 bp, Zea mays
gctaaagggcttgcttgcctccacaatgctcaaaggcctgtcatccacagagatttcaagacatcaaatattctactggactctgattatactgctaagctgtctgactttggcctggcaaaagctggccctgaaggtgatcagacccatgtatcaacacgggtgatgggaacctacggttatgcggcccctgaatatgt

SEQ ID NO: 24617 - DNA, 150 bp, Zea mays
cccacgcgtccgaaagcttgaagatattgttccttcatcacacaactgtgacattccgcatgtgaaccgtactgagtatcagctgattgatatttctgaggatggatttgtgagccttcttacttcagatggcaacactaaggatgatct

SEQ ID NO: 24618 - DNA, 157 bp, Zea mays
cgttgccatcgagaacccgcaggacatcatcgtccagtccgcccgcccctatggccagcgtgctgtcctcaagttcgctcagtacactggcgctcatgccatcgctgggaggcacacccctggtaccttcactaaccagctccagacctccttcagc

SEQ ID NO: 24619 - DNA, 235 bp, Zea mays
acccaactcgccgccgccgctgccaacgccgcctgctgccgcagccgccatgggggcgtacaagtatgtgtcggaactatggaggaggaagcagtcggacgtgatgcgcttcgtgcagcgcgtgcgctagctgggagtacaggcagcagccgtccatcgtccgcctcaccaggcccacccgccccgacaaggcccgtcgtctcggctacaaggccaagcagggatatgtggtcta

SEQ ID NO: 24620 - DNA, 153 bp, Zea mays
gttcctgaacatgctcatcaagctcatcggcgccaagaagtccatggagatcggcgtctacaccggctactccctcctcgtcacggcgctcgccctcccggaggacggcacgatcttggccatggacatcaaccgcgagaactacgagctggg

SEQ ID NO: 24621 - DNA, 152 bp, Zea mays
aaaagcgactaaactgggcaaggcgggtcaccattgctgtacaggctgctaggggaattgagtacttgcatggctatgcttgccctcctgtaattcaccgggacatcaagtcgtcaaacatactgattgatgaggaccacaatgcccgtgtt

SEQ ID NO: 24622 - DNA, 207 bp, Zea mays
ctcgaagcttgaagatgttgcaaaagcactgaatctcagggtaaggaagaaggacaatggtgttgtcaagattcaggggaggaaggcggggaggaagggtgtcctggagttcgacactgaaatatttgagatcacggcatcctaccacctcatcgagatgaaacaaacgggcggtgattcagttaagtacaagacactgttggaaga

SEQ ID NO: 24623 - DNA, 253 bp, Zea mays
gacgccgccgtgtactggggcccctggcagagggcccgggccacctggtacggccagcccaacggcgccggccccgacgacaacggtggcgcgtgcggattcaagcacaccaaccagtaccccttcatgttcatgggctcctgcggcaaccagccattgttcaaggacggcaagggctgcggctcctgctacaagattcggtgcaggaaggacccgtcctgctccgggcggacggagacggtgatcatcaccg

SEQ ID NO: 24624 - DNA, 250 bp, Zea mays
cccacgcgtccgcccacgcgtccgtgagcaccaaggaggtggacgagcagatgctgaacgtgcagaacaagaactcctcctacttcgtggagtggatccccaacaacgtcaagtcgacggtgtgcgacatcccgcccacggggctgaagatggcgtccaccttcatcggcaactctacctccatccaggagatgttccggcgcgtgagcgagcagttcaccgccatgttccgcaggaaggccttcttgca

SEQ ID NO: 24625 - DNA, 248 bp, Zea mays
cgttgcttcgttggcggcctcgcctgggccaccgacgaccactccctcaacaacgccttcagcacctacggcgaggtcctcgagtcgaagatcatcctggatcgggagacgcagaggtcccgcggcttcggcttcgtcaccttctccacggaggacgcgatgcgcacgccatcgagggcatgaacggcaaggagctcgacggccgcaacatcaccgttaacgaggcccagtcccgcggcggccgtgga

SEQ ID NO: 24626 - DNA, 247 bp, Zea mays
ggcaattccactaggatcccagttgtgatgccactttcagccgcgatggcagcatgctcgcagttgctggtggcgaggtatggcgagatgagtgacggtctcgtgacgaggaaagatgctgatgttcctggttcagtggcggtccggccggagcggaagctagaccacgcgtggatggtgtattcgtcgctgaaagatgagtctggggatcaggcggacacgtcgcaggtatgcgaagcctgctgac

SEQ ID NO: 24627 - DNA, 245 bp, Zea mays
ctcgggaatcaggggtttcacacatagcttcgtcgatttgaatttgatgtactaatggagtctaagggtggcaaaaagtctagcagtagtcgttctatgatgtatgaagctccccttggctacagcattgaggacgttcgacctgccggaggcgtgaagaagttccagtctgctgcttactccaactgcgcgaagaagccatcctgatatcccttttggcttcctcattctagtagtttaggatt

SEQ ID NO: 24628 - DNA, 243 bp, Zea mays
gcgggcaccgtgacctccttctacctgtcgtcgggtgacgggcccgtgcacgacgagatcgtcatggagttcatgggcaacgccagctggcagcccgtggtgctgaacaccaacgtgtgggccaacggcgacggcaagaaggagcaccagttctacctgtggttcgacccggccgccgacttccacacctacaccatcatctggaacgacaagaacgtcatcttcaaggtggacgacctcttc

SEQ ID NO: 24629 - DNA, 247 bp, Zea mays
gacatcctactttcgtcctcacgagtgaccgataatccgccggcgctaagatgttggtttatcaagatctcctatctggcgacgagctcctgtcggattcattcacctacaaggagctcgagaacggcgtcctgtgggaggtcgagggaaagtgggtcacccaaggtcctgttgatgtagacattggtgccaatccatccgccgagggtggtgaggacgaaagcgttgatgacacagccgtgaaggt

SEQ ID NO: 24630 - DNA, 241 bp, Zea mays
catccggcagcagccaaaccctacataggcgccgccgcaggcccccccgcatcgtcgccaaagatgcagatctttgtgaagactctgacggggaagaccatcactttggaggtggagtcctcggacaccatcgacaatgtgaaggccaagatccaggacaaggagggcatccccccggaccagcagcggctcatcttcgccggcaagcagctcgaggacggtcgcaccctcgccgactaca

SEQ ID NO: 24631 - DNA, 240 bp, Zea mays
tccttcctcaaatggctggccttcctcgccgcagtgtatctcttgatattggatcgcacaaattggaagaccaacatgctgacagctctcttggttccttacattttcttcaccctgcctaatgtgctgttttctctgatcagaggagaggtggggaaatggattgcgattattgctgttattctgcgtctattctttccacgccacttcccagattggttagagcttcctggttccatc

SEQ ID NO: 24632 - DNA, 243 bp, Zea mays
gcaccaaggaaaccggggacgagacagcagaggacctccagccgaagcatccaaaatatgacatccgggtagcaaacgctatgatcaaggcgtacattaccgagggcatgcttgacaaagctgtcgccatgaagaagcgtgccaagatgcgcggcggaaggctgaacgccaagacatgggagatcttcatggagcattacctcaagacgggggatctcaagatggcccattggtgcgcggacc

SEQ ID NO: 24633 - DNA, 241 bp, Zea mays
gacccacgcgtccgcggacggtgggtgcaaattggacagatggcgcactcaatttggctttacatcgtcccatcgggcatgtatggagtcgtgaactacctaaaggaaaagtaccataatccaatcatcatcatatcggaaaacggaatggatcagcctggaaacctcacgcgcgaggagtacgtgcacgacgccgtgaggatcgatttctacaagaactacctgacggagctaaagagag

SEQ ID NO: 24634 - DNA, 241 bp, Zea mays
cccacgcgtccgcccacgcgtccgcaccattcctcctccggatttcgcagtcagcggtggtgaaggtagcgggcgcggaggaagatggggctcgcgttcgggaagctcttcagccggctcttcgccaagaaggagatgcggattcttatggtcggtctcgacgccggcggtaaaaccaccatcctctacaagctcaagctcggcgagatcgtcacaaccatccccaccatcggtttcaatg

SEQ ID NO: 24635 - DNA, 237 bp, Zea mays
cgcgaacatctccggcgggcacgtgaacccggccgtgaccttcggcgccttcgtgggcggcaacatcaccctgttccgagggctcctgtactgggtggcgcactgctggggtccaccgtggcgtgcttcctgctccgcttctcgacgggcgggcaggccacgggcaccttcgggctgacgggcgtgtcggtgtgggaggcgctggtgctggagatcgtgatgaccttcgggctggtg

SEQ ID NO: 24636 - DNA, 242 bp, Zea mays
aaggcgaagaggggaagcaccgcaccaggacccttgttcgccgccgccgcctctgatctccgcgaggttgtcaggattcaatatgtcgaccagcacattcgctacttcctgcacgctgttgggcaatgttagaacaacgcaggcctcccagacagcggtgaagagcccttcgtctctaagcttcttcagccaagttacgaaggttccaagcctgaagacctccaagaaactggatgtctccg

SEQ ID NO: 24637 - DNA, 240 bp, Zea mays
aatttggatcatttgataaatactgttggagcttcgtgaaccacaaacctatattgagccgattcaggtactcccgtcaagtgcctgtcaaaacatcgaaagcagatgccataagcaaagacttggttcgaaggggtttccgcagtgtcggcccaacagtcgtatataccttcatgcaagtctctggcatgactaacgaccaccttatctcctgctaccgttttgctgaatgcgcggcct

SEQ ID NO: 24638 - DNA, 239 bp, Zea mays
ggattacgagaagaccggcaagatccccgacccggagtccaccgacaacgctgagttcaagatcgtgctcaccatcatccgcgacgggctcaaggctgaccccaagaagtaccgcaagatgaaggagaggcttgtcggcgtctctgaggagaccaccacgggtgtcaagaggctctaccagatgcaggagaccggcgccctcctcttccctgccattaacgtcaacgattccgtcacca

SEQ ID NO: 24639 - DNA, 237 bp, Zea mays
cccacgcgtccgataatgtagaggatgtagtggtatttccctaggatggtggacttcatatcaaggcacgcgtggagaaataccactacatcctctacattattgtcctggcaatgcagcccaggatgcttttgactgtcgacgaggatctgaagcccctgtcagtacctgtccgcgtcggacaagctgtcgacgtggttggtcaggcaggaaggccgaagacaatcaccggcttcc

SEQ ID NO: 24640 - DNA, 245 bp, Zea mays
gagctgtacgccaacgaggtgcccaagaccgcggagaacttccgcgcgctgtgcacgggcgagaagggcgtgggcaagtccgggaagccgctccactacaagggctccaccttccaccgcgtcatccccgagttcatgtggcagggcggcgacttcacccgcggcaacggcaccggcggcgagtccatctacggcgagaagttccccgacgagaagttcgtgcgcaagacaccgcccccggtgtg

SEQ ID NO: 24641 - DNA, 242 bp, Zea mays
ctccggaagtgatgcagacgagctatgctatcttggttctggttttgcctaatgatggttcattagggtggggtcgaagagagttggagattgttgaggtagttgctgaccaagttgcagtcgctctgtcacatgctgcactcctagaggagtctcagctgatgcgagagaagcttgccgagcagcatagggacttgctgcaggcaaaggatgaagccatgagggcaggggacgctaggaat

SEQ ID NO: 24642 - DNA, 242 bp, Zea mays
gaagcttgtgctcaccgccgagaactacggctcggtgcggcggttctacgtggagaccacggaggacaacacgattcctctgcccctccagcagagcatgtgtggtgccaacccaccggagaaggtgctgcggctgaagggggcagaccacgcgcccttcttctccaagccgcagcgcctgcacaaggcgctggtcgagatcgccaccatgccgcatgtccgggcttcgtgagaacgtgttt

SEQ ID NO: 24643 - DNA, 238 bp, Zea mays
cgtcgcttccagccgccgccgcgtccgcctcgccaagcgcacagccgccgcagcacatcgctctcttgatctcagccatggcggaggtggagcagcaacaggacacgccgaagctcttcaaccgctggaccttcgatgatgtccaggtgaacgacatctcgctgaacgactacctcgctgtgaacgcgacgaagcacgcgatgtacctgccgcacaccgcggggcgctactccaagaa

SEQ ID NO: 24644 - DNA, 245 bp, Zea mays
cgatccgatccgccgagtgcacaccacctttccccactccgatcgaatcgatggccgccgagggcgagaagaagatgataaccctcaaaagctccgatggcgaggagttcgaggtggaagaggcggtggcgatggagtcgcagaccatccgccacatgatcgaggatgactgcgccgacaacggtatccctcttcctaacgtcaactccaagatcctatccaaggtaatcgagtactgcaacaag

SEQ ID NO: 24645 - DNA, 240 bp, Zea mays
gccgtcgtggtaatgatgaagtaatggcaaggggaacgtttgcaaacattaggatcgtgaacaagtttttgaacggagaagttggacccaagaccattcatgttcctactggggagaagctttctgtttttgatgcggccatgagatacaaatttgagggccatgctactataatcctcgctggtgctgagtatggaagcggcagttctcgtgattgggctgctaagggtccgatgctcc

SEQ ID NO: 24646 - DNA, 230 bp, Zea mays
gactcttgtggcccagattaaggaagggttcgaaagcgggaaggatcttgttgtgactgtccagtctgcgatgggggaggagcagatctgcgcgttgaaggatgttggccccaagtaacttccttggctttggagacggaaccctactgtatctcaacttaaatcggaaaagaagtgtatcaccaaaggattgctaccgagacattcacctggcttgagctggcttttgc

SEQ ID NO: 24647 - DNA, 221 bp, Zea mays
gaaaaatgttcgggatatttttgagaaggctaggtctgcacgcccatgtgtcattttctttgatgagcttgattccctcgctcctgcacgaggatcctcagcagattctggcggtgtcatggacagggttgtttcccagttacttgtggagatcgatgggttgagtgacaacagccaggaccttttcattattggggctaccaataggcctgaccttcttg

SEQ ID NO: 24648 - DNA, 236 bp, Zea mays
gaaggctcctgccaaggaggaagaggaggaagatgaagaggagtctgacaagtccaagtcggaggtcaatgacgaggatgatgaagagggtagtgaggaggatgaagatgatgacgagtgatggagctcctcgagacaatggaccgtgcttcatccaacaatggagcggctacacaaggccccgtggcgatcacaaaaaaggagcctatatccatgtactagaattattcagtttc

SEQ ID NO: 24649 - DNA, 236 bp, Zea mays
ctgcaatggatgcaagagccctgataccattctgtccaaggaaaatcgtctgttcttccttcgctgcgaacagtgtggatcttcaaggtccgttgctccaatcaaagctggattcgttgctcaagtcggtcgtcggaaggcatgagcatctatatgtggatggtgttggggtcaataccaactcaacaatagttgattatttgttgactagagattctgcggcgcaatgttgagca

SEQ ID NO: 24650 - DNA, 233 bp, Zea mays
tgttcatggaggaatttcgcaaggagttcaaggagaagaaccctaagaacaagtctgtcgctgcggtggggaaagctgctggcgacaggtggaaatccctgagcgagtcggacaaggctccctatgtagccaaggctaacaagctcaagctcgagtacaacaaggccatcgctgcctacaacaagggcgagagcactgcagctaagaaggctcctgccaaggaggaagaggag

SEQ ID NO: 24651 - DNA, 237 bp, Zea mays
attttcacacagataccaaggaaattcacaagcatgacagaagggaagatgggctatgaagactttgtttattttatattatcagaggaagacaaatcatctgagcctagtcttgaatactggtttaagtgcatcgatcttgatggtaatggtattttaacttacaatgaaatgcattttttctatgaggagcaattgcaccgaatggagtgcatggcacaggaacctgtggttttt

SEQ ID NO: 24652 - DNA, 227 bp, Zea mays
cagggagttgaggatgtcttatgttctctccagatgcaaagattaccctaagtttcaagcagtagctattgccatacaaagatctggcttcaagatcgtgttgctactaaggcttgtacctttacttccggtcaacatgttgaactacctgatatctgtcactcctgttggtgttggagaatacatgctggcttcttggttgggaatgatgccaatcactcttgctc

SEQ ID NO: 24653 - DNA, 225 bp, Zea mays
ggcgaacctcgtgatcgttgccggtgaccacggcaaggagtccaaggacagggaggagcaggcggagttcaagaagatgtacagcctcatcgacgagtacaagttgaagggccatatccggtggatctcggcgcagatgaaccgcgtccgcaacggggagctgtaccgctacatttgcgatacgaagggcgcattcgtgcagcctgcgttctacgaagcgttcgg

SEQ ID NO: 24654 - DNA, 227 bp, Zea mays
cggacgctgggcaggacgcgtgggccaggcacattgtgctgatgttggatctcacttgttggagcgtctaaaagcgcttcaggagaagcacgacatcataggtgatgttagacgaaggggactgatgcttggggtggaactcgttacgggcagaaaggagaagacccctgccaagtcagaaaccattgaactgtttgagaagctcagagatctcggggtactagttg

SEQ ID NO: 24655 - DNA, 233 bp, Zea mays
gcttctactacctccgcggccacctccaccagacctggtccgtgcaccgctacggcttccagtacttcctgccggcggagaagaagggcatcaaccagcagatcgagctggccatcctgcgggccgacaggatgggcgtcaaggtgctcagcctcgccgcgctcaacaagaacgaggctctgaacggaggcggcaccctgttcgtgaacaagcaccaagacctgcgtgtcagg

SEQ ID NO: 24656 - DNA, 231 bp, Zea mays
ctgaacaactactttggggttggctgagatgcaaaggttgccttagatatagacaacctgagggcagagcaccctgaacggttttatagccagtttatgaacaaggtgctgtatgcaagagagggagcaaagaacataatggataacacatttgattgtattccttgggatgtcaagcttgagatagatggatcgaaaattgatattcctcaggactccgaagtatccttg

SEQ ID NO: 24657 - DNA, 244 bp, Zea mays
ggagttccatcagagaatattctttatcttggcggacctaatattgcttctgaaatttacaacaaagaatatgcaaatgcacgtatttgtggagctgacaaatggagaaagccccttgcaaagtttttgaggcagcctcattttattgtgtgggataacagtgatctcatcactcatgaagtcatgggtggcttaaaaaatgtctatgctattggtgctggtatggtagctgcactaaccaacg

SEQ ID NO: 24658 - DNA, 229 bp, Zea mays
gatgatgttgaattgaataatcttcatcgacagataattcataaagaagcatatgttggacaatctaaagtgaagtcagcagctgatgcttgccgggacattaactaaaataccctcagatatgatatagttgttgatgcaactgacaaccttcctactaggtatatgatcagcgattgctgtgttttgctgaacaagccacttgtatctggtgcggcattaggcttag

SEQ ID NO: 24659 - DNA, 231 bp, Zea mays
gggcttcgcgcgggacctgcggttcgagaacatcgtgatgacgaacgtctccaaccccatcatcatcgaccagtactactgcgaccagcccacgccctgcgccaaccagacgcaggcggtggaggtgcgcaaggtggagttcgcgggcatccggggcacgtcggcgacgccgcaggagtcagcatcgcgtgcagcgacgccgtgccgtgccgggacctggatctggcgaac

SEQ ID NO: 24660 - DNA, 209 bp, Zea mays
cccacgcgtccggcgcaacttgcagacaactgcactgggctgcagggattcttggtgttcaatgctgttggtggtggtactggctctggacttggttcactgctgttggagcgcctttcagttgattatggcaagaagtctaagcttggtttcacgatttatccttccccacaggtgtcaacagctgttgtagagccatacagcggtgg

SEQ ID NO: 24661 - DNA, 227 bp, Zea mays
gacgctggggcgtcacagacctacccgcagcaggctggcaccgtccgtaagaacggcttcatcgtcatcaagaaccgtccctgcaagttgtggaggtttctacctccaagactggtaagcatggccacgccaaatgccactttgtcgccatagacatattcaatgggaaaaagcttgaagatattgttccttcatcacacaactgtgacattccgcatgtgaaccgt

SEQ ID NO: 24662 - DNA, 224 bp, Zea mays
cccacgcgtccgatggaatttatgcttgaaaccatatgtgacattaagaacaataagaaaaggcctaaagaggatccttcacaccatactcgaataaaaaagtggcttcaaaagcttaaggcagaagatgtcctcttgcttggttaaccagggagcggttttggcccccctgataagaaggggcagtggtggttgtctggggctgttccatcgacagtagctaa

SEQ ID NO: 24663 - DNA, 222 bp, Zea mays
ctgcaaccatgagtggtgttacgtgctgccttcgcttccctggtcagctgaattctgacctccggaagcttgcagtgaacctgatccccttcccacgtctgcacttcttcatggttggattggctccagtgacctcggggggccccaagaagaacggtgttctcagggtgccagaactgcgactgcctccaagggttccaggtctgccactcgctgggagga

SEQ ID NO: 24664 - DNA, 221 bp, Zea mays
gaacgcggcgctaaacgcgacgtccccgacgatgcgaacgagcattgccctggaacacagtctgaggaggcaggcaaggcagatgcctgcgctgggtgccccaaccagcagatttgcgccaccgcccccaaggggcctgatcccgatgtggttgctattgttgagatgttggctactgtgaaacacaaattgttagtcttgtctggaaagggaggtgttgg

SEQ ID NO: 24665 - DNA, 226 bp, Zea mays
gtggagtctgggctgcatgtttgctgggatgatttttcgtaaggaaccatttttctacgggcatgacaaccacgatcaacttgttaagatagccaaggtacttgggacagatgggctgaatgcttatttgaacaagtacagaattgagcttgaccctcagcttgaagccctcgttggaaggcatagcaggaaaccctggttaaagtttatgaatgcagataaccag

SEQ ID NO: 24666 - DNA, 220 bp, Zea mays
cccacgcgtccggtcaatgcttgtgcaaatccttggggcgcgccgttgcattgaagttggtgtgtttactgggtattcatcattagctgttgcactggcccttcctgaatctggtcacttggttgcttgtgagagggatgacagatgcctagaagttgccaagaagtactaccaacgtgctggtgttgcacataagattgatgtgaaacatgctttggct

SEQ ID NO: 24667 - DNA, 230 bp, Zea mays
gatggaaagagatctaaatgagcaaatagaacgtggagaagccccaccggaatgcgcagggctccggcagtggcgaactccaatattagccatgacagcagatgttatccaggcgacgcacgaacagtgcttaaaatctgaaatggacggttatgtatccaagccattcgagggcgagcaattgtacagagaagtagctcgctttttccaaaatcaagaccaagttcagt

SEQ ID NO: 24668 - DNA, 226 bp, Zea mays
gctggctcacttctccaggtaaggaaagtgttcgtcctcatggcgccgccgcagccgaagtcgggcctcttcgtgggcatcaacaagggccatgtcgtcaccaagcgcgagctgcctctgcgcccgtcccaccgcaaggggaaagcaacgaagagggtgtccatggtcaggggcctgatcagagaggttgctggctttgctccttatgagaagcgtatcaccgagc

SEQ ID NO: 24669 - DNA, 224 bp, Zea mays
ctcacccgccgcagccaaaccctctccagcagccgtcgtcgccaccgctgcagcgcggaggcgacccccatcgccgccaagatgcagatcttcgtgaagaccctgacggggaaaaccatcacgttggaggtggagtcctcggacaccatcgacaacgtgaaggccaagatacaggacaaggagggcatcccgccggaccagcagcggctcatcttcgccggcaa

SEQ ID NO: 24670 - DNA, 217 bp, Zea mays
gtggttcatgtcactttttatctgcatttttgctacgagcatcctagaaatgagatggagtggtgttggaattgatgactggtggaggaatgagcagttctgggtcattggaggtgtgtcctcacacctctttgctgtgttccagggacttctcaaggtcatagctggtgttgatacaagcttcaccgtgacatcaaagggtggagatgatgaggag

SEQ ID NO: 24671 - DNA, 218 bp, Zea mays
gattgactctgttctggatcttgcacggtgcacgatcgtgtccgagctctccaacaaggattttgactcctatgttctctccgagtcaagcttgttcatctatcctctgaagattgtcatcaagacctgtggcactaccaagctcctgctcacaattccaaggatcctagagcttgctgaagagctgtctatgcctcttgctgctgtgaagtactccc

SEQ ID NO: 24672 - DNA, 220 bp, Zea mays
cgctcccctacctctccagcatctcccgtctccgtcgtctcgtctctgctcctcacctcgccgccagccatgggcaagatcaagatcggaatcaacggtttcggaaggatcggcaggctcgtggccagggtcgccctgcagaccgaggatgtcgagctcgtcgccgtcaacgaccccttcatcaccacggattacatgacctacatgttcaagtacgaca

SEQ ID NO: 24673 - DNA, 214 bp, Zea mays
cacacgcgtccgcttgagaagattgagaaggacattaagaaaccacttttgaggagcgacaagaagaacatggccaccctcttggcagagtttgacaagattaacaaaaagcttggctttcggaaggaggatcttccaaagatcgaggaagagcttgaattggaaattgccaaaagtgagctgactgaacttaagaaggaatgcgttgaagcaa

SEQ ID NO: 24674 - DNA, 212 bp, Zea mays
cggacgcgtgggctggtggtcatgataaaaaggttactttgtggtgtacagattctctgaagcctaaatccatcctggaagagcactcgtttcttatcactgatgttagatttagcccaagcatgtcgcgccttgcaacatcctccttcgacaaaactgtgcgggtttgggatgcagataacactgactattcactccgaactttcacgggc

SEQ ID NO: 24675 - DNA, 212 bp, Zea mays
aacctcctctgcttccgagatctctccccacctcccggtccgctagcagatagcgggggccagagagatcgagatccggaggcgctagcgccacccatcagcgtctgcggcaatggcgggcacggtgacggtcccggggtcgtcgaaaccctccacgccgctgctcaaggacgagctcgacatcgtgatcccgacgatccgcaacctcgact

SEQ ID NO: 24676 - DNA, 201 bp, Zea mays
cccacgcgtccggaccgcatcttcacactgtttatccacacggctccactgatactcttccttttgccacgatgggttctggatcccttgctgcaatgtcagtgtttgaatcgaagtataaagagggcctcactagggaagagggaatacaactggtgtcagaagcaatatgtgcaggtatcttcaatgacttgggtagtg

SEQ ID NO: 24677 - DNA, 148 bp, Zea mays
cccacgcgtccggagcatctgtccgcacccaatcaccaaacatggaaatgattgactcgctgtttaagccacgggaaactgatgacgatggtctgattcgggaatgtctgattgacttctacaccagttcagggaagagaaagcctga

SEQ ID NO: 24678 - DNA, 220 bp, Zea mays
gagataacatccgacaataggcctacgagtaaaatctttgagtggttttttgaccctctgatggtcatcaaagatcaaatcaaagctgaaaacttcacagaagaagaggaagcataccttgagaagcaagtgctcttgattagtgatccaaagcgcatcaaggagaatctcattcggcttccaccattgagtgagcgaaaacaagcagaaatagaagcat

SEQ ID NO: 24679 - DNA, 220 bp, Zea mays
aaagatgcatgtcacagtgcaaaagggaggaagcaaagatcacagcttgggaaaatctacagaaagcaaaagcagaggcagctatccgtaagctggagatgaaacttgaaaagaaacggtcatcatcaatggacaaaattttaggcaaactccgctctgctcagaagaaagcacaagacatgcgaagtgtagtttcttctagtgaaggtcagtgtagtgt

SEQ ID NO: 24680 - DNA, 241 bp, Zea mays
cccacgcgtccgcctcatcttggctgcacactatctgaacatcaagggtctgctcgacctgacctgtcagactgttgctgacatgatcaagggcaagacaccagaagagattcgcaagaccttcaacatgcaagaatgacttcacccctgaggaggaagaggagatccgcagagagaaccagtgggccttcgagtaaggaggtgctggatctattgatgcctaagtgtggtcgtgtctact

SEQ ID NO: 24681 - DNA, 241 bp, Zea mays
cccacgcgtccgcttcttgatggtttgtcctcaagcacatctcttcctgatgagaatgcagcttacccgacaatcacagcattccagagtgcaaccttgaggatcacattcagtttcaaaaagcaacctggaaaacctcaggagactacaattaatgcttctttcacaaatttagcaactactgcattaacagatttcgtcttccaggcagccgtgccaaagttcatccagttgcgtttgg

SEQ ID NO: 24682 - DNA, 247 bp, Zea mays
caaaaactggattaaagcgatggttcttacagcgtccctgtttccgttcttgtgtttctcaattggcttcgcgctgaatacaattgctattttctaccgctcattagcagcaataccatttggaacaatggttgtcatgtttgtactttgggctttcatctcctttcccttggtgcttttgggaactgtcgttggtaggaactggagtggagctcctaacaatccctgccgagtaaagactattcca

SEQ ID NO: 24683 - DNA, 240 bp, Zea mays
cccacgcgtccgacggggcgctgtacaagtacttctccacggtggcgaacaggcgctggacaccgccgagggcctgggcctgtcgcgcgaggaggcctgccacaacctcctcttcgccaccaccttcaacagctacggcggcctcaaggtgctgttcccgggcatcctggccaacgtcgccagcgccggcgagaagctccacgagcggctggtggctgagattcgaggcgccgtggccga

SEQ ID NO: 24684 - DNA, 238 bp, Zea mays
cccacgcgtccgcattgatcaaatccagcgagaaatttctgtgatgaagcttgttaggcatccaaacatcatacagctctatgaggtcatggccaccaaaaccacgatatactttgtgctggaacatgttaaaggtggagagctgttcaacaagattcagcgacgaaggctcaaggaagacgcagcgaggaagtacttccaacagctgatctgtgcggtggacttctgtcacagcagg

SEQ ID NO: 24685 - DNA, 238 bp, Zea mays
gagaggtctttgtattctgaaggtgatagaaagctggcagaccttgacaaagcaagcgagctggatcctactctcacttacccttacatgtatcgagctgcatccttgatgagaaaaaaagatgctaaacatgccttagaggaaattaaccgactcttgggtttcaagttagcattggagtgcctggagctacggatctgtctatacctggctcttgaagactataagtctgctatct

SEQ ID NO: 24686 - DNA, 235 bp, Zea mays
cagaaaggctgttgtttatatcattgatacaagtggaagcatgcaaggaaagcctcttgagagtgttaagaatgccatgtccactactctctctgatcttattccaggagattacttcaacataataacatttaatgatgtgcttcactcattctcatcgcgtttggagcaagtaaatgaaaaaacaattggaaacgctattgaatggatgaatttaaactttgtcgctcagggt

SEQ ID NO: 24687 - DNA, 235 bp, Zea mays
cagacgctgggcgaccgcgtgaagaacatgacaggcctggtggagatgtacggcaagaacgcgcgcctgagggagctggcgaacctcgtgatcgtcgccggtgaccacggcaaggagtccaaggacagggaggagcaggcggagttcaagaagatgtacagcctcatcgacgagtacaagttgaagggccatatccggtggatctcggcgcagatgaaccgcgtccgcaacgggg

SEQ ID NO: 24688 - DNA, 243 bp, Zea mays
atcgtcgactccgagaagctgagggagatcggcttcatcgtctactccatcggcaagccgctcgacgcctggctcaaggacatgcccgcggtcgcctaatcccacccccctcacccatggattggattccgggaaggaagaggagagaagctggttgaccgttctttattacagtttgtttttgcaggctacgctaccgattttctcttgtgtcaggcataaaaaaaggctggacgggctgct

SEQ ID NO: 24689 - DNA, 237 bp, Zea mays
cggacgctgggcgagaggctcaggagaaatccagtgactgcccggtgttcttgtttttctctgtgaacacaagtggtcagtttgttggtgttgctgaaatggttggtcctgtcgactttgataagactgtggagtattggcaacaagacaagtggaatggttgttttccactcaagtggcacatagtcaaggatgtgcccaacaacactttgaagcatattacactggataacaatg

SEQ ID NO: 24690 - DNA, 232 bp, Zea mays
ggagtacgatgggaaggtttttgtacctggacagtcgaacaacgcctacattttccctggatttggcctcggtcttgttatctctggagccatccgtgtccacgaggacatgcttcttgccgcctcggaagcactagctgctcaggccacacaggagaacttcgacaagggatcaatcttcccgcccttcaccaacattagaaagatctctgcgcgcattgccgcagccgtg

SEQ ID NO: 24691 - DNA, 233 bp, Zea mays
ccttcttgttactaccctggtcataagctggtctatcactgagatcatcagatactctttctttggaacgaaggaggcatttggctttgcgccttcctggttattatggcttaggtacagcacctttatgttgttgtatcctactggtatctctagtgaagttggtctgatctacattgccttgccttacatgaaggcatcggagaaatactgtattaggatgcccaacaaat

SEQ ID NO: 24692 - DNA, 180 bp, Zea mays
gtaagagggtaatcgacgttgaccttaccgagcagcagctcgaagaaagacggaggaaatggaccccaccgccatacaagtccacctgtggagctctttggaagtacatcaagcttgtggctccagcgtctagaggatgcgtcactgatgaataggatgtgttacattctgttaggttgt

SEQ ID NO: 24693 - DNA, 180 bp, Zea mays
aacatccagaaggagagcacccttcaccttgttctccgcctcaggggtggtatgcagatctttgtgaagaccctgactggaaaaaccataaccctggaggttgagagctcggacaccatcgacaatgtgaaggcgaagatccaggacaaggagggcatccccccggaccagcagcgtctg

SEQ ID NO: 24694 - DNA, 175 bp, Zea mays
atgactggcgccgttgattttgagaaaaccctagagtattggcaacaggacaagtggaacggctccttctctgttaagtggcacattgtcaaggacgtgcccaacaatattctcaagcacatcatcctggagaacaatgagaacaagcctgtcacaaacagccgtgacactcagg

SEQ ID NO: 24695 - DNA, 169 bp, Zea mays
tcgccaggcaggccgccaagagcatcgtggccagcggcctcgcccgccgctgcctcgtgcaggtgtcctacgccatcggcgtgccggagcccctgtccgtgttcgtcgactcctacggcaccgggaccatccccgacaaggagatcctaaagatcgtcaaggagaactt

SEQ ID NO: 24696 - DNA, 174 bp, Zea mays
gattttagccgccgccgctgctcatctcacatccctcgagaagacgcctgctcctcgccgatcgatacgatggccgtcttctccgacctccacaccgccgacggcctcaagtccctcgaggctcacctcgccggcaaaacctatgtgtctggtgactccattactaaggatgac

SEQ ID NO: 24697 - DNA, 169 bp, Zea mays
catgtttgtgattccattctgcgtggtaattggctggatgatgggacaagaaatggacttgaattttcaactgttcgagacagcgactctctttataactgtactagtggtggcattcatgctacaggaaggcacatcaaactattttaaaggtcttatgctcatctta

SEQ ID NO: 24698 - DNA, 168 bp, Zea mays
cccaccgatccatttcagccgccgccgcgcgtagcaagcaggagcagcaaggatgccggctggccacgggctgcgctcgcggacgcgcgacctgttcgcgcgccccttccgcaagaagggctacatcccgctcaccacctacctccgcacctacaacatcggcgacta

SEQ ID NO: 24699 - DNA, 268 bp, Zea mays
gaagagctctggcaagtatgagaagaaggtgtatgtgctccccaagcaccttgatgagaaggttgctgctctccacttgggcaagcttggtgccaagctgaccaagctcaccaagtctcaggccgactacatcagcgtgccgatcgagggtccctacaagcctgcccactaccggtactaggcagccagcacacggcttgcagctcactcgggccgttgtgtgctatgaagttcgctacactggcctgtcagttatcttttgcatgca

SEQ ID NO: 24700 - DNA, 261 bp, Zea mays
gcaatctataaacaatgtggtgtggagtttgctgcggaatatgtgattcctctcatcttcccattactcacagcacatcaattgaatgtacaacaatttgccaagtatatgctatttgtcaaggacattacaagcaagatcgaagagaagcgtggtgtgactgttacagataatgggaacacagaggtaaaagcatcaccttcattggcaaacgggatccattctgaacctatgccaggacaaataccagctgcaaagagc

SEQ ID NO: 24701 - DNA, 259 bp, Zea mays
atgagcaatccatagcatcaaatatagtacgcattgtggttgttgggaattcagtgcatatttcaccaaggtttgtcaatggtcagacggtaccatcaaaagatcaatcaaggatagcagaacctattaaggaactggatataatgcttacccagctcgtggcttcgttgcctgtagatatgatgccggggtgtcatgatccggcaaatttttctttgcctcagcagcctctgcacagatgccttttctctggggcatc

SEQ ID NO: 24702 - DNA, 258 bp, Zea mays
cccacgcgtccgcatctgaagcgcgcgagagaaacgcgtatacccaggcggcggttgaggaagaggaggagaagaagaaggagatggcttcctccgcatacgcctcatggtccaagcggtggatccgtcccgaggtgtacccgctgttcgtgccgatggccgtggccttgggcatctgctcgtaccagcttgtgcgcaacatcacgggcaaccccgaggtgcgggtgaccaaggagaagagggcggccggcgtcctgg

SEQ ID NO: 24703 - DNA, 260 bp, Zea mays
cccacgcgtccgcccacgcgtccgcccacgcgtccgccttcaagaaggacaccggcgacaccagggagaccccggccatcgatgtctgccagggcctgctgggtgacaaggcccagatcagcatctacgacccccaggtgacggaggaccagatccagcgggacctagccatgaacaagttcgactgggaccacccgatgcacctgcagccgacgagcccgacggccgtgaagcaggtgagctgcgtgtgggacgcgtac

SEQ ID NO: 24704 - DNA, 261 bp, Zea mays
gtccatggcagtggctgtttgtggagattagaagctgatgagggagtctcgtagcagaacttcaatgttgagatatggaaaagctacatatgtatcaagatatgtgaagactgtccgcctcaaacaagaggagtattttggtggagcgaagtttatgaagggcatggaggtactgctggtaacaagttctggatgtcattaggtctaccattgatagctactgtgaactgtgctggtaacactggagccaagaacctctac

SEQ ID NO: 24705 - DNA, 232 bp, Zea mays
atcgctggatctcgataaggacgaccgatgacgcacgctgagatccggcgtactgctaattttgataactgatctgttagatggcatcagctgagctttcccgttatgtaaatgtgtacttgtcgaactcgctgagcaggcggagaggtacgatgtgatggttgatttcatggagatggtagccaagactgttgactcggaggagctcactgtggaggagcgatacctcttg

SEQ ID NO: 24706 - DNA, 263 bp, Zea mays
cgcacgcgtccgcggacggtgggaggaagtgcaaagaaggtggtggttattggtgggggctatattggcatggaggtagctggcagcagcttgtggctggaatcttgacacaacgattatattcccagaggaccacattatgccaagattatttacgccctcgcttgctaagaagtatgaggaactgtatcagcaaaatggtgtcaaattcataaagggagctcttatcgaaaaacttggagctggctctgatggaagggtgt

SEQ ID NO: 24707 - DNA, 256 bp, Zea mays
aacagcgtcaaggacgaggaagggtacccggccttcgcgctcgtcaacagggtcaccggcgaggccatcaagcactcccagggcgagggccacccggtcaagctggtgccctacaaccccggctaccaggacgagtcggtgctgtggacggagagccgcgacgtcggccacggcctccgctgcgtccgcatggtcaacaacatctacctcaacttcgacgccttccacggcgacaaggaccacggcggcgtgcgcg

SEQ ID NO: 24708 - DNA, 257 bp, Zea mays
ctcacttccgcgccgccacccccttcaggtaaggaagaggaggagggcaggatgtcgcaccgtaagttcgagcacccgaggcacggctccctcggcttccttcccaggaagcgctcctcccgccaccgcggcaaggtgaagtcattccccagggatgaccccaagaagccttgccatctcactgccttccttggctacaaggctggcatgactcacattgtccgtgaggttgagaagccaggatccaaactccatac

SEQ ID NO: 24709 - DNA, 256 bp, Zea mays
gcacgagttgcatttgaggtcgctcgcaagagaagagggaaactatgctcggttgataaagcaaatgtgctggaggcatccatgctttggaggaaaaaggtgactgcactagcctctgaattccctgacattgagctctcacacatgtatgttgacaatgctgcaatgcagcttgtcaggaatcctaagcagtttgatacaattgtcacaaacaatatttttggtgacatattatctgatgaagcatcaatgatta

SEQ ID NO: 24710 - DNA, 258 bp, Zea mays
gacgccgagaacctcgcctgcgtagggaggctgggcgcccagatcccgctcgccgagctggcgaagaccggcacggaccgagccaagcgcaaggcaacctcgctcctggagcacctcagcaagctgcaggtgctctagtagtcccacccaccactgtccatccacagccacaccactctgtgcgcgcgcgtgcgttttcgacttttccacgccacggtgtatgcgtacaaatgcgagtagtgtagcatcatcatcatc

SEQ ID NO: 24711 - DNA, 257 bp, Zea mays
cgccttgcgtgactgaaagctcgtcggcttccgtccacgcgagaagcgagagcatggacacccaggtgaagcttgctgttgtggtgaaggtgatgggcaggaccggctccaggggtcaggtgacccaggtcagagttaagttcttggatgaccagaaccggctcatcatgaggaatgtcaaggggcccgtccgcgagggtgacatcctcaccctgctcgagtccgagagggaggccaggaggctgcgctgaagccct

SEQ ID NO: 24712 - DNA, 259 bp, Zea mays
atagcaccacacctcttcttcttcttcctcctcctcctagcacagctagcgcctgctccccttcgcctgtgatcatgtcttgcagcagcggcaagtgcgactgtggctccagctgctcctgcggcagctcatgcaactgcatgtcccctaacgtggagaccgccgccgccagcagcatcaagaccacggtcctcgccgcgccgaccaccaaggccagcgccggcggcttcgaggcggccaccgagggcggcggctgcga

SEQ ID NO: 24713 - DNA, 242 bp, Zea mays
gaagcttatatgactttgtgcacaagcagcataacgttctaaacctcacgactctattgaagtttgcagttgatgtatgccgagggatgtgctacttgcatgaaaggggtatcatccatagagacttaaagactgccaaccttctaatggacaacgatcatgctgtgaaagtggctgattttggcgtactcggttccaggatcaaggaggtatcatgacagctgaaactggaacatacagat

SEQ ID NO: 24714 - DNA, 243 bp, Zea mays
cccacgcgtccggtcaatgcttgtgcaaatccttggggcgcgccgttgcattgaagttggtgtgtttactgggtattcatcattagctgttgcactggcccttcctgaatctggtcacttggttgcttgtgagagggatgacagatgcctagaagttgccaagaagtactaccaacgtgctggtgttgcacataagattgatgtgaaacatgctttggctgcggattctctaagatctcttct

SEQ ID NO: 24715 - DNA, 244 bp, Zea mays
agccggtcaccgtctttggcatcaggaaccctgaggaaatcccgtggggtgaggctggcgctgagtatgtcgtggagtccaccggcgtcttcactgacaaggacaaggctgctgcacatctcaagggtggtgccaagaaggttgttatctctgccccaagcaaagatgcacccatgtttgttgttggtgtcaatgaggacaagtacacctcggatgttaacattgtttccaatgctagctgcac

SEQ ID NO: 24716 - DNA, 243 bp, Zea mays
ctgatgaaggagaaggtggtgaaattgtgtttggtggaatggattctagccactacaagggcgatcacacgtttgtcccagtcactcggaagggatactggcagttcaacatgggtgatgtcctggttgatggaaagtccactgggttttgtgccggtggctgtgcagccatcgcagattctggaacttccttgcttgctggccccacagccataattactgaaatcaatgacaagattggtg

SEQ ID NO: 24717 - DNA, 247 bp, Zea mays
caaatccccctgtcccgctaggattcccccgaaaccctcccccaaaaccccagagcggagaagagcgcaagatgttcggcttcgggcaccacggccaccacggccagaacccgccggcgcacggcggcgtgcaccagcccaccttcaagatcttctgcaaggccgacgaggggtactgcctcaccgtccgcgacggcaacgtggtgctggcccccgccaacccgcgcgacgagcatcagcactggta

SEQ ID NO: 24718 - DNA, 228 bp, Zea mays
gtatcattctcagaagaggtgctggggcattggcttcggcctgcggttcagagtggtctcgctcgacctgaccttcaggaagctttccttggagaacatccttatggcataccggagagccaagacacgggcaattctgctggactacgatggcacgctgatgccacaggcgattaacaagagcccgtccactgaatctgtgcggatcctgaacagcttgtgccgaga

SEQ ID NO: 24719 - DNA, 228 bp, Zea mays
aggttgatcgatggcagagaggctgtcttcttcctgcggcgcatcaaggatgttgtcgaggaccccaggaggttgctgcttgacatataaattcatgcaccagcgctgcgctgccctgccggactgttttgtgcaattgtgcttatctggaaataatgccatggaaatttttgactgatgaaaaagaattacttcctcagaaagacgaaatctgagctgaggataccg

SEQ ID NO: 24720 - DNA, 225 bp, Zea mays
cccacgcgtccggctggatgaaatcataaactacgtgcagtccttgcaacggcaagtcgagttcctgtccatgaaactggccaccgtgaatccccagctggacttcaacaacctgcctaacctccttcctaaagatatgcaccagtcctgcggcccgctgcagaactcgcatttcccgctggagacctcaggcgcgccgctgccatacctcaaccaggggaacct

SEQ ID NO: 24721 - DNA, 226 bp, Zea mays
cccacgcgtccgcatttctatggatctgatatcacatgctcataccctataaatgggaaattcaacagaagtcagacaataatatacaatgctgtgcttaaggctcataatgctgttatatcagacatgcggcctggagttaattggatggatatgcacaaattagcagaacgggcaatacttgaatctctcaggaaggaacaaattgtacaaggggatgttgatg

SEQ ID NO: 24722 - DNA, 229 bp, Zea mays
gggaactgagtcaagtggtttcatgtacccaagtgcagtagatcattttaaaaagcagtttgcataccttgaagaacattatgccaagggatctacaggaactccacctgagaggcaacataattcattgccgcggccgtctgttgtctattccgacaaccgatcacaaaccacagccaacatcaccgaggatctttccaagtgtatgctcagagaaaatacacagaag

SEQ ID NO: 24723 - DNA, 227 bp, Zea mays
agcaaggtggtttaatcacattgatgcgctcgtgaggctgagcggaattactgcagagggccaaggtgtgaaggttgaatcgtcagcagttccttcagccccaactccagatgttgctgaagcacaggccccagttgctgaggaggacgacgacgatgatgttgacctttttggtgaggagaccgaagatgagaagaaggctgctgaagagcgtgctgcagctgcca

SEQ ID NO: 24724 - DNA, 233 bp, Zea mays
cctctttcccctcctcgcttcgcttcctcggcggattcctcctccctcgaccgtccccgtccccgtccccttccggcgcgcgagctcgcccgagatggcaaacgcgagatcgggtgtcgctgtgaatgacgagtgcatgctcaagttcggcgagctgcagtcgaagaggctgcaccgcttcctaactttcaagatggacgacaagttcaaggagatcgttgtggaccaggtcg

SEQ ID NO: 24725 - DNA, 225 bp, Zea mays
agcgtcgcctgcatcgccgtgttcgtcgtcgagatgtacgagaacaactgccccaagcacgggagccagctcggcgactgcgtcgcggcttcctccgccgcttctccttccagccgctccgcgagaacccgctgctcggcccgtcctcctccactttggagaaaatgggagctcttgactggaataaaattgtccatcaaaaccaagggtggcgccttattagct

SEQ ID NO: 24726 - DNA, 226 bp, Zea mays
cgcacgcgtccgcggacgcgtgggccgcagttgtcttcggtcttccgtgctcaccttcgagagatcaagtagctgcagcggacgtccccaaccatcatcatgcagaacgaggagggtaagacggtggacctctacgtccccaggaagtgctcggccacgaataggatcatcactgccaaggatcatgcctctgtccagatcaacattggccacttggatgcgaatg

SEQ ID NO: 24727 - DNA, 226 bp, Zea mays
cggacgcgtggcggacgcgtgggcgcagtcactcccgggccgccgccgccgccgcctccgcgaaaaaccactagcaggcttcgccgctatcactccaaggggcgcgaccatggtggccacaaagaagacgaagaaatccacggacaacatcaataacaagctgcagcttgttatgaagagtggcaagtacactctcggctacaagaccgtcctcaggactctcagg

SEQ ID NO: 24728 - DNA, 221 bp, Zea mays
gcagcatcctcccagtctacaaggaggtcattgctgagttgaaggcagctggggcttcatggattcagtttgatgagcccactcttgtcctcgaccttgattctgacaaattggctgcattctctgctgcatacgcagaacttgaatctgtactttctggattgaatgtgcttgttgagacttactttgctgatgttcctgctgagtcctacaagacccta

SEQ ID NO: 24729 - DNA, 226 bp, Zea mays
cccacgcgtccgcccacgcgtccggcagctcctccgcggggcggcgaactactacccatcgccaaaaccctgagccccgatcctgtcgaggagcactacttcttggcatggcgggcacccctagccaggcaagcctcctgctccagaagcagctcaaggatcttgcgaagaaccccgtggatgggttctccgcagggcttgtagacgatagcaacgtcttcgagtg

SEQ ID NO: 24730 - DNA, 221 bp, Zea mays
gtgaggaacatctagttgcagcattttcgtattttgacaaagatagcagtggttacattactgtggatgagcttcaacaagcgtgcaaagagcataacatgccagctgcttttcttgatgatgtgattaaagaagctgaccaggataatgatgggcgcattgattacggggaatttgttgccatgatgacaaagggcaatatgggagttgggaggagaaca

SEQ ID NO: 24731 - DNA, 219 bp, Zea mays
gcgagaagaaggcaatggcggccgagagcttccttttcacctcggagtccgtgaacgaggggcaccccgacaagctgtgcgaccaggtgtcggacgccgtgcttgacgcatgcctcgcgcaggaccccgacagcaaggtggcctgcgagacctgcaccaagaccaacatggtgatggtgttcggcgagatcacgaccaaggcgaccgtggactacgaga

SEQ ID NO: 24732 - DNA, 217 bp, Zea mays
ctcgcggtattcgcggcgttttctcccactgctcgaaccgcgccgacgagcgacgacaagagctgctctattcttcaaaacaaatggcgaccgttccagttaacccaaaaccttttctgaacaacctgacaggaaagcctgttattgtcaaactcaagtggggtatggagtacaagggttatcttgcttctgtggactcatatatgaatctccagct

SEQ ID NO: 24733 - DNA, 218 bp, Zea mays
cagaggccagccacctccccgtcgctctcacgctcttcgtgcccgccgcctctcctccgtctctgcctctctccctctcccctcccgtctgacgcacatggcctccatcgccggatcttcggccctctccttcgccaggcccgtcaaggcaatcaacacaaattctctagccttctccccggcgaggaagggcaacacattcctccgcctgcaaccaa

SEQ ID NO: 24734 - DNA, 219 bp, Zea mays
cgccgccgccacctgctgcagcttctcaaccggataggtagcaccggagcaggtagaacgctgcacaatccccttcgccgccgccaagatggtgaacgttcctaagaccaagaagacgtactgcaagaacaaagagtgcaagaagcacacactccacaaggtgactcagtataagaagggcaaggatagcctgtctgcccagggaaagcgccgttatga

SEQ ID NO: 24735 - DNA, 221 bp, Zea mays
cccacgcgtccgtgcttgatcacctggaaagtgtactagcaaatgaaccagtctctgtcaagagtggccagttcattgttgaagtcaaaccacagggaataagcaagggaatagttgccgagaggatacttgcatcagtgaaggagagaggaaagcaggctgatttcttattgtgcatcggcgatgataggtctgatgaggacatgtttgaaaatattgct

SEQ ID NO: 24736 - DNA, 222 bp, Zea mays
agcatgcgaagaaaggggtcgacatcttgtctggaactagtgtcaagacgcacttcgcgcgtcccaattggcgaacgtcttcaaacatgttgcagtgaaccatgagaaccaacgcgttggagttttctactgcggtgagcctgtgcttgtgccacagctacggcagtggtcagcagacttcacccacaagacgaacacaaagtttgagttccacaaggagaa

SEQ ID NO: 24737 - DNA, 262 bp, Zea mays
tgctctggcaacctctgcatcaaggaagttcatgactacctgaaaagcctttgccctgatctccacattactggaggtgaatatgatgagtatgctcgatacccagagactaagacacttacaattggtcagtttaagcttgggctgtgccatggtcatcaggttgttccatggggcgacctggactccctggcgatgctccagcggcagctggacgtggacatcctggtgaccgggcacagccatcagttcaaggcatata

SEQ ID NO: 24738 - DNA, 256 bp, Zea mays
gttggcatgacagcaatcaagtacatccctcaggccatcatgaacttcaggcggaagagcacaattggttggagcgttggcaatatattacttgatctcacaggaggggtgctgaatttttgtcagatgggtgtgcagtctatagatcaacatactttggtgaatttctatggaaacattgggaaaacccttctttcattggagacggttttctttgatgtcctgttcattatccaacactacgtgttgtaccctg

SEQ ID NO: 24739 - DNA, 255 bp, Zea mays
ctccttcccggtctcctccgcccgttgccttcgtcccctccatctccggctgcgtcgccggcgagcccgacaccgcgaatcggatccgccgacaaggcgagagggaaaagatggggcttacgttcaccaagctgttcagccggctgttcgccaagaaggagatgcggatcctgatggtgggactcgacgccgccggaaagaccaccatcctctacaagctgaagctaggcgagatcgtcaccaccatccccacca

SEQ ID NO: 24740 - DNA, 253 bp, Zea mays
gagagcatcaatgagaaggaccgctgtccagggtgcaagggtgagaaggtcattcaagagaagaaggttcttgaggttcatgttgagaaggggatgcaacacaaccagaagatcaccttccctggtgaagctgatgaagcgcctgatactgtcactggagacattgtattcgtcctccagcagaaggatcactccaaattcaaaagaaagggtgaagatctcttctatgagcacaccttgtctctgaccgaag

SEQ ID NO: 24741 - DNA, 251 bp, Zea mays
ggtcatctcatccctgacggcttccctgaggttcgatggtgctctgaacgttgatgtgaacgagttccagaccaacctggtgccctacccgaggatccacttcatgctttcgtcctacgctccagtcatttctgctgagaaggcctaccacgagcagctgtccgtggccgaaatcaccaacagcgccttcgagccatcctccatgatggccaagtgcgacccccgccatggcaagtacatggcatgctgcc

SEQ ID NO: 24742 - DNA, 250 bp, Zea mays
atgcgacatccactgctagagcatatcacatttgttgacacacctggtgttctttctggtgaaaagcaacgcacacagcgcagtatgatttcactggtgtgacatcatggtttgctgcgaagtgtgatcttatccttctcctgtttgatcctcataagctcgatatcagtgatgagttcaaacgtgtcattggatcattacgtggccatgatgacaaaatacgcgtagttttgaacaaggcagaccaagt

SEQ ID NO: 24743 - DNA, 245 bp, Zea mays
gtgtccgcgtccagtgtgtccgctactccgctccccctcagtcctcagttcctcacctagcggtagcgtgcgcgcgggagacgtagatggcggcttcggaggcggcagcggcggcggcaacaccggtgacgccgacagaggggacggtgatcgcgatccacagcctggaggagtggagcatccagatcgaggaggccaacagcgccaagaagctggtggtgattgacttcactgcaacatggtgt

SEQ ID NO: 24744 - DNA, 246 bp, Zea mays
cccacgcgtccgccttcatgctctgcctcctcggcggcttcgtcgccgactccttcctcggccgctacctcaccatcgccatcttcatcgccgtccaggcctcgggcgtgacgatcctgacgatctcgacggcggcgccggggctaaggtcggcgtcctgctccgcgaccggcggaggcgtcgtcggggagtgcgcgcgggcgtcgggggcgcactgggggtgctgtacctggcgctgtacctgac

SEQ ID NO: 24745 - DNA, 248 bp, Zea mays
cccacgcgtccgcccacgcgtccgggcagcttcaacctcaacccggggcccttcaacgtcaaggagcacgtcatcatcaccatcttcgccaactgcggcgtctcctacggcggcggcgacgcttactccatcggcgccatcaccgtcatgaaggcctactacaagcagacgctcagcttcgcatgcgccctcctcatcgtcctcaccacacagatactggggtacggctgggctgggttgctgaggag

SEQ ID NO: 24746 - DNA, 229 bp, Zea mays
cttcaagaagttccatgagcagagaagcgaagggaacatcatacaactcaccatccatgctttctgtccggtgctcggaccgagaaagcgctcggccgcaaaagttggaccgtggggtgggagcggcgggtctccggtggacatcacggcagagccccagcgtctgaagagcatcaccgttgctactggcatcgccgtgacctcgattgcctactcctacgtcgactcc

SEQ ID NO: 24747 - DNA, 246 bp, Zea mays
attgacacagaggaggactacccctatcgtgcagcagatgggacatgtaacaagaacaagctgaaaaagcgagttgtgactattgatggttacactgatgtaccttccaacaaagaagatttgttacttcaggctgttgcacagcaacctgttagtgtaggaatatgtggtagcgctagagcatttcagttatactaccagagtatctgtgatggtccatgtccgacatctcttgatcatgctgtg

SEQ ID NO: 24748 - DNA, 246 bp, Zea mays
caccgtcactcaacacagcacaggcagctcgagagagagagagagagaaagatgtcgtggttcgggcaccaccaccacaaccagccggctcccccggcgtcgggccccaaccaggtgttcaagatcttctgccgcgccaacgagaactactgcctggccgtccgcgacggcgccgtcgtgctggccccggtcaaccccaaggacgaccaccagcactggtacaaggacatgcgcttcagcacccgg

SEQ ID NO: 24749 - DNA, 239 bp, Zea mays
gcggcctcaaggtgctgttcccgggcctgctggccaacgtggccagcggcggcgagaagctccacgagcggctggtggccgagatccgcggcgccgtggccgacgccggcggcaaggtcaccctcgcggcggtggagaggatggacctggccaagtcggtggtgtgggagtcgctgcgcctggacccgcccgtcaagttccagtacgggcacgccaagaaggacctgctggtggagagc

SEQ ID NO: 24750 - DNA, 240 bp, Zea mays
cggacgcgtgggctggacgcgtgggttcttgacttccaatttgaagctaagaagaatgttagaggcctttatgagacgatggatgagcttaggatggcagtcttcatgaagactgtcatccaaagatcatccatcgtgacataaagggatctaacattcttcttgacttccaatttgaagctaaggttgctgattttggacttgcaaagttcactactgagaacaacacccatgtttcga

SEQ ID NO: 24751 - DNA, 240 bp, Zea mays
tgttaagttatatgcatatcagatgtgccgtgcccttgcttacatccatcgtgttgtcggtgtgtgtcaccgtgatattaaacctcaaaatctactggtcaatcctcatacacatcaacttaagatttgcgattttgggagcgctaaaaaattggtacacttctctcttttagtttgttcctgctgaatatcttcatggatttaataaagtaaaatatccatttcaggtccctggtgagc

SEQ ID NO: 24752 - DNA, 241 bp, Zea mays
ggattatagctgctttagttttagatcctccaaattatgtttcttcttttgtatcacatggataataaatttagcattggctactgttatcctaacgttgattcttgtttggcagatatctggctgagttgcttgcagagaggcagaaattggccccatttgtgcaagttcttcctttctgtaccaggctcttgaaccaagagattttgcgcgcatcttctatggcgcctaaccataactt

SEQ ID NO: 24753 - DNA, 242 bp, Zea mays
cccacgcgtccgctgaaggagagcagcccggaggagggggagcaagcagcagccgtccgtggaagaagatgtcgtacctgctgccgcatctgcactcggggtgggcggtggaccaggccatcctcgccgaggaggagcgcctcgtcatcatccgcttcggccatgactgggacgagacctgcatgcagatggatgaagtgctggcagcagtagctgagaccataaagaactttgcggtcatc

SEQ ID NO: 24754 - DNA, 228 bp, Zea mays
gcaccgcgccactggcggcgcccccaagttcatccgcaagcttgtggaagggatcgaggacaccgtgggtgtcggcaagggcgccaccaagatatatgccaccgtcgatctcgagaaggcccgtgtcgggcggacccggatgatctccaacgagcccgtgaaccctcgttggtacgagtccttccacatctactgcgcgcacatggccgccgacgtcatcttcaccgt

SEQ ID NO: 24755 - DNA, 219 bp, Zea mays
gtgccgaattgacatgaagaatctgattggcgaacatcttgtagaatctgtcaggaaaacttcagcacaactgttaatgcactcactgagcctattgatatatatagtgaatggattgatgagtgtgagcgtgtcaacactgttgaaggcgacgatgatgcgtgagcgtgccccatgtgatgaaactgttacctacaatcgtaatgtaatgtgctggta

SEQ ID NO: 24756 - DNA, 221 bp, Zea mays
cctacaccgaggaccatgtacataggagcattaagtataaagtttgggccagcacagccagcgggaacaggaagctggattctgcttaccatgcagccaaagagaaagaagagcattgccctattttcttgtttttctcagttaatggaagtggccaattctgtggcgtggctgagatgattggacctgtcgatttcgacagaagtgttgattactggcag

SEQ ID NO: 24757 - DNA, 218 bp, Zea mays
ctccggaaaggttctaaatcttttgaagaagcccgagcagcaggattcaccgaagagagtgggacgctgggtgatatatgggagactgtatcaaacagtgatcttgttttgctactgatatctgattctgctcaggctgataactacgagaaaattttctcgcacatgaaaccaaacagtattcttggtttgtcacatggatttctccttggacattt

SEQ ID NO: 24758 - DNA, 213 bp, Zea mays
cggacggtgggcgacaaaatgcttgagaagattggaacacctgaggcacttgccttgagagggaaggctgagcgtcgcacaggccaaactagcaaatcggctctaccagaagaaattctctggcccgaggtgggaggcgttggccaagaaaggtgccaagaaacagaggttgttgtgggcgtccaccggtgtcaagaacccagcttatcccga

SEQ ID NO: 24759 - DNA, 208 bp, Zea mays
ccgtaaagcaaaacctttccatgaccatgtatttgtcttctccattgtggatggccatgtttggtttcgaaactaccagatttctgttccccacaatgagattgataaagttgataaaggtggtatggataaaatgacacttattgaggttggcaggttctgtttgaatccaatcaaaatatttggtggtagttttggtggtcctaca

SEQ ID NO: 24760 - DNA, 203 bp, Zea mays
gcagcgtccgggacggtggggactccgccgccgcccgccgctccgcctcagcgcatagcccgccgcgacctcatcgatgaccttcaacattcaatcatggcggacgtcgatgtcgaaccggaggttgccgccggagctcccaagaagaggacgttccgcaagtacagctaccgcggcgtcgacctagatgcgcttctcgacat

SEQ ID NO: 24761 - DNA, 209 bp, Zea mays
ggcatgcgttacttccataagctccgcaacaagttctactgccccgcggtcaacatcgagcgcctctggtcgatggtgcccaccgacaaggcggcggaggccggcggcgacaaggccccgcagatcgacgtcacgcagttcggctacttcaaggtgctcgggaagggggtgctgccgccaaagcccattgtcgtcaaggccaagctcat

SEQ ID NO: 24762 - DNA, 139 bp, Zea mays
tgttagtgctgtgttcatcctcggctccagcagacccatgcatcaaccagcatggactgtggatcgatggatgctgttactcctgtcaggatttgttctaagttaatcctaaggaaaaaatggtgcttcttggtgctgc

SEQ ID NO: 24763 - DNA, 211 bp, Zea mays
gctatttgcaagctgaaatcgacgttggcggcgaaatcgcagtagcaaagactgctgggccagtagaccctgatgctgggttggttgattatgtggagacgctcgtaaggaaacctgaaactgaattcaatgttgttgtgcttcaatccaatggcgtcgatcagccaaaagagtcggttcatgtactaaatgtcgggaggctgcggatgat

SEQ ID NO: 24764 - DNA, 208 bp, Zea mays
gctgagcctgcccgagctccgggacggcctgatcaccgccaagagctccgtgtacacgcccaagtcgaccaccggcgcggaggcgtgggtgtggcacctggccaaggcctacgccaacgtgaacgactactgctggcaccagctcatcagccactggctcaacacccacgccgtgatggagccgttcgtgatcgccaccaaccggcag

SEQ ID NO: 24765 - DNA, 205 bp, Zea mays
tttgtttcctgctctggccaaattccagacaagaagaacgagaacaaggaggtggccgtcaacgacttcctgcccgccgccgctgcccgcgaagcatccagtactccatgtaaagtcgccctgctcatttatctcgtggatgacttgaaaaaaaacgaggtttggattctgggactctgcattcgtacgtgttgacatggatctt

SEQ ID NO: 24766 - DNA, 202 bp, Zea mays
gtagttgcaggcagacgcgccatgcggatgcgggtgcttcccgcgtcctggtcatcttcctccgccaagcatagcagcggcagctccgagtcgcaggagcacccttcttcctcctctgctacggccgcggtgtacctcaacatctacgacatctcccccctcaaccactacctctactggttcggactcggcatcttccact

SEQ ID NO: 24767 - DNA, 205 bp, Zea mays
gatgacgacgcgcagactggatcaaggacatgaagtacagcaccagggtgaaggatgaggaaggctaccctgccatcgtcctcgtcaacaaagccactggagaggctctcaagcattcccttggccagtcacaccctgttcttctgacccgccataatccagactccctggacgagtctgtcctgtggacagagagcagggacgt

SEQ ID NO: 24768 - DNA, 164 bp, Zea mays
caagaaaccaagaacccagccccccaccatgacgagctcctcctctccttccagaaaggcgctgagcaagatcgcttgcaatcggctgcagaaagagctcgccgagtggcagcaaaacccccccgccgggttcaagcacaaggtctccgataacctccaaaggg

SEQ ID NO: 24769 - DNA, 193 bp, Zea mays
gacgagaagttcgtgcgcaagacaccgcccccggtgtgtctccatggccaacgccgggcccaacaccaacggctcccagttcttcatctgcaccgtcgcgaccccttggctcgacggcaagcacgtcgtcttcggccaggtcgtcgagggcatggacgtcgtcaaggccatcgagaaggtgggcacccgcaac

SEQ ID NO: 24770 - DNA, 188 bp, Zea mays
gcttgatgttgaccgcataatgcgaggggtagactcacgaactacactgatgataaagaatatcccaaataagtatacctccaagatgctcttggctgctattgatgaaagtcataagggcacttatgactttatttacttgccaattgattttaagaataaatgtaatgttggctatgctttcatca

SEQ ID NO: 24771 - DNA, 182 bp, Zea mays
cgtctgtagctaaatatgtgaggacaggcctgactcctcgttgggctgatcttgatataaatcagcatgtcaataatgttaaatacattgcgtggattcttgagagtgcacccatctctattcttgagaatcatgagctggcgagcattgtgctggattacaaaagggagtgtggccgggat

SEQ ID NO: 24772 - DNA, 196 bp, Zea mays
cccacgcgtccgcccacgcgtccgcgatcgacctgctccctccccaccaccgagcccatggcggaccagctcaccgacgaccagatcgccgagttcaaggaggccttcagcctcttcgacaaggacggggatggttgcatcacgaccaaggagctgggcactgtcatgcgctcgctggggcaaaatcctacagagg

SEQ ID NO: 24773 - DNA, 190 bp, Zea mays
cccacgcgtccgtatcacacacgtaatcccatcccattccgcccgcaacagcagcaccaccggtgggaagaagaagatgaagaaggccacttcgctctccgagctgggcttcgacgccggcgacgcgtcgtcgggcttcttccgccctgtgtccggcgactcgtcgacgccgacgtcgcagcaccaccgg

SEQ ID NO: 24774 - DNA, 189 bp, Zea mays
cagacaaggagggcatcccaccggaccagcagcgtttgatcttcgctggcaagcagctggaggatggccgcacccttgcggattacaacatccagaaggagagcaccctccacctggtgctccgtctcaggggtggtatgcagatctttgtgaagacactcactggcaagacaatcacccttgaggtgg

SEQ ID NO: 24775 - DNA, 187 bp, Zea mays
tgcatctaaccgatgggctgaagctgcccagtttgcgcttgctagaagcctcacatcatcacatagtgacctccttgcattagaagctgccgagggaaataatattctgaggagaacaaaggatgctgtaatcactctgcaaagcgtactggaagggaagcacaatactgaaatcgatgaatctcta

SEQ ID NO: 24776 - DNA, 188 bp, Zea mays
acaccatggagatcaacgcgctggccagggaggcgctcatcaacgccgacggcatcatcgaggagtccttctggccgggcaggtacgccgtcgagctcagctcagcggcgtacggcgccacgtggcagttcgacacggaggcgctgcccaacgacctcgtcaagcgtgggctcgccgtgcgccgggac

SEQ ID NO: 24777 - DNA, 191 bp, Zea mays
agaagctgaaaagagatcgatggcccagcagaaggtggtgctccggatctctaccatgaccgacgacaggacgaagcagaaggccatggaggccgttgcagacatctacggcatcgactcgatcgcggcggacgtgaaggagaacaagatgacggtgatcggcgacatggacacggtggccgtcgccaaga

SEQ ID NO: 24778 - DNA, 192 bp, Zea mays
agaagatgcagaatacaaagttatagtattctgtactactgcaatggttacaagacttgttgctgaggtactctcccagctaaaactgaatataagagagattcattccagaaagacacaatctgcaagaactaaggtctcagatgaattcaggaagtcaaagggtctcatattagtcagctccgacgtatc

SEQ ID NO: 24779 - DNA, 184 bp, Zea mays
gaagatggcacttctggtttagatgtcaaagttgatcacaagggtgaccacgattttcgtgtggatgtttctggtctgcaaactgatgtgactctagcatcttattcaaagggaaacagcaaacacatacatgtctggcatgggaatcatcaccaccattacagacagactgtaagagctgagc

SEQ ID NO: 24780 - DNA, 184 bp, Zea mays
cccacgcgtccgtatcacacacgtaatcccatcccattccgcccgcaacagcagcaccaccggtgggaagaagaagatgaagaaggccacttcgctctccgagctgggcttcgacgccggcgacgcgtcgtcgggcttcttcagccctgtgtccggcgactcgtcgacgccgacgtcgcagcac

SEQ ID NO: 24781 - DNA, 186 bp, Zea mays; identical to SEQ ID NO: 6622

SEQ ID NO: 24782 - DNA, 183 bp, Zea mays
cccacaccccccgagctcagcttagctccactccagctccaatcacagtcgtgaccagagcgcgagagctagctagagggccgtgaaaatgccgatcaataggatcgccctggggagccaccaggaggtgtaccacccgggcgccctcaaggcggcgttcgctgagttcatctccaccctcat

SEQ ID NO: 24783 - DNA, 185 bp, Zea mays
gccaagccaaccagccagtcagaagaggaaccggggagcggcagtgcagcggccgagggcggacacgcgaggcatggatagataccaaagggtagagaagcctcggaatgacacgccaatcagccagaatgagatcagaatcactactcaggggaggatgaggaactatatcagctatgggatgt

SEQ ID NO: 24784 - DNA, 144 bp, Zea mays
cccacgcgtccgtgctgcttaaaaaattttggggagaggaaggagaaaaggttgatgtccaaaaactgtttggttatcttgggctttttacccttgttgctctatggtggattgtctggccattaaccgcactaggcgttgagc

SEQ ID NO: 24785 - DNA, 213 bp, Zea mays
ggaccgtgggcggacgcgtgggttcagacaccatcgacaacgtcaaggccaagatccaggacaaggacggcatcccacccgaccagcagcgtttgatcttcgctggcaagcagctggaggatggccgcacccttgcggattacaacatccagaaggagagcaccctccacctggtgctccgtctcaggggtggcatgcagatctttgtgaaga

SEQ ID NO: 24786 - DNA, 212 bp, Zea mays
ccgagtcggaagcgggtcacttgaaagccgcggaagagggtctgcacgaggaaggtgagagtagccaagctcaggactccgacgccgagctccagcagcccagccccagccccgaagtcgaccctctggccagggccgtgctcgtgacccccaccactccttcagcattcaccagtgatgaggatatcctcgagctcgctcgcagccgcgac

SEQ ID NO: 24787 - DNA, 206 bp, Zea mays
gctcactggtatgtccttccgtgttcctactgtggatgtctcggttgttgacctcaccgtcagaatcgagaagggggcctcctatgaggatatcaagaaagctattaaggctgcttccgagggtccactcaagggtatcatgggttatgcggaggaggatctggtttctaccgacttccttggtgacagcaggtcgagcatcttcg

SEQ ID NO: 24788 - DNA, 208 bp, Zea mays
gaaaagaagtatccttgaacctgctggtgcccttgcattggctggggctgaagcctactgcaaatactataacttgaaagcgagaaactgtggttgcaataactagtggggcaaatatgaactttgatcgacttagactagtaaccgagctagctgatgttggccgaaaacgggaagcagtgttagctacatttctgccagagcagca

SEQ ID NO: 24789 - DNA, 207 bp, Zea mays
gaactcacctgatcgcgcctgcagtcttgcaaagcaggcttttgacgaggccatctcggaactggacaccctgagcgaggagtcctacaaggacagcactttgatcatgcagctccttcgtgataacttgaccctatggacctctgacatctcggaggaccctgctgaagagattagggaggcgcccaagcgggactcgagtgaggg

SEQ ID NO: 24790 - DNA, 116 bp, Zea mays
ctccgccgcaagctcaacgacaagctctacgcgctccgcagcgtcgtgccgaacatcaccaagatggacaaggcgtcgatcatcaaggacgccatcgagtacatccagcagctgca

SEQ ID NO: 24791 - DNA, 210 bp, Zea mays
cgctccgcctccactcctcgcgccgctgccgcatctcctctacaggtaagaaggagagaaagagggcgaaatggtgaagcacaacaacgtcatccccaacgggcacttcaagaagcactggcagaactatgtcaagacatggttcaaccagcccgcccgcaagcagaggcgccgcatcgcacgtcaaaagaaggctgtgaagatattccc

SEQ ID NO: 24792 - DNA, 210 bp, Zea mays
ctcgaacaacattttagtgattgtggtgagatgacaagggtctctatcccgactgatcatgaatctggtgcaataaaaggaatggcttacatagacttcaaggatcaggactctgtgtctaaagcccttgagctcagtggctctgacattggtggtggctatgagctttatgttgatgaagccaaaccaagaggcgatggccagcgtggt

SEQ ID NO: 24793 - DNA, 218 bp, Zea mays
cccacgcgtccgcccacgcgtccgcgtccagatagtaaagaagaaggaaaaggaggagggtgggcgaggccggttcaagtcgcacacgaacgcacctgaccggatatctgatagggtgaagaaagccccactgaagacataataataactggttccctgagcgcgtcgtgatcagcttctccaaaccagatggacaacacaagctcggtgggagatca

SEQ ID NO: 24794 - DNA, 202 bp, Zea mays
catatttggccctgatgcaagatccctgtttatcaccatgttccttattgtcgcgccggtatcaattttctgcgcgttcgttgccaaggaattgatggataagttctcttatggtctgggattgccggttatgattgcagcagttctattcacagcatatgatctgagtcttctgcttctaacttctgggagagatccaggg

SEQ ID NO: 24795 - DNA, 209 bp, Zea mays
gtttatcgacgcggcccacttctctgtccccgcggggcagtacgcggtggagctggtggccgggcgggagagcgccatcgcgcaggtcatccgcaccgtgcccaaccgcgcctacaacctgtcgttcgccgtcggcgacgcccggaacggctgccacggctctatgctggtggaggcgttcgcgggcaacgtcacgcagaaggtgccgt

SEQ ID NO: 24796 - DNA, 213 bp, Zea mays
ctaggcccttgcttccaaaaatgcactatgtgcgcccaatacctgtgcttcaggttgatatgctacgccatcaagctgtccagattgtggctgcccgacttagccggatggagccacctttgagaaaggaagttgttgaatacatgacagattttgattctcacttgtggagcatgaggaaaagcaaagccaacttcttcagactcatgacag

SEQ ID NO: 24797 - DNA, 203 bp, Zea mays
gccgtggcgctgcctgcggccaaggtgggcatcatgggccgtagcgccagccgcaggcgcaggctgcgcgcgcaggccacctacaacgtgaagctgatcacgccggagggggaggtggagctgcaggtgcccgacgacgtgtacatcctggaccaggccgaggaggacggcatcgacctggcctactcctgccgcgcggggtc

SEQ ID NO: 24798 - DNA, 202 bp, Zea mays
ctcacttccgcgccgccacccctacaggtaaggaagaggaggagggcaggatgtcgcaccgtaagttcgagcacccgaggcacggctccctcggcttccttcccaggaagcgctcctcccgtcaccgcggcaaggtgaagtcattccctagggatgaccccaagaagccttgccatctcactgccttccttggctacaaggc

SEQ ID NO: 24799 - DNA, 197 bp, Zea mays
ggctaagattgttgtgtgaatcttacttgtgcaagcatgtttctgtaaactccgtggcaactactctagcattggctgatcgataccatgctatcgagcttaaatctgtttgcctaaaatttgctgctgaaaacctttcggctgtgatccggaccgaggggttcgactatctcaaagacaactgcccatccctgcag

SEQ ID NO: 24800 - DNA, 198 bp, Zea mays
attcatcacagttgcactgacatacttccagcttgctgctgaagaccatgagtggtggtggaggtcattcctatgcggaggatcaactggatttttcgtatacggctactgcctgtactactactatgcgcgatcggatatgtctggcttcatgcagacatctttcttctttggctacatggcctgcatctgctatgc

SEQ ID NO: 24801 - DNA, 208 bp, Zea mays
  unsure (1)..(208): unsure at all n locations
cggtacgcgtgggcggacgcgtgnggagggcattgatcggatcactactcctcctcacgccaactactcttactagattgaggctggtgttggtgctggaattgacatgatcatggttccattcaggtacacagaattcatcgacgacctgacgacacaagttcagaacaaggtcatccccatgagcagaatcgacgacgccgtctac

SEQ ID NO: 24802 - DNA, 167 bp, Zea mays
cccacgcgtccgtgaagctgctccaggagctgagaatgaaaaagctggtattgtaaatcaacaaaaattagaaaagaaatttggtcagtcttctgtctttgcaacatccacacttctcgaaaatggtggaaccttgaagagtgcaagtcctgcttctcttctgaaag

SEQ ID NO: 24803 - DNA, 165 bp, Zea mays
tccgcaagtacagctaccgcggcgtcgacctagatgcgcttctcgacatgtccacggacgacctcgtccagctcttccccgcgcgcgccaggagaaggttccagaggggtctgaagaggaagcccatggcgctcatcaagaagctgcgcaaggcgaaaaaagatg

SEQ ID NO: 24804 - DNA, 166 bp, Zea mays
cggacgctgggcgagtcctttactcatcagttgtataccctcacaattatggtttcattccaaggacactttgtgaagacaatgacccaatggatgtgttggtcctgatgcaggagcctgttgttcctggttcgttcctgagagctagagcaattggccttatgcc

SEQ ID NO: 24805 - DNA, 168 bp, Zea mays
ctgcactacagagagtgagaggttacttgtttatccatacatgccaaatggaagcgttgcttctcaattgcgggaacatatcaatgccaagccggctctagactggtcaaggagaaagagggtagcgctaggcacagcgaggggtctgctctaccttcacgagcaatg

SEQ ID NO: 24806 - DNA, 169 bp, Zea mays
cccatatccgctcccctacctctccagcatcctcccgtctccgtcgtctcgtctccgctcctcacctcgccagccatgggcaagatcaagatcggaatcaacggtttcggaaggatcggcaggctcgtggccagggtcgccctgcagagcgaggatgtcgagctcgtcg

SEQ ID NO: 24807 - DNA, 147 bp, Zea mays
cggataggtagcaccggagcaggtagaacgctgcacaatccccttcgccgccgccaagatggtgaacgttcctaagaccaagaagacgtactgcaagaacaaagagtgcaagaagcacacactccacaaggtgactcagtataagaa

SEQ ID NO: 24808 - DNA, 139 bp, Zea mays
caagacgcgtgcagtctttttgagcctatctacgatgagaccgatggggctgatgggtatgtctccgtggaggtgtctcctaggttggcaaatgacactcaaggaactgttgaggccgcaaagtggttacacaaagtgg

SEQ ID NO: 24809 - DNA, 159 bp, Zea mays
agtttattgagatatgcatcatgctttgtgcggaccatggtccctgtgtatctggtgctcataactctatagttactgctagggctggaaaggaccttgtttccagcttggtgtctggattattgacaattggcccccgttttggcggacaattgatga

SEQ ID NO: 24810 - DNA, 163 bp, Zea mays
atgatctgtttccagcgaaaacaaaggtcaagtgtttttctgatgctggatattttttcgatgggaaggatatctccgggaacttttacgctaggtcaatctataagagcgttgtgaatctacatggatcagccaaaaatttaccagcttcatgtacctcaaa

SEQ ID NO: 24811 - DNA, 147 bp, Zea mays
gcttcctgataatcgaccagttccccagtcttgctccttgcactcctccctcctccatctccagcattgtgttctgattcacctgctccaatggctgttctttctgctgctgatgcttccccggtctcagctatcgggtttgagggc

SEQ ID NO: 24812 - DNA, 157 bp, Zea mays
cccacgcgtccggcgagatcgtgcgcacctccgagatctccacgaagttgtggtaacatggggctcaccttcacgaagctcttcagccggctcttctccaagaaagagatgaggatccttatggttggtctcgatgcagctggtaagaccaccatcc

SEQ ID NO: 24813 - DNA, 158 bp, Zea mays
cccacgcgtccgcccacgcgtccgcccacgcgtccgcccacgcgtccgcccacgcgtccgaggggattgaagaagcacttgaagaggctcaatgcgcccaagcattggatgctcgacaagcttggcggagcttttgtaagtaaaaaatattttctagc

SEQ ID NO: 24814 - DNA, 160 bp, Zea mays
cccacgcgtccgcccacgcgtccgcagaaaggaggtgaaaccagtacgaacagtattgcctcaatctttgcgtggacaagaggacttgcacacagggcaaagcttgatgacaatgctagactacttgacttcacccagaagcttgaggctgcctgcgttg

SEQ ID NO: 24815 - DNA, 216 bp, Zea mays
cttcatggagtcctccttgaagtggttccaggtcaagtatgaaggtgtcatcctcaacaaggctcaggccagcacgatttaaacctcacctgtgggggcaaaacagctctcgcttcatctccatgtgaacgcaagatcaccttccaaggtttttgtttgagttgtatcctctggcccgacttttagtctactagcagagctataatcactatatga

SEQ ID NO: 24816 - DNA, 213 bp, Zea mays
caacttcctgctcgctcatgcacaccgctgtggatcttgtgaacgagactaagcttgacagcgagattaagtcttggcttgcttttgctgcccagaaggttgttgaggttgatgctcttgctaaggcattggctggtcaaaaggatgaggcttacttcgcagcaaatgctgctgctcaggcctcgaggaaatcctcaccccgtgtgaccaatg

SEQ ID NO: 24817 - DNA, 213 bp, Zea mays
cgacgctgggcggatcgcgtggggaacaacaacaagcagaggagcaacgaggagtggactgtcgtactctcccctgagcagttccgcatcctccgcctcaagggcaccgagttacccgggacaggagagtacaacaaattctacggcgacggggtttataactgcgctggctgcgggactcccctgtacaagtccgccacaaaatttgattct

SEQ ID NO: 24818 - DNA, 215 bp, Zea mays
ggacgcgggcggacgcgtggtgcagggcaatgttgaggccactgatcgaggacttcagctgttgagccagctgatgagaggaggccattccgtgctctcttggatgttggccttatcaggactacaacagggaaccgtgtctttggtgccctcaagggagctttggatgggggcctggatattcctcacagcgagaagaggtttgctggattcaa

SEQ ID NO: 24819 - DNA, 212 bp, Zea mays
ggacgctggtgccgcctcaccgcctctctcaatctgataccgcagatagcgtcgtccggtgagtggaagccgcacgaacccatggcctccggcgagcttgcctgcacctacgccgctctcatcctcagcgacgatggcatcgccatcaccgccgagaagatcgccacgatcgtgaaggcggccaacatcaaggtcgagtcctactggccggc

SEQ ID NO: 24820 - DNA, 214 bp, Zea mays
attctttgtctgatggagataatctttagtcggccatctgaagatagaactattccattaagtgttattgctgagcagactaagctttcaatcagtgatgtggagtatctccttatgaagagcctctcggttcatcttattgagggaataattgatgaagtggacagtacagttcatgtttcgtgggtccagcccagagtgcttggaatcccac

SEQ ID NO: 24821 - DNA, 218 bp, Zea mays
aggctgcactgagagaagggctgccgctccgcaaggctgagcatgcattctacttggactgggctgtccactccttcagaatcaccaactgcgagatccaggacaccacccagatccacacccacatgtgctactccaacttcaacgacatcatccactcgatcatcgacatggacgcggacgtgatcaccatcgagaactcgcggtccgacgagaag

SEQ ID NO: 24822 - DNA, 209 bp, Zea mays
gcagtgtgcgtgaacttctggaatgtccagtctgtttgagtgccatgtatcctcctattcatcagtgctctaatggtcatacattgtgttccggatgcaaaccaagggttcataaccgttgtccaacttgtaggcatgaactgggtaacataaggtgtcttgctcttgagaaggtggctgcatctcttgaacttccatgcaagtaccag

SEQ ID NO: 24823 - DNA, 204 bp, Zea mays
gaagatcaaggactggagcaacgtattgttgcctatgaaccagtttgggctattggaactggtaaagttgccaccccagctcaggctcaggaagtgcacgcctccctgagggattggctaaagaccaatgccagccctgaggttgctgaatctactaggatcatctacggaggctctgtaactgctgcgaactgcaaagagcta

SEQ ID NO: 24824 - DNA, 204 bp, Zea mays
gtgggtccacgcttgaagtgaggggcataacggttgaaactggcgagtgggctgttgttgggggcaccggccagtttgctatggcgaacggcatcatctccaagaagttacacgagcagagaagcgacgggaacgtcatagagcttagtgtccatgctttctgcccgctgctcaaagggaaaaggggcggtgctgtgacaaagg

SEQ ID NO: 24825 - DNA, 204 bp, Zea mays
catcactcgtggagaaatctaggcagaaaccgcagaaaggatgtctgttttatctgatgtgctgcaaagaagcaactatgatgcagagcccatgttgaaggcatgcgggattacaattgctagaaatttcacagaagttgatggtagggtattgcagccacctaagcttaaagccgggaatggtgaagacatttttacacgcaa

SEQ ID NO: 24826 - DNA, 204 bp, Zea mays
gctcgaagtctggtgcttcaatgaggtgccctgggtgccagggctcaggtatgaaagtcaccattcggcagctggggccttccatgatacagcagatgcagcagccttgcaacgagtgcaaggggactggggagagcatcaacgagaaggaccgctgcccagggtgcaagggtgagaaggtcgttcaggagaagaaggttcttg

SEQ ID NO: 24827 - DNA, 210 bp, Zea mays
  unsure (1)..(210): unsure at all n locations
ggacgctggcggnacgcgtggggcgaacaacaacaagcagaggagcgaggaagcgtggcgcgtcgtactctcccctgagcagttccgcatcctccgcctcaagggcaccgagttacccgggacaggagagtacaacaaattctacggcgacggggtttataactgcgctggctgcgggactcccctgtacaagtccgccacaaaatttga

SEQ ID NO: 24828 - DNA, 130 bp, Zea mays
gctccaaccattggtatttctcttgatcaccgccgcaagaacaaatcccttgagggactgcaggccaatgtccagaggcttaagacatacaaggccaagctggttatcttcccaaggcgtgcgcgcaagg

SEQ ID NO: 24829 - DNA, 236 bp, Zea mays
gtacctcactcactatggagttgacattggtaggaagaagaaaacccctgctgcaaagaaggataatgctgagggacaagaggttgaggcagcagctgaggaaacgaaaaagagcaaccatgtcacgaggaagcttgagaagcgcaaggagggacgtacccttgacccacacattgaggagcaatttggcagtggacggttgctggcatgcatttcttcccgccctggacagtgtg

SEQ ID NO: 24830 - DNA, 128 bp, Zea mays
acagaatgttgacattgccatcattgaagcaggtcttggtggagctagggatgcaacaaatgttattcgaagtactgaattagcagcatctgtcataacaacagtagggagggaacatctggttgcat

SEQ ID NO: 24831 - DNA, 202 bp, Zea mays
atgggtttgagtgatcaggacattgttgccctctctggtggccacaccttgggaaggtgccacaaagagcggtctggttttgagggggcctggactacgaaccctttggtctttgacaactcttacttcaaggaacttctgagtggcgacaaggagggtcttcttcagctcccaagtgacaaagccctgctgagcgaccctg

SEQ ID NO: 24832 - DNA, 198 bp, Zea mays
cccacgcgtccggaattctttgcctttattgttgactgtaaagatcccaaggcatgtactgttttgttgatgggagcaagcaaagatgtattgaatgaagttgagagaaacctgcaggatgccatgtccgttgcaagaaacattttgaaaaatccgaaactccttcctggaggtggtgctacagagctgactgtatca

SEQ ID NO: 24833 - DNA, 233 bp, Zea mays
cgcacaccagcacctgccctcctcgccgtcgccgcctccctccgcgcgaccgatctaccctccgccgccaccatgtcgctgatcgccggggaggacttccagcatatcctgcgtttgctgaacaccaacgtggatgggaagcagaagatcatgttcgccatgacctcaatcaagggtgtcgggcgccgcttctccaacatcgtctgcaagaaggccgacatcgacatgaacaa

SEQ ID NO: 24834 - DNA, 133 bp, Zea mays
cccgttcaggatccacatcttcccgagcgagttcttggttgacctcttcctcttcggaccacctccaaggctcttggtgtagcttgccactctcaccaatcaagttttcatgtctgatctcgacattcagatc

SEQ ID NO: 24835 - DNA, 219 bp, Zea mays
atttgcgccgccgcagcccgcagtcgcttgcgcgcacagcacttcgcaccgccgccccatcccatcgccgccagtgtctgctcgatccgatggctcccacgaagaagtcgaagaagagcacagagagcatcaacaacaagctgcagctggtgatgaagagcggcaagtacaccctgggctacaagaccgtcctcaagacgctgcgcaacttcaaaggga

SEQ ID NO: 24836 - DNA, 232 bp, Zea mays
cggacgcgtgggctgatgaagacctacggcttcctcactcctgaattctggagccagaccaagttctccaaggccccgttccagcagtacaccgacctgctggcaaagcccaccaagggccttgtgctcgaggccccaactgagacagtagaggcttaggatgtttgagtggagagctctactcgtcgggtgcttgtctaaatgcggtatctatattatagctaagaactgc

SEQ ID NO: 24837 - DNA, 231 bp, Zea mays
gagcgaacggcgagggcgaatgtgggactgctggcgcgcgggtgggcgccgcagatgcggatcctgacgcacccgtccaccggcgcgttcctgagccactgcgggtggaactccgtcctcgagagcctgtcccgcggcgtgccgctgatcgggtggccgttgggcgccgagcagttcttcaacgcaaactctcggtcgaatggggcgtctgcgtggaactggcgcgcggga

SEQ ID NO: 24838 - DNA, 240 bp, Zea mays
tgcaggtgcagagcctgctggaccagaaccggatgctcatcagcgagatcaaccagaaccacgagtcccgcgcgcccgacaacctcacccgcaacgtcggcctcatccgcgagctcaacaacaacatccgccgcgtcgtcggcctctacgccgacctctccgcctccttcgcgcgcaccatggaccacgcgtcctccgagggcgactcctccggcaccggcaataacggccgcgccggcg

SEQ ID NO: 24839 - DNA, 239 bp, Zea mays
ataagaatttcaagtcgtcaaacattttgctggactcagaattcaatccacacctttcagatgctggacttgcaagctttattcctgatgctgaattccaggcagcagaacaaagtgccggatacactgccccagaagtggacatgaccggtcagtacaccctcaagagtgatgtctacagctttggagttgtcatgcttgaactattgacaggacgtagaccatttgacagctctaga

SEQ ID NO: 24840 - DNA, 104 bp, Zea mays
gtgggtgatcggatcgagatggcggcgtcggatgttgagtaccgctgcttcgtcggctgcctcgccaggtccacggacgaccactccctccacaacgccttcag

SEQ ID NO: 24841 - DNA, 117 bp, Zea mays
cccacgcgtccggcaactgatggatcctacattgagacaaaagaaagtgccttggtgtggcaccatcaggatgctgacccaggctttggatcctcacaggcaaaggagctgcttgat

SEQ ID NO: 24842 - DNA, 229 bp, Zea mays
cccacgcgtccgctctctttctctacgaagcatttgcatctttctctgggaagccagcttataatgattggttcttgtcactctataatgtcttcttcacctcccttcctgtcattgctttgggagtctttgaccaggatgtgtctgccaggctatgcatacagtatccacagctataccaagaaggagtgcagaatatattattcagttggtgtcggatacttggctg

SEQ ID NO: 24843 - DNA, 187 bp, Zea mays
cccacgcgtccgcccacgcgtccgcggacgcgtgggctctacccttcttccctcgcgccgccgccaccgcaagactatctcaactctgccccgagacctcccccctcgactggtctcagccatggtgaaatattcgacggagccgaccaaccccaccaagtccgccaaggccatgggccgtgaccta

SEQ ID NO: 24844 - DNA, 230 bp, Zea mays
cccacgcgtccgcttgtcgggcctgaaggtgaagagcacgagtttgatgctccagacgacgcctacatccttgacgcagccgagactgccggtgtggagttgccatactcgtgccgtgctggggcttgctccacctgtgccggcaaaatcgagtctggttcggttgaccagtcggatgggtccttccttgatgacgggcagcaggaggaaggttatgtgctgacatgcgt

SEQ ID NO: 24845 - DNA, 189 bp, Zea mays
cccacgcgtccgagaatatccggaagttggttaaggatgggtttatcatcaagaagcctcataagatccactctagatcccgtgcaagaagggcacatgacgccaagcaaaagggacgccactcaggatatggtaagcgtaggggtaccagggaggctaggctacccaccaaggttctgtggatgagga

SEQ ID NO: 24846 - DNA, 229 bp, Zea mays
  unsure (1)..(229): unsure at all n locations
ctccggataagagataaggagtgtctctcctctctttcagctaagtcnctggcccctctctttttcttacattcaggtcctcgcagctcctctcttttttcttgtttctttctttcgatctgcgagccgtccaggtccagtactctcctttccgtgaaggaactcttgcaggcggcccctctggtttcctcgaattcttgtgccccggtggctcctcctgtcgccgcgt

SEQ ID NO: 24847 - DNA, 254 bp, Zea mays
cctttggtacatttgcatatctcttatcttcattgtgtgccaaggctaagactaatatgttttcatgagtatctcatgtattaagtcttagattgaaagggaaatggagtattcggtaaagacatcgcttccactcaactccgttggtattatccactctttgccggtatcccgctgtctctccgtctttggtatattcttcactcatgttttatttgccaaaggggagaaagtagttatttaagggcttgtat

SEQ ID NO: 24848 - DNA, 216 bp, Zea mays
ttttggtcgcagttatttactaagtaagacaccttgcggtgaccattaaagagtaaccaatcaccctgggtaggtcaatttttatctgcaagaactgatgaggccgcttggtaggagtaaatcgcttttcctgggaacgattgttggttagcgccgctactgtatgtatattgagataccttaacgattggtcttttggctgccatttggttacat

SEQ ID NO: 24849 - DNA, 253 bp, Zea mays
  unsure (1)..(253): unsure at all n locations
attgatgctgacggtgttctccagttaaaaggacgtgctgcctgtctaatagacacaggggatgaactgcttatcactgaacttatgttcaatggtacatttaatgatcttgaccatcatcaagttgcttcccttgctagctgctttgtaccttgtgataaatcaagtgagcagatacgcctaagaaatgaactttctaggccgatgatgcagcttcaggaggctgctaaganaatagctgaggtacaacgag

SEQ ID NO: 24850 - DNA, 252 bp, Zea mays
cgcaaatgttcaggaatattgagcagactaccaagccttgtggattttaagacgagtacaaaaattgatgccttgagggaggagataagaaacatgattgagcacgatggttctgccaaagggattgtcttcagccagttcacatcattcttggatttgattcagttttccttggagaggtccggcattaagtgtgtccagttgaatggagccatgaacattaccgaaaagggaagagccatagacaccttc

SEQ ID NO: 24851 - DNA, 253 bp, Zea mays
tcctagaccaccatgaccatttcatgccgtacctcgacgagatcaacgagctggaggggaacttcatctacgccagcaggaccctactgttcctgaaggacgatggcacgctgaagcccctggccatcgagctgagcctgccccaccctgacggccagcagcgcggcgcggtcagcaaggtgtacaccccggctcacaccggcgtcgacggccacgtctggcagctcgccaaggcttatgcctgcgtaaacga

SEQ ID NO: 24852 - DNA, 254 bp, Zea mays
cggttgctctagatccgttcatcctggtggttttgtgaggtcgaaagcggcgagcgaattagaagatgctggacaagctgtgggacgacgtggtggccgggcctcgcccggagacgggcctcgagaagctccgcaaggccaccaccgcccgtccgctcgtcatcaacaaagacgcggacggcggcagctacaagcgggcgcagtcgatgccgtcgaccccgacgacgccggtgacgccgtcgtcgtcgtcgtcg

SEQ ID NO: 24853 - DNA, 247 bp, Zea mays
acgtcggcgactcccgggccgtgctgggcaccacgtccggcgatggcgccattgcggctgtccagctcaccgtcgacctaaagcctaacctgccacaggagaaggagcgcatccggcggtgcaatggtcaagtgtactgcctcgccgatgagcccggggtgcaccgcgtgtagcagcctagccgagagtcgccggggctcgctatgtcgcgcgcgttcggcgactactgcgtcgaagactgcggtgt

SEQ ID NO: 24854 - DNA, 249 bp, Zea mays
cgctcgagctcatgagccaggagtacaccagcaacgtcatcaagacgctcaaggagaacggcaaccagtacacctggggccccgtcaccgtgaagctcgcggaggcctacgggttctgctgcggcgtcgagcgcgccgtgcagatcgcgtacgaggcgcgcaagcagttccccgaggagcgcatctggctcaccaacgaaatcatccacaacgccaccgtcaacaagaggttggatgagatgggtgtag

SEQ ID NO: 24855 - DNA, 249 bp, Zea mays
gggatgaatccacagtggactgatattctggaacatcacactggcctagctgagccacagttactggactgcgctaggcggctgatcagcttccatgccctggctccggaaagcaagcaaaaggcggtgtacaggaagtactccaagcccaagctcggctccgtcgcgcttcaatcccctgacaagaagctgttgtcaggttgaggctcgctgctgctcattgtattgtatatcatcgcttcgatggta

SEQ ID NO: 24856 - DNA, 244 bp, Zea mays
gttggcttctcctcggcctccggttcgggttcgggttcgtgaagttctccggggttcggattcgtgggtgggcggatcgagatggcggcgtccgatgtcgactaccgctgcttcgtcggcggcctcgcctgcgccacggacgactactccctccacaacgccttcagcacctacggcgacgtcctcgagtccaagatcatcctcgatcgggagacgcataggtcccgcggcttcggcgtcgtca

SEQ ID NO: 24857 - DNA, 242 bp, Zea mays
cccacgcgtccgcatccctccagaccagcagcggctcatctttgctgggaagcagcttgaggacgggcgcacgcttgccgactacaacatccagaaggagagcaccctccacttggtgctgcgcctcagaggaggcatgcagatcttcgtgaagaccctgaccggcaagactatcaccctcgaggtagagtcttcagacaccatcgacaacgtcaaggccaagatccaggacaaggagggca

SEQ ID NO: 24858 - DNA, 245 bp, Zea mays
ctcgaaatacagagcttctgtccgcacccaatcacctaaaatggaaatgattgactcattgtttaagccacgggaagctgaagatgatggtctgatccgggagtgtctgattgacttctacaccagttctgggaagagaaagcctgaccaagtcatcatattcagggacggtgttagcgaaagtcagtttaatcaggtgctgaacattgagttgcaacaaatcatcgaggcttgcaaatttcttg

SEQ ID NO: 24859 - DNA, 261 bp, Zea mays
cccacgcgtccgcagaacgtttcgaagctactggacgcgtcacactacgacgagcgtaagatcatggcgaagtcgatcttctacgtcggggagatcggtgtcaacgactacttcgccgccctaagcaacaacgactccgtcgacgtcgcggtcagcctggtgccgcacatcatcgacaccatccgttcggccctgaccgtcatgatcgatgccggggcgaggacagtggtgatcacggggatgctaccgatcggctgcgag

SEQ ID NO: 24860 - DNA, 259 bp, Zea mays
cggacgcgtggggtgccagaaaacacacggccgccaccccgcgccaccacccagttcgatcccattccaagcgcgcgcagagcagcgccacatgggtcgggcgccgtgctgcgacaagacgagtgtgaagcgggggccgtggtcgcccgaggaggacgaggtgctgcggagcgacgtccagaaccacggcacgggcggcaactggatcgcgctcccgcacaaagcagggctcaaccggtgcggcaagagctgccggctg

SEQ ID NO: 24861 - DNA, 257 bp, Zea mays
cccacgcgtccggcctgacgaaggaaattctcaagcgttccaaaggatcctgaccactagacagtcagctcgggcgctacttgtgataagtgattactcttcacgtctccgtgccctaagctctctctggcttgctcggcccaaggaatagcaagaacatgctatttgactgcaatacttttcacaatttggttttcaatggtcaggagatttgacaaggctgcgacagacttgattcggacatatctgcacatact

SEQ ID NO: 24862 - DNA, 256 bp, Zea mays
cccacgcgtccgcccacgcgtccgcgcgctcaactccacgggccttgagctagggttttcttcgccgctacctccctacgaggcgggcgtgcagccatggcgctggtgcaggcgggcatgggccttacccgggtcgttatcctcgtcggcgccggcgttgccggctccgtcgtcctccgcaacggccgcctcgccgagatcctcggcgagctccaggagatactcgacaaggggaagaaggtgaaggatggaggag

SEQ ID NO: 24863 - DNA, 160 bp, Zea mays
atacagcgccatccgaaagcagtttggctctcaagatggtggccctgagactaaggtccttgattacaagactcaacaaagcagactctttccgttgctggcttcagcatatgcatttagatttgtgggtgactggctgaagtggctatacatggatgtc

SEQ ID NO: 24864 - DNA, 254 bp, Zea mays
cgcacaccgccagccagccacccgcacacccctagcccctaggctcccctcccgcaaaaccctagcgctctctctatctctctgtctgtcggcggcgatggaggatgctgccgagagccgcaagctcttcgtcggcgggatcccggccggggcgcaggaggcagacctgcgggcccacttcgcgcgcttcggcgaggtgcgctccgtcgtcgtcatgcgcgacagggagacgggccacggccggggcttcggct

SEQ ID NO: 24865 - DNA, 254 bp, Zea mays
ggtactgctcctctctttcgacaagttcctcttccactacctgaagcgccgttggttctccggcggcagcggcgccaccgtcttaaggccccccgccaaatcgaggcggaacatggcgtccgccaagtggagcgagacggccatgctcgttatcgacatgcagaaggacttcgtggacccggcgatgcgcacccgatgctggtggccggtggcgaggccgtcgtccctgccgttgccggggccgtcgccgtcgc

SEQ ID NO: 24866 - DNA, 254 bp, Zea mays
ccacgcgtccgcggacgcgtgtgtaaaggaagtgaaaaatatgaaatcgatggtcaagtactggaagtgtccatggccaaaccattggcagataagaaacctgatcattcacacaggcctggaggaggccctaattatccccttcctccctatggtggtggtggctacatgggagatccatatggtgcttatggtggcggcggtcctgcatacaaccagccaatgatatatggcagaggaccagcaccggcagg

SEQ ID NO: 24867 - DNA, 233 bp, Zea mays
tgcctgataatgttgcaatgcttacccttcaggagcttgaagatggaagtgttctccttcggtttgctcatctatatgaggccggggaggacaaggatctttcatctttagcgagtatcgacctcaagagagtgttcccggagaagaagattggcaaggtcatcgagacaagcttatcggcaaaccaagaacgcgcaccatggagaagaagcgtttgaaatggacggcgcaag

SEQ ID NO: 24868 - DNA, 247 bp, Zea mays
gcagatctttgtgaaaaccctgaccggcaagactatcaccctcgaggtggagtcctctgacaccattgacaacgtcaaggccaagatccaggacaaggagggcatccctccagaccagcagcggctcatctttgctgggaagcagcttgaggacgggcgcacgcttgccgactacaacatccagaaggagagcaccctccacttggtgctgcgcctcaggggaggcatgcagatcttcgtgaagacc

SEQ ID NO: 24869 - DNA, 250 bp, Zea mays
aaatcactatcacaaacttcaacttccgcatgaattacacgcatggaacttagtagctcagcatccaaactttgataatatcactcagttgttcagcttcaactacaaaccacttactccatatggtggtggcataaatgatacggcaatgttctggggtgtaaaattctacaatgatctgctgatgcaagccggcaaacttgggaatgtgcaatcagagctgcttctccgcatagactcccggactttc

SEQ ID NO: 24870 - DNA, 251 bp, Zea mays
cccccgcctacggcggcgccgcctacctgcggacgtcggtcatgggcgccactacagggactacgtcgaggtcgtgttcgagaacggcgaggacgaggtgcagtcgtggcacatcgacggatacgccttctgggtcgtcgggatggatggagggaaatggtcgtcggcaagcaggcagggctacaacctgagggacggcgtttcgcggtacactgttcaggtgtaccccagatcgtggacggcgatctaca

SEQ ID NO: 24871 - DNA, 244 bp, Zea mays
ggtggatctcggcgcagatgaaccgcgtccgcaacggggagctgtaccgctacatttgcgatacgaagggcgcattcgtgcagcctgcgttctacgaagcgttcggcctgactgtgatcgagtccatgacgtgcggtctgccaacgatcgcgacctgccatggtggccctgctgagatcatcgtggacggggtatctggcctgcacattgacccttaccacagcgacaaggccgcggatatcct

SEQ ID NO: 24872 - DNA, 236 bp, Zea mays
gcattctgcaagacttgtttgatagactactctgcagctttggggaatgtttcatgtccatcctgttcaatacctctcaccgtggacttaacagcacaaaattcagttggaaaagtaactcgaagtgtcaagggtcgcaaatgttcaggaatattgagcagactaccaagccttgtggattttaagacgagtacaaaaattgatgccttgagggaggagataagacacatgtttgc

SEQ ID NO: 24873 - DNA, 242 bp, Zea mays
tgcgagcgctattttggattcggatgcgaaattgatgaagagacctccaacaaactcgaaggtcttccaggggttctttttgtgcttcctgactcttatgttgatgctgagaacaaggattatggtgctgagttattcgtgaacggtgaaatcgttcagcggtcgccagaaaggcagagaagggtggagccagtgcctcagagagctcaggatcggccacggtacagtgaccggacccgcta

SEQ ID NO: 24874 - DNA, 241 bp, Zea mays
gaaacctctcaaaccctagccgcctcctgcaagtttcagagctcaggaatctgcgccatggcgagtgagacggagaccttcgcatttcaggctgagatcaaccagctgctctcactcatcatcaacaccttctactccaacaaggagatcttcctccgcgagcttatctccaactcttccgatgcgctggacaagatcaggttcgagagtctcactgacaagagcaagctcgatgcgcagc

SEQ ID NO: 24875 - DNA, 242 bp, Zea mays
gacccacgcgtccggcccttcctcatgctattctacgtctggatcttgctggtcgggacctcaccgactcgctcatgaaaattctcactgagaggggttattccttcacaacctccgccgagcgagaaattgtaagggacatcaaggagaagcttgcgtatatagctcttgactacgagcaagagttggagactgccaagaacagctcctcagttgaaaagagctatgagctacctgatggc

SEQ ID NO: 24876 - DNA, 235 bp, Zea mays
cccacgcgtccgccgagcccaagaggccttcggacaagcccctgcgtctgcccctccaggatgtgtacaagattggtggtattggaactgtaccggttggtcgtgtggagactggtgtcatcaagcctggtatggtagtcacctttggtccaaccggcctgactaccgaggtgaagtctgttgagatgcaccacgaggcacttcaggaggctcttccgggtgacaatgttggctt

SEQ ID NO: 24877 - DNA, 143 bp, Zea mays
tcctggtccatcacgcgtccgtcacgcgccgagaccgtggtcccctcaatatctctcgtgagactcttcagcagaacaagatcctgaaggtgatcaggaagaaccttgtgaagaagtgtgttgagctcttctttgagattgct

SEQ ID NO: 24878 - DNA, 159 bp, Zea mays
gcgcctcatcggagatgcggccaagaaccaggtcgccatgaaccccatcaacaccgtctttgatgccaagcgtctcattggcaggaggtttagtgatgcctctgtccagagtgatattaagctgtggcccttcaaggtcattccagggcccggtgagaa

SEQ ID NO: 24879 - DNA, 219 bp, Zea mays
tgaaggtgcctgggagacttcatccagttgagatattttacacccaagaaccagagagggactacctagaggctgctatcaggacggttatgcaaatacatatgtgtgaacctgctggtgatatccttgtattccttacaggagaagaggagattgaggatgcatgccggaaaatcaacaaggaaactaataatatgggagatcaggttggcccagtta

SEQ ID NO: 24880 - DNA, 220 bp, Zea mays
cccacgcgtccgcaacagcgtcaaggacgaggaagggtacccggccttcgcgctcgtcaacagggtcaccggcgaggccatcaagcactcccagggcgagggccacccggtcaagctggtgccctacaaccccggctaccaggacgagtcggtgctgtggacggagagccgcgacgtcggccacggcttccgctgcgtccgcatggtcaacaacatctac

SEQ ID NO: 24881 - DNA, 224 bp, Zea mays
cccacgcgtccgcccacgcgtccatggatgcaaaataacagttgttccagcaaattggcctgcttcagaggtactcaatttgaagcctaatggtgttctttttagcaatggtcctggggatccagctgcagttccctatgctgtgaagacggtacaggaaataattgggaaggttcctgtttttggcatctgtatgggccaccaattgattgggcaggctcttg

SEQ ID NO: 24882 - DNA, 217 bp, Zea mays
gccagaggactagaatacattcatgagcacaccaaagatcattatgttcatagagacattaaatcaagtaatatcttgcttgatggttccttcagagcgaagatttcagattttggccttgcaaaacttgtagtgaaatccaatgacgcagaggcttctgtcactaaggttgttggaacttttggttatttagcccctgaatacctgcgggatggcc

SEQ ID NO: 24883 - DNA, 220 bp, Zea mays
cctgctgtgtgatccaaacccaaactcccctgcaaactcagaagccgcgagactgttcagcgagaacaagcgggagtacaaccgcaaagtccgcgagattgtggagcagagctggacagccgactagtgcaggaggaggatgctcatcgtgcccgaaagggcacaataatgaaccatgaaaaaaaacatccttgtgtttgtggttcgccagacctgtcga

SEQ ID NO: 24884 - DNA, 217 bp, Zea mays
aattactttatggagaatctttcccagtttctgctgaagtgcttgattctagtttttgcctaccgattggcaaagctaagatagaacgtgagggtaaagatgttaccattactgcattctccaagatggttggctatgctctccaggctgcagagatactgtccaaggaaggaatcagtgctgaggtgatcaaccttcgatcaatcagaccacttga

SEQ ID NO: 24885 - DNA, 213 bp, Zea mays
tggacttactgggaccgagtcttgaagatctttttagcttttgcaacaggaagttgtccctcaaaactgttttgatgcttgctgatcaaatgatcaatcgagttgagttttttcattccaagtcattcttgcatagagatatcaagcctgacaattttctcatgggtctcgggaaaagagcaaaccaggtttatgttatcgattttggacttg

SEQ ID NO: 24886 - DNA, 213 bp, Zea mays
tgttgggctcgtggcatatgtgaagactcctcgtggcctccgcacactcaactctgtttgggcccaacatcttagcgaagaagtgaggagaaggttctacaagaactggtgcaagagcaagaagaaggctttcacaaagtatgctctcaaatatgaaaatgatgctggcaagaaggaaattcagctgcagcttgagaagatgaagaaatatgc

SEQ ID NO: 24887 - DNA, 210 bp, Zea mays
aacgagaacaagcctgtcacgaacagccgcgacactcaagagatacacctagaacaaggccttcagatgctcaagatattcaaggagcatgtcagcaagacgtccatcctggatgacttcgccttctatgagagtcgccagaagctgatgcaggataagaggtcgaaacagcagcaggtccaaaagcaggtctgggacagtaggaccccc

SEQ ID NO: 24888 - DNA, 210 bp, Zea mays
catacccacgtattcatttcatgctttcctcatatgcccctgtaatatctgctgagaaggcctaccatgagcagctctctgtgcctgaaatcaccaatgctgtatttgagccctcaagcatgatggccaagtgtgacccaaggcacggaaagtacatggcttgctgcttgatgtaccgcggtgatgttgttcctaaggatgtcaacgctg

SEQ ID NO: 24889 - DNA, 211 bp, Zea mays
cgacggagcacgacgcacgcagagccgcagagatccgtcacactgcaagttttgaaaactgaactgtaagatggcatcagcagagctttcccgtgaggaaaatgtgtacatggcgaactcgccgagcaggcagagaggtacgaggaaatggttgagttcatggagaaggtagcgaaaactgttgactcggaggagctcactgtggaggagc

SEQ ID NO: 24890 - DNA, 211 bp, Zea mays
gaattgaggattgtttatcctttaattctgaattttgctgtcagtggtgacctagagcttaatgggatggttcatccaaagtatctaagacctaagggcatcttaacatttgaaaatggtgaggtcaacctggtagctacgcaggttagacttaaaaatgatcatttaaatgcagcaaaatttgaacctgatcttggtttggatcctgttc

SEQ ID NO: 24891 - DNA, 211 bp, Zea mays
cggacgctgggtgcaccatgaggcgcttcaggaggctcttccgggcgacaatgttggcttcaacgtgaagaacgttgctgtcaaggatctcaagcgtgggttcgtggcctccaactccaaggatgaccctgccaaggaggctgccagcttcacctcccaggtcatcatcatcaaccaccctgggcagattggcaacggctatgccccagtg

SEQ ID NO: 24892 - DNA, 244 bp, Zea mays
tggacggcggcatcccgttcaacaaggcgtacgggatgacggcgttcgagtaccacgggacggacccgcgcttcaaccgcgtgttcaacgagggcatgaagaaccactcggtgatcatcaccaagaagctgctggacttctacacgggcttcgagggcgtgtcgacgctggtggacgtgggcggcggcgtgggcgccacgctgcacgccatcacgtcccgccacccgcacatctccggggtcaa

SEQ ID NO: 24893 - DNA, 91 bp, Zea mays
tgcaagttgatgctgccccattcaagcagtggtacctcactcactatggagttgacattggtaggaagaagaaaacccctgctgcaaagaa

SEQ ID NO: 24894 - DNA, 174 bp, Zea mays
ggacctggctgctattgggattgagatctggacaatgcaggatggcatcctgttcgacaatatattgattactgatgatgagaaagttgccacctccattctcgagaagacctggaagcccaagtatgatgttgagaaggaaaaggagaaggctgaggaggctgctgctggtgc

SEQ ID NO: 24895 - DNA, 240 bp, Zea mays
gtggagagccacgacgcggtgttccaggtgaggaagggcgagatgctgttccgctaccagccgtgcgccaccaaggacccccgcgtgttcggcgacaccgccggggacttcgtgcccgaccgcttcctcggcgaggagggcagcaagctgctgcagtacgtgtactggtccaacggccgtgagaccgagaaccccagcgtcgacaacaagcagtgccccgggaagaacttcgtggtgctg

SEQ ID NO: 24896 - DNA, 118 bp, Zea mays
cggacgctgtaccagttcgaatacgccacaatatacatttgtggaacaatggctttactgtggatgatggtccactgagatactacgatgatcctgaaaatgaagagttccttgagag

SEQ ID NO: 24897 - DNA, 184 bp, Zea mays
atcagccaagaccacgcacgaaaaacggtgactattgaggaccatcctcacttattggctgggaagcatgcatcagtgcacccatgcaaacatgcagctgtgatgaaaaagatcatcgacgttccaatgtcggggggagtggaaccagaagttgacaagtaccttttcatatttttgaaattca

SEQ ID NO: 24898 - DNA, 237 bp, Zea mays
catttcttctctctctgctcctccgcctccgcctgatccatccaagacagggatcgccatgtcggactcggaggagcaccacttcgaatcgaaggccgacgctggggcgtccaagacctacccgcagcaggctggcaccgtccgtaagaacggcttcatcgtcatcaagaaccgtccctgcaaggttgtggaggtttctacctccaagactggtaagcatggccacgccaaatgcca

SEQ ID NO: 24899 - DNA, 231 bp, Zea mays
cccacacgtccgcccacgcgtccgcttgtgtatgaatacatgcccaatagaagcatcgacaccatccttttcgatcctgagagaaacaaggagctagattggggaaccagattcaagataataaatggaattgccagaggactacagtatctccatgaggattctcagctgaagatcattcaccgggaccttaaagcgagcaatgtccttttagactctgattatacacct

SEQ ID NO: 24900 - DNA, 232 bp, Zea mays
cccacgcgtccgatcttcgtgaagacacttactggcaagacaatcacccttgaggtggagtcctcggacaccattgacaacgtcaaggccaagatccaggacaaggagggcatcccaccggaccaacagcgcctgatcttcgccggcaagcagctggaggatggtcgcactcttgcggattacaacatccagaaggagagcaccctccacctggtgctccgcctcaggggtg

SEQ ID NO: 24901 - DNA, 231 bp, Zea mays
gtcatctcgaagccagatgtgttcaagagcccgaactcagacacatacgtcatattcggcgaggccaagatcgaggacctcagctcccagctgcagacccaggccgcagaacagttcaaggcccctgacttgagccagatcacgagtccagagacttctggcccgggccaggaagacaatgacgaggaggtcgacgaaactggtgttgaggccaaggacatcgagctggtg

SEQ ID NO: 24902 - DNA, 215 bp, Zea mays
acgcctgcaaccgacgagccccacggccattaagcaggtgagctgcgtgtgggacgcgtacgaggccaccaagggcgcccacggggtgtgcatcctgaccgagtgggacgagttcaagaccctggactaccagaagatcttcgacaacatgcagaagcccgccttcgtcttcgacggccgcaacatcgtcgacccggagaagctgagggagatcg

SEQ ID NO: 24903 - DNA, 230 bp, Zea mays
agctgcttgactcccacctagtgccttcttctactgctgctgaatcaaaggtcttctacctcaagatgaagggtgactatcacaggtatcttgcggaatttaagactggtgctgagaggaaggaatctgctgagagcacaatggtggcctataaggctgctcaggacattgctctggctgagctggcacctacccatccgataaggctgggacttgctcttaatttttca

SEQ ID NO: 24904 - DNA, 206 bp, Zea mays
gaacaagagttatatggatagtcaaagccgtattatgaagagaacagaatcttcagctcccatcttcaatatggaagacatcgaagagggtattgaaggttatgaggatgaaaggtcagtgcttatgtcccagaggaaattggagaaacgctttggtcagtctcctattttcattgcatccacctttatgacacaaggtggcatac

SEQ ID NO: 24905 - DNA, 196 bp, Zea mays
cccacgcgtccgggagcttccggatgctaatttgagacctgaggatctatgggctaatcactcaaaaccaatcttgccaaagccacatatgaaggatactgcatcgtggagagccatccaaaaggttcttgagaacggtgaaagcattgatttgaaacatttcagaccagtaaggcctttaggatctggtgtactg

SEQ ID NO: 24906 - DNA, 221 bp, Zea mays
actgcgacacctacctgacccatgactcgccatctgtccggaaacaacataatgctggatacaaacacaaggcgaatgttcgaacctactatcagcaatttgaggagcagcaaactcaaagtttaattgatcaaagaatcaaggagcatcttggacaagctgcagctttccaagcaggtgcccctttcaaccaacatctgcttgcattcccaggagctatg

SEQ ID NO: 24907 - DNA, 79 bp, Zea mays
cttctcctccccctcttaccaagtcctcctcgggttagggttccttagggttttgtggaggggcgatggcggcggctga

SEQ ID NO: 24908 - DNA, 220 bp, Zea mays
cccacgcgtccgggaaataattgtgggtaccatgtcatttattctggaacagttgctggtgctagggaggcattcttatatgggattcctgcaatagctatgtcatatgattgggttgcgggtcggagcagtgttaatgacctcaaggtgtctgcagaggtctgcatgcctctgataaatgctatcgtgactgagatcaagaatgggacttaccctcaag

SEQ ID NO: 24909 - DNA, 220 bp, Zea mays
gggaacagcagggtgtacaggggcagcctcgcgtgcggccggcaggtggcgatcaagttgtgcaaggcgtcggtggaggcgtccaaggacttcctgcgtgaggtggacatcatcaccaagctgcagcaccaccggatcgtccccttgatcggcgtctgcgtggaaggccgcaacctcatctccgtttaccgctacctccccaggggcagcctcgaggaca

SEQ ID NO: 24910 - DNA, 148 bp, Zea mays
gaccgtgggaaggacaattcatattgtcaatcttgatccagctgctgagcacttcgactatcctgtggatatggatatcagagagctgatttcattggatgatgttatggaggagattgggttggggccaaatggcggtctcatctac

SEQ ID NO: 24911 - DNA, 221 bp, Zea mays
gcaaaccagagggctggaagatctggacgcactggacccggaaaatgcttccgtctatacacgagttacaactacatgcacgacctagaagataatactgttccagagatccaacgaaccaatcttgcgaatgttgtgcttacactcaagagtcttggtattcatgacttggttaactttgacttcatggatccacccccatcagaagccctattaagggc

SEQ ID NO: 24912 - DNA, 221 bp, Zea mays
aaatgaaactcctctggtgaaatggagaatccaggggatggatgagtcatctttacctctgtcagtcaattgctggccgtctgtatctggaaatgaaacctatgtgaacattgaatatgaagcttctgagatgtttgatctgcacaatgttgtcatatctatacctctgcctgcagttcgggaggctccaagtgtcagacagatagatggagagtggaagt

SEQ ID NO: 24913 - DNA, 100 bp, Zea mays
ggatcgagatggcggcgtcggatgttgagtaccgctgcttcgtcggctgcctcgcctgggccacggacgaccactccctccacaacgccttcagcaccta

SEQ ID NO: 24914 - DNA, 215 bp, Zea mays
ggtgggatagcattattttggatatcttgatctgcaattggtttggtatttgggcaggaatgcacacagtccgttactttgatggcaaaacatatgaatgggtcggactgagccgccaacgaagcatcatgggtaaggtgaaaagatcgctgagccagttcacccctgctcaatgggacaaggatcagtggcatcctttcatggggccactgcgg

SEQ ID NO: 24915 - DNA, 100 bp, Zea mays
caagcttcttggtgctggaaagagtcatgtcaccactagggttatgggtactttgggtatgtggcaccagagtatgcaaatactggactcttgaacgaaa

SEQ ID NO: 24916 - DNA, 217 bp, Zea mays
gccattccgtgctctcttggatgttggccttatcaggactacaacagggaaccgtgtctttggtgccctcaagggagctttggatgggggcctggatattcctcacagcgagaagaggtttgctggattcaagaaggatgacaagcagttggatgctgatacccaccgcagtacatctatggtggccatgttgctgactacatgaagaaccttgctg

SEQ ID NO: 24917 - DNA, 219 bp, Zea mays
ctcctgcgagagcatgtgaaggaatctgggcttgcggaaaagattgagctggttatttgttctcctttgtcgaggaccatgcagactgcagtgggagtttttggtggcgaaagctgcagtaatggtgtgagtgtgcctccactgatggtggagaatgctggacgtccggcagtttcaagtttgaactgcccaccatttcttgctgttgaggcctgcagg

SEQ ID NO: 24918 - DNA, 212 bp, Zea mays
cccacgcgtccgggaacctttcctgggtctcggagatggcggcgcctccgggagggcccgggccgactacgacttcctcatcaagctgctcctcatcggagatagcggtgttgggaaaagttgtctccttttacggttctcagatggctccttcactactagcttcatcaccaccattgggattgacttcaaaataagaacagttgagcttg

SEQ ID NO: 24919 - DNA, 212 bp, Zea mays
gtcaatggaggaatcatggcattctactttgtcttatggggtaaaggacttcttgcttgtggcccactagttgctctactggcagagtatgcaggtgctgttcttggagttctctctgctgctttatatggaaggaaagttaacatctggaaaaagattggtggacttgctgctatgttagtagcatattatctattgtcaattggatggtc

SEQ ID NO: 24920 - DNA, 252 bp, Zea mays
cagagatcatggtgttagtagtatagatatggagataactatctatgagactattccaaggctaattgagcaaatgatgatatcactttcgtttgaaaataaaagaagtgctgtaatagagctcaacaagataatatctggtggtgtgctggaatatacaagagcagtggcagattctggaggcatatttccactggtgaaaatgcttgaagaggcggatggagatgcactggaggctatcttatctatctt

SEQ ID NO: 24921 - DNA, 258 bp, Zea mays
aatctcctcggcacaaagtttgcaatatatgatacccagcccccatgcaatgcagcagaacccgggaaaacaagccgtcggttctactcccggaaggtgtcgccaaaggtctcctccagcacctacaacatagcgcaggtttcatatgagctgaatgtgttgggtactcggggccctaggcggatgaactgtgttatgcactccatccctacctcgtgccttgaggctggtggcactgttcccagccagctggacagc

SEQ ID NO: 24922 - DNA, 257 bp, Zea mays
cgcgtgcgaaccaagcagaccacagcaagaagcgtagtcgtcgccggaaggaaaggcgcggacaaaatgtcgtggcaggcgtacgtcgatgagcacctgatgtgcgagatcgaaggacaacatctcagcgccgccgccatcgtcggtcacgacggcagcgcttgggcgcagtccgagagcttccccgagttaaagcctgaggaggttgctggtatcataaaggactttgatgaacctggtactcttgcaccaactgg

SEQ ID NO: 24923 - DNA, 190 bp, Zea mays
gcaaaagatgcaactgagcttgtagcaaagcttagggcatatcatcatactgctcaaacaaaggccgacaagcaacattattcaagtatgggccttgacctctctaagggtatcattcgcaacaaccttgagtatggcgtgatagagccatcgatgagcaaagtaaagatcattcagtttgccacggagg

SEQ ID NO: 24924 - DNA, 259 bp, Zea mays
caagtgggaggtcatggtggatttgttcttctacagggacccagaggaagcaaaggagcaggaggaggaagctgctgttgcccctgagtttgccgcaatcactgattaccaaggagctgatcagtggggtggtgaccagtggacctctgatgtgactgcgccgcctgttgctcctactggtgctgattggggtgctgctccagctccggttcctaccggtgatggctgggatcaagctggggcccctgcacctgtggtg

SEQ ID NO: 24925 - DNA, 257 bp, Zea mays
gtcggctccaattgaagagtgccgcaagaagatttggttggtggactcaaagggtttgattgttgactctcgtaaaaactccgttcagtcattcaaaaaaccttgggcacatgagcatgaacccttgacaaccttgtacgatgctgttcagtccatcaaacctacatttctgattgggacgtctggagttggaagaacattcacaaaagaagttgttgaggccatggcttccttcaatgagaggcctatcatctttt

SEQ ID NO: 24926 - DNA, 250 bp, Zea mays
atggcggagcatgtgccacccaagaccatcaagcaccaagacatgtcctggaccgtgtgggaccgctggacggtaactggcaacatgacgctgagggagctcctggagtggctgaaggagaagggcttgaatgcgtacagcatatcatgcgggacctcgatgctgtacaactccatgttcccgagacacaaggagcggctggacaagaaggtggttgatgtggccagggaggtggccaagttggaggtgc

SEQ ID NO: 24927 - DNA, 251 bp, Zea mays
cggaccgtggcggcaactgcgcgaccgccgacgcccgacggcaggtgcaccaggtcttcgtcgacccctatcgcaaggcactcggttccatccttcgccggaggcaccgcccgtcaacaggacttgatctactactcactagcggtgtagaggcgaagagaagaacttgaccatgagcagcataggcacaggttacgatttgtctgtcacgactttctccccagatggtcgtgtcttccaggtcgagtatg

SEQ ID NO: 24928 - DNA, 247 bp, Zea mays
  unsure (1)..(247): unsure at all n locations
cgacgcgctagctagttctattgccgcaccccagatctccaggagggactcgttcgttcagctaactacactgcacgcaatggccaccacggcgaccgaggcggcgccggcgcaggagcagcaggccaacggcaacggcgagcagaagacgcggcactccgaggtcggccacaagagcctgctcaagagcgacgacctctaccagtacagccntgacacgagcgcgctcccgcgggagccggagagc

SEQ ID NO: 24929 - DNA, 203 bp, Zea mays
  unsure (1)..(203): unsure at all n locations
agcacgcagtagtgcagcagcactgaagcactacttcctgcactcactgtgctagctgctcaaaccgtagtagtaacagtccatcaccatcaccatcaccaccaatggctcccaaggttgcgctcttccttgccctaagcctcctgttcgctgccaccgcgcatggctgcgaaccctactgttccggcccagncgncccaaca

SEQ ID NO: 24930 - DNA, 175 bp, Zea mays
ggataatgctaacgacataaaggcaaagtacatcatcgaggctgccaatcaccccacagatccagaggcagacgagatcctgtcaaagaaaggcgtcctcatcctccccgacatactggccaactctggtggcgtcacagtgagctacttcgagtgggtacaaaacatccagggg

SEQ ID NO: 24931 - DNA, 177 bp, Zea mays
gcgcaccataatgaactgactacacaaaacactaaagaaagcttgcattctcttcatggttcagtagatgagaaacatggagatcttacttctaatggcagcaatatcaaagataggaaaggacattttggtccagtgattagtcagaagctacatgaacattttaagacacaacca

SEQ ID NO: 24932 - DNA, 184 bp, Zea mays
cccacgcgtccgcacccacccactcgcttcagccgcctccgccgcgcgtacaagcaggtggagacaggatgccggctggccacggcctgcgctcgcggacgcgcgacctcttcgcgcgccccttccgcaagaagggctacatcccgctcaccacctacctccgcacctacaagatcggcgatta

SEQ ID NO: 24933 - DNA, 251 bp, Zea mays
accagaaatcctggctgtaattggcaaagtacctcacctctccgagtttctcaactccctgtacaactgccagtataagtcgttcttcgttgcattttctggtctgacagagcaaatcaagttagaccgttatcttcagcctcatttccgctactacatgagggaagtgcgcaccgtggtatactcacagttcttagagtcatacaagagtgtgacaatggaagcaatggccactgcgttcggtgtaactg

SEQ ID NO: 24934 - DNA, 242 bp, Zea mays
atctccggcgggcacgtgaaccctgccgtgaccttcggcgccttcgtgggcggcaacatcaccctgttccgggggctcctgtactgggtggcgcactgctggggtccaccgtggcgtgcttcctgctccgcttctcgacgggcgggcaggccacgggcaccttcgggctgacgggcgtgtcggtgtgggaggcgctggtgctggagatcgtgatgaccttcgggctggtgtacacggtgtac

SEQ ID NO: 24935 - DNA, 244 bp, Zea mays
gttctggtctccatccagggcctcgtgctgaatgacaggccatacttcaatgagccaggatccaagaactcggctgaaacgacaggtggtgagaggtgttccctggcttacaatcagacggccttcgtcagatcatgcaagacgatgctgtattcactccggaagcctccaatgcattttgagacccttgtgttgtggcacttccacgagcatgagcgtgccatcctcgacgcttgcagggctt

SEQ ID NO: 24936 - DNA, 244 bp, Zea mays
agttgcttcccttgctagctgctttgtaccttgtgataaatcaagtgagcagatacgcctaagaaatgaactttctaggccgatgatgcagcttcaggaggctgcaagaaaaatagctgaggtacaacgagaatgcaaactggaagtaaatgtggaggaatatgttgaatcaacctgcagaccctaccttatggatgtcatatactgttggtcaaggggagccacctttgcggaggtgatggaa

SEQ ID NO: 24937 - DNA, 186 bp, Zea mays
  unsure (1)..(186): unsure at all n locations
cggaaagcgacgcggcgcgagcgagngagggccaaggcgaagaggggaagcaccgcaccaggacccttgttcgccgccgacgcctctgatctccgcgaggttgtcaggattcaatatgtcgaccagcacattcgctacttcctgcacgctgttgggcaatgttagaacaacgcaggcctcccagac

SEQ ID NO: 24938 - DNA, 208 bp, Zea mays
  unsure (1)..(208): unsure at all n locations
cccacgcgtccgggttctaagaagcctaagaagggagctgcaccggcacctccgtccgaggaaaagaagatgagcattggtctcatatatgtgaacgagcactactctggatggaaagagcagtgcttgagggtgctgcagtccaagttcgacagccaaagccgctccttctcacccgatcaggaaatagcagaagcgcngaaggagg

SEQ ID NO: 24939 - DNA, 159 bp, Zea mays
atcaagtggaaatcagtggagaggttgggtgcaacagtggtccttgagggggactcatatgatgaagctcagtcatatgcaaaattgcgttgccagcaggaaggccgcacatttgtacctccttttgaccatcctgatgtcatcactggacaaggaact

SEQ ID NO: 24940 - DNA, 250 bp, Zea mays
cccacgcgtccgtcaatttcgataattattagtagatctatgagatatgccgcctggaagaggcgaggtaagctgcagcatgtaaaaaagagaaaaaagatgtgacatcctagaggaggaggcctttgccatgatgggtgcgctcgcatggcaggccaggcaataataaaaagatgattattgcgtgccgggggaggagatcgcacgggggttgatgtttttggccccgggttctcctccctcatcttgt

SEQ ID NO: 24941 - DNA, 228 bp, Zea mays
gcaccggcaagcgaagtcgcgccactccaatgggcagggccgctggccgttaaatcagccaggttcatcctggatttgctgaagaatgctgagagtaacgctgatgtgaaaggcttggatgtggacaacctctatgtttcacacatccaggtgaatcaagcccagaagcagaggcgccgcacctaccgtgctcacgggcgcatcaatccctacatgtcctcaccttgc

SEQ ID NO: 24942 - DNA, 230 bp, Zea mays
ctttctagatcctgagccctataaacaactttatcttcctccacacgtaatcgtaatgatactcagattcttcccacagccagattttcagaaaagctggtcagaaaaaagccgaaacaaacagggccaactgtcttgtcttgctgccctaccaaaccttctgcaaaattttttttcaagatgtttgtcaggtgtatgtgtggatgtggtttttctgattcaactcctgg

SEQ ID NO: 24943 - DNA, 230 bp, Zea mays
cccacgcgtccgcccacgcgtccgcccacgcgtccggttgtgccgaccatcgcgaagatgcccaccctgggggctgtgtatgagcgaggattgatcggcatatatcatgactggtgtgaggctttctctacttatccaaggacgtatgatcttatccacgctagcggtcttttcaccttgtataaaaccaagtgcagcatggaagatgttctcctggagatggaccgcat

SEQ ID NO: 24944 - DNA, 234 bp, Zea mays
aaaagataatgctatacattaatggaccaggaggagatcttactccgtgtatggcactatatgataccatgctaagtctaaaaagtcctattggcactcactgcttgggctttgcattcaacctggcaggattcatccttgcagccggtgaaaagggttcacgcactggtatgcctctatgccggatttcactccaatcacctgccggagcagctcgaggacaggctgacgata

SEQ ID NO: 24945 - DNA, 237 bp, Zea mays
cccacgcgtccgcccacgcgtccgcccacgcgtccggtcctcttggagcttattactggtagaaagcctgtcgacgcatcaaagccattgggtgacgagagccttgttgagtgggctaggccattgctcacgcaggcgcttgagaccggcaacgccggggagctggtggacgcccggcttaacaagaactacaacgaagtcgagatgttccgtatgatcgaagctgctgcagcttgc

SEQ ID NO: 24946 - DNA, 226 bp, Zea mays
cccacgcgtccggtggaggactacccgtacgcgtcggacgggctggccatctggcacgccatcgagcagtgggtgacggagtacctcgccgtctactaccccaacgacggcgtgctgcgggcggacgtggagctgcaggcgtggtggaaggaggcgcgcgaggtcgggcacgccgacctcaaggacgcgccctggtggcccaagatgcagacggtggccgagctgg

SEQ ID NO: 24947 - DNA, 224 bp, Zea mays
gctgctggtggtgagctatttgaaaggatctgtaatgctggaagatttagtgaggatgaggcgagatttttcttccaacaactgatttcaggagttagttattgccactcaatgcaaatatgccatagagatttgaaactagaaaacactctcctggatgatagtatagcacctcggctaaagatatgtgattttggttactccaagtcctctgtgctgcactc

SEQ ID NO: 24948 - DNA, 226 bp, Zea mays
cccacgcgtccgcctgcagtacgtcgacgagacctgggcaggcaccgggacccctctcctccccgccgacgcctacgaccgcgccatggctcgcttctgggcagcctacgtcgacgacaaggtaataacggtgactgcagaggccggccggccggccaaaatgctaatccttgcctttttcttcttcttgcgccgagaatctgtctgctgggcctctgggactggg

SEQ ID NO: 24949 - DNA, 227 bp, Zea mays
cccacgcgtccgcagggatcgagactgaacagcagtccgagacgccatgaacgtggaggaggaggtcgggaggctcaaggaggagatccataggctcggccagcagcagcccgatggctcttacaaggtcaagtttggcgttctcttcaacgacgatcggtgtgcaaatatctttgaagcactagttggcaccttgagggccgccaagaagaggaagatcttgacct

SEQ ID NO: 24950 - DNA, 182 bp, Zea mays
atccctgatccatctaggatcatcgtattgtattgtagtgtatgtatgtcgtcggcctaccatcgttgccatccaccatagtgaggtggttggacatgcttcgcctatatgcacctgtgcttgccttccttcgggtcggtgctgtttggttaatgttcatcgaagacgttgatttcgttgcc

SEQ ID NO: 24951 - DNA, 231 bp, Zea mays
gcagagacaggcgtcttcgtactcgcctatctccgcgactcaaagctttccccaaggcccccccttctcgcatttctcaccaccgccgccgctccccccgttcaacaacaccatgagggagtgcatctcgatccacatcggccaggctggtatccaggtcggaaacgcgtgctgggagctgtactgcctcgagcatggcattcaggctgatggccagatgcccggtgacaa

SEQ ID NO: 24952 - DNA, 221 bp, Zea mays
cctcttcctcctcttcctcctcctagcacagctagcgcctgctccccttcgtctgtgatcatgtcttgcagcagcggcaagtgcaactgcggctccagctgctcctgcggcagctcatgcaactgcatgtcccctgacgtggagaccgccgccgccagcagcatcaagaccatggtcctcgctgcgccgaccaccaaggccagcgccggcggcttcgaggc

SEQ ID NO: 24953 - DNA, 211 bp, Zea mays
atggtttttcatggtggataaagaggattaaacgtgcccttgatttgtatgatgaattccgtattgaccatttccgggggcttgcgggtttttgggcagtcccttctgatgcaaaagtagcactggttggaagctggagggctggaccaaggaatagcttttttgacacgctcttcaaagctgttggtagaatagatataatagcagaaga

SEQ ID NO: 24954 - DNA, 105 bp, Zea mays
tctcaacttcctttggcttcaggcaagctaaagaggattgctgtgattactcaaggtgctgatccagtggttgttgctgaggatgggaaggtgaaaacgttccct

SEQ ID NO: 24955 - DNA, 219 bp, Zea mays
cttctggcaagctaacagaaaaatccgatgtattttccttcggagtcatgcttcttgagcttattactgggcggcgaccagttgacacaacccaaacatatatggatgacagcttggttgactgggcaaggccattactgatgcgagcacttgaggatggtgaatatgattctttagtggatcctcggctgggaaaggacttcaatcctaatgagatgg

SEQ ID NO: 24956 - DNA, 221 bp, Zea mays
actaccgtgaggtcatttctatcctgatgcaacgccatgtacttgttgatggcaaggtcaggactgacaagacctaccctgctgggttcatggatgtcatttccatccctaagacaatggagaactacaggctgctttatgacaccaagggccgcttccgtcttcacccaatcagggatgaggatgccaagttcaagctctgcaaggtgaggtccgttcag

SEQ ID NO: 24957 - DNA, 222 bp, Zea mays
cactcttcgcctcctttctggagcagctagggttccgtcctcgatccgatccgccgagtgcacaccacctttccccactccgatcgaatcgatggccgccgagggcgagaagaagatgataaccctcaaaagctccgatggcgaggagttcgaggtggaagaggcggtggcgatggagtcgcagaccatccgccacatgatcgaggatgactgcgccgacaa

SEQ ID NO: 24958 - DNA, 224 bp, Zea mays
atgggataaaagtttctacatcagttctgttgctggctccaacaatggaagttctattgtagtgatgtcaaaaggcacaccatatacacagcaatcttataaagtcagtgattcctttccatttaagtggataaacaagaaatggaaagaaggttttcatgtgactgcaatggcaacatcaggcaatcgatgggctatagtcatgtcccgcagtgctggatttt

SEQ ID NO: 24959 - DNA, 224 bp, Zea mays
gggtcgagctcggtggccatcagcaagtacgtcgaggggaagcacggcggcaagctccccaccaacttccgcaagcagctcaccgtgcagctgaagaagctcgctgccgccggcaagctgacgagggtgaagaactccttcaagctgccggccaccgacgccaagcccaaggccgccaagcccaaggcacccaaggccgcgcccaagcccaagccctcgccgaa

SEQ ID NO: 24960 - DNA, 238 bp, Zea mays
cccacgcgtccggtcgccaatggaactgatcaacgaggtacctccgatcaaggttgatggtcgcattgccgtctgtgaaggggcttctgaaggtgttggacttggccacccaattgagtacatctgccttgatctggaggcacctaatgtgtgcaagtactgtggtctccgttatgttcaagttcaccatcactaaattgggaagatactgccgtctaccgctgcagaagctgagttg

SEQ ID NO: 24961 - DNA, 80 bp, Zea mays
cacctcgcctgcgatcttcgtagcctccgtcgcgtcgagcatcgatcatgtcggcctactgcggaaagtacaaggatgag

SEQ ID NO: 24962 - DNA, 232 bp, Zea mays
gcgccatcgtcgagcgcctcaccaactcgctcatgatgcacgggcgcaacaacggcaagaaggtcatggccgtccgcatcatgaagcacaccctggagatcatccacctgctcactgacgccaatcccatccaggtggtcgtggacgccattatcaacagtggaccacgtgaggatgccacccgtattggttctgctggtgttgtgagaaggcaggctgtggatatctcacc

SEQ ID NO: 24963 - DNA, 236 bp, Zea mays
ctcacgcgtccgcttcatcaacatgttgaatcaatgaaaactgaatatctcaatgaacaacgccgcaccggcaatgggggtgatccatttctggaggcaaacagacgagaagcagctaaacaagaagcagctgccagaagggtccatccaacactgcatctgcctacccccgcgcagccacggcacagatcgctgcaccagctacaagccaaccgcagcaaccttcctttccgtcc

SEQ ID NO: 24964 - DNA, 235 bp, Zea mays
cccacgcgtccgcccacgcgtccgcccacgcgtccgcccacgcgtccgcgaagatcttcggcatgatcttgcgtgcatgttcggtattcaagggcagcttgaagatccctacaggacggactggaagctggtctatgttgaccacgaaaatgacatcctccttgttggcgacgacccatgggaggagtttgtaagctgtgtcaagagcattaaaatattgtcatctgttgaagta

SEQ ID NO: 24965 - DNA, 238 bp, Zea mays
cccacgcgtccgggtgttcctgtttcaatcaatggccgagacctctcaccagcatccctcctcgcggagctcaatgaaatcggtggaaagcatgggattgggcgtatcgacatggtggaaaacaggctggtcggcatgaagtcacgtggggtctatgagacccccggtggcaccatcatggcagccgcggtacgcgagttggagtccctgaccctggacagggagaccatgcagtgga

SEQ ID NO: 24966 - DNA, 232 bp, Zea mays
cttctcctccccctccggttcgggttcgggttcgtgatgttctccggggttcggtttcgtgggtgagcggatcgagatggcggcgtcggatgttgagtaccgctgcttcgtcggcggcctcgcctgggccacggacgaccactccctccacaacgccttcagcacctacggcgaggtcctcgagtccaagatcatcctcgatcgggagacgcagaggtcccgctgcttcggc

SEQ ID NO: 24967 - DNA, 231 bp, Zea mays
gaaactgtggttgcaataactagtggggcaaatatgaactttgatcgacttagactagtaaccgagctagctgatgttggccgaaaacgggaagcagtgttagctacatttctgccagagcagcagggaagcttcaaaaaattcacagaattggttggcaggatgaatattactgaattcaaatacagatacaattctaatgcaaaagatgcccttgttctttacagtgtt

SEQ ID NO: 24968 - DNA, 142 bp, Zea mays
cccacgcgtccgccgagttcgagcgaccatgtcggggcgtggcaagggcgggaagggtctgggcaaaggcggcgccaagcgtcaccgcaaggttctccgcgacaacatccagggcatcacgaagccggcgatccggaggctg

SEQ ID NO: 24969 - DNA, 226 bp, Zea mays
gtcaattgctggccgtctgtatctggaaatgaaacctatgtgaacattgaatatgaagcttctgagatgtttgatctgcacaatgttgtcatatctatacctctgcctgcagttcgggaggctccaagtgtcagacagatagatggagagtggaagttggactcaagaaactctgtgttggaatggtctattctccttattgatcagtcgaatcgcagtggttcca

SEQ ID NO: 24970 - DNA, 118 bp, Zea mays
gattcacaaaagcagatgatgtgcctcttagttggagaatgaagcaacatgagaaggttcttgaggaaggcgtcctcaacccagaatcaactgttgttgcgatctttccctctccaat

SEQ ID NO: 24971 - DNA, 225 bp, Zea mays
cccggacacggcgctggggctagtgatggggtacgtggaggacccctgggaccgcgacgccatctcgctggtgtgccgccactggtgccgcgtcgacgcgctcagccgcaagcacgtcacggtggccatggcctactccacaacacccgagcgcctgttcggccgcttcccgtgcctcgagtcactcaagctcaaagcaaagccccgcgcggccatgttcaacct

SEQ ID NO: 24972 - DNA, 223 bp, Zea mays
ttcaggtcagagctcaagaagatgggttttgaggttcttggtgacaatgactctcctgtcatgcccataatgctctacaatccggctaagattcctgcattctctagggagtgccttagacaaaaggttgctgttgttactgttgcgttccctgcgacacctcttcttcttgctagggcacgcatatgcatttctgcttcacatactagggaggacctgatta

SEQ ID NO: 24973 - DNA, 222 bp, Zea mays
cggacgcgtgggcgggacgcgtgggctcctcgcatttcttcccatccgatccccccttcgcaaccaaaaccccaactcgccccgcaacgatggcgcccaaggccgagaagaaacccgcggcgaagaagccggcggaggaggagcccgcggccgagaaggcgcccgccgggaagaagccgaaggagagaagcgggtccccgctggcaagtccgctgccaagga

SEQ ID NO: 24974 - DNA, 227 bp, Zea mays
ccgagacctgccccggcgagctgcagctgcgctccccggccggcagcgtcctcgcgtgcaacacccgctgcgcggccttccgcaccgacgagctgtgctgccgcaacatgtacaacagcccgcacacctgccgcgcctccaagtactcggagttcttcaagcgacagtgcccgcaggccttcacctacgcgcacgacagctactcgctcacccacgagcgcgccgcg

SEQ ID NO: 24975 - DNA, 229 bp, Zea mays
cacacctgccttgtgccttcccttcccttgcttcgcttattgccggcacatcacatcggcaggcgagggacggagcgagcagggaagcccatccaacagccagccaccgcgttcctgagaagcgaggagcgagaaaagagaagagcggccatgttctggcacggggtcgcggaccggctgacggggaagaacaaggaggcgtggagcgagggcaagatccgcggcacgg

SEQ ID NO: 24976 - DNA, 231 bp, Zea mays
cccacgcgtccgcgctgacggacgcggactccggcaagccgtcgacggcccccgtcccggacctgtggcgcctgagcaccgtgcaccgcgtggaggagctcaagtcggtgatccgcatgggtcctatctgggcggcgggcatcctggtgatcacggggtcgtcgacgcagaacaccttctctctgcagcaggcgagcaccatggaccgccgcctcgcgccgggcctctcca

SEQ ID NO: 24977 - DNA, 224 bp, Zea mays
atctccaccgcccacttgatccacgcagaccgtgatccgctgaaagctcgcagccccgagtgcgtccagctggccgctctgcactccatggcggtcgacttcgccaagacgggagctccagccgagatgcccctggcgctgaggccccgggagtttccggacttcatggaacggtgggagaggccaatgtacgtctccaacggcgtcctcggcaagctctaccg

SEQ ID NO: 24978 - DNA, 220 bp, Zea mays
gttggcttctactccccctccggttcgggttcgggttcgtgaggttctccggggttcggtttcgtgggtgagcggatcgagatggcggcgtcggatgttgagtaccgctgcttcgtcggcggcctcgcctggagcacggacgaccactccctccacaacgccttcagcacctactgctaagtcctcgagtccaagatcatcctcgatcgggagacgcaga

SEQ ID NO: 24979 - DNA, 223 bp, Zea mays
caccgattggttctgatgatctctaccctgggcctggtgcaggcttctaccctcacagtggcattgggagcggtggcagcatgcatgttggtcctaatgatccgcgcttctttccttctaatcccttctctgccccatttggtgggcttgggagtgttccaccaggtagtcgctatgatccaattggcccacctgacgtcccagggtttgagccatctagctt

SEQ ID NO: 24980 - DNA, 218 bp, Zea mays
ggtgggtcccgagaacctggtcccctactacccggcgacacgggtcaagttccttatcgtggggaacgagatcctctccgacttgtccatcgcgaactccacctggccacaccttgtcccggcgatggagaacatccaccggagcctccgaaagaggagcatcagcagcgtcaagatcggcaccacgctcgccatggacgcgctcgccgacgggcctt

SEQ ID NO: 24981 - DNA, 220 bp, Zea mays
gtggaattgtgaggtctgtccatgctgcctgctagaaatgggaaaatatgttagcagtagcaacaagtgtttttggcctttgatcttctggaggtcatgtggttgcagttctaccgatacttgttctacttgggcaaaattaggacaattcagttggagtacactgatgctaaagaaagcctcctgcaagttgctcgtaaggcaccaacaacagcccatg

SEQ ID NO: 24982 - DNA, 221 bp, Zea mays
  unsure (1)..(221): unsure at all n locations
cggatcgtgggctnggacgcgtgggcggacgcgtgggtggacaacattgagaagatatagtatcgcggggagaatcttgagcttttggtatgtaagacagagaccctacagtcacaggcggacagcttccacaggcatggcagagagttgaggcgaaagatgtggcttcagaacctgaggtttaagctgatggtgggtggcggcattgcggctctgatcct

SEQ ID NO: 24983 - DNA, 219 bp, Zea mays
ccgcacgcctgcacacattccgcgcacaccccggcagccgcaaacgccttcgccgtcgcgtcccgctcctccgcccgcccgacgcgacccctaggacctggagagagaggtcggcatggctgccgcagtggtcgacgacgctggtatggacgccgtccagaagcgcctcatgttcgaagacgaatgcattttggtggacgagcaggacaatgttgttgg

SEQ ID NO: 24984 - DNA, 219 bp, Zea mays
tcatcttttctcgtttagaacctctaaaatttcccccactcgccagtcgcagcagcacctgtagcagccatggacgccagcggaccggtagcaaggggaagaagggggcggccgggcgcaaggcaggcggccccaggaagaagtcggtgacgcggtccgtcaaggccgggctgcagttccccgtcggccggatcgggcgctacctcaagaagggccggt

SEQ ID NO: 24985 - DNA, 221 bp, Zea mays
gagacgcacatctatctgtcaagcgacgccgcggcctcgatcagagtcggaggcgaacacccccatggcggcggctggcggcggcgcaggagggaaggtatccttcaagatcatcctcacctccgaccccaagctccctttcaaagtgttcagcgtgcccgatgcggcgccctttaccgcggtgctcaagtacgccgcggaggagttcaaggtcccgcccc

SEQ ID NO: 24986 - DNA, 252 bp, Zea mays
ggccaggggatatcatggctttttccttttactgatggccatccacctcttggctggtcagatactttggcatacattgtgttaccagttcttcttgtcatttcacagtacatatctactcaagtaatgcagccaccacagagcaatgatcctaaccaacaaggtgctcaggctgtaacaaagttcttaccattgctaattggttattttgctctttccgtgccttcaggactaagtctgtactggcttaca

SEQ ID NO: 24987 - DNA, 247 bp, Zea mays
cccacgcgtccgggctttgtttttatggctgtgtctgttccatatcttcgatctgagtatggaaaagaatatgaatacgatgcacccgtgaagttgttggacaagcatttgcatgcaatggcacaatcatctgatgagcagcttgtggtggtgtcacaggtgcttgtggctgatataaacattgggtacgaagatatagtcgacatgcagggtcgtgccttcaatagcacaccgggtaaaaatttga

SEQ ID NO: 24988 - DNA, 244 bp, Zea mays
caaagatagagagtagtttttcggtgagcactgagcaggaaatgatgttgctgtagtagaactcaatgtcgattttgctctgaattttactgtttccttgacacaagttatttcctcattcagactccacctggctgcatgggctgggcatgttgatgttgtgagatgcctttgcaagcacaaagctgatgtgggagctgcagcaatggacgacactgcagcacttcattttgcttcccagaaa

SEQ ID NO: 24989 - DNA, 242 bp, Zea mays
accccaactccgtcaacaaccgcgtcgcctactacaagcagttctgccaggatttcggcgtcgacccgggcaacaacctcacctgctgaatgatctctctctcattgggttgttgtcctgtacttacacatgtgttggttgatggatagatggcgattgcgtggtgcggatgtttcggtttggcggtgtcaattctgatatgcgcgtcggtgctgttctgatactgactatatacggaaata

SEQ ID NO: 24990 - DNA, 248 bp, Zea mays
ggccaggggatatcatggctttttccttttactgatggccatccacctcttggctggtcagatactttggcatacattgtgttaccagttcttcttgtcatttcacagtacatatctactcaagtaatgcagccaccacagagcaatgatcctaaccaacaaggtgctcaggctgtaacaaagttcttaccattgctaattggttattttgctctttccgtgccttcaggactaagtctgtactggct

SEQ ID NO: 24991 - DNA, 249 bp, Zea mays
cccacgcgtccgggctttgtttttatggctgtgtctgttccatatcttcgatctgagtatggaaaagaatatgaatacgatgcccccgtgaagttgttggacaagcatttgcatgcaagggcacaatcatctgatgagcagcttgtggtggtgtcacaggtgcttatggctgatataaacattggttacgaagatatagtcaacattcaggttcttgccttcaatagcacaccggttaaaaatttgaag

SEQ ID NO: 24992 - DNA, 253 bp, Zea mays
caaagatagagagtagtttttcggtgagcactgagcaggaaatgatgttgctgtagtagaactcaatgtcgattttgctctgaattttactgtttccttgacacaagttatttcctcattcagactccacctggctgcatgggctgggcatgttgatgttgtgagatgcctttgcaagcacaaagctgatgtgggagctgcagcaatggacgacactgcagcacttcattttgcttcccagaaaggccatgta

SEQ ID NO: 24993 - DNA, 251 bp, Zea mays
accccaactccgtcaacaaccgcgtcgcctactacaagcagttctgccaggatttcggcgtcgacccgggcaacaacctcacctgctgaatgatctctctctcattgggttgttgtcctgtacttacacatgtgttggttgatggatagatggcgattgcgtggtgcggatgtttcggtttggcggtgtcaattctgatatgcgcgtcggtgctgttctgatactgactatatacggaaataaaaatctga

SEQ ID NO: 24994 - DNA, 248 bp, Zea mays
gtgacaagcttcaaaatagattcttatcacgcaatccagcaaaggttatcttgtcaagcatggaggttgttgcgcaatcaatgggatttaagacacacattcgcaattataagatgagggtggaaggtctaaatgccgacaagactagtcatctctcagttatggttgaagttttcgaagttgctccatcaatcttcatggtagaactacaaagagcagcaggagatacttcagagtataacacgttc

SEQ ID NO: 24995 - DNA, 244 bp, Zea mays
caagatagagatgcatgttggagctgtacaggccaacgatcgggctcttgtagtcgatgatcttattgccaccggtggaacactctgtgcagctgtcaaacttattgaacgtgttggagcaaaggttgttgagtgtgcttgcgtcattgaattggcagaactgaagggccgagacaaacttggggacaggccagtttttgttcttgtcgaagcagatgcttgagcggaacttgggacttctctt

SEQ ID NO: 24996 - DNA, 242 bp, Zea mays
gctgctggctgtcggtcatgacatcgccatcaagagaaataggaaagtttttataaaggtgatattgattttgtggctggtttcatttgttggaatgctcttcaactttcttacactcatttacattggtgtaatgctttctctgttggttccaccactctatgagaagtatcaggatcaggttgatgaaaaggttggcgtacgcacagtataatattgaggcacataaataccattgttac

SEQ ID NO: 24997 - DNA, 242 bp, Zea mays
cccacgcgtccgcttgagcaggtccggctatgcctagatcgtcaagattatgttcgagcacaaattttatcaaggaaaatcagtactagagtatttgacgcagatccatcaaaggaaaaaaagaaaccaaaggagggtgacaacattgttcaggatgctcctgcagatattccttccctcctagaattgaagcgtatctactatgaactgatgattcgatattacttgcacaacaatgatta

SEQ ID NO: 24998 - DNA, 242 bp, Zea mays
gcagggttccaggtctgccactcgctgggaggaggtactggttcaggaatgggcaccctgctcatctctaagatcagggaggagtacccggatcggatgatgttaacattctctgttttcccgtcgcccaaggtgtctgatactgtagtggagccctacaacgcaacgctctctgttcaccagctcgttgagaacgcagacgagtgcatggtgctcgacaacgaggctctctatgacatctg

SEQ ID NO: 24999 - DNA, 248 bp, Zea mays
cccacgcgtccgttcatcgtgtaactcatcatggtgcacaaggccctgtacatgcagtcttgagcgagaactgggttgtttatcattattttaatctgcgagctcacagatttgaaatagcggtgattgagatatatgatcaatctagggcggacaataaagatgtcatgaagctcatacttgggaagcataatctttcagcaccaattacatcatacgcccgccctgaggtggcagtaaaatcccag

SEQ ID NO: 25000 - DNA, 231 bp, Zea mays
gactgttggaagcatcaaacagtctcaagttcagtctcgaattccttcaagctctgagggtagtgagcatacagctttttaatcgcaattggcttgcagttcttcatgtcgcatctgtagactgtacttgaggctccataaccctcagagcttgaaggaattcgagactgaacttgagactgttggaagcatcaaacaccggaatcttgtaagccttcaggggtactccct

SEQ ID NO: 25001 - DNA, 238 bp, Zea mays
cggacggtggtgcagacgcgtgggcttgagaatggtgggaccctgaagagcgcaagcccagcttctcttctaacggaagctataactgttatcagctgcggctatgaagacaagactgactggggaaaagagatcggctggatctatggatcaattacggaggatatcttgactggatttaagatgcactgccatggttggcggtctatttactgcatcccgaagcggcctgcattca

SEQ ID NO: 25002 - DNA, 239 bp, Zea mays
ctgacatcgaatttgggatagctgaaggagttgattgcattgctctatcatttgtaaatgatgctaatgatatagagcagttgaaagcttacctctctagaagatcgttagagcacatcaaagtatttgcaaagattgagagtctagaatctctcaagaacctgaaagacatcatagaggcatctgatggagttatggtagcacgaggggatcttggagttcagattcctcttgaacag

SEQ ID NO: 25003 - DNA, 225 bp, Zea mays
  unsure (1)..(225): unsure at all n locations
cccacgcgtccgcggacggtgggctccgctcggccaccagctttgaccgcctcccctccccaccaaacctggagctccacaccacacncccccgcaggagcggcgcggcggcggcggcggcaaagccaaaggcaagatgttcgggcgcgcgccgaagaagagcgacaacaccaagtactacgagatcctcggggtgcccaagtcggcgtcccaggacgacctcaa

SEQ ID NO: 25004 - DNA, 212 bp, Zea mays
cagacgtacaggatctactgcaaggctggggaggaccagtacagcctcgcctcccgcgacggcaaggtctgcctcgtgcgcacggaccgtgatgacgacgcgcacactggatcaaggacatgaagtacagcaccagggtgaaggatgaggaaggctaccctgccatcgtcctcgtcaacaaagccactggagaggctctcaagcattccctg

SEQ ID NO: 25005 - DNA, 215 bp, Zea mays
cccacgcgtccgcagagtacccagcttatcggtattattcgtcattgtaagaagctccatgtcttatgggtgttagatcacattggtgatgagggcttgaaggctgtgtccttttcttgtcctgatcttcaggagttgagggtatatccaagtgttgttgcaccaagaggactgtgacgaaggaagggttgtaagcccaacctccgggtcgaaat

SEQ ID NO: 25006 - DNA, 164 bp, Zea mays
ggcggcaagatgagccggcaaatcagcggacgtcttctactgcctcaagctcctggtggcgacaggaatctccactgtcccgggctctggttttgggcaaaaggatagggtgttccaccttcggaccactatccttccagcggaggaagacttccctgccatca

SEQ ID NO: 25007 - DNA, 234 bp, Zea mays
aacactggtgcagctggtgtcgatggccctgctgcaaattcagttaaaaggaagaggaagaaccagttcaggggtatccgccggcgcccgtggggcaaatgggctgctgagatcagagatcctcgcaagggcgtgcgcgtctggctcggtacattcaactctcccgaagaagctgccagagcttacgacgccgaggcacgcaggatccgcggcaagaaggctaaagtcaacttc

SEQ ID NO: 25008 - DNA, 238 bp, Zea mays
gcttcaacaaggagctgtacaaaggttcataagcaaggagttgcgcttggccggtccgtggacctctctaaattcaccgactacggtgagctcaaagcggaactagacaagatgtttgagttcgagggcgaattggtatctgctaaccggaactggcagatcgtttataccgacaacgagggtgatatgatgcttgtcggagatgacccgtgggaggagttctgcaacatagtgcgca

SEQ ID NO: 25009 - DNA, 240 bp, Zea mays
ctcacgcgtccgcccacgcgtccgcttccagtccccgcgcgcgagatcgccgccccgtgtgggccctagatcccgatggcctcgcgccgccgcaccctgctcaaggtcatcatcctcggcgatagtggggttgggaagacttccttgatgaaccaatatgtgaacaagaagttcagcaatcagtacaaggctacgatcggcgcggatttcctcaccaaggaggtgcagttcgaggacagg

SEQ ID NO: 25010 - DNA, 228 bp, Zea mays
ccacgcccaccgccccgcatccaccccgaaaccctagtggatcgtcgccatggccgcagccgccctcattcgccgcctccccgctgcccgggcccaggccccggcattcatggcggcgcgaccgatctccgactccacggcagcgttcaccatcgagacatctgtccctttcacctcccacctcgtcgacccaccctcgcgtgatgtcaccaccacccccgctgagct

SEQ ID NO: 25011 - DNA, 192 bp, Zea mays
caccccccgagctcagcttagctccactccagctccaatcacagtcgtgaccagagcgcgagactagctacacggccgtgaaaatgccgatcaataggatcgccctggggacccaccaggaggtgtaccacccgggcgccctcaaggcggcgtccccgaggtcatctccaacctcatcctcgtcgtcggcgg

SEQ ID NO: 25012 - DNA, 225 bp, Zea mays
atcatcttctacttccctctcgatatcatcaagttcctcatcagatatgctcttagtgggaaagcgtgggatcttgtcattgagcagaggattgcgttcacaaggaaaaaggactttggtacggaggagagggagctgaagtgggcacatgcacagaggaccctccatgggctacaggcacctgatgccaagatgttcccagagaaggctgggtacaatgagctg

SEQ ID NO: 25013 - DNA, 231 bp, Zea mays
ggaaaccctagccgccatatctcacgatccactcgagcaccaagcagagggaaggtgaggagcgatggcgcgcggcgtggtgtcggcgaagggcggcgcggtcgcgggcaagaagaaggggtcggtttccttcacgatcgactgcaccaagccagtggaggacaagatcatggaggtcgcctcgctcgagaagttcctgcaggagcgcatcaaggtcgccggcggcaaggc

SEQ ID NO: 25014 - DNA, 217 bp, Zea mays
ggaattctatagaatatagaagtgccagtacgaggccaaatacctttcctgattgtaagtcatccaaaagttgttgtagtttcatgtggaaaacacgaacaataatatcaggtctatcatttggatgctcacctagtaataaacatgttgttatctcaggccatttagggttacaagtgcatgtaataaaaagatctggtggcccatagcacaacaa

SEQ ID NO: 25015 - DNA, 220 bp, Zea mays
cacagagcaggctctccctgacgacctaatcaagagaggcatggcggttgccgacccgtcgagcccgtacaaggtacggctgctggtggaggactacccgtacgcgtcggacgggctggccatctggcacgccatcgagcagtgggtgacggagtacctcgccgtctactaccccaacgacggcgtgctgcgggcggacgtggagctgcaggcgtggtgg

SEQ ID NO: 25016 - DNA, 218 bp, Zea mays
ggcttcgccaaccagtccgtgcccgtctacctctcggagatggcgccgacgcgctccgcgggatgctcaacatcggcttccagctcatggtcaccatcggcatcctctgcgccaacctcatcaactacggcaccgccaagatcaggggcggctggggctggcgcgtcacctcgcgctcgcggccgtgccggcggccatcatcgccgtgggcgcgctct

SEQ ID NO: 25017 - DNA, 220 bp, Zea mays
ggcagcagcacaagcaagaaccacacctcctcccttcgcctgtgatcatgtcgtcttgctgcggcggcaagtgcgggtgcggctccagctgctcctgcggcagcggatgcaacggctgcggtatgtaccctgacgtggagaccgccgccaccagcagcgtcaagaccacggtcctcgccgcgccgaccaccaaggccagcgccggcggcttcgaggcggc

SEQ ID NO: 25018 - DNA, 219 bp, Zea mays
cttgatctggacgctgttgaggcgctcatccagggtttactcatttttcaaggaggggtgctgatggtgagtcacgatgagcatcttatcactggaagcgtggacgagctttgggtggtgtcggaaggcagggtgaccccgttctcgggcactttcaaggactacaagaagatgctcaagtaacaaaaacatgtattatcgaccatagcctatatatct

SEQ ID NO: 25019 - DNA, 212 bp, Zea mays
gttggtttatcaggatctcctatctggcgacgagctcctgtcggattcattcacctacaaggagctcgagaacggcgtcctgtgggaggtcgagggaaagtgggtcacccaaggtcctgttgatgtggacattggtgccaatccatccgccgagggtggtgaggacgaaagcgttgatgacacatctgtaagggtgttagatattgtagaca

SEQ ID NO: 25020 - DNA, 218 bp, Zea mays
cccctgtgttgtccctcgagctgttcctatggtggaatccatggctgcactggtcctgatggaccagctcatggcgcatattgcccagtgtgagatgtttccgctgaaccttgccctacaagagcccattggctctgctagcagtgcatctgaactgtcaccaaacctatcataatgtttgtcgtggaacatgtcccagctttccttcgaccgaaatt

SEQ ID NO: 25021 - DNA, 112 bp, Zea mays
cccacgcgtccgccacgcgtccgcccacgcgtccggaggttctccggggttcggtttcgtgggtgggatgatcgagatggcggcgtcggatgttgagtaccgctgcttcgtc

SEQ ID NO: 25022 - DNA, 226 bp, Zea mays
cccacgcgtccgtgtagacattggtgccaatccatccgccgagggtggtgaggacgaaagcgttgatgacacagccgtgaaggtggttgatattgttgacacattccgtctacaggagcaacctccttttgacagaaatcatttgtctcttacattaaaaaatacatcgagaatctcactgctgtgttggagccagagaaagcggatgatttcaaaaggggtgtcg

SEQ ID NO: 25023 - DNA, 232 bp, Zea mays
ggagccgccgtcgcagcaatcacagcagcccggagaacggccaggtccgacaagatgcagatcttcgtgaagacgctgacagggaagaccatcaccctcgaggtcgagagcagcgacaccatcgacaatgtcaaggccaagatccaggacaaggaagggatcccgccggaccagcagcggctgatctttgccgggaagcagctggaggatggccgcacccttgcggactata

SEQ ID NO: 25024 - DNA, 225 bp, Zea mays
cggacgcgtggctgacatctcggaggaccctgctgaagagattagggaggcgcccaagcgggacacgagtgaggggcagtaaagccggctttatgtgcctagaaactagtagctagtgtttgctgctgtcgaatgacactatgcaatgtgatctggaacctggtttcttgggtgcgacgcttgtagccgtgttatgactgtcgtccgtaaaatttgggggctccc

SEQ ID NO: 25025 - DNA, 229 bp, Zea mays
gtgtgtcgttggaagagagacgacggcggccatggcgacctccttccaggggacgaccaccaagtgcaccgcctgcgacaagacggtgtaccttgtggacaagctcaccgccgacaaccgcatctaccacaaggcctgcttccgctgccaccactgcaagggcaccctcaagctcgccaactacaactccttcgagggagtgctctactgcaggcctcacttcgaccag

SEQ ID NO: 25026 - DNA, 231 bp, Zea mays
cccacgcgtccgattgaagccctgtacaagaaggttcatgctgccatccgtgctgatccttcggttgttaagtcaaccaagcagccaccaaaggagcataagaggtacaaccccaagaagctgacatatgagcagaggaaggccagcctcattgaaaggctcaaccaactcaactcctccggtggtgctgatgacgacgatgaggacgacgagtaaagtttagtgccatcg

SEQ ID NO: 25027 - DNA, 225 bp, Zea mays
gtgcagcgcaagtacatgatctacaactactgcaccgaccccaagcgctaccagcagggcctccccgccgagtgctccatgcagtagcgcccggttattcctcgcccgtccaacaatggcgcgcgcgcgcgtgtgtgtgcatgtggtccgctctactgctaccgctacgacgatcggtgtcgatcaccggatcaaggcaagacgaaaggcatcgaaacatggtag

SEQ ID NO: 25028 - DNA, 228 bp, Zea mays
gccaccacggcaagttcaagcacgggcacggcaagttcaagcatggcaagcacgggcacggcatgtttggcggcggcaagttcaagaagtggaagtgatgtgccctccatggttgatcgtagctgaactcaggcttccaggacatgtgttgcctgtaataccttttcagcgttactcatccttcatctgtatttccagtaatccagcttgtggcgagtgacataatgc

SEQ ID NO: 25029 - DNA, 190 bp, Zea mays
ccccatccgcacctctctccatctccctgctcctccgccttcttcttgatccagccaagccagggatcgccatgtcggactcggaggagcaccacttcgaatcgaaggccgacgccggagcgtccaagacctacccgcagcaggctggcaccgtccgtaagaacggcttcatcgtcatcaagaaccgccc

SEQ ID NO: 25030 - DNA, 210 bp, Zea mays
caatccgaaatctcgagcgctcgcgccggcgaccacagcaaagaggaggccgcagcacgacagcgccccagggttcctactctcgtcgcagcggcagcactggtagcggcacagtgaggggaagatgtcgtcggtgttcagcggcgatgagaccgcccccttcttcggcttccttggcgccgccgccgcgctcgtcttctcatgcatggg

SEQ ID NO: 25031 - DNA, 222 bp, Zea mays
gccgctggcgatgcgggaccccgaggtgttcgagcggcccgaggagttcgtgccggaacgcttcctcggcgacgacggcgccaggctgctgcagcacctcttctggtccaacgggccggagacggcgcaccacggacccgggaacaagcagtgcgccgccaaggaggtggtggtggacacggcgtgcatgctgctggccgagctgttccggcgctacgacga

SEQ ID NO: 25032 - DNA, 187 bp, Zea mays
ctcgtccaagaaccccaacgtgttcttcgcccggaagcagaaccggtacgggccaatcttcaagacgcacatcctgggctgcccctgcgtgatggtgtccagcccggaggcggcgcgcttcgtgctcgtcacgcaggcccacctcttcaagcccaccttcccggcgagcaaggagcccatgctgggg

SEQ ID NO: 25033 - DNA, 236 bp, Zea mays
cagacgctgggtgagagggaacatactaggtcaactggcagctgctgtgccacaaacgctgacagttaacccagaggaacgggaggctatccagcggctcgagggaatggggttcaaccgtgagcttgtgctagaagttttctttgcatgcaacaaggacgaagagcttacagccaactaccttctggatcatggccatgagtttgacgagcagcagcaatagacgtggggtggat

SEQ ID NO: 25034 - DNA, 236 bp, Zea mays
ctaccatggaattgcacggatcttgaccaagaccttcacgtctgatttccctcatgtcgagaggtatttctggaccatggttaaccagcctaacttcaagaaggtcattggtgaggtcaagcaggcagagtctgcacctcctattccgaaaaaggctgctccttctaaggagccaaaggcaaaggatgtcagaaggaggctccaaaggaggcccccaagccaaaggtggttgaggc

SEQ ID NO: 25035 - DNA, 234 bp, Zea mays
aggaggcctgacatgctcactgacacgtttgggtttggccggatcatacatgatgggctcatgttcaggcagaacttctccattaggtcctatgagattggggcagataggacggcatctatagagacgctgatgaaccatttgcaggaaacggactcaatcatgtgaagaccgctgggctgctaggtgatggatttggctccacaccagagatgagtaaacgaaacttgttct

SEQ ID NO: 25036 - DNA, 224 bp, Zea mays
ccatgctcttttgctcctccgccagcttcatggtggacgacatgcccatcagggacttccgcaacctggagagcaagggggtggcgttccccaagagccagccgatgcggctctactccagcctgtggaacgcggacgactgggcgacgcagggcgggcgcgtcaagacgactggtcccacgcccccttctccgcctcctaccgcgtgttcaaggccaacgctt

SEQ ID NO: 25037 - DNA, 236 bp, Zea mays
gagtactcatatgttaatgcaccattgcagaaggagctgttggctgatgaggtggggaacacagctgcattcctggtttcttcattggcttctgccatcaccggctcgactgtttatgttgacaatgggctcaatacaatggggcttgcaattgacagccctaccataacgtcatagatgtggtttgtggtagatagacgacctttcctgctgcattgcggtatcatccttgaata

SEQ ID NO: 25038 - DNA, 233 bp, Zea mays
gaggcaccttcattgctgacctctcagttggcctgtctacgggccaaatcaagacgggagccccttgccggtctgagcgcctggccaaatacaaccagctgctcaggatcgaggaagagctcggtgatgccgcggtctacgccggagcaaagttcagggcaccagtggagccctactaagaaaggaagaggatgaggatgttttcttgtggagctatactagctcgctgctgc

SEQ ID NO: 25039 - DNA, 234 bp, Zea mays
tgcacggcatcttcaaggccgccagcttcggcgggaccaacatcgacccgacggcgtgggaggacaagaagtgccccggcgagtcgcgcttccctgcacaggtgcgagtggcaacgcggaagatctacgatccactggaggaggacgccttccgccccatccttcaccactacgacgggcccaagtttcggctcgagctctccgtcgccgagaccctcgccctcctcgacatct

SEQ ID NO: 25040 - DNA, 233 bp, Zea mays
cacagaagcggcggcggcggacaaacgcaggcgaaggcgagggtgtgagggaaggagcaccagccatggtgcacgtcaacttctaccgcaactatggtaagacgttcaagaaaccaaggcgtccttatgagaaggagcgtcttgatgctgaactgaagctggtcggtgagtatgggctgaggtgcaagcatgagctttggagggtccagtatgcactgagcaggatccgtaat

SEQ ID NO: 25041 - DNA, 235 bp, Zea mays
caacgtcatcgtgccggcgttcgacgtcaagtccctgcagcccatcatcttctcgacgtacgaggccaagaccgacaccctcaagaacgcgcacctctccgacatctgcatcagcacgtcggcggcgcccacctacttcccggcgcacttcttcaagaccgaggccaccgacggccggcccccccgcgagtaccacctcgtggacggcggcgtcgcggccaacaaccccaccatg

SEQ ID NO: 25042 - DNA, 130 bp, Zea mays
ggcacctctgcccatctcttcgcagtgttccagggtctgctgaaagtgttggctgggattgataccaacttcacagttacctcaaaggcatctgatgaggatggcgactttgctgagctataagtgttcc

SEQ ID NO: 25043 - DNA, 230 bp, Zea mays
aagaccctggactaccagaagatcttcgacaacatgcagaagcccgccttcgtcttcgacggccgcaacatcgtcgactccgagaagctgagggagatcggcttcatcgtctactccatcggcaagccgctcgacgcctggctcaaggacatgcccgcggtcgcctaatcccacccccctcacccatggattggattccgggaaggaagaggagagaagctggttgaccg

SEQ ID NO: 25044 - DNA, 227 bp, Zea mays
aaatgattgaatgggatccgtggggtgtccctgatgactacgaatgtgaggagattgaagacgacaccccaattcctaagcatgtacctcagcaccggcccgttgctcttcctgaggagttcttcaagacactagatgccgtcaaatcagatcccgccctccaaggcgatgctcctcctcaagtgaaggcgtaaagatgagtcttcccggttatgtcttatgtcatt

SEQ ID NO: 25045 - DNA, 226 bp, Zea mays
ttgctctacgaggccaattcgtataggacctgcgactcccagaagatcttcaggtgattctggctcctcgactcctggtcattcagatggtgattcttctaacagaacggtatatgttggtgggcttgaccccaatgtcagtgaagatgaactgagaaaagcctttgccaaatatgatcttgcctctgtgaaaattcctctaggaaagcaatgtggctttgttcaa

SEQ ID NO: 25046 - DNA, 184 bp, Zea mays
gcatcggcgcggccctgaggcgcaacatcgacgagttcctccaggccaagctcggcgtgtcggccgacgaggccgccgccacgcacgccgagctcttccgcgcgcacggcagctccctcgccgggctcatcgcgctcgggtacgacgtgcacccggacgagtaccacagctacgtgcacggcag

SEQ ID NO: 25047 - DNA, 129 bp, Zea mays
cttggttccattgaaattcttttcagcaggcattgtcccatatggtatggctatggaggtcggcttaaattcctggagagatttgcttatatcaacacaacaatttatccactcacatcattccggtcc

SEQ ID NO: 25048 - DNA, 216 bp, Zea mays
cccgattgctgatgcttcacaatcaccttctcgctggccattagaattcgagaagaaacagcaagagatcatcgggctttggcacgcgtgctgtatttccttagtccacaggacctactttttcttgctattcaagggagaacaagctgattcaatctacatggaagtggagctccggaggctatcattcctcagagatacctactctcggggaaa

SEQ ID NO: 25049 - DNA, 165 bp, Zea mays
caagctgcccgacatccccgccctcgaggagttccgcaagcagttcccgctacagatggtcaaggacctcatgcccgccggcggcgactacgtcctcaagctcgccatgcccaaaatcatcaaagaggacaagaaagcttggatgagtgacgaggagttcgcaag

SEQ ID NO: 25050 - DNA, 246 bp, Zea mays
cgagttctcctcaaccaaattcaaggtcacagcggcgaacctctcggctatcatgtctggccgcggcaagggcgggaagggtctgggcaagggcggcgccaagcgccaccgcaaggtactgcgcgacaacatccagggcatcaccaagccggcgattcgcaggttggcgaggaggggcggcgtcaagcgcatctccgggctcatctacgaggagacccgcggcgtgctcaagatcttcctcgagaa

SEQ ID NO: 25051 - DNA, 224 bp, Zea mays
cccacgcgtccgcccacgcgtccgaagagatgctcctctactagaatctgttggaccacaaaagtgtcatgctttcagcacagatggtgcaaaatttgcaattggtggagaggatggacatctcagaatattccattggccaagcataaaagtgcttttggatgagcccaaagctcataaatccttccgagacatggatatcagcttagactcagagttcttag

SEQ ID NO: 25052 - DNA, 99 bp, Zea mays
cccgactggagcatgctccttgctgccatcacgaccatcttcttggccgccgagaagcagtggacgatgcttgattggacacccaggcggcatgacatg

SEQ ID NO: 25053 - DNA, 232 bp, Zea mays
aaagctttttgaagggactccacagcagatgtatgcctcactccagaaaattacagctctacccgatgatacaaaagtatactgtgggcatgaatataccttgagtaatgcaaagtttgccttgagtgtagaaccgggaaataaagcattgcaggaatatgctgcaaatgcagctgagctgcgtaataagaatatacccacggtgccaacaacaattggaagggagaaggat

SEQ ID NO: 25054 - DNA, 237 bp, Zea mays
cgcaaggcttttgatgaagggccatggccgaagatgactgcctatgagaggtcccgtatcctactgcggtttgctgatttgatagagaagcacaatgacgagcttgctgctttggagacatgggacaacgggaagccatatgagcaagcagcccagattgaaatacccatggtggcccgtcttatgcgttactatgctggttgggctgataagatccatgggctcattgtgccggct

SEQ ID NO: 25055 - DNA, 108 bp, Zea mays
gacctcctcagacccgagaagcgcactgcgtgccatggacgccaccggcactggagctggagggaaggcgaagaagggagcagccggtcgcaaggccggcggaccgaa

SEQ ID NO: 25056 - DNA, 227 bp, Zea mays
cgcctcttctcctccctcctgccgggtccttaataaagagcagcagcgcaagaggttggtagagcgagcgagaagaaggcaatggcggcggagagcttcctgttcacctcggagtccgtgaacgaggggcacccagacaagctgtgcgaccaggtgtcggacgcggttcctgaaggcttcctggcgcaggaccccgacagcaaggtggcctgcgagacctgcaccaa

SEQ ID NO: 25057 - DNA, 230 bp, Zea mays
cagagtgtctgaaacaacggtgtggaggctcttggaagcatgttcttgggtacattctggttagggagaagaatggttctcgggtgattgccgggccaggccacagcatcattatcacctcaaatggagatgtatattcgtttggagcaaactgctccggtcagcttggccttggggattcagaagaccggttcaagccatgtgttattaggtctctacaaggcatcaga

SEQ ID NO: 25058 - DNA, 226 bp, Zea mays
cccacgcgtccgcccacgcgtccggaagggagttgccaggagcatgccaacatctgctgctcttgatgttgttgcaaagaatttgaaccttaagttctttgaggtgcctactggatggaagttttttgggaatttgatggatgctggaatgtgctcaatctgtggtgaagagagctttggcactgggtctgaccacattcgtgagaaggatggcatctgggctgtg

SEQ ID NO: 25059 - DNA, 225 bp, Zea mays
ggaccgtggtcacaatacaacaaattagcctcggtaactctttatgtttgtggttttgcagccgggtctgcgcgaaccctcacggtctgatcaggaagtacgggctcatgtgctgcaggcagtgcttccgcagcaacgccaaggacattggtttcatcaagtaccgttgaagaggccactgtgctgctgtggagaacttcctacatcaaagaaatgggtccttca

SEQ ID NO: 25060 - DNA, 230 bp, Zea mays
cccacgcgtccgtcccaatctcgcgagggcaagcagcagcggcaggttcgtcgccgtcgcctccatgacgtccgccgtctccaccaaggtcgagaataagaagccatttgctcctccaagggaggtacatgtccaggttacacattcaatgccacctcacaagattgaaattttcaagtcacttgatgattgggctagagataatatcttgacacatctcaagccagtcg

SEQ ID NO: 25061 - DNA, 226 bp, Zea mays
gaccgaagctctatgtgggttccaatttgttcttacacatctggacaacaggcagcttctgatcaaatcaaaccccggcgaagttgttaaacctgaccaattcaaggcaataaacgacgaggggatgccgatttaccagaggcccttcatgaaggggaagctctacattcatttcacggtggagttccccgactcgctggcaccagagcagtgcaaggctctcgag

SEQ ID NO: 25062 - DNA, 229 bp, Zea mays
cccacgcgtccgcccacgcgtccgagacaaccagtacaccaccgccaccaagcccgggccgaataactctgccgggcaaccgccgcccttcgccggcaaagaacgcccaccagatccaccccggcctgctatggagtccgcggtgaacccgaatgcgtacccgctggctgatgcgcagctgacgatgggtatcctcgatatcatccagcaggccgccaactacaagcag

SEQ ID NO: 25063 - DNA, 223 bp, Zea mays
gaaggagaaaagcagttcttcagctaggagggcacaggaaggaggagatggcgtcaaagaggattcagaaggagctcaaggatctgcagaaggaccctcccacctcgtgcagtgcaggtcctgttggtgaagacatgttccactggcaggcaacaataatgggtccatctgatagcccatattctggtggagttttcctagtcacaatccattttcctcctga

SEQ ID NO: 25064 - DNA, 223 bp, Zea mays
ccacccagcacgacgagacagtgaccaatgatgagatcgctgctgacctgaaggagcatgtcatcaagcctgtcatccctgagcagtaccttgacgagaagaccatcttccaccttaacccatctggccgctttgtcattggtggacctcacggcgatgctggcctcactggccgcaagatcatcattgacacctacggtggctggggagcccatggtggtgg

SEQ ID NO: 25065 - DNA, 224 bp, Zea mays
cccacgcgtccgcccacgcgtccgatccaagctagcaaccggcgcgtctggtcgccgcccgccccgacccacgttagggcgttcgcgccccaagggcccgtgccgttgggtcagcccgcccggccgacgcgccgcggcgggccgcgtcggagctccgttcccgacgggcggcgtggtgggtcgtttgcagacgacttgaaacgcgacggggcgttgtaagtggc

SEQ ID NO: 25066 - DNA, 224 bp, Zea mays
cgcatccgcagcctttcgaggtctggtccaccccctcgatgtcgaagcgcacagcagcagtcaggcggccatggacgcgagcgcaccggagccggcgggaaggcgaagaagggcgcggccgggcgcaaggccggcgggccgaggaagaggtcggtgacgaggtccgtcaaggccgggctgcagtttcccgtcggccgcgtcgggcggtacctgaagaagggccg

SEQ ID NO: 25067 - DNA, 220 bp, Zea mays
ctccacagaggcactccctgcttccgcggttatggcaggcgtaatggtgagcgcaggaggaagtctgtccgaggttgtattgtgagccaagacctatctgttatcaacttggtaattgttaagaagggtgagaacgatctgcctggtttaactgacactgagaagccaaggatgaggggtcccaaaagggcctccaagatcaggaagctgttcaatcttg

SEQ ID NO: 25068 - DNA, 221 bp, Zea mays
cgaaaacacaaacgcacacaagcacacgacgcaagggtgacgactgacgagatggggagagagagatgcgaggaaggagggagagagcacgggggcttgatcgaagatggatgccggagcaaaggtggtgaagaaggccgcggcggggcgtcgcggcgggggcggccccaagaagaagccggtctctcgctccgtgaaggccggcctccagttccccgtag

SEQ ID NO: 25069 - DNA, 230 bp, Zea mays
accacccacgcgtccgcccacgagaccgacacaaccacaattggatacattcccacagactgtggaacatcaggagggttcgccgtagaatacaaggacaaaaagatcaccgaagacgaatacatcagtgcaatcaaggaaataatcagcaaggattgtcagatacaagaggaacttgacattgatgtgctatgtacatggagagccaaagagacatgacatggttgagt

SEQ ID NO: 25070 - DNA, 181 bp, Zea mays
cctgacggcaacggtggagtttatgctgcgctgaagtccaagaagctgatggaagacatggctgcgcggggagtgaaatacgtagactgctacggagtcgacaacgcgctggttcgagttgcggatcctacgttcttagggtacttcatcgacaagggtgtgtcttctgccgccaagttgg

SEQ ID NO: 25071 - DNA, 244 bp, Zea mays
cggacgctgggtgttcaaaccaccaaaggtggcattccgcaccaaggtgttccatccaaacatcaacaatcaacgggagcatctgccttgacatcctgaaggaccagtggagcccggcgctaaccatctccaaggtgctgctgtccatctgctccctgctgaccgatccgaaccccgacgatcctctggtccccgagatagcgcacatgtacaagacggaccggaacaagtacgagaacaccgc

SEQ ID NO: 25072 - DNA, 242 bp, Zea mays
gtctaaccttcaagctgcctacgctgccgctttcaagaatatcagaccaagtgccgataacttgcccgaggagctgtcagaaatcctaacatcctgctggaaggaagacccaaacgacagaccaaacttcacacagataatacagatgctcctacactacctatccaccctttcgccacaagagaccttggcgggcccccgccgcacgttcagttcggagaacacaatcctgcccccagagt

SEQ ID NO: 25073 - DNA, 237 bp, Zea mays
cccacgcgtccgtgcaaatgcagaacaatcatttaaaaccctggaggtggcctgccatgagcttcggaacagccgtctattcaagaagctgctagaggctgtactcaagactggcaaccggatgaacgatggcacctttcgaggtggggcccaggcgttcaagctggacaccctcctgaagctctcagacgtgaagggggtcgacggcaagacgacgctgcttcactttgttgtcca

SEQ ID NO: 25074 - DNA, 239 bp, Zea mays
gacccacgcgtccgcggacgctgggcttcaagcaaccaaatgaccggaatggtgcaatactggtggcaccgatgtgcaagaaagcagacgatgaggttccaccttggcccattcagcaagttctaatttttatggccaaacttctgccaaaagaaaagcttgttcctcaaaaggatttagctgagttggcattcaaagagaagaagaaacaagagcagtgttctttcaatgtgattgcc

SEQ ID NO: 25075 - DNA, 241 bp, Zea mays
cccacgcgtccggtacaaccaggagctggacctcaccctgcagcagcggatgcgctgggtgcagcgcaagtacatgatctacaactactgcaccgaccccaagcgctaccagcagggcctccccgccgagtgctccatgcagtagcgcccggttattcctcgcccgtccaacaatggcgcgcgcgcgcgtgtgtgtgcatgtggtccgctctactgctaccgctacgacgatcggtgtcga

SEQ ID NO: 25076 - DNA, 203 bp, Zea mays
cgttagattggaactccagaatgaagatcatccttggaacagcatatggaattgcacatatacattcagaagggggcgcgaactcacccatggcaatgtcaagtcaaccaacgtactcgtagaccaagatcacaatccttccgtctcggactatggcctcagcgctctgacgagtgtgccggtcaacgcatctcgcgtcgtgg

SEQ ID NO: 25077 - DNA, 235 bp, Zea mays
gccaccacggcaagttcaagcacgggcacggcaagttcaagcatggcaagcacgggcacggcatgtttggcggcggcaagttcaagaagtggaagtgatgtgccctccatggttgatcgtagctgaactcaggcttccaggacatgtgttgcctgtaataccttttcagcgttactcatccttcatctgtatttccagtaatccagcttgtggcgagtgacataatgctaataag

SEQ ID NO: 25078 - DNA, 225 bp, Zea mays
  unsure (1)..(225): unsure at all n locations
tgcgtccacacgtctnccacgcgtccgcggacgctggcgaccgtggtttcccgtcctgtccttccaccatgcggcttaaaccctagttctcactcccatcgccgcttcagctccgccgctgcagatggagttctggggtctcgaggtcaagcctggttccactgttaagtgtgagcctggatatggctttgtgctgcacctttcccaggctgctcttggggaatc

SEQ ID NO: 25079 - DNA, 228 bp, Zea mays
cccacgcgtccgctgctccgcctaccccacctccggcggcctctacttctggagcgccaggctctgcacccaccgccgctggggacccttcgccgcctggctcaccggctggttcaatgttgtcggacagtgggcggtgaccaccagcgtggactactccctggcgcactgatccaggtgatcatcctgctcgccaccggcggcaagaacggcggcggctacctggcg

SEQ ID NO: 25080 - DNA, 234 bp, Zea mays
gctcaacggcttcccacggtaacatcaagtcatccaatgtcctcctgggcgaatcgtatcaagcacacgtatcagacaatggccttaccgctcttgttggtccatcgtcttcaccgtctcgcgccactggataccgtgcacccgaggttattgatccccggagggtttcccagaaggcagacgtgtacagcttcggtgttctgttgcttgagctggtcacaggcaaggccccca

SEQ ID NO: 25081 - DNA, 236 bp, Zea mays
gccgccgccgccggccgacgactccaaggccctggccatcgtcgagaaagttgcagatgaacctgctcccgagaagcctgcccctgcgaacaagggggctccaatgacagggatctcgctcttgcaagggtggaaacagagaagaggaactctttgatcaaagcttgggaagagaatgagaagacaaaagctgagaacaaggctgctaagaaagtatccgctattctttcatggga

SEQ ID NO: 25082 - DNA, 235 bp, Zea mays
gccaccgccgctagaagaagagctcggcgattcccaggtcccgcgagaatatgccgaagcagatccatgagattaaggacttcctcctcaccgcgaggaggaaggatgcccgctcagtgaagatcaagaggagtaaggatgttgtcaagttcaaggtgcgctgctccaagtacttgtacacgctctgggtcttcgatgctgagaaggcaaacaagttgaagcaatctcttccccc

SEQ ID NO: 25083 - DNA, 232 bp, Zea mays
cccacgcgtccgcgtcatcaagaaccgtccctgcaaggttgtggaggtttctacctccaagactggtaagcatggccacgccaaatgccactttgtcgccatagacatattcaatgggaaaaagcttgaagatattgttccttcatcacacaactgtgacattccgcatgtgaaccgtactgagtatcagctgattgatatttctgaggatggatttgtgagccttcttact

SEQ ID NO: 25084 - DNA, 222 bp, Zea mays
cacagaagcggcggcggcggacaaacgcaggcgaaggcgagggtgtgagggaaggagcaccagccatggtgcacgtcaacttctaccgcaactatggtaagacgttcaagaaaccaaggcgtccttatgagaaggagcgtcttgatgctgaactgaagctggtcggtgagtatgggctgaggtgcaagcgtgactattggagggtccagtatgcactgagca

SEQ ID NO: 25085 - DNA, 137 bp, Zea mays
agttgctgcaccttcagaatcaagtccggagtccaagaagagcaaggatgacgatgattctgatgaggacgagactgatgattctgatgaggatgagacggacgattctgatgagggtttatcttctgaagaaggcg

SEQ ID NO: 25086 - DNA, 224 bp, Zea mays
cccacgcgtccgcggacggtgggaaaaccctagccctgcttctttgccatggcgagcagcgctagccaggcgagccacctgatccagaagcagctcaaggatcttgcgaagaaccccgtggatgggttctccgccgggcttgtagacgacagcaacatcttcgagtggcaggtcaccatcatcggaccgcctgacaccctatatgatggaggctacttcaatgc

SEQ ID NO: 25087 - DNA, 210 bp, Zea mays
ggacaagatcaggccactgtggaggcattacttccagaacacgcagggtctcatctttgttgtggacagcaatgatagggaccgtgttgttgaagcaagggatgagctccaccgaatgctgaatgaggatgagttacgtgatgctgtgttgcttgtttttgctaacaagcaagatcttccaaatgctatgaatgccgctgagatcactga

SEQ ID NO: 25088 - DNA, 227 bp, Zea mays
cgaaggatctcccaggaggtcagtggtgatgctctgggtgaggagtttaagggttatgtcttcaagatcatgggtggatgtgacaaacaaggcttcccaatgaagcaaggagttctgacttctggtcgtgtccgccttctgctccacagaggcactccctgcttccgcggttatggcaggcgtaatggtgagcgcaggaggaagtctgtccgtggttgtattgtgag

SEQ ID NO: 25089 - DNA, 227 bp, Zea mays
ctgaccgaaatcttctgggtatctgatagccacctttatcatgcgtatgcgtggctcaagcttttcaacctgcaaaagaactacaataaaaacttgtctcagaaggatctacaattaatagcatcttccgtcttacttgctgcactatctgtggcaccttatgacaaaaaatatggtgcatctcatcttgagacagagaatgagaaggagcgtaacatgaggatggc

SEQ ID NO: 25090 - DNA, 225 bp, Zea mays
aagtgatataacgcttgttggatggggagctcagcttgcggtgctgaaagaagcctgtgaagatgctgcaaaggatggggtgtcttgcgagctcatcgatctgaaaacactcgtaccatgggataaggaaacagtagaggcctcggtgaagaagaccgggaagctcctcgttagccacgaggctccagtcaccgggggcttcggcgcggagatcgccgcgtccat

SEQ ID NO: 25091 - DNA, 227 bp, Zea mays
cccacgcgtccggctagggttccgtcctcgatccgatccgccgagtgcacaccacctttccccactccgatcgaatcgatggccgccgagggcgagaagaagatgataaccctcaaaagctccgatggcgaggagttcgaggtggaagaggcggtggcgatggagtcgcagaccatccgccacatgatcgaggatgactgcgccgacaacggcatccctcttcctaa

SEQ ID NO: 25092 - DNA, 226 bp, Zea mays
attttagccgccgccgctgctcatctcacatccctcgagaagacgcctgctcctcgccgatcgatacgatggccgtcttctccgacctccacaccgccgacggcctcaagtccctcgaggctcacctcgccggcaaaacctatgtgtctggtgactccattactaaggatgacattaaggtcttcgccgcggtgccgtcgaagcctggcgctgagtttcctaatgc

SEQ ID NO: 25093 - DNA, 228 bp, Zea mays
ccggcaagggcgatggcccggctatcggcatcgatctcggcacgacgtactcttgcgtcggcgtgtggcagcacgaccgcgtcgagatcattgccaacgaccagggtaaccgcaccacgccctcgtacgtcgccttcaccgactccgagcgcctcatcggagatgcggccaagaaccaggtcgccatgaaccccatcaacaccgtctttgatgccaagcgtctcatcg

SEQ ID NO: 25094 - DNA, 228 bp, Zea mays
cggacgcgtggcgccgccgcgtccgcctcgcccagcgcacagccgccgcagcacatcgctatctcgacctcagccatggcggaggtggagcagcaacaggacacgccgaagctgttcaaccgctggaccttcgatgatgtccaggtgaacgacatctcgctgaacgactacctcgctgtgaacgcgacgaagcacgcgatgtacctgccgcacaccgcggggcgttac

SEQ ID NO: 25095 - DNA, 218 bp, Zea mays
gtttactttgttcccgaaacataatgtacattggcctgatgatgatcttacgactgaaacaataacttaggtcatctgcgaccacctgagcctgggagtcaagactggcctgccatacatctggcacagcaaggctagcaaccccttcgttaacttgaagaaggaatacaagggcatcttctggcaggaggacatcatccccttcttccagaacgtga

SEQ ID NO: 25096 - DNA, 218 bp, Zea mays
ggaccgtggtcttcaccaggtccttcgctgggcccttgggtccgtcgaaattttcttcagcaagcactgcccactttggtacggatacggcggcgggctaaaattcctggaaaggttttcttatatcaactccatcgtttatccctggacgtccattcctctcctggcttactgtaccttgcctgccatctgcctgctcacggggaagtttatcacac

SEQ ID NO: 25097 - DNA, 223 bp, Zea mays
ggaccgtggctaggttttttgattttagccgccgccgctgctcatctcacatccctcgagaagacgcctgctcctcgccgatcgatacgatggccgtcttctccgacctccacaccgccgacggcctcaagtccctcgaggctcacctcgccggcaaaacctatgtgtctggtgactccattactaaggatgacattaaggtcttcgccgcggtgccgtcgaa

SEQ ID NO: 25098 - DNA, 212 bp, Zea mays
cccacgcgtccgggacgctgggcccgacgcccgcacgctcgggatcaagaaggcgctcgtcttctacaccggcaaggcgaagcgcggggacaagacagactggatcatgcacgagtacaggctcgctgacgccggccgccgcgccaagaaggggtcgctcaggttggatgactgggtgctgtgccggctgtacaacaagaagaacgagtggg

SEQ ID NO: 25099 - DNA, 217 bp, Zea mays
gtcgttgagccttaaccagctcaccaccatgtttgatctcagcgagcagcatgcccacagtattgttagcaaaatgatgatgcatgaagagcttcaggctagctggcaccagccaacaaagtgcaccgtgtttcacagcctggatcaaaccaggcttcaggagctactcttccaggttgcagaaaaaatatcggtcctggtggagacaaacgagagg

SEQ ID NO: 25100 - DNA, 217 bp, Zea mays
cccacgcgtccgcattcattgcgctcgctgcagggtcccttggcacattgaaggtggcatgcttttgttggaattgaaccgcttgttacgccctggtggttactttgtctggtctgccactcctgtttaccaaaagctcccagaggatgttgagatttggaatgccatgtctactttgacaaagtccatgtgctggaagatggtcaacaagactaag

SEQ ID NO: 25101 - DNA, 215 bp, Zea mays
cccacgcgtccgcggacgctgggtcacagcacaaatcatatctgctagtatagcaggtgatatggttcttgcttctgcttactcgcatgagatgccacgatatggtctcgaagttggtctgaccaactatgcagctgcctactgcactggccttctgttagctcgccgtgtgctcaagacccgtggtttagataaggaatatgagggcaatgttg

SEQ ID NO: 25102 - DNA, 218 bp, Zea mays
cccacgcgtccgcccacgcgtccgcgatttctctctcaaccaggctagatccatccggtggaacctgacagcgagtggaccaaggccaaaccctcagggttcctaccactacggtctcgtcaacaccacaagaaccatcaggctcgccaactcgcgggcaaccatcaacggcaagctgagatacgcagtgaacggcatctccttcgtcccggccgaca

SEQ ID NO: 25103 - DNA, 221 bp, Zea mays
caatgttgttgttgagatcacaaagggaagcaaagtcaaatacgagcttgacaagaaaactggactgattaaggttgatcgagtcctttactcatcagttgtataccctcacaattatggtttcattccaaggactctttgtgaagacaatgacccaatggatgtgttggtcctgatgcaggagcctgttgttcctggttcgttcctgagagctagagcaa

SEQ ID NO: 25104 - DNA, 125 bp, Zea mays
caagtatgcaaaatcggcagaagttctggtcacacaactggaactgtggtggcttatgcccttgagtacaatgacgagaaaggaataagcttcttcactgacctccttgttgtcggcgaaaaccg

SEQ ID NO: 25105 - DNA, 125 bp, Zea mays
gagagcaccctccacctggtgctccgtctcaggggtggcatgcacatctttgtgaagacactcactggcaagacaatcacccttgaggtggagtcttcggataccattgacaatgtcaaggccaa

SEQ ID NO: 25106 - DNA, 198 bp, Zea mays
cccacgcgtccgcttcagctatgcaagctacgaggtcatgggctttaacccgggctctttctcttatggtgacctggttaagagggtgctgaggtgctttggtccaactgagttctctgttgccgtgaccatcttcggtgatcgggacaatgcgaagacctgggggacgaaactggatgctgaggcctatgcttgcag

SEQ ID NO: 25107 - DNA, 249 bp, Zea mays
cacgtcatcaagcccgtgatccctgagaagtacctcgacgagaagaccatcttccacctcaacccgtccgggcgcttcgtcatcggcgggccccacggtgacgccggcctcaccggccgcaagatcatcatcgacacgtacggcggctggggagcccacggcggtggcgccttctccggcaaggaccccaccaaggtggaccgcagcggcgcctacgtggccaggcaggccgccaagagcatcgtggcc

SEQ ID NO: 25108 - DNA, 243 bp, Zea mays
acactcttgaatctgagattacccaagacgccactctgaagctgctacattcactggatccaattaaaaataaggacaccaaggataggggcacattacatcttaaggtaaagtaccacccctttacaaaggaagagcagctggaagccctagagatggaaaaacaagccatagaggagaagaagcgtctgaaggaggctgggataattggtagcacaatggatgctgttggttctggtgttg

SEQ ID NO: 25109 - DNA, 168 bp, Zea mays
gcatgccgggcgcctccgcgtgctccaacccggcggcgcacctcagctgggacggcatccacctcaccgaggccgcgtacaagcagatcaccgacggctggctcaacgggccctactgccgcccggccattctccacagctaaagcgacagggggggccggttaatta

SEQ ID NO: 25110 - DNA, 243 bp, Zea mays
cgcagttgtcttcggtcttccgtgctcaccttcgagagatcaagttgctgctgcggtagtccccaaccatcatcatgcagaacgaggagggtaagacggtggacctctacgtccccaggaagtgctcggccacgaataggatcatcactgccaaggatcatgcctctgtccagatcaacattggccacttggatgcgaatggcctgtacgatggtcacttcaccacgtttgctctctctgggt

SEQ ID NO: 25111 - DNA, 117 bp, Zea mays
tgcaagtcagggataaggctttgttacttctggattcatggcaagacgcatttggtggacctggtggcaaatatccacagtactactggtcatacattgaactaaagagggcaggag

SEQ ID NO: 25112 - DNA, 249 bp, Zea mays
cccacgcgtccgcaaaccagcgcaagcccttccctgacagcggcggcgacatggtgctcgaggcgacgatgatctgcatagacaactcggagtggatgcggaacggcgactacgccccgtcgcggttccaggcgcaggccgatgccgtcaacctcatatgcggtgccaagacccagtcgaacccggagaacacagtaggcgtgatgacgatggccgggaagggcgtccgcgtgcttgtcactcccacca

SEQ ID NO: 25113 - DNA, 253 bp, Zea mays
cggacgcgtggggcagtaccggaggaaggagcaggaagatgccggcggggcacgggctgcagtcgcggacacgcgacatgttcgcgcggcccttccgcaagaaggggtacatcccgctcaccacgtacctgcgcacctacaagatcggcgactacgtcgacgtcaaggttaacggcgccgtgcacaagggcatgccgcacaagttctaccacggccgcaccgggagcgtctggaacgtcaccaagcgcgccat

SEQ ID NO: 25114 - DNA, 220 bp, Zea mays
ccaagtacctgatgagcatgtgaatgagtttaaatcaatcgagaagtttaagatattcaacactaacaacttgtgggtgaaccttaaagctgtcaagagactagtagaggctgaggcacttaagatggaaattattccaaaccccaaggaagttgatggtgtgaaagtccttcaatttgaaactgcagctggtgcagctattggtttcttagacaaagcg

SEQ ID NO: 25115 - DNA, 108 bp, Zea mays
ggaccgtggtgccgcctcaccgcctctctcaatctgataccgcagatccgtcgtccggtgagtggaaaccgcacgaacccatggcctccggcgagcttgcctgcacct

SEQ ID NO: 25116 - DNA, 223 bp, Zea mays
atgccttctgattgaaccatttcctgaatctgcacttaatgaacaagctgggaagatgttacttgaaaattatgaggaatatgcacgacatgcaaggttatacactggcatccatgcccttaaacctaagaatatgtccaagaccggagctatatctgagtcaaccacagctctgaatgtcgacaagtcaagtactgcctctagcaagaacacaccatcgatg

SEQ ID NO: 25117 - DNA, 236 bp, Zea mays
cggacgctgggcggacgcgtgggtgccttgcccgttggaacagtcagtggtgcaccaaaggtgaaggccactggagttgattaataagttggaagttacgaggcgaggaccatatagtggtggtctaggaggaatatcgtttgatggtgacatgcaaattgcactttctctccgcaccatcgtattctcaacagcgccgagccacaacacgatgtactcatacaaagacgcagata

SEQ ID NO: 25118 - DNA, 236 bp, Zea mays
ggataatgctgagggacaagaggttgaggcagcagctgaggaaacgaaaaagaacaaccatgtcacgaggaagcttgagaagcgcaaggagggacgtacccttgacccacacattgaggagcaatttggcagtggacggttgctggcatgcatttcttcccgccctggacagtgtggccgagctgatgggtacatccttgagggtaaagagcttgagttctacatgaagaagctac

SEQ ID NO: 25119 - DNA, 200 bp, Zea mays
cggacgcgtggtgcaagatgctgcaaaggatggggtgtcttgcgagctcatcgatctgaaaacactcgtaaccatgggataaggaaacagtagaggcctcggtgaagaagaccgggaagctcctcgtatgcagctcgtctcgctcgttagccacgaggctccagtcaccgggggcttcggcgcggagatcgccgcgtcca

SEQ ID NO: 25120 - DNA, 229 bp, Zea mays
gcggtgtatccagcaacagcgtatgcaatgcctcagctccaggcagttctccctgacagtgatcctacaaacactacgatatttattgggaatttggacccaaatgtgatagaagatgagctgaggcagatatgtgtacagtttggagaacttatatatgtgaaaattcctgttggtaaaggatgtggttttgtacagtatgcatctagggcatcagctgaagaggcag

SEQ ID NO: 25121 - DNA, 218 bp, Zea mays
caactcctccccaaatccacgctgccaccaactcgccgtcctccgcgccaagcaccagagctccgatggcccgcactagacagacggcgcgcaagtcgacgggcggcaaggcgccccgcaagcagctggcgaccaaggcggcgcgcaagtctgcgccggccaccggcggcgtgaagaagccccacggcttccgccccggcaccgtcgcgctccgggag

SEQ ID NO: 25122 - DNA, 238 bp, Zea mays
ggacctggtgacaggatagtcattgtggcctccggtgtatgcacaggatggcgtgacaccttggggtggggggttgcaaatctttcactatcatggtgccaggaccgcatgaatgacttggtgatatcactggctcacaaattcacgaagctgcaagttctatctctacgccagatcaggcctcagctagaagacagcggcgtggaggccgtggcaaaccactgccacgacctgcgcg

SEQ ID NO: 25123 - DNA, 238 bp, Zea mays
caacagacgcaacaagtttgatcctctctggaactcactcgtacttggtggagtgaaaaagggtccaaagggtgatgagaagtatcttggcatggttaatatgattggtacccacttcgaggaaaaccatgtcgcaactggatttgcaaatcatctggcgatcccgatactccgtgctgaatggcgcgaggatatgacttttgaagaagctgttaagctggttgagaagtgcttgctg

SEQ ID NO: 25124 - DNA, 241 bp, Zea mays
cattcccccagaccagcagcggctcatctttgctgggaagcagcttgaggacgggcgcacgcttgccgactacaacatccagaaggagagcaccctccacttggtgctgcgcctcaggggaggcatgcagatcttcgtgaagaccctgaccggcaagactatcacccttgaggtggagtcttcagacaccatcgacaacgtcaaggccaagatccaggacaaggagggcatcccaccggac

SEQ ID NO: 25125 - DNA, 243 bp, Zea mays
tggagatctgtgtgcattctgtgaaagacagtgcatgaatccttatcaatctgatgaaaggggggtacatgtcaagctatgcaagaaaaacaatagagttcttgaggccatgagaagaagtgaagacatagaatgtggtgtgtgcttggaccgtgtgctttcaaaacctacggcagcagaaaggaggtttgggctgctatctgactgcgaccattccttctgtatctcatgcattaggaattg

SEQ ID NO: 25126 - DNA, 242 bp, Zea mays
caacaggatcaggctctaacacatatgttgaaactgagactcttgcaaagtttgagttgatggatggtgctcctgtgagaggtgaatctattccagtgaggctgttcctgacaccctatgagttgaccccgacttaccgcaacataaacaacaaattcagcgtcaagtattacctgaatctggtccttgtggacgaggaagatcggaggtacttcaagcagcaagagatcacaatgtaccgt

SEQ ID NO: 25127 - DNA, 240 bp, Zea mays
gttcgcaaagatggcggtgccgctgctgacgcagaagatcgtgaagaagagggtcaagcagttcaagaggccccatcttgaccgctacaagtgccttaagccaagctggcgcaggcccaagggtatcgactcccgcgtcaggcgtaagttcaagggatgcaccttgatgcccaacattggatatggctccgacaagaagaccaggcactaccttcccaacaagttcaaaaagtttgttgt

SEQ ID NO: 25128 - DNA, 237 bp, Zea mays
tgaaggagaggcttgtcggcgtctctgaggagaccaccacgggtgtcaagaggctctaccagatgcaggagaccggcgccctcctcttccctgccattaacgtcaacgattccgtcaccaagagcaagtttgacaacctgtatggttgccgccactcactccctgatggtctgatgagggccaccgacgttatgatcgccggtaaggttgccgtggtctgcggatacggtgatgttg

SEQ ID NO: 25129 - DNA, 235 bp, Zea mays
gtgaacccgccgccgacgcagcagcaggagacgcgccaaggagagcccgcaaggaggcgactatgagggccaagtggaagaagaagcgcatgaggaggctgaagaggaagcgccgaaagatgaggcagagagtcaagaaggcagaaggggacttcgtgatgctgagccggcatagttgtgtacgtttcttcgatcgtgagttcatggagagatgtcacatcctagttcgtcgtca

SEQ ID NO: 25130 - DNA, 230 bp, Zea mays
atcccctttgcaagtatagtctctctgctaagcgaactatcttcaagctagtctcggcggctctagaagacgatgggcaaggacgacgtgatcgagagcggcgctggcggcggcgagttcgctgccaaggactacacggaccctcccccggcgccgctgatcgacgcggcggagctggggtcctggtcgctgtaccgcgccgtgatcgccgagttcatcgccacgctgct

SEQ ID NO: 25131 - DNA, 234 bp, Zea mays
gtgttctgcttgccttttttttttgatctggccattcttgccggctttcttggtttatcggcgtcgcaggatgatgagcgactacaaggtggagatggtgaacgatgggatgcaggaattcttcgtcgaattcaaggggccggccgaaagtaatagccctcgcgctgaatcccggttgctcttctctctccccgcctcccgtgctgatggtgcacgctcctgattctgatctag

SEQ ID NO: 25132 - DNA, 236 bp, Zea mays
ctacccacgcgtccgtgaaggtggagcgagggttcgcggcgctgtacacggacaagggcaccagctgccgcttctgccggtactcggctcgggagcaggtgctggtcgaggtgcgcaagctggtggatctgtaccacgggctgtgcgagcaggtgagcgtgacggtcacgggccacagcctgggcagcgcgctggcgatgctgtgcgccttcgacgtcgcggagacgcgcgcgaac

SEQ ID NO: 25133 - DNA, 234 bp, Zea mays
cttctcgcatgccagttccgacatggttgacatccatgcgtcgatcctctttcaggccctgcactgcgagaagaagtaccttcgcatccaggatgatactttgactgggaacgcatcgtccgtggacatcgccaccaaggagaacatggagatctctgatatcgatcggccaggagctgctcacgaagccagtggcgagagtgaacatcgacacagggctgtacgagtcctgcg

SEQ ID NO: 25134 - DNA, 232 bp, Zea mays
ggctcgttctggtgtgggtgggcaccatggcggccacagaggcctcggcagacaagaacgccgtcttccgcaagcttcgcaccaaatcagacaacaagatgtgcttcgattgtaacgccaagaacccgacgtcggcgtccgtcacctacggtgtcttcctctgcatcgactgctcggcggtgcaccgcagcctcggcgtccacgtctccttcgtcacgtcaacaaatttgga

SEQ ID NO: 25135 - DNA, 224 bp, Zea mays
cccacgcgtccgcccacgcgtccgctcacgcgtccggagctgaggtatccttcataccctgaggccaacggaacctggcgtttcccgggcatcggcgagttccaatgctatgataagtacatgcgggcatcgctggaagcagcggcgttggcggcgggtcaccaggattcggggactgtcggaccccatgactccggggagtataagcagatgcccgacgacac

SEQ ID NO: 25136 - DNA, 229 bp, Zea mays
  unsure (1)..(229): unsure at all n locations
atttaagtccattttcacaccgtttggcagaagatattgataatccagagctccagagattgagatgcagagtgaattaccatgcactacgattcaagccaaatatcatgaaaacaagcagtgagacagntaacaagcatcgctcagaaggccgatttantntcaattcatcttcgatttgagttggatatgcttgcatttgcagggtgctttgacatattcaaacctc

SEQ ID NO: 25137 - DNA, 230 bp, Zea mays
cccacgcgtccgcgggcacaccccccgagctcagcttagctccactccagctccaatcacagtcgtgaccagagcgcgagagctagctagagggccgtgaaaatgccgatcaataggatcgccctggggagccaccaggaggtgtaccacccgggcgccctcaaggcggcgttcgctgagttcatctccaccctcatcttcgtcttcgccggccagggctccggcatggc

SEQ ID NO: 25138 - DNA, 230 bp, Zea mays
cggacgctgggcattctcgcagtatcctccccttggtaggtttgctgtccgcgacatgaggcagacagtatgctgttggagtcatcaagagtgtggagaagaaggacccgaccggcgccaaggttaccaaggcagctgccaaaaagaaatgatgcaacctgtcgttaatcctgtatctgcttttgcaatacctgacttgtcactccatcccgaagttttgtatgcggttg

SEQ ID NO: 25139 - DNA, 241 bp, Zea mays
cccacgcgtccgagaagaacggggcaagaagtccctgagcatcaacgagttcttgaagccagctgaaggcgacaggtactataaccctagtggccgtggccgtggtaggggccgtggggggttccgtggtggttacaacggcggttatcggggaccagctgctgctccatcgatcgaagaccaggctcagttccctgccctggcctaagcacagctcgtgttctcgctcaagattgtgtca

SEQ ID NO: 25140 - DNA, 241 bp, Zea mays
caagaggtagctgagaagttccaaaacacaaacttgtatttgaagaacttagaggagaacattgatgatgagaaattgcgtgaactctttgctgagtaggcaatattacttcctgcaagttatgcgggattcgaatggtgtcagcagaggttctggatttgttgctttcaaatctgctgaagatgctaaccgagctcttacggagatgaatggcaaaatggttggaagcaagcccctttat

SEQ ID NO: 25141 - DNA, 243 bp, Zea mays
gtttaactgacactgagaagccaaggatgaggggtcccaaaagggcctccaagatcaggaagctgttcaatcttgcaaaggatgacgacgtgcgcaagtacgtgaacacgtaccgcagacattcactaccaagaatggcaagaaggtgagcaaggcacctaagatccagcggcttgtgacccccttgaccctccagaggaagcgtgctagaattgctgacaagaagaagaggatcgctaagaa

SEQ ID NO: 25142 - DNA, 243 bp, Zea mays
gcagatctttgtgaagaccctgactggaaaaaccataaccctggaggttgagagctcggacaccatcgacaatgtgaaggcgaagatccaggacaaggagggcatccccccggaccagcagcgtctgatcttcgccggcaaacagctggaggatggccgcaccctagcagactacaacatccaaaaggagagcaccctccaccttgtgctccgtctccgtggtggtcagtaagtcatgggtcg

SEQ ID NO: 25143 - DNA, 246 bp, Zea mays
caaagccaaagccaaagaatcctcttgacttgctgccaccaagcaagatggtccttgatgactggaagaggctatactcaaacacaaagactaacttccgggaggttgccatcaaaggtttctgggacatgtacgacccagagggctactctttgtggttctgtgactacaagtacaatgatgagaacaccgtctcctttgtgaccctgaacaaggttggtggattcctgcagcggatggacctgt

SEQ ID NO: 25144 - DNA, 249 bp, Zea mays
cgcgccgcaacgccaccatgaagttcaacatcgcgaacccgtctaccgggtgccagaagaagctggaaatcgatgacgaccagaaactacgtgccttttatgaccgaagatctcccaggaggtcagtggtgatgctctgggtgaggagtttaagggttatgtcttcaagatcatgggtggatgtgacaaacaaggcttcccaatgaagcaaggagttctgacttctggtcgtgtccgccttctgctcca

SEQ ID NO: 25145 - DNA, 241 bp, Zea mays
aaatctactcaaacctactacttgtatctgtgccttagcacagctgtgcttgttgaaagtggcaagttcctcctatgtgcgaaacggacctcccgcccaacctgtacagaatatacaatatttatgaattctgaaaatttatctaggtcaagcaaaatgtacattggaaagctgaggtcgaatctcctcggcacaaagtttgcaatatatgatacccagcccccatgcaatgcagcagaac

SEQ ID NO: 25146 - DNA, 237 bp, Zea mays
gactcactgggaccttaccttctggagtgaacgactgagagagtctaaatatgatatcaatgaggaagagctgcgcccttattttgcactacccaaggttatggatggcctcttcactctggcacataagctttttgaagttactgttgaacctgcagatgggctggctccggtctggcacagtgatgtcaaattttattgtgtcaaagactcttccagtagccctgttgcttactt

SEQ ID NO: 25147 - DNA, 168 bp, Zea mays
tgttgaaatgcaccatgaggctctccaggaggcccttcctggtgacaatgttggcttcaatgttaagaatgttgctgtgaaggatctgaagcgtgggtatgtggcctccaactccaaggatgaccctgccaaggaggctgctagcttcacgtcccaggtcatcatcat

SEQ ID NO: 25148 - DNA, 238 bp, Zea mays
atgtgaagatgttcgtgaagcctacaggaaaaaagggtggggtgtatcgaatccagatttgcttgaccagtgcaaaagggagggctttcttcaaagtataaaggacgaagaaggcgaaggatgcaatatttatggttttattgaagttaataaggttgctgggaatttccattttgctccagggaaaagtttccagcagtcaaatgtgcacgttcatgacttgctcccgttccagaag

SEQ ID NO: 25149 - DNA, 237 bp, Zea mays
cccacgcgtccggcagcctccatgatggtagagaccaggtttgctctcatggttgtggatagtgctaaagccctttacagaactgatttctctggtagaggggagctatcagcaaggcagatgcatctggcgaagtttcttaggagccttcaaaagttagcagatgagtttggagtggcagtggtaatcacgaaccaagtagtggctcaagtggatggtgctgcaatgtttgctggg

SEQ ID NO: 25150 - DNA, 235 bp, Zea mays
gccgtcgtggtaatgatgaagtaatggcaaggggaacgtttgcaaacattaggatcgtgaacaagtttttgaacggagaagttggacccaagaccattcatgttcctactggggagaagctttctgtttttgatgcggccatgagatacaaatttgagggccatgctactataatcctcgctggtgctgagtatggaagcggcagttctcgtgattgggctgctaagggtccgat

SEQ ID NO: 25151 - DNA, 243 bp, Zea mays
cggacgcgtggcgcgcccccgctcgcttcacttctctaggtgcgcaccgatcagaagagatggcggtgcagctgctgacgaagaagatcgtgaagaagcgggtcaagcagttcaagaggccccacctcgaccgctacaagtgccttaagccaagctggcgcaggccaaagggtattgactcccgtgtcaggaggaagttcaagggatgcaccttgatgcccaacattggttatggttctgaca

SEQ ID NO: 25152 - DNA, 241 bp, Zea mays
accgactcccggcgaagacgatggggaaggggttcgcatcctacctggcgatgaagacggggccggagggcggcgacgcggcggcggcgcacaggctctgatcgacgcggacctgcgggagctcggcgtcgccgcgcggaagctcgccaaccacgcattcgtcctcggcggcgggctggggttcggcacctccttcctcaaatggctggccttcctcgccgcagtgtatctcttgatattg

SEQ ID NO: 25153 - DNA, 234 bp, Zea mays
agagaccgtggtcgaccacgcgtccgattctgcttgtcaatcggggtttcagcttagtttggagggtgtagagttgattcagctcggtttggatggactaagattgaaggagcgagaagggagggaggcaaaggagacagcatatgggatgtatttacagatgacaaagaacatgtcttagacagaagcaatggagaaattgcagttgatcactaccatcgatacaaggaagag

SEQ ID NO: 25154 - DNA, 226 bp, Zea mays
cagacggtgggtcgacgcacgcgtccgcttctgcttgtcaatcggggtttcagcttagtttggagggtgtggagttgattcagctcggtttggatggactaagattgaaggagcgagaagggagggaggcaaaggagacagcatatgggatgtatttacagatgacaaagaacatgtcttagacagaagcaatggagaaattgcagttgatcactaccatcgatac

SEQ ID NO: 25155 - DNA, 141 bp, Zea mays
gggaatgtcattgcgctcttcctcttcctgtcgcctgttgtcaccttctggagggtcatcaggaagcggtcgacggaggacttctccggcgtgccctacaacatgacgctgctcaactgcctcctatcggcttggtacggc

SEQ ID NO: 25156 - DNA, 233 bp, Zea mays
ctggcactcgtcattattcaagagatgctgttgccaagaatcagaaacgcccgggagaaaatactactgtgaataataatagcacaacctttgatgacatacaagtaatagaacccaatgttgggttgatagataaaccagctgcagatgtaaatgacatgatttctgaaaagttgatggtccaaatagatcttaacgaagacattgaagaagatatcccaccgagccaatat

SEQ ID NO: 25157 - DNA, 234 bp, Zea mays
ctcatgccgggcctcaccttctccaacgagctcatctcccgcgatgagggcctccactgtgatttcgcctgcctcctctacgagcttctccgcaacaagctcgacgaggcccgcgtccgcgacatcgtcgcagagcatgtcgacatcgagcgcgagttcgtctgcgacgccctccctgtcgcgctcgtcggcatgaacggggatctcatgagccggtacattgaattcgtcgcc

SEQ ID NO: 25158 - DNA, 234 bp, Zea mays
ctttggaagcggtgagccccccaaaccagcagtggcaccagctgtaagtgctccacctgctgctgcaggtgctccacctgctgagaaaccacctgctgcaaagcctgatggcaccagtcagattgctgctggggttaccagccaaaccaataactaccacagggccgacggtcagaacaccggaaacttccttacggaccgtccttcgaccaaggtccacgctgctcctggcgg

SEQ ID NO: 25159 - DNA, 231 bp, Zea mays
agggttttcgcgccgccgccgccgccgcttcgtcgtctccgccgcagcgatgccgtcgcacaagaccttccggatcaagaagaagctggcgaagaagatgcgccagaaccgccccatcccctactggatccgcatgcgcacggacaacaccatcaggtacaacgccaagcgcaggcactggcgccgcaccaagctcggcttctgagcgcgcggttcggccggctcctgcgt

SEQ ID NO: 25160 - DNA, 244 bp, Zea mays
tctctttccccgagctctcgaaaccctaggtgcgtgccgaccggcggcggcggcgaggtgatggcgatggacccggacgcggtggcgaaagcttcgtggagcactactaccggacgttcgacaccaaccgcgcggcgctggtggggctgtatcaggagacctccatgctcaccttcgagggccagaagttccagggcccatccgccattgccggcaagctcggatctcttcccttccaggcctg

SEQ ID NO: 25161 - DNA, 246 bp, Zea mays
agttggtgaaccagttgccgactactttggtattactggacaagagaccacagttcttgcttacactggtaatgaagatgctaggaaattttttcttgatggtgaggtgtcacttgaagctataaaggacttcgctgaaggtttcttggaagacaagcttacaccattctacaaatcggaaccagtgcctgaatctaatgatggggatgtgaaaattgttgttgggaagaatctggatctaatagt

SEQ ID NO: 25162 - DNA, 245 bp, Zea mays
ggaatgttcagctcttcagatccatcgatggtggtgctgcttttggcttccccgagactcccgaggaagctgcaagagctgggcttgtgagtggaaaggatcaaatcatcgaccggagtatccaggatgcatacgtaaacgccatacggagggcgaagaacttcatctacattgagaatcagtacttccttggaagttcatacggctggaagcccgaagcatcaagccggaagaaatcggtgctc

SEQ ID NO: 25163 - DNA, 248 bp, Zea mays
cccacgcgtccgcccacgcgtccgggtccggccgtctccttgccccgatggcgtccgagaagaagcagtccaacccgatgcgggagatcaaggtgcagaagctggtcctcaacatatccgtaggggagagcggcgaccgcctcacccgcgccgccaaggtgctggagcagctcagcggccagacccccgtcttctccaaggcgaggtacacggtgcgctcgttcggcatccggcgtaacgagaagatc

SEQ ID NO: 25164 - DNA, 244 bp, Zea mays
tgatcgtactcttcttatctgggatggtggcaatgattatgctccgcaccctgtatagagatatctctaggtacaatcagcttgaaactgaagaagaaacccaagaggagacaggatggaagcttgttcatggagacgtattccgccctcctgcaaactctgacttactctgtgtctgtgttgggactggtgttcagttcttcggtatgctgctagtaaccatgatctttgctgttctgggttt

SEQ ID NO: 25165 - DNA, 231 bp, Zea mays
cccacgcgtccggcttgtgagtggaaaggatcaaatcatcgaccggagtatccaggatgcatacgtaaacgccatacggagggcgaagaacttcatctacattgagaatcagtacttccttggaagttcatacggctggaacccgaaggcatcaagccggaagaaatcggtgctcttcacttgattccgaagagctctcgctgaagattgtcagcaggattgaagcggggg

SEQ ID NO: 25166 - DNA, 241 bp, Zea mays
cgtccccgtcccgacgaattggaataggagaagcaaaagatgatggatctcgccgacagccagcaacagcggctcatcgccggcgcggctctgctggtcgccaccgtcgccttcctcaggctcctcctgagctcccgctccgggggcaagcgcctgccgcccaccatcccgggggcgccggtggtcggcggcctcgtcaagttcatgcgcgggcctatcccgatgatccgggagcagtacg

SEQ ID NO: 25167 - DNA, 242 bp, Zea mays
ctttcctcaagaagtcgattcccttccccaagaacccaagcccccaccatgacaagctcctcctctccttcccgaaaggcgctgagcaagatcgcttgcaatcggctgcagaaggaactcgccgagtggcaactcagcccccctgctggattcaagcacaaggtctccgataacctacaaaggtgggtaattgaggtcactggagcggcgggcaccctttacgccggcgagacctaccagtt

SEQ ID NO: 25168 - DNA, 241 bp, Zea mays
gagaccctagccctcgcgccggcgccgccgtgcccagcgctcgagctcctcgcctgccgcgagctcgcgccgcaacggcagcatgaaggtcaacatcgcgaacccgtctaccgggtgcgagaagaagctggaaatcgatgacgaccagagactacgtgccttttatgacggaagatctcccaggaggtcagtggtgatgctctgggtgatgagtttaagggttatgtcttcaagatcgtgg

SEQ ID NO: 25169 - DNA, 244 bp, Zea mays
cccacgcgtccgggagctcgtggccgcgctgcccggcgacgactgccgctacgccgtcttcgacttcgacttcgtcaccgtcgacaactgccagaagagcaagatcttcttcatcgcctggtcaccggcggcgtcgaggatcagggccaagatcctgtacgcgacatcgaagcaaggcctgcggcggctgctggacggggtccactacgaggtgcaggccaccgacccctccgagatgggcttc

SEQ ID NO: 25170 - DNA, 222 bp, Zea mays
cgactcgaccgccgccgtcccagttcgcttcgcgtcaccgagagctcgtcggcctccgtccccgcgagaagcgagagcatggacacccaggtgaagcttgctgttgtggtgaaggttatgggcaggaccgggtccaggggtcaggtgacccaggtcagagtgaagttcttggatgaccagaaccgtctcatcatgaggaacgtcaagggctctgttcgtgag

SEQ ID NO: 25171 - DNA, 189 bp, Zea mays
agcggcctagattcggttgcctcggaccgggatgaatcctggcgtttcaacagagtatatataaaactctattattgacagaatggtccggaaactggtaccatccgccgccgcagccatccgcttgttctcttcggttcagttctcgagtttccaggatgaaggtaatagctgcctatctgcttgctg

SEQ ID NO: 25172 - DNA, 234 bp, Zea mays
cggacgctgggctagatgaagacctacggcttcctcactcctgaattctggagccagaccaagttctccatggccccgttccagcagtacaccgacctgctggcaaagcccaccaagggccttgtgctcgaggccccaactgagacagtagaggcttaggatggtttgagtggagagctctactcgtcgggtgcttgtctaaatgcggtatctatattatagctaagaactgcc

SEQ ID NO: 25173 - DNA, 191 bp, Zea mays
gaagaaacatcaaatgaaatacaagggaggtactttggaaattatgggataatccgtgacatagttcacagccacattcttcaaacaatagctctatttgctatggaaccacctgtaagtcttgatggagaggatatccgagatgaaaaggtgaaggttctcagatcaattcggaaagtgaaccttgatga

SEQ ID NO: 25174 - DNA, 237 bp, Zea mays
ggagctttgtgaaggtggagaattattggataggatcttgtccagaggtggaagatacaatgaaggggatgcaaaaattattgttgaacagatattaaaagtagttgccttttgccatcttcagggtgttgttcaccgtgatctgaagccagagaatttcctattcagcactagggaagagcattctcctatgaagataattgattttggtctctcagattttataagaccagatga

SEQ ID NO: 25175 - DNA, 265 bp, Zea mays
caggaacaagatcctgcagcgacaggatgcccctgctgctataatgcaagcgaataaactaaatgatccagaagctgtcacaaagaggtcaaagctaatgctgacgcctcctcaaatttctgaccacgagctagaggagatagcaaagatgggcagtgctggtgatcctgctttagctgatgagcttggtgaaggaagcactgccacaagaaccttgcttgccagctattctcagactccaaggcttggtatgacaccattgcga

SEQ ID NO: 25176 - DNA, 259 bp, Zea mays
cccacgcgtccgcgacgacacgggcttcttccggcgcgagggcacttggagcaccgagtacgggcatttcttcctggcgtggtattcaggcatgctgctggagcacggcgaccgcgtccttgccgcggccgaggccgtgttcggcggcacgggcgcaacgctctccgccaaggtcgccggcatccactggcactaccggactcggtcccatgcggcggactcacggccgggtactacaacacgcgggacggcgacgggt

SEQ ID NO: 25177 - DNA, 249 bp, Zea mays
gatgacaagttaggggcactttgcatgcagtggttggaagataaggttttctcgatcagagatgctggtgccaataatttgaagcgtttgacagaggaatttggccctgagtgggcgatgcaacatataattccccaggttttggagaagataaacaacccacattatctgtatcggatgaccactttgcaagctatttctttgctagctcctgtcatgggtcctgatatcacatgccaacagttgctc

SEQ ID NO: 25178 - DNA, 203 bp, Zea mays
cccacgcgtccggagctccagaggctgagcgtcgaacagctgcaggagctcgagaagaccctcgaatcaggcctcggctctgtactcaaaaccaagagccaaaaaatccttgacgagatcagcggtctggaaagaaagagaacgcagctgatcgaggagaactcaaggctgaaggagcaagtgacacggatgtcgaggatgga

SEQ ID NO: 25179 - DNA, 255 bp, Zea mays
catcagttcattggagaaattggtgttggttcttgtggtccacgtggtttttatggaacaattgatgtccatcttgattgtgagtcaaagatagctaaatttttggggaccccagactccattctttattcatatgggatttctacaatattcagtgtgatacctgccttctataagaaaggagatatcatagtcactgatgagggtgttcactgggcagtgcaaaatggtctccatctatcaagaagcattgtg

SEQ ID NO: 25180 - DNA, 259 bp, Zea mays
ctgcgagtcgattccgtcacccgcgcagggcggacggcgggagcgggcgagctgggtaacaaaagcccttgcccacggcatgacgctcagcaagaagcaaggcgcaggcactgatcagcaggccttgctggatgctcagctgcagctctggcaccacaccatcgcttttgtcaagtccatggcgctcaaggccgccgtagacctccgcatagcggacgccatccacctgcacggcggctcagccaccctctcgcagata

SEQ ID NO: 25181 - DNA, 252 bp, Zea mays
caaggcagcagcacaagcaagaaccacacctcctcccttcgcctgtgatcatgtcgtcttgctgcggcggcaagtgcgggtgcggctccagctgctcctgcggcagcggatgcaacggctgcggtatgtaccctgacgtggagaccgccgccaccagcagcgtcaagaccacggtcctcgccgcgccgaccaccaaggccagcgccggcggcttcgaggcggccaccgagggcggcggctgcgactgcaaca

SEQ ID NO: 25182 - DNA, 253 bp, Zea mays
catgcttccagaaggacatcctgaacctggtgtacatctgcgagtgcaacgtcctgcccgaggtggccaactactggaagcaggtgatcaagatcaacgactaccagaagagccggttcgtgaaccgcgtcgtggcctccatgttcaacaccgtcgccggcaagaagatcgccgtcctcggcttcgccttcaagaaagacaccggtgacaccagggagaccccggccattgacgtctgcataggcctgctggg

SEQ ID NO: 25183 - DNA, 247 bp, Zea mays
agctgattcttcagaggttttctcagaagcaaggaagcatgcaccaagctaatggtagcggtggatatggcagaaatggggcgattcttacatggatggtgctgatcattcccatctttattgcgtcgttcttctcagcagtcttctccaaggcactggattttgctggggtttatgcaaactgcttcctgtttgggatcctgcctcctgttatggcctggatccatcggtcacagaagaaaaggag

SEQ ID NO: 25184 - DNA, 248 bp, Zea mays
attgatcaaacacgtatgtggaaggtgggtgaaagggtccgttcaaccaggccacaaggtgatcttggcccactgcatcccttcactgctggagtgtatgttgcactaatgatggctcagattgaggtccttaggaagaagggccactcttactcagagataattaatgagagcctgatcgagtccgtggactcgttgaacccgttcatgcatgctcgcggtgtggccttcatggtcgataactgctc

SEQ ID NO: 25185 - DNA, 251 bp, Zea mays
cggacggtgggttcgccgcaaaggcctctagaagcaatcaggcgagcggcggctgcggcgcgatgggagatcaggtcgtgacggagcgtatccagcggaagctaggaggaggccaacactaccgtccaacagcacctcgccggcatccaggaccacgtcaacttcaccatgcagcaagcatacttcaagtgcgcatatgattgcttcgatcggcgccgtactcaggaagcgatcaacaattgtgtggagaa

SEQ ID NO: 25186 - DNA, 248 bp, Zea mays
ctcacgcgtccggatggcatgaacctgtctgcccctcaaacattcatgtccaaggagatctccaagagcaacgtggtggatgacatggtctcgagcaatgccatcctctatgagcccggcgagcatcccgatcatgtcgatgtcatcaagtatgtgccgtacgtgggagatatcaagagggctatggacgagtacacctctgagatcttcatgggcggcaagatcaccatcgtgctgcacaacacctg

SEQ ID NO: 25187 - DNA, 247 bp, Zea mays
gggaaatcctcactggcgaagaaccatatgccaatatgcactatggcgcaattatagggggcatcgtaaacaacacactgaggccacatgtgccagcttcatgtgatccggagtggagaaggctcatggagcagtgctgggctccagatccggcacagcgcccagcgttcacagagatcgctggacggcttcgctccatgtcagttgcagcaaatcaggcgaaggcaaccaaataagatacaggtgg

SEQ ID NO: 25188 - DNA, 243 bp, Zea mays
agcagctggatgctgatatccatcgcaagtacatctatggtggccatgttgctgactacatgaggaacctcgctgaagaggagccagagaagtaccagtctcacttcagtgagtacattaagaagggaattgaggctgatgacatggaagctctgtacaagaaggtccatgctgccatccgtgctgatccttctgtggtcaagtcaaccaagcagccaccaaaggagcacaagaggtacaacc

SEQ ID NO: 25189 - DNA, 241 bp, Zea mays
  unsure (1)..(241): unsure at all n locations
ctcctgctcacccttcttctcttctagggtagtttgctcgttgtgctgcttggttggttctgctncggcttctccgncagtttcttcttggcgccacttagcatcatgatacgagttatccagacgatgagcgtggagtacatgctctttttcctctccctcttgctcaccctcagctccgtcgtctggttcctctacggcctcctcatcaaggacaaatacgtcgcgcttccaaacatcc

SEQ ID NO: 25190 - DNA, 242 bp, Zea mays
gatgttgaaaccttaagagcaaaggtgaagatggcagaggactcagtgaagcgggtaactggcatgaacacattgttccctgccgtgtctgatatgtcgtccctcagcatgccattcaatggctccccatccgactccgcctctgatgccgccgtacccatccaagatgacctgaacagttacttcgccattccaagcgagatcggaggcagcgacggttacatgccagatatagcttcctc

SEQ ID NO: 25191 - DNA, 247 bp, Zea mays
actgatgaaagttgtcgacattaggggacaacttctcaggatagtgaagagttttggtatacaactgatatcatgtgacagagatatgcaggcagttagaaaggccattattgctggttcatttactaatgcatgtcatctggaggaatacagccaaaacggaatgtataatacaattaggacattacaagatgtttatattcatccatcttcagttctctttagggtcaatccaaagtgggttgtc

SEQ ID NO: 25192 - DNA, 221 bp, Zea mays
ggagctgcggacgctggcggaccgtggcagctcccatatactctcccctaactctccagcaagttcccgtctccgtcgtctcgtctccgctcctcacctcgccagccatgggcaagatcaagatcggaatcaacggtttcggaaggatcggcaggctcgtggccagggtcgccctgcagagcgaggatgtcgagctcgtcgccgtaaacgaccctttaata

SEQ ID NO: 25193 - DNA, 235 bp, Zea mays
atttcatcaggtacatgcattacaacggaagaatgcttgctgaatcctaataggaaccccaacatgaccaaactagagatagagaatgagctgaaggattttcttggagtctcgaaggtcatctggatacctcgtggactttatggtgatgaggatacaaacggccacgttgacaacatgtgctgcttcatcaaacccggtgtgatcctgctgtcgtggaccgacgacgagaagg

SEQ ID NO: 25194 - DNA, 171 bp, Zea mays
cccacgcgtccgctaagatatgatatagttgttgatgcaactgacaaccttcctactaggtatatgatcagcgattgctgtgttttgctgaacaagccacttgtatctggtgcggcattaggcttagaagggcatttgactgtttatcagcataatggaagcccatgctat

SEQ ID NO: 25195 - DNA, 238 bp, Zea mays
ctgtcgtggaactacctcgacttcgacctgagccagctggtgttcccgccggagatgacgtacctggacctgtcccacaacctcatccggggcaccgtgccgctgtcgctggagcggctgtccacgctgcagaagctggacctgagctacaaccgcctgtgcgggccgctccccaaggggcacggcgtcatcaagcacgggtgcaagccgtacgcgcacaaccagtgccgcaaaggga

SEQ ID NO: 25196 - DNA, 230 bp, Zea mays
gaagcacattgttgagcaatatgatttagagaagaagacagccattcaatacatgaccggaattaaatcccgggttgctatcactagtgatatgtggacctctaataaccaaaagagaggttacatggctatcactgcacactttgttgatgaatcttggacactaagaaacattatcatgaggtttatatatgtgccaagccctcacactcatgatgttattggtgatg

SEQ ID NO: 25197 - DNA, 199 bp, Zea mays
ctcccccaaatccagccgtcggcacctccgcttcaagatgcagatctttgtgaaaaccctgactggcaagactatcaccctcgaggtggagtcgtctgacaccattgacaacgttaaggccaagatccaggacaaggagggcatccccccagaccagcagcggctcatcttcgctggcaaacagcttgaggacgggcgc

SEQ ID NO: 25198 - DNA, 226 bp, Zea mays
ggccttctccaagaacctcaagcttggcatccacgaggactccacgaacaggaccaagattgctgagctcctgaggtaccactcgaccaagagcggggatgagctgaccagcctcaaggattatgtgaccaggatgaaggagggccagaacgacatcttctacatcactggtgagagcaagaaggctgtggagaactccccgttccttgagaagctgaagaagagg

SEQ ID NO: 25199 - DNA, 98 bp, Zea mays
gcaagtccacgggagggaaggctcccaggaagcagcttgccaccaaggctgcccgtaagtctgcccccaccactggtggagtgaagaagcctcaccgc

SEQ ID NO: 25200 - DNA, 230 bp, Zea mays
gcccagcatgttgaggaggccgagaagatgggacttgactacatggatgttgaggctctcaagaaaatgaacaagaacaagaagcttgttaagaggcttgccaagaagtaccatgctttcttggcatcagaggccatcatcaagcagattccccgtctccttggtcctggtctcaacaaggcaggcaagttcccgaccctggttactcaccaggaatccctcgagtccaa

SEQ ID NO: 25201 - DNA, 234 bp, Zea mays
  unsure (1)..(234): unsure at all n locations
aaggngaggaacagcattggatgtctgttctggcttctgtccaggatggttctgcaaatgaggggcactatccttcctgggcacaagtgggaagtcatggtcgatctgttcttctacagagacccagaggaagcaaaggagcaggaggaggaagctgccgcggcccctgagtttgccgcaatcactgattaccaaggaactgatcagtggggtggtgatcagtggacctctgat

SEQ ID NO: 25202 - DNA, 140 bp, Zea mays
cccacgcgtccggacaagaccaagcgtatggtcatccctgacgctcttaaggttctgaggctacagcctggacacaagtactgcctcctcggcgagctctctaaggaggtcgggtggaactaccatgacaccatcaggga

SEQ ID NO: 25203 - DNA, 197 bp, Zea mays
cggacgctggctgcaccgccggcatctccggcgggcacatcaacccggcggtgaccttcgggctgttcctaggcgaggaagttgtccctcaccagggcggtgttttacatcatcatgcagtgcctgggcgccatctgcggcgcgggcgtcgtcaaggggttccagcaggggctgtacatgggcaacggcggcggcgc

SEQ ID NO: 25204 - DNA, 234 bp, Zea mays
ccagattggtgatctcaaacttgatgggctcgccgaactgcaagcggtgacaagtgaaatggttcgcctgatggaaactgcaactgttccgatcttggcggtagatggcaacggattggtcaacggatggaaccaaaaggtggcggacttgtcggggttgcgagttgatgaagctataggaagacacatacttacacttgtggaggattcttctgtaccaattgttcagaggag

SEQ ID NO: 25205 - DNA, 230 bp, Zea mays
ctcgccgagctcgcgcttgttgaccccaagcgtgccaagaggattttggcaaaccgccagtcagctgctaggtcgaaagaaagacagatgcgctacattgcggacttgaaaggaacgtacagactctccaattagaagcaactacactatcagctcagctggccatgttgcagcgagatacgactggtatgacaagtgagaatagtgatctgaagatacgtgtgcagaca

SEQ ID NO: 25206 - DNA, 228 bp, Zea mays
cgttgagatgaccggcggcggcgtggactacagcttcgagtgcatcggcgtgccgtcggtgatgaccgacgccttcagatgcaccaagatggggaagggcaagacgatcgtgctggggctggggagggacagcgacgaggtgtgcctgccgtcgctggagctgctgttcgggaggtgcgtcatggggtcgctcttcggcgggctgaagcccaagacccacatccccgt

SEQ ID NO: 25207 - DNA, 228 bp, Zea mays
aaaaaatccccattcgttccccttctcgcctccacgagccttcacaaattgccctctcagatcttctcctaatcttactcaagccctagccaaatcccagacccatcccagccctagcgacaccaaccagctcgccagcgaccatggggaacccggagaagctgatgaatcagatcttcgacctcaagttcacctccaagtcgctgcagcggcaggcgcgcaagtgcg

SEQ ID NO: 25208 - DNA, 231 bp, Zea mays
cccacgcgtccgggaataatttctatgcctgatgttttctaccatcgcatcacggataaggatgaattcgttgtgctggcaactgacggggtgtgggatgtgctttccaatgctgaagctgttagcatcatcagcaatgctccttcacaggcctcagcagctcgatttctggttgaaaaggctcacagggcatggaggacacggtaccccacatcaaaaactgatgattgt

SEQ ID NO: 25209 - DNA, 134 bp, Zea mays
ggcagttttcaaaatatccaagcagaagttggatcagagatggtaaatgtgaccctgattgcacgtaggtgcacacgaaggataggtactcgaatgtggagacgaggagctgatgcagagggttatgctgcaaa

SEQ ID NO: 25210 - DNA, 138 bp, Zea mays
tcccacgcgtccggaccacttctgttgtaacacacagatacggtgaacaagcaggtgaagccacacacaattacctccacgctacaggaaatgttctcggagctgcgtgggctgtattcaagattagaaaagccctcg

SEQ ID NO: 25211 - DNA, 223 bp, Zea mays
cccacgcgtccgcccacgcgtccgcgatttccccttaacacaacacagaggaagcaggcggcggcgatcgggcgatggcatggcgggcgagcctgtctcggagcctaaaggagatccgcgtcctcttctgtcagtcctccccggccagcgccgccgcccgtgagttcgtgaagaagaactatggtgacatcaaggctcgcaacccctccctccccttccttgt

SEQ ID NO: 25212 - DNA, 220 bp, Zea mays
gggcaagtttggtgagattgagaatctgaatgtttgtgataaccttgctgaccacatgattgggaatgtctatgttcagttcagagaggaagaacaggcagctgcagcatacaatgctcttcaggggcgcttttactctgggcgccctataattgttgagtattctcctgtgaccgacttccgtgaagcaacctgtaggcagtttgaggagaacagctgc

SEQ ID NO: 25213 - DNA, 190 bp, Zea mays
cccacgcgtccgcgcaatcggtggatgagtcgatgtttcgtagacattttgaagcttttggggaaattcttgatctttacatgccaaaggaacatggttcaaaagggcatcgtggaattgggtttatcacgtttcagagtgcagagtctgtggacaacatcatgcaagagtcacatgagcttgatggtac

SEQ ID NO: 25214 - DNA, 201 bp, Zea mays
acgttttgcttgccctgttctcgttcggccttgacaacccggaaatcctccagccctctagtccccaacgacgcaggaagcaggatcgagccgaatcctccggaactcgccgccggggccaaccgacctcacactattgatcgaggatgtcgtacgcctacctcttcaagtacatcatcatcggcgacacaggcgtgggga

SEQ ID NO: 25215 - DNA, 172 bp, Zea mays
gcgaggtatattgtcaccaacagctgggaggggaagcccaagttattggatgagaaacagaccaccatctacaaaagggccgtagacaagaattatcacttgaagatgaaagcgtcaaggtttattttcagtgagatcagccagaagttcccaatcatgcctttactgctag

SEQ ID NO: 25216 - DNA, 195 bp, Zea mays
ctttgcgctggaaatgccactccttccgctgaagcaaatatccacagtgatccggaggcagccgacatggttttcacttctggggcggacatctacgtcgttggcctcaacatcacaacgcaagtcagcttcacagataaggatctcctggagctaggaaactcgcaagggaagtacgcacagttcctaggtgat

SEQ ID NO: 25217 - DNA, 232 bp, Zea mays
attgaataccctatgctatttgaagtccacaatgcagcagcagaacggacttcgcattgtggtgttctggagttcattgcagaagaaggcatgatctacatgccatattggatgatgcaaaatcttcttttgcaagagggagatatggtgttcataaaaaatgccaacctccccaagggcacatatgtgcagttgcagcctcatacaacagactttctagatatgtcaaacc

SEQ ID NO: 25218 - DNA, 233 bp, Zea mays
gaggactgagggtctcggagtggattgatttgggattctgttcgaagatttgcagaggggggcaatggcgaccgcggggaaggtgatcaagtgcaaagctgcggtggcatgggaggccggcaagccactgtcgatcgaggaggtggaggtagcgcctccgcagccatggaggtgcgcgtcaagatcctcttcacctcgctctgccacaccgacgtctacttctgggaggccaa

SEQ ID NO: 25219 - DNA, 234 bp, Zea mays
cccacgcgggctcgtcctgcgggcggcggacaggctgggcctcggcggcgtgtacagcacctgggcgtgctgctgcagctggaccacaaggtgtcgccgttcctcaaggagaccctggacctctcgtgctaccacaacctggaggcgcacctgcacctgctggacggcttccgcggctccggcgcggggttcgagccccgcgggagggaccccgcgctggtgaacaagtccacc

SEQ ID NO: 25220 - DNA, 241 bp, Zea mays
agtacctgcagtaggccggaattcccggcacccgcacaaagagcggagtcggatcgatcacaaactatatcttgactggatttaagatgcactgccatggctggcggtctatttactgcatcccgaagcggcctgcattcaaaggttctgcgcctctgaacctttccgaccgtcttcaccaggtccttcgctgggcccttgggtccgtcgaaattttcttcagcaagcactgcccactttg

SEQ ID NO: 25221 - DNA, 239 bp, Zea mays
cgagttgaaggacaggaatgaccaacctcatggaacatgggaggaggtgtacagaaatgtgaaaagggtagagaggttaaaaaatgaattgcatgaaagagatgacaaggagcttgagcggacaggtcagccactttgtatatacgaacctttctttggggaggggacctggccctttctgcaccagagctctctttatcgtggagttggtctgtcttcaaaaggtcgaagaccaggag

SEQ ID NO: 25222 - DNA, 232 bp, Zea mays
ttctcaatggaggttctgcacaatcaggagtatcaggcctgatagtacctgcagcaactgtaggagcactgggttacggttatatgtggtggaaggggatctcgttctcagatctaatgtatgtcaccaagcgcaacatggcaaatgctgtttcaagcatgactaaacatttggagcaagtgcaaagttctcttgctgctgctaaaaggcatttgacacagcgcattgaaaa

SEQ ID NO: 25223 - DNA, 236 bp, Zea mays
cccacgcgtccgaatacacccaaatacagatttgttgtgcgatttaccaacaaggacatcacagcacaaatcatatctgctagtatagcaggtgatatggttcttgcttctgcttactcgcatgagttgccacgatatggtctcgaagttggtctgaccaactatgcagctgcctactgcactggccttctgttggctcgccgtgtgctcaagacccgtggtttagataaggaata

SEQ ID NO: 25224 - DNA, 233 bp, Zea mays
cccacgcgtccggtcgtatatgctgcagattggcggcagggctcctaacaaaattctatttgctaaaaatactgggaagatcttccagactgacttccatccagcttatgatccaaatgggatgattgagttcaacgagcttgttccatttaggctgacacgcaacttgcaagctttcttctcgaattttggtgttgaaggtctcattgtgtctgccatgtgctctgctgccc

SEQ ID NO: 25225 - DNA, 115 bp, Zea mays
cccagaccagcagcggctcatctttgctgggaacagcttgaggacgggcgcacgcttgccgactacaacatccagaaggagagcaccctccacttggtgctgcgcctcaggggag

SEQ ID NO: 25226 - DNA, 232 bp, Zea mays
gtgattttggactgtctcgtcaatatgggagcccattaaaaccttatactcaactggttgtgactttgtggtacagggccccagaactgttgttaggaacaaaggagtattctactgctattgatatgtggtccgtgggctgtataatggctgagctccttgccaaagaaccattatttaatggaaaaacagagtttgaacagctagataagatttttagaacacttggcac

SEQ ID NO: 25227 - DNA, 222 bp, Zea mays
agcagcgatccgaagctcaatcaattcactcaaacctcttccccaaatcttcgattagattctcgttgacaagaagactagaaccgaacctgaccatgtcgctgatccgccgcagcaacgtgttcgatcccttctccctcgacctctgggacccctttgagggcttccccttcggctccggcaacagcagcagtctcttcccctcgttcccgcggaccagct

SEQ ID NO: 25228 - DNA, 226 bp, Zea mays
cccacgcgtccgcaaagatgtcataaagctagcagactttggtcttgcaagggaagtttcatctttgccgccatatacagaatatgtctcaactcgctggtatcgggcaccagaagtattgctccagtcatctgcttatgattctgcagtgtatatggggcaatgggcgccataatggctgatttttgacactccatcctctctttcctggaactagtgaagctga

SEQ ID NO: 25229 - DNA, 220 bp, Zea mays
catcatcgcgctcgccgccagagacgtcgtctacctggcggatggcccctactggcgcgtcgagctcggccgtctggacgggctcgattccagggccagcgacgtcaaggggaagctgccggacccggacatgcacgtcaaggacctcacgccggtgttccagcggaacagcttcacggaggtggacatggtcgcgctctccggcgcgcacaccgtcggc

SEQ ID NO: 25230 - DNA, 222 bp, Zea mays
cccacgagtccgcccacgcgtccgaaagaggttgctgacgatgcattcttgcctgcgaccacagctcgagaggccattcagtactccatggatctgtatgcgcagtatattttgcaaagcttgaggcagtagattggaagcaactatttatctgggcgtcttggaatgagtgtgattttaataagtcaaaacacttgatattgtgagcaattcggggggttg

SEQ ID NO: 25231 - DNA, 182 bp, Zea mays
gcgacctggagatcaagtgggtggcggtccccgagaggcagccgatgcggctctactcgagcctgtggaacgcggacgactgggcgacgcagggcgggggcgtcgagacggactggtcccacgggcgcttctgcgcctcgtaccggtgtttcaatgcctgggcgtgcgacgcggtcgcgggc

SEQ ID NO: 25232 - DNA, 218 bp, Zea mays
cccacgctaccggaagaaatatgcttctgttatccgtgtcattgctcatacccagattaggaagatgaagggtttggagcagaagaaggctcacctgatggatattcaggtcaatggtggtaccattgctgacaaggtggactatggctacaaattctttgagaaagatgtccctgttgatgctgtcttccagaaggatgagatgagtgacatcaatg

SEQ ID NO: 25233 - DNA, 226 bp, Zea mays
ctgcccctactgaatcatccaatgtatataaggatgttcctgaaaccccaagcgccgaaggtcacggcatctgagccagcgtgaggctgcactgaacaagttccggctaaagaggaaggataggtgctttgagaagaaggttcgataccagagccggaaattactcgcagagcagcgtccacgggtcaagggccagtttgttcgtcaagatcatagcatccaagga

SEQ ID NO: 25234 - DNA, 226 bp, Zea mays
acaactcgggcgggacacgggagacagccatggcgacgggcggccaggggaaggccgcgggctactaccagtacccgacatcgtacgccggtgctgcggacgaggagcgccggtggtggccgtggctcgtgcccaccgtgctcgtcgcctgcatcgcggtcttcgccgccgagatgttcgtcaacgactgcccgcgccacgggagcacgctcggcggcggcgccgg

SEQ ID NO: 25235 - DNA, 250 bp, Zea mays
cggaccgtggctctcaactcccaaggtcccttttttttctcgatctggaagcgccgcagtagcagccatggacgtgagctgagcaggcggtaaggcgaagaagggcgcggcggggcgcaaggccggcgggccgacggagaagtctgtgtcgcggtcctccagggccgggctgcagttccccgtcagccgcgtcgggcggtacctcaaaaagggccggtacgcgcagtgtgaggcacgggtgctccgtcta

SEQ ID NO: 25236 - DNA, 247 bp, Zea mays
ggacacgacccgctcttctactcgcaccactccaacgtcgaccgcatgtggcacatctggtcgaccaggctcggcggcgggcagggcatcacggaggcggactggctcgacaccagcttcgtcttctacgacgacgtcaagagcccgcggaaggtgcgcatcagattccgcgacgtcctggacacgcgcgacctcggctacacgtacgacgccgaatcccacaaggacctgccatggctgcgctgca

SEQ ID NO: 25237 - DNA, 253 bp, Zea mays
ggaggagggcaggatgtcgcaccgtaagttcgagcacccgaggcacggctcccacggcttccttcccaggaagcgctcctcccgccaccgcggcaaggtgaagtcattccccagggatgaccccaagaagccttgccatctcactgccttccttggctacaaggctggcatgactcacattgtcggtaagttgagaagccaggatccaaactccataagaagaaacttgtaagctgttaccatcttaaccccc

SEQ ID NO: 25238 - DNA, 256 bp, Zea mays
atcagcgaaaggaaaattgctacttcaactgaggctctctgccgtggatatcctaccgaatttgcttcttacttccattactgtcgctcactgcgtttcgaagatgcaccggactatcagtacctgaagagattgttcagagacctttttattcgggaaggttttcagtttgattatgtttttgactggaccattctaaagtaccaacaggcacagatgaccactgctccacctcgtgcaattgctccagcagtag

SEQ ID NO: 25239 - DNA, 238 bp, Zea mays
aaaatagttacagataatatacagtatgccaaagttgtgaagatgatgggcaacagagttaatgcagtcaaccttgacttctctgagatattgtcagatgaagagctagaaacacagctagaggaggcagcagtaatatccatgggaacaggaattagtgaccttgacttatcgaatatcagagagctatgtgatcaagtgcttgccctttctgagtacagagcccagctgtatgact

SEQ ID NO: 25240 - DNA, 255 bp, Zea mays
cttcaacattatgagaaaactggaggtcaaactgttctatttgttggggatttgtcgtatgctgatagatatgaacataatgatggtattcgttgggattcctggggtcgattcgttgagcgcagtactgcataccagccatggatttggaatactggaaaccgatgaatagaatacaggcctgatctgggagaaacttctgtattcaagccatatttgcataggtacatgactccatatttagcatcaaagagc

SEQ ID NO: 25241 - DNA, 253 bp, Zea mays
cccacgcgtccgggagcaacatctgcctgcacatgttcactctggacttcttgaaccaagtggcgaacagcctcgagaaggacagtgtataccatctagctgagaagaagatcccttccatccatgggttcacaacgggcctgaagctggaacagtttatattcgacgccttcacttactccccatccacagagcttttcgaggtcatgcgggaggaggaattcgcgccggtagagaacgccaacggcgcgac

SEQ ID NO: 25242 - DNA, 238 bp, Zea mays
cccacgcgtccgcgattttgcggcttgcaaagctattgtggtcagagaaaagctatgttacaacccgtgttatgggaacatttgggtacgtggcgcctgaatatgccagcaccggaatgctgaacgagaggagtgatgtatatagctttggcgtactcataatggagatcatcactggtagatctcctgtagactacacaagagcagctggagatgtcaacttggttgagtggctcaa

SEQ ID NO: 25243 - DNA, 251 bp, Zea mays
cagacgctgggtcgaccacgcgtccgatttatgcttatggttttgagaagccatctgcaattcagcagaacggaattgttcccttctgcaagggtattgatgtcattcagcaagcacaatctggtacatgaaagacagcaaccttctgttctgggatcttgcagcagctggactatgagctggttgaatgccaggcgctggtccttgctcccacccgtgagcttgcacagcaaatcgagaaagtcatgcgc

SEQ ID NO: 25244 - DNA, 251 bp, Zea mays
ggacccgaaaacccaagagcacgcagtgacagctctcctgaacctctccatatacgatcagaacaaggagctggtagtggttgccggtgccatcgtcccaatcacacaggtgctgaggacgggtagcatggaagcaagagagaacgcagccgcggctatcttcagcctgtcactgatggacgacaacaagatcatgatagggagcaccccaggggcaatcgaggcgctggtggagctgctgcagagcggta

SEQ ID NO: 25245 - DNA, 248 bp, Zea mays
gatcaccaccaaggccaatgttgactacgagaagattgtcagggagacctgccgcaacattggttttgtgtcaaacgatgttgggcttgacgccgaccactgcaaggtgctcgtgaacattgagcagcagtcccctgatattgctcagggtgtgcatggccacttcaccaagcgccccgaggagattggagctggtgaccagggacacatgttcgggtatgcgaccgatgagacccctgagttgatgc

SEQ ID NO: 25246 - DNA, 250 bp, Zea mays
ggaattgggactgcgcttggtgagctccctccttattttatatcacgagcagctcacttatcaggaagcgagtcaaaagctgttcaggagcttgatgcagctacttccaaagaagatgggccagtagcatcatcccttaatcgaaccaagcgttggcttctctctcactcccaacatctcaacttcttctctatcttgattcttgcttcggttccaaatccactctttgaccttgctggtattatgtgtg

SEQ ID NO: 25247 - DNA, 248 bp, Zea mays
cggacgcgtgggcaagattgacatcaaacgtgtccccaagaagacagccctgatcaaggcgatggaggaagctgctgtgaagaccaagtgggagaacagctcatggggcaagaagctgattgtccagaagaggagagcatcgctcaatgactttgataggttcaaagtcatgctggcgaagattaagaggggcggtgctatcaggcaagagctcgccaagctgaagaaggcgtccacggcttaaggag

SEQ ID NO: 25248 - DNA, 250 bp, Zea mays
ctctggaagatctttacaatggcacctcaaagaagctctctctttcgcgcaatgtcatctgctccaagtgcaagggcaagggctcgaagtctggtgcctcaatgaggtgccctggttgccagggctcaggcatgaaagtcactattcgtcagctgggcccttccatgatacagcagatgcagcagccttgcaatgagtgcaaggggactggagagagcatcaatgagaaggaccgctgtccagggtgcaa

SEQ ID NO: 25249 - DNA, 233 bp, Zea mays
gttgcgcttgttggggagagtgggagtggcaaatcaacggcaatttcattgctccagaggttctatgacccagatgtaggccacatactactagatggcgtggacatacgcaagttccagcttcggtggttaaggcagcaaatgggcctggtcagtcaagaaccggccttgtttaacgacacgataagggcaaacattgcctatggaaaagatggacaggcaacagaatctga

SEQ ID NO: 25250 - DNA, 216 bp, Zea mays
ctgtgccttgaccgtatccgcaagcttgctgacaactgcaccggcctccagggcttcctggtcttcaatgccgttggtggtggcactggctctggccttggttctctcctccttgagcgcctgtctgtggagtacggcaagaaatccaagctgggcttcactgtgtacccatctccccaggtgtcaactctgttgtggagcttacaacacgtctct

SEQ ID NO: 25251 - DNA, 199 bp, Zea mays
gcacaccagcacctgccctcctcgccgtcgccgcctccctccgcgcgaccgatctaccctccgccgccaccatgtcgctgatcgccggggaggacttccagcatatcctgcgtttgctgaacaccaacgtggatgggaagcagaagatcatgttcgccatgacctcaatcaagggtgtcggccgcgtttctcaacatcg

SEQ ID NO: 25252 - DNA, 226 bp, Zea mays
cccacgcgtccgcccacgcgtccgcccacgcgtccggctagcatcgatccgccattgctcaccgcacaagtgcacgctcacctcacacacgcagctaagtagctaacgccgtagcagaacaagaaaaggctcgacatggccgaggagaagaagcagggcctgcagctgctggacttctgggtgagcccattcgggcagcgctgccgcatcgcgctggacgagaagg

SEQ ID NO: 25253 - DNA, 230 bp, Zea mays
gcacaccagcacctgccctcctcgccgtcgccgcctccctccgcgcgaccgatctaccctccgccgccaccatgtcgctgatcgccggggaggacttccagcatatcctgcgtttgctgaacaccaacgtggatgggaagcagaagatcatgttcgccatgacctcaatcaagggtgtcgggcgccgcttctccaacatcgtctgcaagaaggccgacatcgacatgaac

SEQ ID NO: 25254 - DNA, 232 bp, Zea mays
tgcccatcgcgtctgagaaagggttgctcccataggaggccattcagaatattcctctactggtgttgagctgctatctacaagtggccgtacccttctagagacgtgtagtaagtattgcgctcgcagaatctacgggcctagaccagtagcatgatctatcaactggttcatcaaccagatcgaaatggttctggaagccatcggaggacatgcctttcgtgatgatggt

SEQ ID NO: 25255 - DNA, 227 bp, Zea mays
caagtctgaagaacttgggcgttgaaaaacttagcaaagatgaagtgcagaaaatgccgtgggaaattttggagtctaaaatagggaattggattcatttcatgcgaattgctgttaaacttctttttgctggggagcgccaactttgcgaccaagtttttgagtgcagtcaatcgttgagggataagtgctttgctgcaataacaaagaacagtttggctacacta

SEQ ID NO: 25256 - DNA, 224 bp, Zea mays
tgggcagtgtatgacgggccagggccaggcgctaagctggtcggccgtgcgcagggcttgcacatcctagccggaaactgggtcaactcattcaccctggtgttcgaggatgaaaggttcagtgggtccacgcttgaagtgaggggcataacggtcgaaactggcgagtgggctgttgttgggggcaccggccagtttgctatggcgaacggcatcatctccaa

SEQ ID NO: 25257 - DNA, 210 bp, Zea mays
  unsure (1)..(210): unsure at all n locations
attgcagaaaggatgagggcattgcaggaattggtccccaacacaaacaagacggatagggcagctatgctagatgagatccttgattatgtgaagtttcttaggcttcaagtaaaggttctgagtatgagcagactgggtggtgctggcgcagttgcgcactnggttgctgatattcactctcagtcagggcgaagcagcgacggcggg

SEQ ID NO: 25258 - DNA, 199 bp, Zea mays
gattgctaactctctgtgtgcagggatggcgctgtacggcgagaaggagtggtacttcttctccccgcgggaccgcaagtacccgaacgggtccaggcccaaccgcgccgccggggctgggtactggaaggccaccggcgctgacaagcccgtgggcacgcccaagccgctggccatcaagaaggcgctcgtcttctac

SEQ ID NO: 25259 - DNA, 218 bp, Zea mays
atggaagaatacgagaagtggagttgaagcgcgactatgcatttattgagttcagtgaacatcgtgatgccgatgaagctcggtaccaactagatggcagggatgtcgatggaagtcgcattgttgttgagtttgctaaaggggtcccacgtggtccaggtggctcacgtgaatatatgggaagaggccctccaccaggcacaggtcgttgtttcaac

SEQ ID NO: 25260 - DNA, 218 bp, Zea mays
accacacaccccacctaccccggccggaccggcaggcagcacaacatggacctcgccctcctggagaaggccctgctgggcctgttcgccgcggctgtggtggccatcgccgtggccaagctgagcggcaagcggtaccgcctcccaccggggcccccgggcgcccccgtggttggaaactggctgcaggtgggcgacgacctgaaccaccgcaacct

SEQ ID NO: 25261 - DNA, 221 bp, Zea mays
catcctcgcgctcctcgactcccacctcgtcccatccgccggcggcgccgagtccaaggtcttctacctcaagatgaagggtgactaccacaggtaccttgctgagttcaagtcaggtgcagagaggaaggatgctgcggagagcaccatgaatgcctacaaagctgctcaggatattgctcttgctgatctggccccaacccagcccatcaggctcgggc

SEQ ID NO: 25262 - DNA, 255 bp, Zea mays
attcatgtccagatgttgttcgaagtcatttacacggttgcaaggtttgctgatgctcttctgcatagccacagtcttagcttggttggtttcagggcattggatgctaaataacctactggggatttccatatgtatagcgtttgtcagccatgtgaggcttcccaacataaagatctgtgcactgcttcttgcctgcttgtttgtgtatgatattttctgggtgttcttctcagaaaggttctttggagcaaa

SEQ ID NO: 25263 - DNA, 255 bp, Zea mays
ctttcctaaagttttcagggtttttcttgctcttgcaatggcggcaattggagtgtcgcaatcaagtacccttacatcggattcttccaaagcaaaatcagcggcgtcctctatatttgcaatcgtagaccgaaaatcaaggatagacccaagtgaggatgcaggggtgactgctgagacactacgaggaaatatcgaattccagcacgttagcttcaggtatcctaccaggccagatgtccagatcttccggga

SEQ ID NO: 25264 - DNA, 254 bp, Zea mays
ccctcccgacccactcgcccaaaaccgtagcgccctcgcctgctcgccgccgccgtcgttgcgagctccccatcttcctccgttaaccatggcgacccagatcagcaagaagaagaagttcgtcagcgacggcgtgttctacgccgagctcaatgagatgctgacgcgggagctcgcggaggacggctactccggcgtggaggtgcgtgtcacaccgatgcgcacggagatcatcatccgcgcaacggcacgca

SEQ ID NO: 25265 - DNA, 252 bp, Zea mays
ccgtgttccgtgtccgcgtccagtgtgtccgctactccgctccccctcagtcctcagttcctcacctagcggtacgtgcgcgcgggagacgtagatggcggcttcggaggcggcacggcggcggcaacaccggtgacgccgacagaggggacggtgatcgcgatccacagcctggaggagtggagcatccagatcgaggaggccaacagcgccaagaagctggtggtgattgacttcactgcaacatggtgt

SEQ ID NO: 25266 - DNA, 252 bp, Zea mays
gaagccaaccggctcgtccgcccgttgcctgtcgtcgctatggccgccgtggaggtgtgcgtgaaggccgccgcggggaaccccgacacgctcggcgattgcccgttctcgcagagggtgctgctcacgctggaggagaagaaggtcccgtacgaggtgaagctcgtcgacctcggcaacaagcccgaatggtttctgaacatcagcccagagggtaaggtgcctttgttcaacggtggagatggcaaatgc

SEQ ID NO: 25267 - DNA, 250 bp, Zea mays
tgctcttttgctcctccgccagcttcatggtggacgacatgcccatcagggacttccgcaacctggagagcaagggggtggcgttccccaagagccagccgatgcggctctactccagcctgtggaacgcggacgactgggcgacgcagggcgggcgcgtcaagacggactggtcccacgcccccttctccgcctcctaccgcgggttcaaggccgacgcttgcgtcgccgtcgcgggcggccggacccg

SEQ ID NO: 25268 - DNA, 253 bp, Zea mays
cccacgcgtccgcccacgcgtccgctctcctggatgatagtatagcacctcggctaaagatatgtgattttggttactccaagtcctctgtgctgcactctcaaccaaaatcaactgtcgggacaccagcttacattgctcctgaggtccttgctagaaaggaatatgatggaaaggtcgccgatgtttggtcatgtggagttactctgtatgtgatgcttgttggtgcctatccctttgaggaccccgacga

SEQ ID NO: 25269 - DNA, 253 bp, Zea mays
aaaggtcctatggctacacctattggaaagggtcatcgatctttgaatcttacattaaggaaagaacttgggctctatgccaatgtcaggccttgcaacagcctcccaggctacaagaccagatacgatgatgttaaccttgtgacaattcgtgaaaatactgaaggagaatatagtggtcttgagcatcaggttgtgagaggtgttgtagaaagtttgaaaattattacccgccaagcaagtttgagagtgg

SEQ ID NO: 25270 - DNA, 257 bp, Zea mays
agaacctcacggccaaggccaagacggccatcctgctgtaccacgccgtgccggactactactccatgcagttcctcaagtccaacaagggcaatgtcaccacgctcgccaccaccagcgtcgccaagaaggactacacctacgaagcggagagcaaggacgacaccgtcacgctcgacaccaccgtcgtcacctccaccatccaggccaccgtctaggacgacgacccgctcgccgtctacgcttgctccaagttc

SEQ ID NO: 25271 - DNA, 257 bp, Zea mays
caatatccagcgtgcttttggaagtctgttcaaggggtggagtgaggagaagatatattttgctcccacatacaagtactcttgcaattcagattcttatgctggagagactgccacatcaaagaaaaagaggagaaccccagcctggtgtgaaagaatactatggcatggagatggtattgcacagttgtcctacttccgggggggatctcaattctctgaccatcgtcgtgtttgtcggacatttactgttgagg

SEQ ID NO: 25272 - DNA, 254 bp, Zea mays
gcggcggcggcggcacagcggaggaggtagacgagatgctgtccgccgacatccccccaaaccagaccatctacctcaacaacctcaacgagaaggtcaagaaagaagagttgaagagatcgctttatgccctgtgctcgcagtatggaaggatactggatgtggtggccctgaaaacacagaaactgagagggcaagcatgggtggtgtttagcgagattacagctgctaccaatgctttccgtggattgcaa

SEQ ID NO: 25273 - DNA, 250 bp, Zea mays
agatgttgctaattcctgcagaactggagcagctactaatgtcatttttgggcttgctttgggttacaaatcagtcattatcccaatttttgctattgcgtttagtatcttcctcagcttcagccttgctgccatgtatggtgttgctgtggctgctcttggaatgctgagcaccattgccacaggtcttgctattgatgcatatggccctatcagtgataatgctggaggaatagctgaaatggctggg

SEQ ID NO: 25274 - DNA, 249 bp, Zea mays
cccacgcgtccgcccacgcgtccgcaagttacaagcctgtcgtcctaattgataatcgcataccgttttatgaaaaggttgcattctatgccgcgtctgactgttgtattgtaaacgctgtgagggatggcatgaacttagtaccatatgagtatactgtttgccgacagggaaacgaggagatcgacagagtcagaggccttgacaaagacacccatcacacaagcacacttattgtttcggagtttg

SEQ ID NO: 25275 - DNA, 242 bp, Zea mays
ggacctggcggacggtgggcaacttttcagatccgaggaatgcatactcttatccgagctagggacatcagcacacctgactttgtattttattcagatcgattgatccgtttggtagtggagcatggtcttggacatttgccatttacagaaaagcaggttattaccccaacaggatctgtttatatgggagttgacttttgtaagaagctctgtggagtctctattgtgcgaagtggtga

SEQ ID NO: 25276 - DNA, 245 bp, Zea mays
cccacgcgtccgcgaccacaccgttcctccgagcccaggagcagccccgcgccaggaggaagtttgttcttttaacaatatgtcgagggaggagaatgtttacatggccaagttggctgagcaggctgaaaggtatgaggagatggttgagtatatggagaaggtggctaagactgtagatgtggaagagctcactgttgaggagcgtaaccttctgtctgttgcatacaagaatggtgattggg

SEQ ID NO: 25277 - DNA, 249 bp, Zea mays
gaaccgcccgaccaccatccggaagagcatgcccgtggaggaggaggcgggccgggacgaagagatgaagaagttcctgaagcagccggagacgaccctgctggacatgctgccgacgcagatgcaggccatcagggtgatgacgacgctggacatcctctcgtcgcactcgcccgacgaggagtacatgggagagttggcggagccgtcgtggctggaggagcccatggtgaaggcggcgttcgagaa

SEQ ID NO: 25278 - DNA, 251 bp, Zea mays
ggagccactcaggtactaccacaacataacatcaaacacattgacagttcttgatgcaatggcagcatataatgtaaatactctgatttactcgagtacgtgtgcaacctatggtgaacctgatacgatgcctattgtagaaacaactcctcagaatcctatcaatccatacggtaaggcaaagaagatggcagaggacatcatcctagattttacaaaatcaaagaagcaatcagacatggctgtaatga

SEQ ID NO: 25279 - DNA, 253 bp, Zea mays
atgagtatgcactcaagtcatttaccgacgcaaaatgtgtggtcatcggcatcgagcacaccaacgcctgacgaaacatgcaatcgctccgagagaagggctgcagcacttgctaaattcaggcagaaaaggaaagagcgctgttttgacaagaaggtgaggtatgtgaacaggaagaaacttgctgagacgaggctaagggtgcgaggtcaatttgttaggcatgcaagcaatatggatatcataagcactg

SEQ ID NO: 25280 - DNA, 249 bp, Zea mays
gaagatctgtaacaaggggtgggagtgctcggggagcaagtactgctgcaacgacaccatcaccgacttcttcaaggtgtaccagttcgagaacctcttcgccaagcgcaacacccccgtcgcgcacgccgtcgggttctgggactaccaggccttcatcaccgccgcggccctcttcgagccccaggggttctgcaccaccggcggcaagcagatgcagatgatggagctctgcgccttcctcgggca

SEQ ID NO: 25281 - DNA, 245 bp, Zea mays
cccacgcgtccgagtgtgtgatgggatgacttatgaagagataaagaaaatcatgcccgaggaatttgagtcacgaaagaaggacaagctaagataccgctacccccgtggagaatcttacctcgatgtgatacagaggctggaacccgtcatcatcgagctagaacgccagcgtgcaccagtggttgtcatatctcatcaggctgtactgcgagcactgtatgcatatttcgcggaccgtcctt

SEQ ID NO: 25282 - DNA, 241 bp, Zea mays
gccatcatcaagagcctgcacccgagctggtcccccgcggcgatcaagtcggcgatcatgacgtcgtcgggcacggcggctcacgcgggcgtgccgatcaaggacgagcagtacaggcgggcgagcttctacaacctgggcgccggctacgtgaacccgtcccgcgccgtcgacccggggctggtgtacgacctcggcgccggcgagtacatcgcctacctctgcgggctgggcatcgggg

SEQ ID NO: 25283 - DNA, 243 bp, Zea mays
gcattcttggacataaagaattcaggtttgttcttccagtgctacctttagcattgatgttctcaggttactgcttagcttccatgtcacagtccaagggcaaaaatcagcataggaaaggaagtctttcaaggctgcagctttctgttattcttctcgtcataaccaatgttcccatggctttatatatgtccttattccatcaaaggggaacagaagacgttatgtattatttgtcaaaag

SEQ ID NO: 25284 - DNA, 244 bp, Zea mays
ctagcaacatagaaagcacaatagtgtaccaacaatggcagctaaaatattttgcctccttatgctccttggtctttctgcaagtgctgctacggcgaccattttcccacaatgctcacaagctcctatagcttcccttcttcccccgtacctctcaccaacggtgtcttcggtatgtgaaaacccaattcttcaaccctacaggatccaacaggcaatcgcagctggcatcttacctttatca

SEQ ID NO: 25285 - DNA, 242 bp, Zea mays
agcaaagcggcagtgcgtagagaggatcgtcgaacagaacagcatgaagatggtcatcgttctcgtcgtgtgcctggctctgtcagctgccagcgcctctgcaatgcagatgccctgcccctgcgcggggctgcagggcttgtacggcgctggcgccggcctgacgacgatgatgggcgccggcgggctgtacccctacgcggagtacctgatgcagccgcagtgcagcccgctggcggcgg

SEQ ID NO: 25286 - DNA, 243 bp, Zea mays
attgataccaactagcaacatacatagtgaagtacactagcaacatcttagcaccaatgggagccaagatttttgccctccttgccctccttgctctttcagcaagcgctgctacctcgacttttattccacaatgctcacaacaatacctctctccggtgacagccgcgggatttcaatacccaactatacaatcctacatggtacaagaggccatccaagcaagcatcttacggtcattag

SEQ ID NO: 25287 - DNA, 242 bp, Zea mays
caggcgtcctccctgctgccgtcacagcgaggatcagcatcgaggccgggtccactcttggctggcagaagtacgtcggagcccagggcaaggccattggcatcgacaagttcggcgcgagtgctcctgccgggacgatctacaaggagtacggcatcaccgtggagagcatcattgcagctgccaagagcttttaagagctaacaacggtctggagttttttttattgtcgtcgttgatgc

SEQ ID NO: 25288 - DNA, 241 bp, Zea mays
gttaaactttgttgaggggtgatggcggtttctttcgcaaacctcagctccgaggcagggcttaaaaagcttgatgagtaccttctcactcgcagctacatcactggctaccaagcttccaaggatgacttggctgtctacacttcgttttcgtctgctccctcgtccaagtatatcaacgtagcaaggtggtttaatcacattgatgcgctcgtgaggctgagcggaattactgcagagg

SEQ ID NO: 25289 - DNA, 242 bp, Zea mays
atcgaatcgtctcgctcgtggctgccctactcgtgctgcttgccctcgccgccgtttcctccacgcgcagcacaaaaggagtccgtggctgacaacgccgggatgttggcaggcggcatcaaggacgtgccggcgaacgagaacgacctccagctccaggagctcgcgcgcttcgccgtcaatgagcacaaccaaaaggccaatgctcttctggggttcgagaagcttgtgaaggccaagac

SEQ ID NO: 25290 - DNA, 242 bp, Zea mays
gaaatgctgtgagggaggaacatgggggagttgaacgagtctgcaatcggtgtgctgcaattcacaaccaattatctcattgcagcattcttttgctttcccctgtatattttttcaatcggtgtcactcgtatagtggtgttgggtctctttagacaaactcgggacggttgcttatcctaaaaattcgattgtactgcgtggcatgaaatgatagattcgaagaatattttgaacatgct

SEQ ID NO: 25291 - DNA, 245 bp, Zea mays
gaaatcctcccaagagctgtactagatcatagtgtgcaggcatgcatttttacgggctattgggaggatgttggaacaatcaaatcattctttgatgcaaacttggccctcactgagcagccttccaagtttgatttttacgatccaaaaacacctttcttcactgcaccccgatgcttgcctccgacgcaattggacaagtgcaagatgaaatatgcatttatctcagatggttgcttactgag

SEQ ID NO: 25292 - DNA, 243 bp, Zea mays
ggagaactcgacaccatgaaggtgctgatcgttgcccttgctctcctggcgctcgctgcgaggccgcctccagtacaagcggcggctgtggctgccagacaccaccgtttcatctaccgcctccgttctatatgccgcctcagctctatctgccgccgcagcagcagccgcagccatggcaataccccactcaaccaccgcagctaagcccgtgccagcagttcggatcctgcggcgtcggca

SEQ ID NO: 25293 - DNA, 244 bp, Zea mays
gtgttgagtgccgaattgacatgaagaatctgattggcgaacatcttgtagaatctgtaaggaaaacttcagcacaactgttaatgcactcactgagcctattgatatatatagtgaatggattgatgagtgtgagcgtgtcaacactgttgaaggcgacgatgatgcgtgagcatgccccatgcgatgaaactgttacctacaatcgtaatgtaatgtgctggtattctcgaatgccatagcc

SEQ ID NO: 25294 - DNA, 244 bp, Zea mays
atgttgatgagagccgagcttctaaaaatgggctagtgaagattgatcatactggacgtgtacttcaattctttgaaaaaccaaagggtgctgatttgaattctatgagagttgagaccaacttcctgagctatgctatagatgatgcacagaaatatccataccttgcatcaatgggcatttatgtcttcaagaaagatgcacttttagaccttctcaagtcaaaatatactcaattacatga

SEQ ID NO: 25295 - DNA, 239 bp, Zea mays
ggagactgccggaggagtgatgaccgtccttatcccgaggaacaccaccatccccaccaagaaggagcaggtgttctccacctactcggacaaccagcctggtgtgttgatccaggtgtacgagggtgagaggacccggacccgcgacaacaacctgcttgggaagttcgagctctccggcatcccaccggctcctcgtggtgtcccccagatcacggtctgcttcgacatcgacgcca

SEQ ID NO: 25296 - DNA, 239 bp, Zea mays
aacaagcaacatagaaagtggaatccagtagcaacaatagagcaacaatggcgaccaagatactttccctccttatgctccttgctctttctgcatgtgttgctaacgcgacaattttccctcaatgctcacaagctcctatagcttcccttcttcccccataccttccatcaatgatagcttcagtatgtgaaaacccagctcttcaaccctataggcgccaacaagcaatcgcagca

SEQ ID NO: 25297 - DNA, 237 bp, Zea mays
ctgggtcttcagaccattagctttatctactccagagcgcagaagaacccgatcgacaccatgagggtgttgctcgttgccctcgctctcctggctctcgctgcgagcgccacctccacgcatacaagcggcggctgcggctgccagccaccgccgccggttcatctaccgccgccggtgcatctgccacctccggttcacctgccacctccggtgcatctcccaccgccggtccac

SEQ ID NO: 25298 - DNA, 237 bp, Zea mays
ctgccaaggaggctgctagcttcacgtcccaggtcatcatcatgaaccaccctgggcagattggcaacggctatgccccagtgctggactgccacacctcgcacattgctgtcaagtttgcggactcattaccaagattgataggcggtctggcaaagagcttgagaaggagcccaaattcctcaagaatggtgatgctggtatggtgaagatggttcccactaagcccatggtagt

SEQ ID NO: 25299 - DNA, 238 bp, Zea mays
cagaaacacaccaagcgaacagcattagcaacaacctaacaacaatggctaccaagatattatccctccttgcgcttcttgcgctttttgcgagcgcaacaaatgcgttcattattccacaatgctcacttgctccaagttccattattacacagttcctcccaccagttacttcaatgggcttcgaacacccagctgtgcaagcctataggctacaacaagcaattgcggcgagcgt

SEQ ID NO: 25300 - DNA, 237 bp, Zea mays
ggaaagaaacaggacatcaccatcactggtgctagtacgctacctaaggatgaggttgagagaatggtagaagaagccgataagtttgccaaggaggacaaagagaagagagatgcaatcgacaccaaaaaccaggcggactcagtggtctaccagactgagaagcaactgaaggagcttggcgacaaagtccccgctcctgtgaaagagaaggtggatgtgaagctccaggagctc

SEQ ID NO: 25301 - DNA, 240 bp, Zea mays
ccagcaagcaacatagaaagtagaatccattagcaacaatagagcaacaatggcgaccaagatattttccctccttatgctccttgctctttctacatgtgttgctaacgcgacaattttccctcaatgctcacaagctcctatagcttcccttcttcccccataccttccatcattatagcttcagtatgtgaaaacccagctcttcaaccatataggcttcaacaagcaatcgcagca

SEQ ID NO: 25302 - DNA, 239 bp, Zea mays
atagcttcagtatgtgaaaacccagctcttcaaccctataggcgccaacaagcaatcgcagcaagcaacatacctttatcacccttgtttcaacaatcgccagccctatctttggtgcagtcattggtacaaaccatcaaggcacagcagctgcagcaactcgtgctacctgtgatcaaccaagtagctctggcaaacctttctccctactatcagcaacaacaatttcttccattcaa

SEQ ID NO: 25303 - DNA, 241 bp, Zea mays
cagaaacacaccaagcgaagctactagcaacgacctaacaacaatggctaccaagatattagccctccttgcgcttcttgccctttttgtgagcgcaacaaatgcgttcattattccacaatgctcacttgctcctagtgccattattccacagttcctcccaccagttacttcaatgggcttcgaacacctagctgtgcaagccaacatgcaacaacaagcgcttgcggcgagcgtctta

SEQ ID NO: 25304 - DNA, 241 bp, Zea mays
gatggttgcttactgagagaatgcaacatcgagcattctgtgattggagtctgctcacgtgtcagctctggatgtgaactcaaggactccgtgatgatgggagcggacatctatgaaactgaagaagaagcttcaaagctactgttagctgggaaggtcccagttggaataggaaggaacacaaagataaggtgagtatggatgtggaaccaccggttagttcccaaaaatatcactcact

SEQ ID NO: 25305 - DNA, 233 bp, Zea mays
attttgagcattcagaaacacacctagcgaacgtctctagcaacgacctaacaacaatggcttccaagacattatccctccttgcgcttcttgccctttttgtgagtgcaacaaatgcgttcattattccacaatgctcacttgctccgagtgccattattccacagttcctccctccagttacttcaatgggcttcgaacacccagctgtgcaagcctataggctacaacaa

SEQ ID NO: 25306 - DNA, 235 bp, Zea mays
gtgaaaacccagctcttcaaccatataggcttcaacaagcaatcgcagcaagcaacatacctttatcacccttgttcctccaacaatcatcagccctattacatcagttacctttggtgcatttattggcacaaaacatcagggcacaacaactacaacaacttgtgctagcaaaccttgctgcctactctcagcaacagcagtttcttccattcaaccaactagctgcattgaa

SEQ ID NO: 25307 - DNA, 234 bp, Zea mays
cttgctccgagtgccattattccacagttcctccctccagttacttcaatgggcttcgaacacccagctgtgcaagcctataggctacaacaagcgcttgcggcgagcgtcttagaacaaccaattgcccaattacaacaacaatccttggcacatctaaccatacaaaccatcgcaacgcagcagcaacaagcactgagccacctagccgtggtgaaccctatcgcctacttg

SEQ ID NO: 25308 - DNA, 234 bp, Zea mays
cttcgtgaagaccctgacggggaaaacgatcacgttggaggaggagtcctcggacaccatcgacaacgtgaaggccaagatacaggacaaggagggcatcccgccggaccagcagcggctaatcttcgccggcaagcagctcgaggacggccgcaccctcgccgactacaacatccagaaggagtccaccctccacctggtgctccgcctccgaggtggcgccaagaagcgcaa

SEQ ID NO: 25309 - DNA, 230 bp, Zea mays
caacaagcaacatagaaagtggaatacagtagcaaaaatagagcaacaatggcggccaagatattttccatccttatgctccttgctctttctgcatgtgttgctaacgcgaccatttttcctcaatactcacaagctcctatagctgcccttcttcccccataccttccatcaatgaccgctttagtatgtgaaaacccagcccctcaaccctacaagatccagcaagc

SEQ ID NO: 25310 - DNA, 231 bp, Zea mays
atgagtggcaattggttaacaagcagaagcctatctggatgaggaagcctgaggatattaccaaggaagagtatgctgctttctacaagagcttgaccaacgactgggaggagcatctcgccgtgaagcacttctctgttgagggtcagcttgagttcaaggctgtcctgtttgtgccgaagagggccccctttgacctctttgacaccaggaagaagccgaacaacatca

SEQ ID NO: 25311 - DNA, 232 bp, Zea mays
aacgcaacagcaacaacaatccttggcacatctaaccctacaaaccattgcaacgcaacaacaacaacaacagtttctgccatcactgagccacctagccgtggtgaaccctgtcacctacttgcaacagcagctgcttgcatccaacccacttgctctggcgaacgtagctgcataccagcaacaacaacagctgcaacagtttatgccagtgctcagtcaactagccatg

SEQ ID NO: 25312 - DNA, 157 bp, Zea mays
acccaatggccatgacgattccacccatgttcttacagcaaccctttgttggtgctgcattctagatagaaatatttgtgttgtatcgaataatgagttgacatgccatcgcgtgtgactcattattaacaataaaacaagtttcctcttattatct

SEQ ID NO: 25313 - DNA, 235 bp, Zea mays
gtcgtctacactgacgctaactgggccgggtgcccagacactcggcgctccacctccggctacgcgtcttcttagggggcaacctagtttcctggtcgtcgaagcgccagccggtcgtttcccgctcaagtgcagaggcggagtaccgtgccgtggccaacagcgtggcggaggctgcttggctcaggcagctcctcgccgagcttcacagtcccctctccaagagcacgttggt

SEQ ID NO: 25314 - DNA, 236 bp, Zea mays
gagcgccacctccacgcatacaagctgcggctgcggctgccagccaccgccgccggttcatctaccgccgccggtgcatctgccacctccggttcacctgccacctccggtgcatctcccaccgccggtccacctgccgccgccggtccacctgccaccgccggtccatgtgccgccgccggttcatctgccgccgccaccatgccactaccctactcaaccgccccggcctcagc

SEQ ID NO: 25315 - DNA, 148 bp, Zea mays
cgccctactactgattcatgatatttgggaaatctcctctatccatccctctctatctatatatgtaataatgcagtaagacgacacacattatcatgtgtggtatgaccaataatatatgcatcataataaagttttggttttaaaa

SEQ ID NO: 25316 - DNA, 206 bp, Zea mays
acgcagtttgcggctaaccccgcaaccctcttacaactacaacaattgttgccctttgtccaacttgctttgacaaacccagcagcctcctaccaacaacacatcattggtggtgccctcttttagattgattattagttgtaattcaataataaagttttttggatgatgtatgtggccaaccagaaataagaagttacatttcc

SEQ ID NO: 25317 - DNA, 246 bp, Zea mays
ggtcaaagatggtgtcgctgaagttgcaaaagcgccttgccgcgagctacctcaagtgtgggaaaggcaaggtgtggcttgacccaaatgaagttagtgagatctccatggcaaactcccgccagaatatccggaagttggttaaggatgggtttatcatcaagaagcctcataagatccactctagatcccgtgcaagaagggcacatgacgccaagcaaaagggacgccactcaggatatggta

SEQ ID NO: 25318 - DNA, 245 bp, Zea mays
gtcgcacatatctactatactatactctaggaagcaaggacaccaccgccatggcagccaagatgcttgcattgttcgctctcctagctctttgtgcaagcgccactagtgcgacccatattccagggcacttgccaccagtcatgccattgggtaccatgaacccatgcatgcagtactgcatgatgcaacaggggcttgccagcttgatggcgtgtccgtccctgatgctgcagcaactgttg

SEQ ID NO: 25319 - DNA, 241 bp, Zea mays
caaaccatcaaggcacagcagctgcagcaactcgtgctacctgtgatcaaccaagtagctctggcaaacctttctccctactatcagcaacaacaatttcttccattcaaccaactatctacactgaaccctgctgcttatttgcagcaacaactattaccattcagccagctagctactgcctactctcatcaacaacaacttcttccatttaaccaattggccgcactgaacctcgctg

SEQ ID NO: 25320 - DNA, 245 bp, Zea mays
cccctctcctcgctacgcttcgcttcctcggcgccgattcctcctcctcctcctccaccctcgtccgtccccttccggcgcacgagctcgcccgagatggcgaacgcgagatcgggtgtcgctgtgaacgatgagtgcatgctgaagtttggcgagctgcagtcgaagaggctgcaccgcttcataactttcaagatggacgacaagttcaaggagatagttgtggaccaggtcggggatcgcgc

SEQ ID NO: 25321 - DNA, 245 bp, Zea mays
cgccgccgccgcctctgatctccgcgaggttgtcaggattcaatatgtcgaccagcacattcgctacttcctgcacgctgttgggcaatgttagaacaacgcaggcctcccagacagcggtgaagagcccttcgtctctaagcttcttcagccaagttacgaaggttccaagcctgaagacctccaagaaactggatgtctccgccatggctgtatacaaggtgaagcttgtcgggcctgaaggt

SEQ ID NO: 25322 - DNA, 244 bp, Zea mays
cgatcagcaaagcggcagtgcgtagagaggatcgtcgaacagaacagcatgaagatggtcatcgttctcgtcgtgtgcctggctctgtcagctgccagcgcctctgcaatgcagatgccctgcccctgcgcggggctgcagggcttgtacggcgctggcgcggcctgacgacgatgatgggcgccggcgggctgtacccctacgcggagtacctgaggcagccgcagtgcagcccgctggcggc

SEQ ID NO: 25323 - DNA, 245 bp, Zea mays
caggatggaacaattgagttaaacagaggtcctagatctggccggttcaagaaccagaaattgtacggtcatactgtcactattgctgtgaaagggcagtctctcccttctagtgaaagcaagaatgatagtgctgtgcctgatagagcaaagtacaatagagatgacttccctgttcagtacgatgctgcaaagttctttgtcattaaatcgtacagcgaggatgacatccacaagagcgtaaa

SEQ ID NO: 25324 - DNA, 242 bp, Zea mays
gaacaatgcagcgtactgtgcccagcctgcttgcatcgaaccatcctgcattcagccctcctgtgtagctccaaccacttgctttggcccccggttcttctccaaatccaagtccaagtctaagtccaagcccaagaaggagaagtcgaagcctgatggtccaaaccaagagaacctcttcccggagctgattgctgagccaactgatgctcgctcgatgtcctttgttggcactcatgagt

SEQ ID NO: 25325 - DNA, 245 bp, Zea mays
ctttggtccatttggtggcacaaaacatcagggcacaacaactacaacaacttgtgctagcaaaccttgctgcatactctcagcaacatcagtttcttccattcaaccaactggctgcattgaactctgctgcttatttgcaacaacaattaccattcagccagctagttgctgcctacccccagcaatttcttccattcaaccaactgtctacactgaaccctgctgcttatttgcagcaacaa

SEQ ID NO: 25326 - DNA, 242 bp, Zea mays
gcatgtgttgctaacgcgaccatttttcctcaatactcacaagctcctatagctgcccttcttcccccataccttccatcaatgaccgcttcagtttgtgaaaacccagcccttcaaccctacaggctccaacaagcaatcgcaacaagcaacttacctttatcacccctgttctttcaacaatcgccagccctatctttggtgcagtcattggtacaaaccatcagggcacaacagctgca

SEQ ID NO: 25327 - DNA, 241 bp, Zea mays
aagaagcctgaggactgggatgacgaggaagatggtgaatggactgcccctaccattcccaacccagaatacaaaggaccatggaaacaaaagaaaatcaagaaccctaactaccagggtaaatggaaggcacctatgattgacaacccagatttcaaggatgatccgtacatttatgcatttgacagcctgaaatacattggcattgagctgtggcaggttaaatcaggcactttgtttg

SEQ ID NO: 25328 - DNA, 83 bp, Zea mays
ataataatgcagtaagacgacacacattatcatgtgtggtatgaccaataatatatgcatggtcataataaagttttggtttt

SEQ ID NO: 25329 - DNA, 239 bp, Zea mays
caactagcaacatagaaagcacaatagtgtaccaacaatggcagccaaaatattttgcctccttatgctccttggtctttctgcaagtgctgctacggcgaccattttcccgcaatgctcgcaagctcctatagcttcccttcttcccccgtacctctcaccagcggtgtcttcggtatgtgaaaacccaattcttcaaccctacaggatccaacaggcaatcacagctggcatcttac

SEQ ID NO: 25330 - DNA, 241 bp, Zea mays
caccatgagggtgttgctcgttgccctcgctctcctggctctcgctgcgagcgccacctccacgcatacaagctgcggctgcggctgccagccaccgccgccggttcatctaccgccgccggtgcatctgccacctccggttcacctgccacctccggtgcatctcccaccgccggtccacctgccgccgccggtccacctgccaccgccggtccatgtgccgccgccggttcatctgccg

SEQ ID NO: 25331 - DNA, 261 bp, Zea mays
gagtcgacaccatgaaggtgctggtcgttgcccttgctctcctggcgctcgctgcgagcacgcctccagtacaagcagcggctgtggctgccagacaccaccgtttcatctaccgcctccgttctatatgccgcctccgtactatctgccgccgcagcagcagccgcagccatggcaataccccactcaaccaccgcagctaagcccgtgccagcagttcggatcctgcggcgtcggcagcgtcggcagcccgttcctggg

SEQ ID NO: 25332 - DNA, 260 bp, Zea mays
accctgctgcttacttgcaggcacaacagctactaccattcaaccaacttgtcaggagccctgctgccttcttactgcagcaacagttgcttccattccatctacaagttgtggcaaacattgctgctttcttgcaacaacaacaacaattgctgccattttacccacaggttgtgggaaacattaacgccttcttgcaacagcaacagttgctaccattctacccacaggatgtggcaaacaatgtcgccttcttacaa

SEQ ID NO: 25333 - DNA, 259 bp, Zea mays
ataaaattcaccccccatccacatgctggcgacaagtggtgtgtctatccgagctatgactacgctcattgcatggtggattctcttgaaaacatcacacattcgctgtgcacacttgagtttgacatacgtcgcccttcatactactggctacttgttgccttgggcctttatcaaccatatgtgtgggaatattcgaggctaaacatatcaaatactgtgatgtctaaaagaaagttgaatcgacttgtgacagaga

SEQ ID NO: 25334 - DNA, 258 bp, Zea mays
caaagcgtcagtgcgtagagaggatcgtcgaacagaacagcatgaagatggtcatcgttctcgtcgtgtgcctggctctgtcagcagccagcgcctctgcaatgcagatgccctgcccctgcgcggggctgcagggcttgtacggcgctggcgtcggcctgacgacgatgatgggcgccggcgggctgtacccctacgcggagtacctgaggcagccgcagtgcagcccgctggcggcggcgccctactacgccgggt

SEQ ID NO: 25335 - DNA, 254 bp, Zea mays
acgaccattttcccgcaatgctcgcaagctcctatagcttcccttcttcccccgtacctctcaccagcggtgtcttcggtatgtgaaaacccaattcttcaaccctacaggatccaacaggcaatcacagctggcatcttacctttatcacccttgttcctccaacaatcatcagccctattacatcagttacctttggtgcatttattggcacaaaacatcagggcacaacaactacaacaacttgtgctagc

SEQ ID NO: 25336 - DNA, 260 bp, Zea mays
agattgtaccagctctgactcaactagctgtggcaaacactgttgcctacttgcaacagctgcttccattcaaccaactgactctgtcgaactctgctgcgtacctacaacagcgacaacagttacttaatccattggtagtggctaacccattggtcgtcgccttcctacagcagcaacaattgctgccatacaaccagttctctttgatgaatcctgtcttgtcgaggcagcaacccatcgttggaggtgccatcttt

SEQ ID NO: 25337 - DNA, 260 bp, Zea mays
aatcgcagcaagcaacatacctttatcacccttgtttcaacaatcgccagccctatctttggtgcagtcattggtacaaaccatcagggcacagcagctgcagcaactcgtgctacctgtgatcaaccaagtagctctggcaaacctttctccctactctcagcaacaacaatttcttccattcaaccaactgtctacattgaaccgtgctgcttatttgcagcaacaactattaccattcagccagctagctactgcct

SEQ ID NO: 25338 - DNA, 230 bp, Zea mays
attttgagcattcagaaacacacctagcgaaggcactagcaacgacctaacaacaatggctaccaagatattatccctctttgcggttcttgccctttttgtgagcgcaacaaatgggttcattattccacaatgctcacttggctctagtgccattattccacagttcctccctccagttacttcaatgggcttcgaacacccagctgtgcaagcctacaaggtacaac

SEQ ID NO: 25339 - DNA, 257 bp, Zea mays
acaactagcaacatagaaagcacaatagtgtaccaacaatggcagctaaaatattttgcctccttatgctccttggtctttctgcaagtgctgctacggcgaccattttcccacaatgctcacaagctcctatagcttcccttcttcccccgtacctctcaccaacggtgtcttcggtatgtgaaaacccaattcttcaaccctacaggatccaacaggcaatcgcagctggcatcttaggtttatcacccttgttc

SEQ ID NO: 25340 - DNA, 255 bp, Zea mays
agccggtccatgtgccgccgccggttcatctgccgccgccaccatgccactaccctactcaaccgccccggcctcagcctcatccccagccacacccatgcccgtgccaacagccgcatccaagcccgtgccagctgcagggaacctgcggcgttggcagcaccccgatcctgggccagtgcgtcgagtttctgaggcatcagtgcagcccgacggcgacgccctactgctcgcctcagtgccagtcgttgcggc

SEQ ID NO: 25341 - DNA, 251 bp, Zea mays
agattctagagccgttatttctaaaggaggacaagcgattgcggtttcaagggatcacaaacctgatcagacagatgagagacaaagaattgaggacgcagggggctttgttatgtgggctgggacatggcgagtgggtggtgttcttgctgtctctcgcgcatttggtgataaactcttgaagcagtatgttgtcgctgaccctgaaatcaaggaggaggtggtcgacagctcccttgaattcctcatcc

SEQ ID NO: 25342 - DNA, 255 bp, Zea mays
aagcaacatagaaagtggaatccagtagcaacaacagagcaacaatggcgaccaagatattttccctccttatgctccttgctctttctgcatgtgttgctaacgcgacaattttccctcaatgctcacaagctcctatagcttcccttcttcccccataccttccatcaatgatagcttcagtatgtgaaaacccagctcttcagccctataggctccaacaagcaatcgcagcaagcaacatacctttatcac

SEQ ID NO: 25343 - DNA, 250 bp, Zea mays
agccgcagcaccggtaccaggcgatcttcggcttggtcctccagtccatcctgcagcagcagccgcatagggccaggtcgcggggctgttggcggcgcagatagcgcacaactgacggcgatgtgcggcctgcagcagccgactccatgcccctacgctgctgccggcggtgtcccccactgaagaaactatgtgctgtagtatagccgctggctagctagctagttgagtcatttagcggcgatgattg

SEQ ID NO: 25344 - DNA, 251 bp, Zea mays
acacagttcctcccaccagttacttcaatgggcttcgaacatccagccgtgcaagcctacaggctacaactagcgcttgcagcgagcgccttacaacaaccaattgcccaattgcaacaacaatccttggcacatctaaccctacaaaccattgcaacgcaacaacaacaacaacagtttctgccatcactgagccacctagccgtggtgaaccctgtcacctacttgcaacagcagctgcttgcatccaa

SEQ ID NO: 25345 - DNA, 252 bp, Zea mays
tgttcctgcggaggatcctgaccggtgggggcggcctggcggccctgagggcggcgcgcgccgtgaaggagacgacggggatcgtgggccttgaggtggtgcctaacgcgcgagaggttctggtagggctctacgagcgcacgctcaaagagatcaaggccgtccccgaagacgagggttaccgcaatgccgttgaatccttcaccggtcaccgcctccagatctgccaggaggaggaggactggaagcgca

SEQ ID NO: 25346 - DNA, 172 bp, Zea mays
atgcaacaattgctgccattcaaccaacttgctttgacaaacccagcagtgttctaccaacaacccatcattggtggtgccctcttttagatttcttatgagttatagttcaataataaagttttttatctgatgtttgtggcttcccagaaataagaaagtacatttctag

SEQ ID NO: 25347 - DNA, 251 bp, Zea mays
gcaaagcggcagtgcgtagagaggatcgtcgaacagaacagcatgaagatggtcatcgttctcgtcgtgtgcctggctctgtcagctgccagcgcctctgcaatgcagatgccctgcccctgcgcggggctgcagggcttgtacggcgctggcgccggcctgacgacgatgatgggcgccggcgggctgtacccctacgcggagtacctgaggcagccgcagtgcagcccgctggcggcggcgccctacta

SEQ ID NO: 25348 - DNA, 184 bp, Zea mays
caacaacaattgctgccatttaaccaacttgctttgacgaatcctaccaccttattgcagcagcccaccattggtggtgccatcttctagatttttttatgctttatactgtaataataaagttctcatactgatatgtgcaacttctcagtaataaaagattagagatctatattttaagttc

SEQ ID NO: 25349 - DNA, 250 bp, Zea mays
ataccttccatcaattatagcttcaatatgtgaaaacccagctcttcaaccatataggcttcaacaagcaatcgcagcaagcaacatacctttatcgcccttgttgtttcaacaatcgccagccctatctttggtgcagtcattggtacaaaccatcagggcacaacagctgcagcaactcgtgctacctctgatcaaccaagtagctctggcaaacctttctccctactctcagcaacaacaatttctt

SEQ ID NO: 25350 - DNA, 248 bp, Zea mays
cccatgcccgtaccaacagccgcatccaagcccgtgccagctgcagggaacctgcggcgttggcagcaccccgatcctgggccagtgcgtcgagttcctgaggcatcagtgcagcccgacggcgacgccctactgctcgcctcagtgccagtcgttgcggcagccgtgttgccagcagctcaggcaggtggagccgcagcaccggtaccaggcgatcttcggcttggtcctccagtccatcctgcagc

SEQ ID NO: 25351 - DNA, 247 bp, Zea mays
aaacgagctggttctacgcgatcaacctgaagaagcaatcctgttgaaagtcaacaacaaggtcccagggcttgggctccaactagatgcttcagaattgaacctgctttaccgggatagatacagcaccgaggtaccagattcgtatgaacatcttctactggatgtgctagatggagatagtcatttattcatgcgcaacgacgagctggctgccgcatggaacgtgctgactccgataatccat

SEQ ID NO: 25352 - DNA, 248 bp, Zea mays
agccatcacagcaagcatcttacggtcgttagcattgaccgtccaacaaccatatgccctattgcaacaaccatccttagtgaatctgtatctccaaagaatcacagcacaacaactacaacaacggttgcttccaacaattaatcaagtagttgcagcgaaccttgctgcttaccttcagcaacaacaatttcttccattcaatcaactagctggggtgaaccctgctgcttacttgcaggcacaac

SEQ ID NO: 25353 - DNA, 248 bp, Zea mays
gatgattacaagaatagagttcatgcattccaaagggtacttacacagagacatcaaacctgacaactttctgatgggtcttggtcggaaagcaaaccaggtatatataattgattttggccttgcaaaaagataccgtgattccactacgaatcgccatattccttacagagaaaataagagcttgactggtacagcgcgctatgcaagttgcaacacccaccttggaatagaacaaagtcgcagag

SEQ ID NO: 25354 - DNA, 247 bp, Zea mays
taaagaacgtggtgatcacaaacagtaagggcatccaagaggctgatcacccggaagaagggtactacataaggtctggaatcgtggtgatcttgaagaatgcaaccatcaacgatgggtctgtcatatagatcggctgcgtttgcgtctacaaaacaagaacctacaatggtattgcatcgatggatcgtgtaaccttggtatggtaagagccgcttgacaggaagtcgagcgttcgggcgcaaga

SEQ ID NO: 25355 - DNA, 245 bp, Zea mays
attcggagaaggttgatatatggggtgccggtgtgctactacatgtactactacttggttcacttccatttcaagggggctctctggacgccgttttcgagtccataaagacacttgaacttgatttcagcagcaccccatgggaatcaatatcagttcttggacgggatcttattgggcgaatgctaaatcgagatgtctcttgcagaatgactgctgatgaagttcttagtcacccatgggtc

SEQ ID NO: 25356 - DNA, 246 bp, Zea mays
gcataccagcaacaacaacagctgcaacagtttatgccagtgctcactcaactagccatggtgaaccctgccgtctacctacaactactttcatctagcccgctcgcggtgggcaatgcacctacgtacctacaacaacagttgctgcaacaaattgtaccagctctgactcagctagctgtggcaaaccctgctgcctacttacaacagttgcttccattcaaccaactggctgtgtcaaactct

SEQ ID NO: 25357 - DNA, 247 bp, Zea mays
aaacaacctaacaacaatggctaccaagatattatccctccttgcgcttcttgcgctttttgcgagcgcaacaaatgcgttcattattccacaatgctcacttgctccaagttccattattacacagttcctcccaccagttacttcaatgggcttcgaacacccagctgtgcaagcctataggctacaacaagcaattgcggtgagcgtcttacaacaaccaatttcccagttgcaacaacaatcc

SEQ ID NO: 25358 - DNA, 248 bp, Zea mays
agcaaagcgtcagtgcgtagagaggatcgtcgaacagaacagcatgaagatggtcatcgttctcgtcgtgtgcctggctctgtcagcagccagcgcctctgcaatgcagatgccctgcccctgcgcggggctgcagggcttgtacggcgctggcgccggcctgacgacgatgatgggcgccggcgggctgtacccctacgcggagtacctgaagcagccgcagtgcagcccgctggcggcggcgccct

SEQ ID NO: 25359 - DNA, 246 bp, Zea mays
attgagaccaactagcaacatagaaagcacaatagtgtaccaacaatggcagccaaaatattttgcctccttatgctccttggtctttctgcaagtgctgctacggcgaccattttcccgcaatgctcgcaagctcctatagcttcccttcttcccccgtacctctcaccagtggtgtcttcggtatgtgcaaacccaattcttcaaccctacaggatccaacaggcaatcacagctggcatctta

SEQ ID NO: 25360 - DNA, 247 bp, Zea mays
atagaaagcacaatagtgtaccaacaatggcagccaaaatattttgcttccttatgctccttggtctttctgcaagtattgctaccgtaaccattttcccacaatgctcacaagctcctatagcttcccttcttcccccatacctctcaccagcggtgtcttcaatgtgtgaaaacccaattgttcaaccctacaggatccaacaggcaatcgcaacaggcatcttaccattatcacccttgttcct

SEQ ID NO: 25361 - DNA, 249 bp, Zea mays
caagacggggtgaacaccaaggaggatgtcgcgtggtacgctggcaacgcatggcgtacatctacaaggccaagaccaagagcaatgagacccgctacaggtgcatctggggcaaggtcacccgtccgcacggaaactcgggcgtcgtccgtgccaagttcaagtccaacctcccgcctgagtccatggggcgcaaggtcagagtgttcatgtacccgagcagcatctaaggttttgttggagtaaaga

SEQ ID NO: 25362 - DNA, 247 bp, Zea mays
gatcgcgagcggccgccctttttttttttttttattattcctttccatttcaatggttcattcaggtcattgctcacactgccacccatggtgatgggtgacactacgttactcatcgccgctaaatgagtaaactagcgagctaggtagctagtcagcggctccattacattattactacagtacatagtttcctcagtagtagacactgccggcagctgcgttgcaagggcagggacctggctgc

SEQ ID NO: 25363 - DNA, 246 bp, Zea mays
aagaaacacacctagcgaagcagctagcaacgacctaacaacaatggctaccaagatattatccctctttgcgcttcttgcccttttttgtgagcgcaacaaatgcgttcattattccacaatgctcacttgctcctagtgccattattccacagttcctcgctccagttacttcaatgggcttcgaacacccagctgtgcaagcctacaggctacaacaagcgcttgcggcgagcgtcttacaac

SEQ ID NO: 25364 - DNA, 244 bp, Zea mays
caattagctcatcgactccagattggagaactcgacaccatgaaggtgctgatcgttgcccttgctctcctggcgctcgctgcgagtgcgcctccagtacaagcggcggctgtggctgccagacaccaccgtttcatctaccgcctccgttctatatgccgcctccgttctatctgccgcagctctgcagccgcagccatggcaataccccactcaaccaccgcagctaagcccgtgccagcag

SEQ ID NO: 25365 - DNA, 253 bp, Zea mays
  unsure (1)..(253): unsure at all n locations
gacttttattccacaatgctcacaacaatacctctctccggtgacagccgcgggatttcaatacccaactatacaatcctacatggtacaagaggccatccaagcaagcatcttacggtcattagcattaaccctccaacaaccatatgctctattgcaacagccatccttagtgcatctgtatctccanagaatcgcggcacaacaactacaacaacagttgctaccaacaatcaatcaagtagttgcagcg

SEQ ID NO: 25366 - DNA, 298 bp, Zea mays
ctattgatcagatacgaacaattgatcgcaattgtgaaattccccatgaaggtcctttctgcgaccttatgtggagtgaccctgaggagatagagacatgggctgttagtccccgtggagcaggttggctgtttggatcgcgcgtcacagcagagttcaactttgttaacggtatcgagctagtttgccgggctcaccagctggtccaggaaggcttaaagtacatgttccaggagaagggccttgtcactgtgtggtctgcacctaattattgctacagatgtggcaatgtcgcttc

SEQ ID NO: 25367 - DNA, 253 bp, Zea mays
gatcctgcggcgtcggcagcgtcggcagcccgttcctgggccagtgcgtcgagttcctgaggcaccagtgcagcccggcggcgacgcgctacggctcgccacagtgccaggcgctgcagcagcagtgctgccaccagatcaggcaggtggagccgctgcaccggtaccaggcgacatacggtgtggtcctgcagtccttcctgcagcagcagccgcagggcgagctcgcggcgctgatggcggcccaggtagc

SEQ ID NO: 25368 - DNA, 274 bp, Zea mays
gagcaagaagaaggctttcacaaagtatgctctcaaatatgaaaatgatgctggcaagaaggaaattcagctgcagcttgagaagatgaagaaatatgcttctgttatccgtgtcattgctcatacccagattaggaagatgaagggtttgaagcagaagaaggctcacctgatggagattcaggtcaatggtggtaccattgctgacaaggtggactatggctacaaattctttgagaaagaggtcctgttgatgctgtcttcagaaggatga

SEQ ID NO: 25369 - DNA, 250 bp, Zea mays
gacgtgcagtccgtcgcgcacagctgcagatgatgatgcagcttgagcgtgccgctgccgccagcagcagcctgtacgagccagctctgatgcagcagcagcagcagctgctggcagcccagggtctcaaccccatggccatgatgatggcgcagaacatgccggccatgggtggactctaccagtaccagtaccagctgcccagctaccgcaccaacccctgtggcgtctccgctgccattccgcccta

SEQ ID NO: 25370 - DNA, 271 bp, Zea mays
agaccaacaagcaacatagaaagtggaatccagtagcaacaatagagcaacaatggcgaccaagatactttccctccttatgctccttgctctttctgcatgtgttgctaacgcgacaattttccctcaatgctcacaagctcctatagcttcccttcttcccccataccttccatcaatgatagcttcagtatgtgaaaacccagctcttcaaccctataggctccaacaagcaatcgcagcaagcaacatacctttatcaccttgtttc

SEQ ID NO: 25371 - DNA, 300 bp, Zea mays
gtctgcgccatggaggtgaggcacagcgtcgaacggctggaccaggccgacgcctacagccctgggagtgggaggatcacacgcctcaccagccacaagttccccgtcctcaacctcgtacagatgagcgcggtgcgggtagacctgtaccaggacgccatcatgtcgccgttctggaacttcaacgcccacagcgccatgtacggcatcaggggcagtgcaagggtccaggtcgccagcgacaacggggacacggtgttcgacgacgtgctccgtgcggggcagctgctcatcgtaccc

SEQ ID NO: 25372 - DNA, 294 bp, Zea mays
ctactatactatactctaggaagcaaggacaccaccgccatggcagccaagatgcttgcattgttcgctctcctagctctttgtgcaagcgccactagtgcgacccatattccagggcacttgccaccagtcatgccattgggtaccatgaacccatgcatgcagtactgcatgatgcaacaggggcttgccagcttgatggcgtgtccgtccctgatgctgcagcaactgttgggcctaccgcttcagacgatgccagtgatgatgccacagatgatgacgcctacatgatgt

SEQ ID NO: 25373 - DNA, 272 bp, Zea mays
aggagccgctgcaccggtaccaggcgacatacggtgtggtcctgcagtccttcctgcagcagcagccgcacggcgagctcgcggcgctgatggcggcccaggtagcgcacagctgacggcgatgtgcggcctgcagctgcagcagccaggtccctgcccttgcaacgcagctgccggcggtgtctactactgaggaaactatgtactgtagtaataatgtaatggagccgctgactagctacctagctcgctagtttactcatgtagcggcg

SEQ ID NO: 25374 - DNA, 273 bp, Zea mays
  unsure (1)..(273): unsure at all n locations
caacaaccacaacagcctcagcaatatcagcagggccaggaaaaatcacaacagcaacaatgtcattgccaggagcagcaacagactacaaggtgcagctataactactatagcagtagctcaaatctaaaaaattgtcatgaattcctaaggcagcagtgcagccctttggtaatgccttttctccaatcacgtttgatacaaccaagtagctgccaggtattgcagcaacaatgttgtcatgatcttangcagattgagccacaatacatt

SEQ ID NO: 25375 - DNA, 258 bp, Zea mays
  unsure (1)..(258): unsure at all n locations
ggacgtcagcctagcaattagctcatcgactccagattggagaactcgacaccatgaaggtgctgatcgttgcccttgctctcctggcgctcgctgcgaggccgcctccagtacaagcggcggctgtggctgccagacaccaccgtttcatctaccgcctccgttctatatgccgcctccgttctatctgcacgcgcagaacctgccgcagccatggcaataccccactcanacgacgcagctaagcacgtgccagca

SEQ ID NO: 25376 - DNA, 297 bp, Zea mays
  unsure (1)..(297): unsure at all n locations
attgtgttacacgtatgccaggagcacacgctcagtatcaatcgttcctcctgcatactatgctcatctggcagccttccgagctcggttttacatggagccagatacaagtgacagcggatctgtggcgagcggtgctacgacaagccgtggccctccaccaggggcgcgcaacaccagggctggtgctgcaaatgttgctgtgaggccattacctgccnctcaagaaaacgtgaagcgcgtcatgttctactgctaagattgacgctgcgctgatgctgtgagcaagcattatcg

SEQ ID NO: 25377 - DNA, 271 bp, Zea mays
attttgagcattcagaaacacaccaagcgaacgcactagcaacgacctaacaacaatggctaccaagatattagccctccttgcgcttcttgccctttttgtgagcgcaacaaatgcgttcattattccacaatgctcacttgctcctagtgccattattccacagttcctcccaccagttacttcaatgggcttcgaacatctagctgtgcaagccaacatgcaacaacaagcgcttgcggcgagcgtcttacaacaaccaattgcccaa

SEQ ID NO: 25378 - DNA, 270 bp, Zea mays
tagcaacatagaaagcacaatagtgtaccaacaatggcagccaaaatattttgcctccttatgctccttggtctttctgcaagtgctgctacggcgaccattttcccacaatgctcacaagctcctatagcttcccttcttcccccgtacctctcaccagcggtgtcttcggtatgtgaaaacccaattcttcaaccctataggatccaacaggcaatcgcagctggcatcttacctttatcacccttgttcctccaacaatcatcagcc

SEQ ID NO: 25379 - DNA, 197 bp, Zea mays
ggcggctgtggctgccagacaccaccgtttcatctaccgcctccgttctatatgccgcctccgttctatctgccgccgcagcagcagccgcagccatggcaataccccactcaaccaccgcagctaagcccgtgccagcagttcggatcctgcggcgtcggcagcgtcggcagcccgttcctgggccagtgcgtcga

SEQ ID NO: 25380 - DNA, 269 bp, Zea mays
ggcaatcgcagctggcatcttacctttatcacccttgttcctccaacaatcatcagccctattacagcagttacctttggtgcatttattggcacaaaacatcagggcacaacaactacaacaacttgtgctagcaaaccttgctgcctactctcagcaacaacagtttcttccattcaaccaactagctgcattgaactctgcttcttatttgcaacaacaacaactaccattcagccagctatctgctgccctaccccagcaatttc

SEQ ID NO: 25381 - DNA, 261 bp, Zea mays
atgaactctcctgcttatttacagcagcaacaactactaccattcagccagctagctggtgtgagccctgctaccttcttgatacaaccacagttgttgccgttctaccagcacgctgcgcctaacgctggcaccctcttacaactgcaacaattgctgccattcaaccaacttgctttgacaaacccagcagcgttctaccaacaacccatcattggtggtgccctcttttagatttcttatgagttatagttcaataat

SEQ ID NO: 25382 - DNA, 266 bp, Zea mays
caaaaacacaccaagcgaacgcactagcaacgacctaacaccaatggctaccaagatattagccctccttgcgcttcttgcccttttagtgagcgcaacaaatgcgttcattattccacagtgctcacttgctcctagtgccagtattccacagttcctcccaccagttacttcatgggcttcgaacatccagccgtgcaagcctacaggctacaactagcgcttgcggcgagcgccttacaacaaccaattgcccaattgcaaca

SEQ ID NO: 25383 - DNA, 268 bp, Zea mays
gtcagccctattacagcagttacctttggtgcatttgttggcacaaaacatcaaggcacaacaactacaacaacttgtgctaggaaaccttgctgcctactctcagcaacagcagtttcttccattcaaccaactggctgcattgaactctgctgcttatttgcaacaacaactaccattcagtcagctagctgctgcctacccccagcaatttcttccattcaaccaactggcagcattgaactctgctgcttatttacaacagcaa

SEQ ID NO: 25384 - DNA, 261 bp, Zea mays
ggacgtcagcctagcaattagctcatcgactccagattggagaactcgacaccatgaaggtgctgatcgttgcccttgctctcctggcgctcgctgcgagcgccgcctccagtacaagcggcggctgtggctgccagacaccaccgtttcatctaccgcctccgttctatatgccgcctccgttctatctgccgccgcagcagctatcgcagccatggcaataccccactcaaccaccgcagctaagcccgtgccagcagt

SEQ ID NO: 25385 - DNA, 240 bp, Zea mays
caacaagcaacatagaaagtggaatccagtagcaacaacagagcaacaatggcgaccaagatattttccctccttatgctccttgctctttctgcatgtgttgctaacgcgacaattttccctcaatgctcacaagctcctatagcttcccttcttcccccataccttccatcaatgatagcttcagtatgtgaaaacccagctcttcagccctataggctccaacaagcaatcgcagca

SEQ ID NO: 25386 - DNA, 253 bp, Zea mays
gtgccaccgcctgggcctggccaaggccatcggcgtgtgcaacttctcctgcaagaagctcgagaccctgctctccttcgccaccatccctcccgtggtcaatcaggttgagatcaacccggtgtggcagcagcggaagctgagggagttctgcagggcgaagggcatccagctatgcgcctactcgcccctgggcgccaagggcacgcactggggcagcgactcggtgatggactccggcgtcctgcacgag

SEQ ID NO: 25387 - DNA, 235 bp, Zea mays
aaactggctgtgtcaaactctgctgcgtacctacaacagcgacaacagttacttaatccattggcagtggctaacccattggtcgctaccttcctgcagcagcaacaacaattgctgccatacaaccagttctctttgatgaaccctgccttgcagcaacccatcgttggaggtgccatcttttagattacatatgagatgtactcgacaatggtgccctcataccgacgatgtg

SEQ ID NO: 25388 - DNA, 261 bp, Zea mays
gaaaaagcttgaagatattgttccttcatcacacaactgtgatattccgcatgtgaaccgtactgagtaccagctgattgatatatcagaggatggatttgtgagccttcttacttcagatggcaacactaaggatgatcttagactcccaactgatgagactcttgtggcccagatcaaggaaggggttgaaagcggcaaggatcttgttgtgactgtccagtctgctatgggggaggagcagatctgcgcgctgaagga

SEQ ID NO: 25389 - DNA, 238 bp, Zea mays
gatattagccctccttgcgcttcttgcccttttagtgagcgcaacaaatgcgttcattattccacagtgctcacttgctcctagtgccagtattccacagttcctcccaccagttacttcaatgggcttcgaacatccagccgtgcaagcctacaggctacaactagcgcttgcggcgagcgccttacaacaaccaattgcccaattgcaacaacaatccttggcacatctaacccta

SEQ ID NO: 25390 - DNA, 261 bp, Zea mays
cacagtgccaggcgctgcagcagcagtgctgccaccagatcaggcaggtggagccgctgcaccggtaccaggcgacatacggtgtggtcctgcagtccttcctgcagcagcagccgcagggcgagctcgcggcgctgatggcggcccaggtagcgcacagctgacggcgatgtgcggcctgcagctgcagcagccaggtccctgcccttgcaacgcagctgccggcggtgtctactactgaggaaactatgtactgtagta

SEQ ID NO: 25391 - DNA, 258 bp, Zea mays
agcaattagctcatcgactccagattggagaactcgacaccatgaaggtgctgatcgttgcccttgctctcctggcgctcgctgcgagcgcgcctccagtacaagcggcggctgtggctgccagacaccaccgtttcatctaccgcctccgttctatatgccgcctccgttctatctgccgacgctgcagcagccgcagccatggcaataccccactcaaccgacgcagctaagcccgtgccagcagttcggatcctg

SEQ ID NO: 25392 - DNA, 257 bp, Zea mays
gccgcatccaagcccgtgccagctgcagggaacctgcggcgttggcagcaccccgatcctgggccagtgcgtcgagtttctgaggcatcagtgcagcccgacggcgacgccctactgctcgcctcagtgccagtcgttgcggcacagtgttgccagcagctcaggcaggtggagccgcagcaccggtaccaggcgatcttcggcttggtcctccagtccatcctgcagcagcagccgcaaagcggccaggtcgcggg

SEQ ID NO: 25393 - DNA, 259 bp, Zea mays
ggacgtcagcctagcaattagctcatcgactccagattggagaactcgacaccatgaaggtgctgatcgttgcccttgctctcctggcgctcgctgcgagcgcgcctccagtacaagcggcggctgtggctgccagacaccaccgtttcatctaccgcctccgttctatatgccgcctccgttctatctgccgccgcagcagctatcgcagccatggcaataacccactcatacaccgcagctaagcccgtgccagcag

SEQ ID NO: 25394 - DNA, 276 bp, Zea mays
ctatactatactctaggaagcaaggacaccaccgccatggcagccaagatgcttgcattgttcgctctcctagctctttgtgcaagcgccactagtgcgacccatattccagggcacttgccaccagtcatgccattgggtaccatgaacccatgcatgcagtactgcatgatgcaacaggggctttgcagcttgatggcgtgtccgccctgatgctgcagcaactgttggccttaccgcttcagacgatgccagtgatgatgccacagatgatga

SEQ ID NO: 25395 - DNA, 253 bp, Zea mays
agctacctgctgcctacccccagcaatttcttccattcaaccaactagcagcattgaactctcctgcttatttacagcagcaacaactactaccattcagccagctagctggtgtgagccctgctaccttcttgacacaaccacagttgttgccgttctaccagcacgttgcgcctaacgctggcaccctcttacaactgcaacaattgctgccattcaaccaacttgctttgacaaacccagcagtgttcta

SEQ ID NO: 25396 - DNA, 260 bp, Zea mays
ggacgtcagcctagcaattagctcatcgactccagattggagaactcgacaccatgaaggtgctgatcgttgcccttgctctcctggcgctcgctgcgagcgccgcctccagtacaagcggcggctgtggctgccagacaccagcgtttcatctaccgcctccgttctatatgccgcctccgttctatctgccgccgcagcagcagccgcagccatggcaatacaccactcaaccaccgcagctaagcccgtgccagcag

SEQ ID NO: 25397 - DNA, 259 bp, Zea mays
gctagctactgcctactctcatcaacaacaacttcttccatttaaccaattggccgcactgaacctcgctgcttatttgcagcagcaaatattactaccatttagccagctagctgcagcaagccgtgcttccttcttgacacagcaacagttgctgcctttctaccagcagtttgcggctaaccccgcaaccctcttacaactacaacaattgttgccctttgtccaacttgctttgacaaacccagcagcctcctac

SEQ ID NO: 25398 - DNA, 259 bp, Zea mays
atgcaacaacagcttctgccattccatctgcaagctgtggcaaacattgttgctttcttgagacaacaacatttgttgccattttacccacaagttgtgggaaacattaatgccttcttgcaacagcaacaattgctaccattctacccacagaatgtggcaaacattgttgccttcttacaacaacaacaattgctaccatttagccaacatgctttgacgaatcctaccaccttattgcaaccgcccaccattggtg

SEQ ID NO: 25399 - DNA, 259 bp, Zea mays
gcaattagctcatcgactccagattggagaactcgacaccatgaaggtgctgatcgttgcccttgctctcctggcgctcgctgcgagcgccgcctccagtacaagcggcggctgtggctgccagacaccaccgtttcatctaccgcctccgttctatatgccgcctccgttctatctgccgccgcagcagcagccgcagacatggcaataccccactcaaccaccgcagctaagcccgtgccagcagttcggatcctgc

SEQ ID NO: 25400 - DNA, 258 bp, Zea mays
gtcgatcgaagacccatttgatcaggatgactggagcacttatgccaaactcactgatgagattggacagaaagtgcagattgtaggagatgatcttctcgttaccaaccccaccagggtcgccaaggccatcaatgagaagacctgcaatgctctcctcttgaaggtgaaccaaatcgggtctgtgaccgagagtatcgaagctgtcaggatgtccaagcgcgccggatggggagtgatggcaagccacaggagtgg

SEQ ID NO: 25401 - DNA, 261 bp, Zea mays
agaccacctagccatggtgaaccctgtcgcctacttgcaacagcagctgcttgcatccaacccacttgctctagcaaacgtagttgcaaaccagcaacaacaacaactgcaacagtttctgccagcgcttagtcaactagccatggtgaaccctgccgcctacctacaacagcaacaactgctttcatctagcccgctcgctgtggccaatgcacctacatacctgcaacaagaattgttgcaacagattgtaccagctct

SEQ ID NO: 25402 - DNA, 259 bp, Zea mays
acgtcggcagcccgttcctgggccagtgcgtcgagttcctgaggcaccagtgcagcccggcggcgacgccctacggctcgccacagtgccaggcgctgcagcagcagtgctgccaccagatcaggcaggtggagccgctgcaccggtaccaggcgacatacggtgtggtcctgcagtccttcctgcagcagcagccgcagggcgagctcgcggcgctgatggcggcccaggtagcgcacagctgacggcgatgtgcggc

SEQ ID NO: 25403 - DNA, 253 bp, Zea mays
agaaagcacaatagtgtaccaacaatggcagccaaaatattttgcctccttatgctccttggtctttctgcaagtgctgctacggcgaccattttcccgcaatgctcgcaagctcctatagcttcccttcttcccccgtacctctcaccagcggtgtcttcggtatgtgaaaacccaattcttcaaccctacaggatccaacaggcaatcgcagctggcatcttacctttatcacccttgttcctccaacaat

SEQ ID NO: 25404 - DNA, 249 bp, Zea mays
gtcagcctagcaattagctcatcgactccagattggagaactcgacaccatgaaggtgctgatcgttgcccttgctctcctggcgctcgctgcgagcgccgcctccagtacaagcagcggctgtggctgccagacaccaccgtttcatctaccgcctccgttctatatgccgcctccgttctatcttccgccgcagcagcagccgcatccatggcaataccacactcaaccaccgcagctaagcccgtg

SEQ ID NO: 25405 - DNA, 255 bp, Zea mays
agcgccctactacgccgggtgtgggcagccgcagtgcagcccgctggcggcggcgccctactacgccgggtgtgggcagacgagcgccatgtaccagccgctccggcaacagtgctgccagcagcagatgaggatgatggacgtgcagtccgtcgcgcacagctgcagatgatgatgcagcttgagcgtgccgctgccgccagcagcagcctgtacgagccagctctgatgcagcagcagcagcagctgctggcc

SEQ ID NO: 25406 - DNA, 245 bp, Zea mays
aagcactcgggtcagaacccttggctctagggaatttatgcgctactatcgccagaaaccacggccttctgttgcaccagaccgtgcgcttgcactttcactagcttccagctacaagagcatgggtttggtgacagtgcagtctaaggagcagatggtgaggctgaaagttctccgtgctatgaacaggaccggggtcgagactatgcggaacaagatcggaatgaagagcaatgtgatccgga

SEQ ID NO: 25407 - DNA, 255 bp, Zea mays
atgagcgcggtgcgggtagacctgtaccaggacgccatcatgtcgccgttctggaacttcaacgcccacagcgccatgtacggcatcaggggcagtgcaagggtccaggtcgccagcgacaacgggaccacggtgttcgacgacgtgctccgtgcggggcagctgctcatcgtaccccagggctacctcgtcgccaccaaggcgcagggagaaggcttccagtacatcgccttcgagacgaaccctgacaccatg

SEQ ID NO: 25408 - DNA, 255 bp, Zea mays
gacaccgtggggcagtacgagtcccacatcgcgttcactcttcctgggctctaccgtgtcgtccatggcatcgatgttttcgatcccaagttcaacattgtctcccctggagcagacatgagtgtttactacccgtatacggaaaccgacaagagactcactgccttccatcctgaaatcgaggagctcatctacagcgacgtcgagaactccgagcacaagttcgtgctgaaggacaagaagaagccgatcatc

SEQ ID NO: 25409 - DNA, 252 bp, Zea mays
atacaacagcgacaacagttacttaatccactagcagtggcaaacccattggtcgctgccttcctacagcagcaacaattgctgccatacaaccagttctctttgataaaccctgtcttgtcgaggcagcaacccatcgttggaggtgccatcttttagattacatatgagctgaactcgataatggtgccctcattccggcatgtgtttcctagaaataatcactatattgattgagatttatctcaataa

SEQ ID NO: 25410 - DNA, 251 bp, Zea mays
gggaaaaccactctggatagtatgactgatgtcgatcccacagttcatgctagcttttactggatatcatctcaataccacaaggcctgccaagaatttgcagagttctataagaatgctcttctctatctggcctacacaactgtggagtctctatctgagtcattcaagctagacttggcttttgatctatctctagcagccttgctgggtgataacatttacaactttggggagttgttagctcaccc

SEQ ID NO: 25411 - DNA, 253 bp, Zea mays
cggctcgagattatttagaccaactagcaacatagaaagcacaatagtgtaccaacaatggcagccaaaatattttgcctccttatgctccttggtatttctgcaagtgctgctacggcgaccattttcccgcaatgctcacaagctcctatagcttcccttcttcccccgtacctctcaccagcggtgtcttcggtatgtgaaaacccaattcttcaaccctacaggatccaacaggcaatcgcagctggca

SEQ ID NO: 25412 - DNA, 257 bp, Zea mays
atcagggcacaacaactacaacaacttgtgctagcaaaccttgctgcctactctcagcaacagcagtttcttccattcaaccaactagctgcattgaactctgcttcttatttgcaacaacaacaactaccattcagccagctatctgctgcctacccccagcaatttcttccattcaaccaactgacagcattgaactctcctgcttatttacagcagcaacaactactaccattcagccagctagctggtgtgag

SEQ ID NO: 25413 - DNA, 254 bp, Zea mays
gccaaagaattccctcccctagccgccgccgccgctcgtctccctgagaggtgccgggaccgaggaactggccgagttctaggtagagaatcggttttgcttgtctcagcacggggtctgctgcgtctggtggtggtgaaggggagaaattcgtgagatctgttccggatcaggcgtgcgagctcgggaatcaggggtttcacacatagcttcgtcgatttgaatttgatgtactaatggagtctaagggtggc

SEQ ID NO: 25414 - DNA, 257 bp, Zea mays
gattgagattcccagggcagctctagtggctgacgagatcgcggagaggctgaattcttctcctttggaacgaacgacctcacgcagatgacctttggctacagcagggatgatgtggggaagttcatccccatttatctggctcagggcatcctccagcatgaccccttcgaggttctcgaccagagaggagtgggcgagctggttaagcttgctacagagaggggccgcaaagctaggcctaacttgaaggtggg

SEQ ID NO: 25415 - DNA, 259 bp, Zea mays
gctccttgctctttctgcatgtgttgctaacgcgaccatttttcctcaatactcacaagctcctatagctgcccttcttcccccataccttccatcaatgaccgcttcagtttgtgaaaacccagcccttcaaccctacaggctccaacaagcaatcgcaacaagcaacttacctttatcaaccctgttctttcaacaatcgccagccctatctttggtgcagtcattggtacaaaccatcagggcacaacagctgcaa

SEQ ID NO: 25416 - DNA, 250 bp, Zea mays
caatgggcttcgaacatccagccgtgcaagcctacaggctacaactagcgcttgcagcgagcgccttacaacaaccaattgcccaattgcaacaacaatccttggcacatctaaccctacaaaccattgcaacgcaacaacaacaacaacaacagtttctgccatcactgagccacctagccgtggtgaaccctgtcacctacttgcaacagcagctgcttgcatccaacccacttgctctggcgaacgt

SEQ ID NO: 25417 - DNA, 247 bp, Zea mays
accgtacctctcaccagcggtgtcttcggtatgtgaaaacccaattcttcaaccctacaggatccaacaggcaatcacagctggcatcttacctttatcacccttgttcctccaacaatcatcagccctattacatcagttacctttggtgcatttattggcacaaaacatcagggcacaacaactacaacaacttgtgctagcaaaccttgctgcctactctcagcaacagcagtttcttccattc

SEQ ID NO: 25418 - DNA, 249 bp, Zea mays
tagcaacatagatagcacaatagtgtaccaacaatggcagccaaaatattttgcttccttatgctccttggtctttctgcaagtgttgctaccgcaaccattttcccacaatgctcacaagctcctatagcttcccttcttcccccatacctctcaccagcggtgtcttcaatgtgtgaaaccccaattgttcaaccctacaggatccaacaggcaatcgcaacaggcatcttaccattatcacccttg

SEQ ID NO: 25419 - DNA, 248 bp, Zea mays
cagaaacacaccaagcgaagtcactagcaacgacctaacaacaatggctaccaagatattagccctccttgcgcttcttgccctttttgtgagcgcaacaaatgcgttcattattccacaatgctcacttgctcctagtgccattattccacagttcctcccaccagttacttcaatgggcttcgaacacctagctgtgcaagccaacatgcaacaacaagcgcttgcggcgagcgtcttacaacaac

SEQ ID NO: 25420 - DNA, 250 bp, Zea mays
atcgtcgaacagaacagcatgaagatggtcatcgttctcgtcgtgtgcctggctctgtcagcagccagcgcctctgcaatgcagatgccctgcccctgcgcggggctgcagggcttgtacggcgctggcgccggcctgacgacgatgatgggcgccggcgggctgtacccctacgcggagtacctgaggcagccgcagtgcagcccgctggcggcggcgccctactacgccgggtgtaggcagccgagcg

SEQ ID NO: 25421 - DNA, 253 bp, Zea mays
agagagcaccctccacttggagctgcgtctcagaggtggcatgcagatcttcgtgaagacacttactggcaagacgatcacccttgaggtggagtcctcagacaccattgacaacgtcaaggccaagatccaggacaaggagggcattccaccggaccagcagcggctgatcttcgccggcaagcagctggaggatggtcgcaccttggctgactacaacatccagaaggagagcaccctccacctggtgctc

SEQ ID NO: 25422 - DNA, 255 bp, Zea mays
attgctccaagttccattattacacagttcctcccaccagttacttcaatgggcttcgaacacccagctgtgcaagcctataggctacaacaagcaattgcggcgagcgtcttacaacaaccaatttcccagttgcaacaacaatccttggcacatctaacaatacaaaccatcgcaacgcaacagcaacaacaattcctaccagcactgagccacctagccatggtgaaccctgccgcctacttgcaacagcag

SEQ ID NO: 25423 - DNA, 97 bp, Zea mays
agctcatcgactccagattggagaactcgacaccatgaaggtgctgatcgtatgccttgctctcctggcgctcgctgcgagcagcgcctccagtaca

SEQ ID NO: 25424 - DNA, 236 bp, Zea mays
aatcagggcacaacagctgcaacaactcgtgctaccagtgatcagccaagtagctctggcaaacctttctccctactctcagcaacaacaatttcttccattcaaccaactgtctacactgaaccctgctgcttatttacaacaacaacaactactaccattcagccagctagctactgcctactctcagcagcaacaatttcttccatttgaaccattggccgcactgaacccct

SEQ ID NO: 25425 - DNA, 241 bp, Zea mays
aacgcgacaattttccctcaatgctcacaagctcctatagcttcccttcttcccccataccttccatcaattatagcttccgtatgtgacaacccagctcttcaaccatataggcttcaacaagcaatcgcagcaagcaacatacctttatcgcccatgttgtttcaacaatcaccagccctatctttggtgcagtcattggtacaaaccatcgaggcacaacagctgcagcaactcgtgc

SEQ ID NO: 25426 - DNA, 252 bp, Zea mays
aagggcagccggcgtgcttgagaaccatgaagacgggaggcgttacgccatgcatggcctcagaagctttgtgcacgacaagacccccgagatcatgccagctatcaacaagttctttactgaccccaagtgaagcaaagcagctttggttggccgctgatgacgatggttctgctactagttgcccttggggattgtgtaccctttttatggcaattcgatatgggggcgtttggttacttgtatgggtga

SEQ ID NO: 25427 - DNA, 248 bp, Zea mays
caactagcaacatagaaagcacaatagtgtaccaacaatggcagccaaaatattttgcctccttatgctccttggtctttctgcaagtgctgctacggcgaccattttcccgcaatgctcgcaagctcctatagcttcccttcttcccccgtacctctcaccagcggtgtcttcggtatgtgaaaacccaattcttcaaccctacaggatccaacaggcaatcgcagctggcatcttacctttatcac

SEQ ID NO: 25428 - DNA, 249 bp, Zea mays
gagaagagccgcgtgccggacccgcagaggatgatccgcgcctacgcacagtcggtggcgacactcaacctgctccgcgcgttcgccaccggagggtacgctgccatgcacgcgtcactcagtggaacctcgatttcatggatcacaacgagcaaggtgataggtaccgtgaattggcccatagggtggatgatgctcttgggttcatgactgcatcggggcttacagtcgaccacccgataatgacga

SEQ ID NO: 25429 - DNA, 249 bp, Zea mays
atcagcaaagcggcagtgcgtagagaggatcgtcgaacagaacagcatgaagatggtcatcgttctcgtcgtgtgcctggctctgtcagctgccagcgcctctgcaatgcagatgccctgcccctgcgcggggctgcagggcttgtacggcgctggcgccggcctgacgacgatgatgggcgccggcgggctgtacccctacgcggagtacctgaagcagccgcagtgcagcccgctggcggcggcgcc

SEQ ID NO: 25430 - DNA, 240 bp, Zea mays
cgccttgtgccacatagctcaaggctgcaagaacttaacagaactttctattcggcgtggttatgaggttggagacagggcattggtgtctatcgccgagaactgtaaatcgctcagagagttaacgctccagttctgtgagagggtatccgatgcagggctatctgcaatcgcggaaaactgccctctgcataggctaaacttgtgcgggtgccacctaatcaccgataccgggctgac

SEQ ID NO: 25431 - DNA, 249 bp, Zea mays
ggagctggccaaaacgacatctacgtcgcgtcaggtttctactaccttgcctcacatgttgggttcatagatagcaaagctccaagcgcaaaggcccctcctgccgcattcagggctgcggctaagaaggcctgcaaattcgatgtcaacagagcaaaagtggcctacccagatgtttctaacagtgatgtgccgtacttgtgtatggatcttacttacacgtacacattgctcgttgacggcttcggt

SEQ ID NO: 25432 - DNA, 75 bp, Zea mays
attttgagcattcagaaacacacctagcgaagcgcactagcaacgacctagcaacaatggcttccaggacattat

SEQ ID NO: 25433 - DNA, 252 bp, Zea mays
aagccgggtgtgggcacccgagcgccatgttccagccgctccggcaacagtgctgccagcagcagatgaggatgatggacgtgcagtccgtcgcgcagagctgcagatgatgatgcagcttgagcgtgccgctgccgccagcagcagcctgtacgagccagctctgatgcagcagcagcagcagctgctggcagcccagggtctcaagcccatggccatgatgatggcgcagaacatgccggccatgggtgg

SEQ ID NO: 25434 - DNA, 247 bp, Zea mays
cgtcacctagcaattagctcatcgactccagattggagaactcgacaccatgaaggtgctgatcgttgcccttgctctcctggcgctcgctgcgagcgccgcctccagtacaagcggcggctgtggctgccagacaccaccgtttcatctaccgcctccgttctatatgccgcctccgttctatctgccgccgcagcagcagccgcagccatggcaataccccactcatccaccgcagctaagcccg

SEQ ID NO: 25435 - DNA, 239 bp, Zea mays
atcgagcgctcgagcgctcgaggctcgagttctcgatgacgcgtctcgaccgcatgaagaacatgacaggcctggatcagatgaccggcaagaacgcgcgcctgagggagctggcgaacctcgtgatcgttgccggtgaccacggcaaggagtccaaggacagggaggagcaggcggagttcaagaagatgtacagcctcatcgacgagtacaagttgaagggccatatccggtggatc

SEQ ID NO: 25436 - DNA, 244 bp, Zea mays
gtttcagcttgtattcccactctgtcgcacagcgtcgcccgtcgccgctgagatcctaggaagaaatggagctctctcgcaagctcttcacggccgtcctcctcgtcatgctgctgctgctgtccgcagaggtcgggccggtggcggtggcggaggcgcggacgtgccagtcgcagagccacaggttccggggcccctgcctccgccggtccaactgcgccaacgtctgcaggaccgaggggtt

SEQ ID NO: 25437 - DNA, 244 bp, Zea mays
aggtgaccttgtcaagagggtcctccggtgctttggcccctcagagttttccgttgccgtgaccatcttcggcgggcgtggccatgccgggacatggggaaaggcacttggtgcagaggtctatgactgcaacaacatggtggagcaggagctgcctggaggcgggctcctcgtgtaccagagcttctgtgctgctgaagacgctgttgctacctcgcccaaatctgttttccactgctttgac

SEQ ID NO: 25438 - DNA, 244 bp, Zea mays
ctagcaacatagaaagcacaatagtgtaccaacaatggcagccaaaatattttgcttccttatgctccttggtctttctgcaagtgctgctaccgcaaccattttcccacaatgctcacaagccctatagcttcctttcttcccccatacctctcaccagcggtgtcttcagtatgtgaaaacccaattcttcaaccctacaggatccaacaggcaatcgcagcaggcatcttacctttatcac

SEQ ID NO: 25439 - DNA, 248 bp, Zea mays
accaattgcccaattacaacaacaatccttggcacatctaaccatacaaaccatcgcaacgcagcagcaacaagcactgagccacctagccgtggtgaaccctatcgcctacttgcaacaacagctgcttgcatccaacccacttgctttggcaaacgtagctgcataccaacaacaacaacagttgcaacagtttctaccagcgctcagtcaactagccatggtgaaccctatcgcctacctacaac

SEQ ID NO: 25440 - DNA, 248 bp, Zea mays
gcaacatacctttatcacccttgttgtttcaacaatcgccagccctatctttggtgcagtcattggtacaaaccatcagggcacagcagctgcagcaactcgtgctacctgtgatcaaccaagtagctctggcaaacctttctccctactctcagcaacaacaatttcttccattcaaccaactgtctacactgaaccctgctgcttatttgcagcaacaactattagcattcagccagctagctact

SEQ ID NO: 25441 - DNA, 248 bp, Zea mays
tacagcattgaactctgctgcttatttacagcagcaacaactactaccattcagccagctagctgatgtgagccctgctgccttcttgacacaacaacagttgtagcagttctacctgcacgctatgcctaacgctggcaccctcttacaactgcaacaattgctgccattcaaccaacttgctttgacaaacccagcagcattctaccaacaacccatcattggtggtgccctcttttagatttctt

SEQ ID NO: 25442 - DNA, 246 bp, Zea mays
acctggtgccctaccctaggatccacttcatgctttcgtcctacgctccagtcatttctgctgagaaggcctaccacgagcagctgtccgtggccgaaatcaccaacagcgccttcgagccatcctccatgatggccaagtgcgacccccgccatggcaagtacatggcatgctgcctcatgtaccgtggtgatgtggttcccaaggacgtgaacgctgctgtggccacaatcaagaccaagcgca

SEQ ID NO: 25443 - DNA, 243 bp, Zea mays
atccggtggatctcggcgcagatgaaccgcgtccgcaacggggagctgtaccgctacatttgcgatacgaacggcgcattcgtgcagcctgcgttctacgaagcgttcggcctgactgtgatcgagtccatgacgtgcggtctgccaacgatcgcgacctgccatggtggccctgctgagatcatcgtggacggggtatctggcctgcacattgacccttaccacagcgacaaggccgcggat

SEQ ID NO: 25444 - DNA, 242 bp, Zea mays
attattgagaccaactagcaacatagaaagcacaatagtgtaccaacaatggcagccaaaatattttgcctccttatgctccttggtctttctgcaagtgctgctacggcgaccattttcccgcaatgctcgcaagctcctatagcttcccttcttcccccgtacctctcaccagcggtgtcttcggtatgtgaaaacccaattcttcaaccctacaggatccaacaggcaatcgcagctgg

SEQ ID NO: 25445 - DNA, 240 bp, Zea mays
attgagaccaactagcaacatagaaagcacaatagtgtaccaacaatggcagccaaaatattttgcctccttatgctccttggtctttctgcaagtgctgctacggcgaccattttcccgcaatgctcgcaagctcctatagcttcccttcttcccccgtacctctcaccagcggtgtcttcggtatgtgaaaacccaattcttcaaccctacaggatccaacaggcaatcacagctggc

SEQ ID NO: 25446 - DNA, 238 bp, Zea mays
cagaaacacaccaagcgaactacctagcaacgacttaacaacaatggctaccaagatattagccctccttgcgcttcttgccctttttgtgagcgcaacaaatgcgttcattattccacaatgctcacttgctcctagtgccattataccacagttcctccgaccagttacttcaatgggcttcgaacacctagctgtgcaagcctacaagctacaacaagcgcttgcggcgagcgtc

SEQ ID NO: 25447 - DNA, 234 bp, Zea mays
agctcatcgactccagattggagaactcgacaccatgaaggtgctgatcgttgcccttgctctcctggcgctcgctgcgagcgccgcctccagtacaagcggcggctgtggctgccagacaccaccgtttcatctaccgcctccgttctatatgccgcctccgttctatctgccgccgcagcagcagccgcagccatggcaatcacccactcaaccaccgcagctaagcccgtg

SEQ ID NO: 25448 - DNA, 216 bp, Zea mays
attttgagcattcagaaacacaccaagcgaacagcattagcaacaacctaacaacaatggctaccaagatattatccctccttgcgcttcttgcgctttttgcgagcgcaacaaatgcgttcattattccacaatgctcacttgctccaagttccattattacacagttcctcccaccagttacttcaatgggcttcgaacacccagctgtgcaag

SEQ ID NO: 25449 - DNA, 258 bp, Zea mays
caacaagcaacatagaaagtggaatccagtagcaacaacagagcaacaatggcgaccaagatattttccctccttatgctccttgctctttctgcatgtgttgctaacgcgacaattttccctcaatgctcacaagctcctatagcttcccttcttcccccataccttccatcaatgatagcttcagtatgtgaaaacccagctcttcagccctataggctccaacaagcaatcgcagcaagcaacatacctttatca

SEQ ID NO: 25450 - DNA, 256 bp, Zea mays
cgcacagcagccgcagccatggcaataccccactcaaccaccgcagctaagcccgtgccagcagttcggatcctgcggcgtcggcagcgtcggcagcccgttcctgggccagtgcgtcgagttcctgaggcaccagtgcagcccggcggcgacgcctacggctcgccacagtgccaggcgctgcagcagcagtgctgccaccagatcaggcaggtggagccgctgcaccggtaccaggcgacatacggtgtggtcc

SEQ ID NO: 25451 - DNA, 258 bp, Zea mays
atagcaacaacctaacaacaatggctaccaagatattatccctccttgcgcttcttgcgctttttgcgagcgcaacaaatgcgtccattattccacaatgctcacttgctcctagttccattattccacagttcctcccaccagttacttcaatggccttcgaacacccagctgtgcaagcctataggctacaacaagcgattgcggcgagcgtcttacaacaaccaattgcccaattgcaacaacaatccttggcac

SEQ ID NO: 25452 - DNA, 255 bp, Zea mays
acaagacattatccctccttgcgcttcttgccctttttgtgagtgcaacaaatgcgttcattattccacaatgctcacttgctccgagtgccattattccacagttcctccctccagttacttcaatgggcttcgaacacccagctgtgcaagcctataggctacaacaagcgcttgcggcgagcgtcttagaacaaccaattgcccaattacaacaacaatccttagcacatctaaccatacaaaccatcgcaa

SEQ ID NO: 25453 - DNA, 258 bp, Zea mays
caacctaacaacaatggctaccaagatattatccctccttgcgcttcttgcgctttttgcgagcgcaacaaatgcgttcattattccacaatgctcacttgctccaagttccattattacacagttcctcccaccagttacttcaatgggcttcgaacacccagctgtgcaagcctataggctacaacaagcaattgcggcgagcgtcttacaacaaccaatttcccagttgcaacaacaatccttggcacatctaac

SEQ ID NO: 25454 - DNA, 256 bp, Zea mays
tccaagcaagatggtccttgatgactggaagaggctatactcaaacacaaagactaacttccgggaggttgccatcaaaggtttctgggacatgtacgacccagagggctactctttgtggttctgtgactacaagtacaatgatgagaacaccgtctcctttgtgaccctgaacaaggttggtggattcctgcagcggatggacctgtgccgcaagtacgcctttgggaagatgctcgtgataggctctgagcca

SEQ ID NO: 25455 - DNA, 257 bp, Zea mays
gaagaacccgatcgacaccatgagggtgttgctcgttgccctcgctctcctggctctcgctgcgagcgccacctccacgcatacaagctgcggctgcggctgccagccaccgccgccggttcatctaccgccgccggttcatctgccgccgccaccatgccactaccctactcaaccgccccggcctcagcctcatccccagccacacccatgcccgtgccaacagccgcatccaagcccgtgccagctgcagggaa

SEQ ID NO: 25456 - DNA, 258 bp, Zea mays
cggcaggtggagccgctgcaccggtaccaggcgacatacggtgtggtcctgcagtccttcctgcagcagcagccgcatggcgagctcgcggcgctgatggcggcccacgtagcgcacacgctgacggcgatgtgcggcctgcagctgcagcagccaggtccctgcccttgcaacgcagctgccggcggtgtctactactgaggaagctacgtactgtagtactactgtaatggagccgctgactagctacctagctcg

SEQ ID NO: 25457 - DNA, 253 bp, Zea mays
aagatattttccctccttatgctccttgctctttctacatgagttgctaacgctacaattttccctcaatgctcacaagctcctatagcttcgcttcttcgcccataccttccatcaattatagcttcaatatgtgaaaacccagctcttcaaccatataggcttcgactagcaatcgcagcaagcaacatgcctttatcgcccttgttgtttcaacaatcgtcatcgctatctttggtgcagtcattggtac

SEQ ID NO: 25458 - DNA, 259 bp, Zea mays
attcccattcttcctcgccgcgggggtcgcctgagatcacataaacaatggtgaaggctgttgctgtgcttggtagcagcgatggtgtcaagggcaccatctttttcacccaagagggagatggccctaccgctgtcaccggaagtgtctctggcctcaagcctggcctccatgggttccatgtacatgcacttggtgacaccaccaatggatgcatgtcaactggaccacactacaatcctgcgagcaaggagcatgg

SEQ ID NO: 25459 - DNA, 257 bp, Zea mays
cagctctgactcagctagctgtggcaaaccctgctgcctacttgcaacagctgcttccattcaaccaactgactgtgtcgaactctgctgcgtacctacaacagcgacaacagtaacttaatccactagcagtgcctaacccattggtcactgccttcctacagcagcaacaattgctaccatacagccagttctctttgatgaaccctgccttgtcgtggcagcaacccatcgttggaggtgccatcttttagatt

SEQ ID NO: 25460 - DNA, 257 bp, Zea mays
cgctgcaggaacctgggcgttggcagcaccccgatcctgggccagtgcgtcgagtttctgaggcatcagtgcagcccgacggcgacgccctactgctcgcctcagtgccagtcgttgcggcacagtgttgccagcagctcaggcaggtggagccgcagcaccggtaccaggcgatcttcggcttggtcctccagtccatcctgcagcagcagccgcaaagcggcaggtcgcggggctgttggcggcgcagatagcgc

SEQ ID NO: 25461 - DNA, 257 bp, Zea mays
attttgagcattcagaaacacaccaagcgaagctacctagcaacgacttaacaacaatggctaccaagatattagccctccttgcgcttcttgccctttttgtgagcgcaacaaatgcgttcattattccacaatgctcacttgctcctagtgccattataccacagttcctccgaccagttacttcaatgggcttcgaacacctagctgtgcaagcctacaggctacaacaagcgcttgcggcgagcgtcttacaa

SEQ ID NO: 25462 - DNA, 256 bp, Zea mays
tagaacaaccaattgcccaattacaacaacaatccttggcacatctaaccatacaaaccatcgcaacgcagcagcaacaagcactgagccacctagccgtggtgaaccctatcgcctacttgcaacaacagctgcttgcatccaacccacttgctttggcaaacgtagctgcataccaacaacaacaacagttgcaacagtttctaccagcgctcagtcaactagccatggtgaaccctatcgcctacctacaaca

SEQ ID NO: 25463 - DNA, 253 bp, Zea mays
gcaacatagaaagcacaatagtgtaccaacaatggcagccaaaatattttgcctccttatgctccttggtctttctgcaagtgctgctacggcgaccattttcccgcaatgctcgcaagctcctatagcttcccttcttcccccgtacctctcaccagcggtgtcttcggtatgtgaaaacccaattcttcaaccctacaggatccaacaggcaatcacagctggcatcttacctttatcacccttgttcctc

SEQ ID NO: 25464 - DNA, 251 bp, Zea mays
tgcagcttgagcgtgccgctgccgccagcagcagcctgtacgagccagctctgatgcagcagcagcagcagctgctggcagcccagggtctcaaccccatggccatgatgatggcgcagaacatgccggccatgggtggactctaccagtaccagctgcccagctaccgcaccaacccctgtggcgtctccgctgccattccgccctactactgattcatgatatttgggaaatctcctctatccatctct

SEQ ID NO: 25465 - DNA, 253 bp, Zea mays
caacagttacctttggtgcatttattggcacaaaacatcagggcacaacaactacaacaacttgtgctagcaaaccttgctgcctactctcagcaacagcagtttcttccattcaaccaactaggttcattgaactctgcttcttatttgcaacaacaacaactaccattcagccagctacctgctgcctacccccagcaatttcttccattcaaccaactagcagcattgaactctcctgcttatttacagc

SEQ ID NO: 25466 - DNA, 254 bp, Zea mays
aaagcggcagtgcgtagagaggatcgtcgaacagaacagcatgaagatggtcatcgttctcgtcgtgtgcctggctctgtcagctgccagcgcctctgcaatgcagatgccctgcccctgcgcggggctgcagggcttgtacggcgctggcgccggcctgacgacgatgatgggcgccggcgggctgtacccctacgcggagtacctgaggcagccgcagtgcagcccgctggcggcggcgccctactacgccg

SEQ ID NO: 25467 - DNA, 253 bp, Zea mays
gatattatccctccttgcgcttcttgcgctttttgcgagcgcaacaaatgcgttcattattccacaatgctcacttgctccaagttccattattacacagttcctcccaccagttacttcaatgggcttcgaacacccagctgtgcaagcctataggctacaacaagcaattgcggcgagcgtcttacaacaaccaatttcccagttgcaacaacaatccttggcacatctaacaatacaaaccatcgcaacg

SEQ ID NO: 25468 - DNA, 254 bp, Zea mays
cgagaaggagtacaagtctgacattaacattgtctccaatgctagctgcacaaccaactgccttgctcctcttgctaaggtcatcaatgacaagttcggtatcgttgagggtctgatgaccactgtccatgccatcactgctacccagaagactgttgatgggccctcgtctaaggactggaggggtggaagggctgctagtttcaacatcattcccagcagcactggagctgctaaggctgttggcaaagtgc

SEQ ID NO: 25469 - DNA, 254 bp, Zea mays
gctagctacaacaagccccgcttccttcttgacacaacaacaagtgcttccgttctaccagcagtttgtggctaaccccgcaaccctcttacaactgcaacagttgctgccctttttccaacttgctttgacaaacccagcagccttctaccaacaacacatcattggcggtgccctcttttagattgcttattatttgtaattcaataatgaagttttttggctgatgtatgtggcctcctagaaataagaag

SEQ ID NO: 25470 - DNA, 146 bp, Zea mays
tgaaccctgccgcctacttgcaacagcagttgcttgcatcaaacccacttgctctggcaaacgtagttgcaaaccagccacaacaacagctgcaacagtttctgccagcgctcagtcaactagccatggtgaaccctgcggcctac

SEQ ID NO: 25471 - DNA, 252 bp, Zea mays
gcacaatagtgtaccaacaatggcagccaaaatattttgcttccttatgctccttggtctttctgcaagtgctgctaccgcaaccattttcccacaatgctcacaagctcctatagcttcctttcttcccccatacctctcaccagcggtgtcttcagtatgtgaaaacccaattcttcaaccctacaggatccaacaggcaatcgcagcaggcatcttacctttatcacccttgttcctccaacaaccgtc

SEQ ID NO: 25472 - DNA, 249 bp, Zea mays
attcagccagctatctgctgcctacccccagcaatttcttccattcaaccaactgacagcattgaactctcctgcttatttacagcagcaacaactactaccattcagccagctagctggtgtgagccctgctaccttcttgacacaaccacagttgttgccgttctaccagcacgctgcgcctaacgctggcaccctcttacaactgcaacaattgctgccattcaaccaacttgctttgacaaaccc

SEQ ID NO: 25473 - DNA, 246 bp, Zea mays
gctgcctacttacaacagttgcttccattcaaccaactggctgtgtcaaactctgctgcgtacctacaacagcgacaacagttacttaatccattggcagtggctaacccattggtcgctaccttcctgcagcagcaacaacaattgctgccatacaaccagttctctttgatgaaccctgccttgcagcaacccatcgttggaggtgccatcttttagattacatatgagatgtactcgacaatg

SEQ ID NO: 25474 - DNA, 249 bp, Zea mays
aagaacccgatcgacaccatgagggtgttgctcgttgccctcgctctcctggctctcgctgcgagcgccacctccacgcatacaagcagcggctgcggctgccagccaccgccgccggttcatctaccgccgccggtgcatctgccacctccggttcacctgccacctccggtgcatctcccaccgccggtccacctgccgccgccggtccacctgccaccgccggtccatgtgccgccgccggttcat

SEQ ID NO: 25475 - DNA, 247 bp, Zea mays
agccatccaagcaagcatcttacggtcattagcattaaccctccaacaaccatatgctctattacaacaaccaattgcccaattacaacaacaatccttggcacatctaaccatacaaaccatcgcaacgcaacagcaacaacaatttctaccagcactgagccaactagctgtggtgaaccctgtcgcctacttgcaacagcagttgcttgcatccaacccacttgctctggcaaacatagttgca

SEQ ID NO: 25476 - DNA, 246 bp, Zea mays
gcactagcaacgacctaacaacaatggctaccaagatattagccctccttgcgcttcttgccctttttgtgagcgcaacaaatgcgttcattattccacaatgctcacttgctcctagtgccattattccacagttcctcccaccagttacttcaatgggcttcgaacacctagctgtgcaagccaacatgcaacaacaagcgcttgcggcgagcgtcttacaacaaccaattgcccaattgcaac

SEQ ID NO: 25477 - DNA, 248 bp, Zea mays
aaagtaatgacatttgagaatgtgaagaggtggttgaaggagctccgggaccatgctgactcgaacatagtcgtaatgctcattggcaacaagactgaccttaggcacctgcgctctgtcgccgttgaggatgctgcaagctttgcagagagcgaaggtttgttcttcatcgagacctctgcgctcgatgcgacaaacgtcgagaaggccttccacaccgttctagccgagatctaccggataatcag

SEQ ID NO: 25478 - DNA, 250 bp, Zea mays
caaagcggcagtgcgtagagaggatcgtcgaacagaacagcatgaagatggtcatcgttctcgtcgtgtgcctggctctgtcagctgccagcgcctctgcaatgcagatgccctgcccctgcgcggggctgcagggcttgtacggcgctggcgccggcctgacgacgatgatgggcgccggcgggctgtacccctacgcggagtacctgaggcagccgcagtgcagcccgctggcggcggcgccctacta

SEQ ID NO: 25479 - DNA, 249 bp, Zea mays
cagcagttacctttggtgcatttgttggcacaaaacatcaaggcacaacaactacaacaacttgtgctaggaaaccttgctgcctactctcagcaacagcagtttcttccattcaaccaactggctgcattgaactctgctgcttatttgcaacaacaactaccattcagtcagctagctgctgcctacccccagcaatttcttccattcaaccaactggcagcattgaactctgctgcttatttacaa

SEQ ID NO: 25480 - DNA, 249 bp, Zea mays
agcaaagcgacagtgcgtagagaggatcgtcgaacagaacagcatgaagatggtcatcgttctcgtcgtgtgcctggctctgtcagctgccagcgcctctgcaatgcagatgccctgcccctgcgcggggctgcagggcttgtacggcgctggcgccggcctgacgacgatgatgggcgccggcgggctgtacccctacgcggagtacctgatgcagccgcagtgcagcccgctggcggcggcgcccta

SEQ ID NO: 25481 - DNA, 250 bp, Zea mays
gctttctcaactcgtgaagaagcatctcaggctttaactgaaatgaatggcaaaatgatatctggaaaaccattgtatgttgcatttgcacagcgcgaagacggtagcaaagcgatgttgcaggcacagttttctcagatgcgccctgctgtaccaatgacacccactctagccccacgccttccaatgtactctccgatggctcctcagcgactcttctatggacaagcggcaccagctatgatgcccc

SEQ ID NO: 25482 - DNA, 249 bp, Zea mays
aactgagcggtggggcccgcgcggccaagttatcctgttcgctaccgtgatgtttaccctagtccagagggtttatcttcgttcgtctcgtttgttgttgcccatctgtgtttttgattgcaaggtcgctctgtgtcagttgttagtgctgtgttcatcctcggctccagcagacccatgcatcaaccagcatggactgtggatcgatggatgctgttactcctgtcaggatttgttctaagttaatcc

SEQ ID NO: 25483 - DNA, 109 bp, Zea mays
gcacagcaagaagatgaatgcatttctcggatcgttcatccggaacaataattaaaggggatccggatttgttcttgtgatataattaacgattcctgttatacttgga

SEQ ID NO: 25484 - DNA, 270 bp, Zea mays
gcaattagctcatcgactccagattggagaactcgacaccatgaaggtgctgatcgttgcccttgctctcctggcgctcgctgcgagcgccgcctccagtacaagcggcggctgtggctgccagacaccaccgtttcatctaccgcctccgttctatatgccgcctccgttctatctgccgccgcagcagcagccgcagccatggcaataccccactcaaccaccgcagctaagcccgtgccagcagttcggatcctgcggcgtcggcag

SEQ ID NO: 25485 - DNA, 268 bp, Zea mays
attgagaccaactagcaacatagaaagcacaatagtgtaccaacaatggcagccaaaatattttgcttccttatgctccttggtctttctgcaagtgctgctaccgcaaccattttcccacaatgctcacaagctcctatagcttcctttcttcccccatacctctcaccagcggtgtcttcagtatgtgaaaacccaattcttcaaccctacaggatccaacaggcaatcgcagcaggcatcttacctttatcacccttgttcctcc

SEQ ID NO: 25486 - DNA, 265 bp, Zea mays
ctgggatgagtttgtgtggggtggtgcgtggatgtactttgccacagggaacaattcatacctcacggtcgccactgccccaggaatggcgaacatgctggagcctactggtttggaagtccaaactatggagtatttacctgggatgacaaacttccaggagctcaggttcttctcagcaggttgcgactcttcctaagtccagggtacccttacgaagaaatactgaggacattccacaaccaaaccgacaatgttatgtgct

SEQ ID NO: 25487 - DNA, 260 bp, Zea mays
ccccgctcccgtgaaagagaaggtggatgtgaagctccaggagctcaaagaggcaatatctggtggatcaacacagagtatgaaggatgccatgtctgctttgaaccaggaggtgatgcagattggccaggcaatgtataaccagtctggtgctagtgctgctgggcctactcctggtgctgaggctgggcctacccctggtaccggaccagcgcagaatgatggggatgtcattgatgcggacttcacagatagcaatt

SEQ ID NO: 25488 - DNA, 264 bp, Zea mays
atccctccttgcgcttcttgcgctttttgcgagcgcaacaaatgcgttcattattccacaatgctcacttgctccaagttccattattacacagttcctcccaccagttacttcaatgggcttcgaacacccagctgtgcaagcctataggctacaacaagcaattgcggcgagcgtcttacaacaaccaatttcccagttgcaacaacaatccttggcacatctaacaatacaaaccatcgcaacgcaacagcaacaacaatt

SEQ ID NO: 25489 - DNA, 265 bp, Zea mays
gtcattggtacaaaccatcagggcacagcagctgcagcaactcgtgctacctgtgatcaaccaagtagctctggcaaacctttctccctactctcagcaacaacaatttcttccattcaaccaactgtctacactgaaccctgctgcttatttgcagcaacaactattaccatttagccagctagctactgcctactctcagcaacaacaacttcttccatttaaccaattggccgcactgaaccccgctgcttatttgcagcag

SEQ ID NO: 25490 - DNA, 268 bp, Zea mays
atcagcagggccaggaaaaatcacaacagcaacaatgtcattgccaggagcagcaacagactacaaggtgcagctataactactatagcagtagctcaaatctaaaaaattgtcatgaattcctaaggcagcagtgcagccctttggtaatgccttttctccaatcacgtttgatacaaccaagtagctgccaggtattgcagcaacaatgttgtcatgatcttaggcagattgagccacaatacattcaccaagcaatctacaacat

SEQ ID NO: 25491 - DNA, 270 bp, Zea mays
cgccgcatccaagcccgtgccagctgcagggaacctgcggcgttgacagcaccccgatcctgggccagtgcgtcgagtttctgaggcatcagtgcagcccgacggcgacgccctactgctcgcctcagtgccagtcgttgcggcatcagtgttgccagcagctcaggcaggtggagccgcagcaccggtaccaggcgatcttcggcttggtcctccagtccatcctgcagcagcagccgcaaagcggcaggtcgcggggctgttggcggc

SEQ ID NO: 25492 - DNA, 266 bp, Zea mays
ggacgtcagcctagcaattagctcatcgactccagattggagaactcgacaccatgaaggtgctgatcgttgcccttgctctcctggcgctcgctgcgagcgccgcctccagtacaagcggcggctgtggctgccagacaccaccgtttcatctaccgcctccgttctatatgccgcctccgttctatctgccgccgcagcagcagccgcagccatggcaataccccactcaaacaacgcagctaagcccgtgccagcagttcgga

SEQ ID NO: 25493 - DNA, 265 bp, Zea mays
acaggatccaacaggcaatcgcagcaggcatcttacctttatcacccttgttcctccaacaaccgtcagccctattacagcagttacctttggtgcatttgttggcacaaaacatcaaggcacaacaactacaacaacttgtgctaggaaaccttgctgcctactctcagcaacagcagtttcttccattcaaccaactggctgcattgaactctgctgcttatttgcaacaacaactaccattcagtcagctagctgctgccta

SEQ ID NO: 25494 - DNA, 265 bp, Zea mays
attcattcaagaggttaattatctagcatctctctgtcattggaaccttgtaaaacttttggggtactgtcaggaggatggcatgcagatgcttgtttatgagtatatctccaatggcagcgtatcaacacatttacatggtaacagccatgctctacgttcaaggctagaattccagaagagactttctattgctcatggcacagctaaaggcctgagtcacctgcattcgctgacaccccctgcggtccatatgaatttcaaa

SEQ ID NO: 25495 - DNA, 263 bp, Zea mays
ggagaactcgacaccatgaaggtgctgatcgttgcccttgctctcctggcgctcgctgcgagcgccgcctccagtacaagccgcggctgtggctgccagacaccaccgtttcatctaccgcctccgttctatatgccgcctccgttctatctgccgccgcagactcagccgcagccatggcaataccccactcaaccaccgcagctaagcccgtgccagcagttcggatcctgcggcgtcggcagcgtcggcagcccgttcct

SEQ ID NO: 25496 - DNA, 261 bp, Zea mays
actcgtgctacctctgatcaaccaagtagctctggcaaacctttctccctactctcagcaacaacaatttcttccattcaaccaactgtctacactgaaccctgctgcttatttgcagcaacaactattaccatttagccagctagctactgcctactctcagcaacaacaacttcttccatttaaccaattggccgcactgaaccccgctgcttatttgcagcagcaaatactactaccatttagccagctagctgcagc

SEQ ID NO: 25497 - DNA, 239 bp, Zea mays
aacagcctcagcaatatcagcagggccaggaaaaatcacaacagcaacaatgtcattgccaggagcagcaacagactacaaggtgcagctataactactatagcagtagctccaatctaaaaaattgtcatggattcccaaggcagcagtgcaggcctttggtaatgccttttctccaatcacggttgatacaaccaagtagctgccaggtattgcagcgacaatgttgtcatgatctt

SEQ ID NO: 25498 - DNA, 262 bp, Zea mays
cgcatacaagcagcggctgcggctgccagccaccgccgccggttcatctaccgccgccggtgcatctgccacctccggttcacctgccacctccggtgcaacatcccaacgccggtccacctgccgccgccggtccacctgccaccgccggtccatgtgccgccgccggttcatctgccgccgccaccatgccactaccctactcaaccgccccggcctcagcctcatccccagccacacccatgcccgtgccaacagccgc

SEQ ID NO: 25499 - DNA, 256 bp, Zea mays
attcagcattcaaaaacacaccaagcgaacgcactagcaacgacctaacaccaatggctaccaagatattagccctccttgcgcttcttgcccttttagtgagcgcaacaaatgcgttcattattccacagtgctcacttgctcctagtgccattattccacagttcctcccaccagttacttcaatgggcttcgaacatccagccgtgcaagcctacaggctacaactagcgcttgcggcgagcgccttacaaca

SEQ ID NO: 25500 - DNA, 259 bp, Zea mays
gggaaggaaacctcgaggaggcagcaatggtggatgtttggatcgaagtggaggctaaccagtacaccgctagcactgaatctcatcctcttccaggtcctcatcagtccgatgcttgggggaacaccgaccagaaagttgtgagatgagaaccttgagaagctgaagaacgtgctagaagtgtaagaggcacgactgaccaagtgcaagtaccttgctggagacttcctcagacttggcgacctgaagcatgtgtctg

SEQ ID NO: 25501 - DNA, 255 bp, Zea mays
gcagttcggatcctgcggcgtcggcagcgtcggcagcccgttcctgggccagtgcgtcgagttcctgaggcaccagtgcagcccggcggcgacgctctacggctcgccacagtgccaggcgctgcagcagcagtgctgccaccagatcaggcaggtggagccgctgcaccggtaccaggcgacatacggtgtggtcctgcagtccttcctgcagcagcagccgcaagtcgagctcgcggcgctgatggcggccca

SEQ ID NO: 25502 - DNA, 181 bp, Zea mays
acggcctgcagcagccgactccatgcccctacgctgctgccggcggtgtcccccactgaagaaactatgtgctgtagtatagccgctggctagctagctagttgagtcatttagcggcgatgattgagtaataatgtgtcacgcatcaccatgggtggcagtgtcagtgtgagcaatgacc

SEQ ID NO: 25503 - DNA, 252 bp, Zea mays
ccgatcgacaccatgagggtgttgctcgttgccctcgctctcctggctctcgctgcgagcgccacctccacgcatacaagcagcggctgcggctgccagccaccgccgccggttcatctaccgccgccggtgcatctgccacctccggttcacctgccacctccggtgcatctcccaccgccggtccacctgccgccgccggtccacctgccaccgccggtccatgtgccgccgccggttcatctgccgccg

SEQ ID NO: 25504 - DNA, 82 bp, Zea mays
tagtgtaccaacaatggcagccaaaatattttgcctccttatgctccttggtctttctgcaagtgctgctacggcgaccatt

SEQ ID NO: 25505 - DNA, 199 bp, Zea mays
cattggccgcactgaaccccgctgcttatttgcagcagcaaatactactaccatttagccagctagctgcagcaaaccgtgcttccttcttgacacagcaacagttgctgcctttctaccagcactttgcggctaaccccgcaaccctcttacaactacaacaattgttgccctttgtccaacttgctttgacagaccg

SEQ ID NO: 25506 - DNA, 250 bp, Zea mays
cgaaacacaccaagcgaacgacattagcaacaacctaacaacaatggctaccaagatattatccctccttgcgcttcttgcgctttttgcgagcgcaacaaatgcgttcattattccacaatgctcacttgctccaagttccattattacacagttcctcccaccagttacttcaatgggcttcgaacacccagctgtgcaagcctataggctacaacaagcaattgcggcgagcgtcttacaacaacca

SEQ ID NO: 25507 - DNA, 249 bp, Zea mays
acgaccattttcccgcaatgctcgcaagctcctatagcttcccttcttcccccgtacctctcaccagcggtgtcttcggtatgtgaaaacccaattcttcaaccctacaggatccaacaggcaatcgcagctggcatcttacctttatcacccttgttcctccaacaatcatcagccctattacaacagttacctttggtgcatttattggcacaaaacatcagggcacaacaactacaacaacttgtg

SEQ ID NO: 25508 - DNA, 246 bp, Zea mays
attgagaccaacaagcaacatagaaagtggaatccagtagcaacaacagagcaacaatggcgaccaagatattttccctccttatgctccttgctctttctgcatgtgttgctaacgcgacaattttccctcaatgctcacaagctcctatagcttcccttcttcccccataccttccatcaatgatagcttcagtatgtgaaaacccagctcttcagccctataggctccaacaagcaatcgcag

SEQ ID NO: 25509 - DNA, 246 bp, Zea mays
ccaagatattagccctccttgcgcttcttgcccttttagtgagcgcaacaaatgcgttcattattccacagtgctcacttgctcctagtgccagtattccacagttcctcccaccagttacttcaatgggcttcgaacatccagccgtgcaagcctacaggctacaactagcgcttgcggcgagcgccttacaacaaccaattgcccaattgcaacaacaatccttggcacatctaaccctacaaa

SEQ ID NO: 25510 - DNA, 248 bp, Zea mays
cgcgtcttacaacaaccaatttcccagttgcaacaacaatccttggcacatctaacaatacaaaccatcgcaacgcaacagcaacaacaattcctaccagcactgagccacctagccatggtgaaccctgccgcctacttgcaacagcagttgcttgcatcaaacccacttgctctggcaaacgtagttgcaaaccagccacaacaacagctgcaacagtttctgccagcgctcagtcaactagccat

SEQ ID NO: 25511 - DNA, 253 bp, Zea mays
cggcgagtcgcgcttccctgcgcaggtgcgggtggcaacgcggaagatctacgacccgctggaggaggacgccttccgccccatcctgcaccactacgacgggcccaagttccggctcgagctctccgtcaccgaggccctcgcgctcctcgacatcttcgccgacaaggacgacgcctgatccccatcggatctgtcgtcgggccactcgaagctcggatgcatgaatgaatgaatgaatgaatgaacaaac

SEQ ID NO: 25512 - DNA, 254 bp, Zea mays
cagctcctatagcttcccttcttcccccataccttccatcaattatagcttcagtatgtgaaaacccagctcttcaaccatataggcttcaacaagcaatcgcagcaagcaacatacctttatcgcccttgttgtttcaacaatcaccagccctatctttggtgcagtcattggtacaaaccatcagggcacaacagctgcagcaactcgtgctacctgtgatcaaccaagtagctctggcaaacctttctccc

SEQ ID NO: 25513 - DNA, 254 bp, Zea mays
caaccgccccggcctcagcctcatccccagccacacccatgcccgtgccaacagccgcatccaagcccgtgccagctgcagggaacctgcggcgttggcagcaccccgatcctgggccagtgcgtcgagttcctgaggcatcagtgcagcccgacggcgacgccctactgctcgcctcagtgccagtcgttgcggcagccgtgttgccagcagctcaggcaggtggagccgcagcaccggtaccaggcgatctt

SEQ ID NO: 25514 - DNA, 209 bp, Zea mays
ccatgcccctacgctgctgccggcggtgtcccccactgaagaaactatgtgctgtagtatagccgctggctagctagctagttgagtcatttagcggcgatgattgagtaataatgtgtcacgcatcaccatgggtggcagtgtcagtgtgagcaatgacctgaatgaacaattgaaatgaaaagaaaaaaagtactccatctgttcca

SEQ ID NO: 25515 - DNA, 245 bp, Zea mays
cccataccttccatcaatgaccgctttagtatgtgaaaacccagcccttcaaccctacaggatccagcaagcaatcgcaacaagcaacttacctttatcacacctgttctttcaacaatcgccagccctatctttggtgcagtcattggtacaaaccatcagggcagaacagttgcagcaactcgtgctaccagtgatcagccaagtagctctggcaaacctttccccctactctcagcaacaac

SEQ ID NO: 25516 - DNA, 244 bp, Zea mays
caagatgcttgcattgttcgctctcctagctctttgtgcaagcgccactagtgcgacccatattccagggcacttgccaccagtcatgccattgggtaccatgaacccatgcatgcagtactgcatgatgcaacaggggcttgccagcttgatggcgtgtccgtccctgatgctgcagcaactgttggccttaccgcttcagacgatgccagtgatgatgccacagatgatgacgcctaacatg

SEQ ID NO: 25517 - DNA, 245 bp, Zea mays
caacaatccttggcacatctaacaatacaaaccatcgcaacgcaacagcaacaacaattcctaccagcactgagccacctagccatggtgaaccctgccgcctacttgcaacagcagttgcttgcatcaaacccacttgctctggcaaacgtagttgcaaaccagccacaacaacagctgcaacagtttctgccagcgctcagtcaactagccatggtgaaccctgccgcctacctacaacagca

SEQ ID NO: 25518 - DNA, 242 bp, Zea mays
gcaaagcggcagtgcgtagagaggatcgtcgaacagaacagcatgaagatggtcatcgttctcgtcgtgtgcctggctctgtcagctgccagcgcctctgcaatgcagatgccctgcccctgcgcggggctgcagggcttgtacggcgctggcgccggcctgacgacgatgatgggcgccggcgggctgtacccctacgcggagtacctgaggcagccgcagtgcagcccgctggcggcggc

SEQ ID NO: 25519 - DNA, 237 bp, Zea mays
ggacgtcagcctagcaattagctcatcgactccagatttgagaactcgacaccatgaatgtgctgatcgttgcccttgctctcctggcgctcgctgcgagcgccgcctccagtacaagctgcggctgtggctgccagacaccaccgtttcatctaccgcctccgttctatatgccgcctccgttctatctgccgccgcagcagcagccgcagccatggcaataccccactcaaccac

SEQ ID NO: 25520 - DNA, 248 bp, Zea mays
cttccatcaatgatagcttcagtatgtgaaaacccagctcttcaaccctataggctccaacaagcaatcgcagcaagcaacatacctttatcacccttgtttcaacaatcgccagccctatctttggtgcagtcattggtacaaaccatcaaggcacagcagctgcagcaactcgtgctacctgtgatcaaccaagtagctctggcaaacctttctccctactatcagcaacaacaatttcttccatt

SEQ ID NO: 25521 - DNA, 249 bp, Zea mays
ggcaagaccatcaccttggaggtggagtcgtctgacacaatcgataatgtcaaagccaagatccaggacaaggagggcattccaccggaccagcagcgcctgatctttgctggcaagcagctggaggatggccgtaccctcgccgactacaacatccagaaggagagcaccctccacctggtgctccgcttgcgaggtggtatgcagatctttgtgaagaccttgactggcaagaccataaccctggag

SEQ ID NO: 25522 - DNA, 248 bp, Zea mays
caaatgctgagcgataagggaaatactgctgtgtaccttcagtatgcacatgctcgtatttgttccattattcggaaatccaacaagaacgtggaagagctgaatatgagtggagccatttctctcgaccatccggatgagcgcgtgttggggctgtatcttatccgatttgcagaggttgttgaagaggcatgcacgaatctacttccaaatgttgtgtgtgaatacttgtacaatctatctgaaat

SEQ ID NO: 25523 - DNA, 237 bp, Zea mays
cggctcgagcaccagtgcagcccggcggcgacgcctacggctcgccacagtgccaggcgctgcagcagcagtgctgccaccagatcaggcaggtggagccgctgcaccggtaccaggcgacatacggtgtggtcctgcagtccttcctgcagcagcagccgcatggcgagctcgcggcgctgatggcggcccaggtagcgcagagctgacggcgatgtgcggcctgcagctgcagca

SEQ ID NO: 25524 - DNA, 239 bp, Zea mays
ggaatgtcattcatggaagtgacagcattgagagtgctaataaggagattgccctgtggttccccgagggccctgctgattggcagagcagccagcacccctggatctacgagaagtaaacatggaaagtttcacatcaaaccttgagagccagaggaaaaatgtcaccatttgtgctttagcaatgttttcgaaaagattatgatctgtatcttggaaccttatttcaatggaccaaa

SEQ ID NO: 25525 - DNA, 239 bp, Zea mays
cttacaacaacaatccttggcacatctaaccatacaaaccatcgcaacgcaacagcaacaacaatttctaccagcactgagccaactagctgtggtgaaccctgtcgcctacttgcaacagcagttgcttgcatccaacccacttgctctggcaaacatagttgcataccaacaacaacaacaattgcaacagtttctaccagcgctcagtcaactagccatggtgaaccctgccgcct

SEQ ID NO: 25526 - DNA, 237 bp, Zea mays
gtcgaacagaacagcatgaagatggtcatcgttctcgtcgtgtgcctggctctgtcagctgccagcgcctctgcaatgcagatgccctgcccctgcgcggggctgcagggcttgtacggcgctggcgccggcctgacgacgatgatgggcgccggcgggctgtacccctacgcggagtacctgaggcagccgcagtgcagcccgctggcggcggcgccctactacgccgggtgtggg

SEQ ID NO: 25527 - DNA, 238 bp, Zea mays
gcaacatagaaagcacaatagtgtaccaacaatggcagccaaaatattttgcttccttatgctccttggtctttctgcaagtgctgctaccgcaaccattttcccacaatgctcacaagctcctatagcttcctttcttcccccatacctctcaccagcggtgtcttcagtatgtgaaaacccaattcttcaaccctacaggatccaacaggcaatcgcagcaggcatcttaccttta

SEQ ID NO: 25528 - DNA, 230 bp, Zea mays
tagcaacatagaaagcacaatagtgtaccaacaatggcagccaaaatattttgcctccttatgctccttggtctttctgcaagtgctgctacggcgaccattttcccgcaatgctcgcaagctcctatagcttcccttcttcccccgtacctctcaccagcggtgtcttcggtatgtgaaaacccaattcttcaaccctacaggatccaacaggcaatcacagctggcat

SEQ ID NO: 25529 - DNA, 236 bp, Zea mays
agcaaagcggcagtgcgtagagaggatcgtcgaacagaacagcatgaagatggtcatcgttctcgtcgtgtgcctggctctgtcagccgccagcgcctctgcaatgcagatgccctgcccctgcgcggggctgcagggcttgtacggcgctggcgccggcctgacgacgatgatgggcgccggcgggctgtacccctacgcggagtacctgaggcagccgcagtgcagcccgctgg

SEQ ID NO: 25530 - DNA, 226 bp, Zea mays
tgcagatgccctgcccctgcgcggggctgcagggcttgtacggcgctggcgcggcctgacgacgatgatgggcgccggcgggctgtacccctacgcggagtacctgaggcagccgcagtgcagcccgctggcggcggcgccctactacgccgggtgtgggcagccgagcgccatgttccagccgctccggcaacagtgctgccagcagctgatgaggatgatggac

SEQ ID NO: 25531 - DNA, 243 bp, Zea mays
gatcatagtgtgcaggcatgcatttttacgggctattgggaggatgttggaacaatcaaatcattctttgatgcaaacttggccctcactgagcagccttccaagtttgatttttatgatccaaaaacacctttcttcactgcaccccgatgcttgcctccgacgcaattggacaagtgcaagatgaaagatgcatttatctcagatggttgcttactgagagaatgcaacatcgagcattct

SEQ ID NO: 25532 - DNA, 243 bp, Zea mays
gttcgagagaattcacctccaatcacacatgccacattctcgtgtgatagtcaactgatctatgcaagctttatggatgccactgttggcatatttaatgggtcgagtttgagacttcaatgtcggattcttccagcttcgtatcttcctccaaatatcagtccgagcgttcatcctgttgtgggtgcggcacacccttcggaagcaagccagtttgctctaaggctgactgatggtggtgtt

SEQ ID NO: 25533 - DNA, 245 bp, Zea mays
gcctcgggtcaaaccctaagcagggagttgatttatccgctgcagccatgagtaagttgcagtctgagtctgtcaaggatgccatctcccagattgttggggatgccaaggagaagaataggaagttcactgagactgtggaacttcagattggtctgaagaattatgatccacagaaggacaagcgtttcagtggctctgttaagttgccccatatccctcgtcccaagatgaaggtgtgcatg

SEQ ID NO: 25534 - DNA, 272 bp, Zea mays
  unsure (1)..(272): unsure at all n locations
caccaagcgaagcnactagcaacgacctaacaacaatggctaccaagatattagccctccttgcgcttcttgccctttttgtgagcgcaacaaatgcgttcattattccacaatgctcacttgctcctagtgccattattccacagttcctcccaccagttacttcaatgggcttcgaacacctagctgtgcaagccaacatgcaacaacaagcgcttgcggcgagcgtcttacaacaaccaattgcccaattgcaacaacaatccttgcca

SEQ ID NO: 25535 - DNA, 268 bp, Zea mays
gcaattagctcatcgactccagattggagaactcgacaccatgaaggtgctgatcgttgcccttgctctcctggcgctcgctgcgagcgccgcctccagtacaagcggcggctgtggctgccagacaccaccgtttcatctaccgcctccgttctatatgccgcctccgttctatctgccgccgcagcagcagccgcagccatggcaataccccactcaaccaccgcagctaagcccgtgccagcagttcggatcctgcggcgtcggc

SEQ ID NO: 25536 - DNA, 241 bp, Zea mays
cgtgttcaaggccgacctccccggcgtgaagaaggcggaggtgaaggtggaggtggaggacggcaacgtgctgctcatcagcgggcagcgcagcagggagaaggaggacaagggcgacaagtggcaccgcgtggagcgcacagcggccagttcgtgcggcgcttccggctccccgagaacgccaagaccgacgaggtgacggccgcgctggataacggcgtgctcacggtcaccgtgccca

SEQ ID NO: 25537 - DNA, 270 bp, Zea mays
caactagcaacatagaaagcacaatagtgtaccaacaatggcagccaaaatattttgcctccttatgctccttggtctttctgcaagtgctgctacggcgaccattttcccgcaatgctcgcaagctcctatagcttcccttcttcccccgtacctctcaccagcggtgtcttcggtatgtgaaaacccaattcttcaaccctacaggatccaacaggcaatcacagctggcatcttacctttatcacccttgttcttcaacaatcatca

SEQ ID NO: 25538 - DNA, 273 bp, Zea mays
aacagcatgaagatggtcatcgttctcgtcgtgtgcctggctctgtcagctgccagcgcctctgcaatgcagatgccctgcccctgcgcggggctgcagggcttgtacggcgctggcgccggcctgacgacgatgatgggcgccggcgggctgtacgcctacgcggagtacctgaggcatccgcagtgcagcccgctggcggcggcgccctactacgccgggtgttggcagccgagcgccatgttccagccgctccggcaacagtgctgccag

SEQ ID NO: 25539 - DNA, 243 bp, Zea mays
aacaagcaacatagaaagtggaatccagtagcaacaatagagcaacaatggcgaccaagatattttccctccttatgctccttgctctttctacatgtgttgctaacgcgacaattttccctcaatgctcacaagctcctatagcttcccttcttcccccataccttccatcaattatagcttcaatatgtgaaaacccagctcttcaaccatataggcttcaacaagcaatcgcagcaagca

SEQ ID NO: 25540 - DNA, 265 bp, Zea mays
attcggagaaggttgatatatggggtgccggtgtgctactacatgtactactacttggttcacttccatttcaagggggctctctggacgccgttttcgagtccataaagacacttgaacttgatttcagcagcaccccatgggaatcaatatcagttcttggacgggatcttattgggcgaatgctaaatcgagatgtctcttgcagaatgactgctgatgaagttcttagtcacccatgggtcgtattttacacagaatgccc

SEQ ID NO: 25541 - DNA, 275 bp, Zea mays
caccaactagcaacatagacagcacaatagtgtaccaacaatggcagccaaaatattttgcctccttatgctccttggtctttctgcaagtgctgctacggcgaccattttcccacaatgctcacaagctcctatagcttcccttcttcccccgtacctctcaccagcggtgtcttcggtatgtgaaaacccaattcttcaaccctataggatccaacaggcaatcgcagctggcatcttacctttatcacccttgttcctccaacaatcatcag

SEQ ID NO: 25542 - DNA, 275 bp, Zea mays
acacctacgtacctacaacaacagttgctgcaacaaattgtaccagctctgactcagctagctgtggcataccctgctgcctacttacaacagttgcttccattcaaccaactggctgtgtcaaactctgctgcgtacctacaacagcgacaacagttacttaatccattggcagtggctaacccattggtcgctaccttcctgcagcagcaacaacaattgctgccatacaaccagttctctttgatgaaccctgccttgcagcaacccatcgt

SEQ ID NO: 25543 - DNA, 274 bp, Zea mays
gttacatttgggcctgatcgggttatggagttctgcaacaacaatgatcttcagttaattgtacgagcacatgagtgtgtgatggatggctttgaacgctttgcccaaggtcatctgatcactcttttctccgcaacaaattattgtggtactgcaaataatgcaggtgcgatcttggttttgggtagagatcttgtggttgtgccaaaactaatccatcctttgccccctgcaattacatcacctgaagcgtcgccggatcatattgaggaca

SEQ ID NO: 25544 - DNA, 262 bp, Zea mays
gccgcagcaccggtaccaggcgatcttcggcttggtcctccagtccatcctgcagcagcagccgcaaagcggccaggtcgcggggctgttggcggcgcagatagcgcacaactgacggcgatgtgctgcctgcagcagccgactccatgcccctacgctgctgccggcggtgtcccccactgaagacactatgtgctgtagtatagccgctggctagctagctagttgagtcatttagcggcgatgattgaataataatgtg

SEQ ID NO: 25545 - DNA, 275 bp, Zea mays
gtcgcacatatctactatactatactctaggaagcaaggacaccaccgccatggcagccaagatgcttgcactgttcgctctcctagctctttgtgcaagcgccactagtgcgacccatattccagggcacttgccaccagtcatgccattgggtaccatgaacccatgcatgcagtactgcatgatgcaacaggggcttgccagcttgatggcgtgtccgtccctgatgctgcagcaactgttggccttaccgcttcagacgatgccagtgatg

SEQ ID NO: 25546 - DNA, 262 bp, Zea mays
ccttgtttcaacaatcgccagccctatctttggtgcagtcattggtacaaaccatcagggcacagcagctgcagcaactcgtgctacctgtgatcaaccaagtagctctggcaaacctttctccctactctcagcaacaacaatttcttccattcaaccaactgtctacattgaaccgtgctgcttatttgcagcaacaactattaccattcagccagctagctactgcctactctcagcaacaacaacttcttccatttaa

SEQ ID NO: 25547 - DNA, 264 bp, Zea mays
aagcgcactagcaacgacctaacaccaatggctaccaagatattagccctccttgcgcttcttgcccttttagtgagcgcaacaaatgcgttcattattccacagtgctcacttgctcctagtgccattattccacagttcctcccaccagttacttcaatgggcttcgaacatccagccgtgcaagcctacaagctacaactagcgcttgcggcgatcgccttacaactaccaattgcccaattgcaacaacaatccttggca

SEQ ID NO: 25548 - DNA, 212 bp, Zea mays
gtcatcaattagaagccaacgagatttctcagcatttgataacgaagcagccgagggcttacagtccgcgttggaccacatggaattgcctgaaacaatcaggtggaggatccaagcagccatgcctcttcttccaccatccaggcgcccttgtatgcaatgccaacctgcgcagttgtcgttggctgcattatcaccactccagagcagta

SEQ ID NO: 25549 - DNA, 269 bp, Zea mays
ctagcaacatagaaagcacaatagtgtaccaacaatggcagccaaaatattttgcttccttatgctccttggtctttctgcaagtcttgctaccgcaaccattttcccacaatgctcacaagctcctatagcttcccttcttcccccatacctctcaccagcggtgtcttcaatgtgtgaaaccccaattgttcaaccctacaggatccaacaggcaatcgcaacaggcatcttacccatatcaccttggtcctccaacaaccgtcagc

SEQ ID NO: 25550 - DNA, 249 bp, Zea mays
  unsure (1)..(249): unsure at all n locations
attttcagcattcaaaaacacaccaagcgaacgnnactagcaacgacctaacaccaatggctaccaagatattagccctccttgcgcttcttgcccttttagtgagcgcaacaaatgcgttcattattccacagtgctcacttgctcctagtgccagtattccacagttcctcccaccagttacttcaatgggcttcgaacatccagccgtgcaagcctacaggctacaactagcgcttgcggcgagcg

SEQ ID NO: 25551 - DNA, 244 bp, Zea mays
cccaggcaaggtgcgcgccgtggtcaagttcaacgcggcgctggcgcaccacatcatggccggcgccgacgtgctcgccgtcaccagccgcttcgagccctgcggcctcatccagctgcaggggatgcgatacggaacgccctgcgcctcagcgtcgactgtaacgtcgtggagccggcggacgtcaagaaggtggccaccacattgcagcgcgccatcaaggtggtcggcacgccggcgtacg

SEQ ID NO: 25552 - DNA, 249 bp, Zea mays
ggatcgtcgaacagaacagcatgaagatggtcatcgttctcgtcgtgtgcctggctctgtcagctgccagcgcctctgcaatgcagatgccctgcccctgcgcggggctgcagggcttgtacggcgctggcgccggcctgacgacgatgatgggcgccggcgggctgtacccctacgcggagtacctgaggcagccgcagtgcagcccgctggcggcggcgccctactacgccgggtgtgggcagccga

SEQ ID NO: 25553 - DNA, 259 bp, Zea mays
ccagatattatccctccttgcgcttcttgcgcttattgcgagcgcaacaaatgcgttcattattccacaatgctcacttgctccaagttccattattacacagttcctcccaccagttacttcaatgggcttcgaacacccagctgtgcaagcctataggctacaacaagcaattgcggcgagcgtcttacaacaaccaatttcccagttgcaacaacaatccttggcacatctaacaatacaaaccatcgcaacgcaa

SEQ ID NO: 25554 - DNA, 268 bp, Zea mays
tgcccctgtaatatctgctgagaaggcctaccatgagcagctctctgtgcctgaaatcaccaatgctgtatttgagaccctcaagcatgatggccaagtgtgacccaaggcacggaaagtacatggcttgctgcttgatgtaccgcggtgatgttgttcctaaggatgtcaacgctgcagttgcaaccatcaagaccaagagaactgtccagtttgtggactggtgccccactggattcaagtgtggcatcaactatcagccaccctc

SEQ ID NO: 25555 - DNA, 270 bp, Zea mays
gtcgaacagaacagcatgaagatggtcatcgttctcgtcgtgtgcctggctctgtcagccgccagcgcctctgcaatgcagatgccctgcccctgcgcggggctgcagggcttgtacggcgctggcgccggcctgacgacgatgatgggcgccggcgggctgtacccctacgcggagtacctgaggcagccgcagtgcagcccgctggcggcggcgccctactacgccgggtgtcggcagacgagcgccatgtaccagccgctccggcaa

SEQ ID NO: 25556 - DNA, 264 bp, Zea mays
tcagcaaagcggcagtgcgtagagaggatcgtcgaacagaacagcatgaagatggtcatcgttctcgtcgtgtgcctggctctgtcagctgccagcgcctctgcaatgcagatgccctgcccctgcgcggggctgcagggcttgtacggcgctggcgccggcctgacgacgatgatgggcgccggcgggctgtacccctacgcggagtacctgaggcagccgcagtgcagcccgctggcggcggcgcgctactacgccgggtgt

SEQ ID NO: 25557 - DNA, 207 bp, Zea mays
gcacccgatcgacaccatgagggtgttgctcgttgccctcgctctcctggctctcgctgcgagcgccacctccacgcatacaagcggcggctgcggctgccagccaccgccgccggttcatctaccgccgccggtgcatctgccagctccggttcacctgccacctccggtgcatctcgcaccgccggtcgacctgccgcacgcggt

SEQ ID NO: 25558 - DNA, 246 bp, Zea mays
agcaacttacctttatcacccttgttgtttcaacaatcgccatccctatctttggtgcagttattggtacaaaccatcggggcacaacagctgtagcaactcttgctacttgtgatcaaccaagtagctatggcaaacctttctccctactctcagcaacaacagtttcttccattcaaccaactgcctacactgaaaccttttgcttatttgcagcatcaacaactattaccattcagccagcta

SEQ ID NO: 25559 - DNA, 246 bp, Zea mays
tgtcgcacatatctactatactatactctaggaagcaaggacaccaccgccatggcagccaagatgcttgcattgttcgctctcctagctctttgtgcaagcgccactagtgcgacccatattccagggcacttgccaccagtcatgccattgggtaccatgaacccatgcatgcagtactgcatgatgcaacaggggcatgccagcttgatggcgtgtccgacgctgatgctgcagcaactgttg

SEQ ID NO: 25560 - DNA, 259 bp, Zea mays
gaagaaacagctcctgtcctgccatcatcggtgattgcaagtactacagctaggagcaaaccccatacttcccgatttgagtatgtagaaaatgcacctgctcctaagactgggagcagctcagaaggcaatctcatgagtggacatgttgcacccccaaagtcatcgaacttctttgttgaatttgggatggacagtggatatcacaaaaaatctacatccagttcatccaaagtgcagattgaggaaagcagtgaag

SEQ ID NO: 25561 - DNA, 260 bp, Zea mays
tcaacaagcaacatagagagtggaatacagtagcactaatagagcaacaatggcggccaagatattttccatccttatgctccttgctctttctgcatgtgttgctaacgcgaccatttttcctcaatactcacaagctcctatagctgcccttcttcccccataccttccatcaatgaccgctttagtatgtgaaaacccagcccttctaccctacaggatccagcaagcaatcgcaactagcaacttacctttatcac

SEQ ID NO: 25562 - DNA, 257 bp, Zea mays
acagctgatcattttgttgatcatggggacaaaatacactttggtaaccttttccttgaggtgcgagctactccaggccatacctctggctgtgtgacttatgttacaggtgatgctgatgggcaaccttcaccaaggatggcttttactggtgatgccttaattatccgggcatgtggaaggactgacttccagggaggaagttctgaaacattgtatcagtcagtgcattcacagattttcacattgccaaagat

SEQ ID NO: 25563 - DNA, 257 bp, Zea mays
gcaacatacctttatcacccttgtttcaacaatcgccagccctatctttggtgcagtcattggtacaaaccatcaaggcacagcagctgcagcaactcgtgctacctgtgatcaaccaagtagctctggcaaacctttctccctactatcagcaacaacaatttcttccattcaaccaactatctacactgaaccctgctgcttatttgcagcaacaactattaccattcagccagctagctactgcctactctcat

SEQ ID NO: 25564 - DNA, 249 bp, Zea mays
attttgagcattcagaaacacacctagcgaagcgcactagcaacgacctaacaacaatggctaccaagatattatccctctttgcgcttcttgccctttttgtgagcgcaacaaatgcgttcattattccacaatgctcacttgctcctagtggcattattccacagttcctccctccagttacttcaatgggcttcgaacacccagctgtggcaacctacatgctacgacaagcgcttggggcgagcg

SEQ ID NO: 25565 - DNA, 234 bp, Zea mays
ctctcctgcttatttacagcacaacaactacaacaacttgtgctagcaaaccttgctgcctactctcagcaacaacagtgtcttccattcaaccaagtagctgcattgaactctgcttcttatttgctacaacaagaactaccattcatccagctatctgctgccgtatccgagcaatttcttccagtcgagcaactgacagctttgaaatctcctgctgtattacagcagcag

SEQ ID NO: 25566 - DNA, 257 bp, Zea mays
ccgaagcaggtgctatttctctaatacaacttcaagaagggatgaaaaacctggaggggagtgaggacagcgaggagcaacttatgaagagttttgaggagaaaaaagatgccatgctcagctcgctttggaaaatcaatgtggttgatatcgagtccacgctctcacgtgtctgccaagcagttctgagagatagcatggtctccaaagatgtcctgaagctgcgagccaaagcgttgaaaaagctcggaacgata

SEQ ID NO: 25567 - DNA, 259 bp, Zea mays
gcgccggcgggctgtacccctacgcggagtacctgaggcagccgcagtgcagcccgctggcggcggcgccctactacgccgggtgtgggcagccgagcgccatgttccagccgctccggcaacagtgcagccagcagcagatgaggatgatggacgtgcagtccgtcgcgcacagctgcagatgatgatgcagcttgagcgtgccgctgccgccagcagcagcctgtacgagccagctctgatgcagcagcagcagcag

SEQ ID NO: 25568 - DNA, 260 bp, Zea mays
agctcctatagcttcccttcttcccccataccttccatcaattatagcttcaatatgtgaaaacccagctcttcaaccatataggcttcaacaagcaatcgcagcaagcaacatacctttatcgcccttgttgtttcaacaatcgccagccctatctttggtgcagtcattggtacaaaccatcatggcacaacagctgcagcaactcgtgctacctctgatcaaccaagtagctctggcaaacctttctccctactctc

SEQ ID NO: 25569 - DNA, 263 bp, Zea mays
ctcatcgactccagattggagaactcgacaccatgaaggcgctgatcgttgcccttgctctcctggcgctcgctgcgagtgcgcctccagtacaagcggcggctgtggctgccagacaccaccgtttcatctaccgcctccgttctatatgccgcctccgttctatctgccgccgcagcagttgccgcagccatggcaataccccactcaaccaccgcagctaagcccgtgccagcagttcggatcctgcggcgtcggcagcg

SEQ ID NO: 25570 - DNA, 262 bp, Zea mays
tcacctagcgaagctactagcaacgacctaacaacaatggctaccaagatattatccctctttgcgcttcttgccctttttgtgagcgcaacaaatgcgttcattattccacaatgctcacttgctcctagtgccattattccacagttcctccctccagttacttcaatgggcttcgaacacccagctgtgcaagcctacaggctacaacaagcgcttgcggcgagcgtcttacaacaaccaattgcccaattacaacaac

SEQ ID NO: 25571 - DNA, 259 bp, Zea mays
gcaaagcggcagtgcgtacagacgatcgtcgaacagaacagcatgaagatggtcatcgttctcgtcgtgtgcctggctctgtcagctgccagcgcctctgcaatgcagatgccctgcccctgcgcggggctgcagggcttgtacggcgctggcgccggcctgacgacgatgatgggcgccggcgggctgtacccctacgcggagtacctgaggcagccgcagtgcagcccgctggcggcggcgccctactacgccgggt

SEQ ID NO: 25572 - DNA, 261 bp, Zea mays
acgatccaacaggcaatcgcagctggcatcttacctttatcacccttgttcctccaacaatcatcagccctattacagcagttacctttggtgcatttattggcacaaaacatcagggcacaacaactacaacaacttgtgctagcaaaccttgctgcctactctcagcaacaacagtttcttccattcaaccaactagctgcattgaactctgcttcttatttgcaacaacaacaactaccattcagccagctatctgct

SEQ ID NO: 25573 - DNA, 252 bp, Zea mays
agaactcgacaccatgaaggtgctgatcgttgcccttgctctcctggagctcgctgcgattccgcctccagtacaagcggcggcagtggctgccagatatcaccgtttcatctaccgcctccgttctatatgccgcctccgttctagtctgccgccgcagcagcagccgcagccatggcaatactccactcaaccaccgcagctaagcccgtgccagcagttcggatcctgcggcgtcggcagcgtcggcag

SEQ ID NO: 25574 - DNA, 235 bp, Zea mays
tctgacggcgatgtgcggcctgcagcagccgactccatgcgcctacgctgctgccggcggtgtcccccactgaagaaactatgtgctgtagtatagccgctggctagctagctagttgagtcatttagcggcgatgattgagtaataatgtgtcacgcatcaccatgggtggcagtgtcagtgtgagcaatgacctgaatgaacaattgaaatgaaaagaaaaaagtattgttcc

SEQ ID NO: 25575 - DNA, 260 bp, Zea mays
gcattcagaaacacaccaagcgaagcaactagcaacaacctaacaacaatggctaccaagatattatccctccttgcgcttcttgcgctttttgcgagcgcaacaaatgcgtccattattccacaatgctcacttgctcctagttccattattccacagttcctcccaccagttacttcaatggccttcgaacacccagctgtgcaagcctataggctacaacaagcgattgcggcgagcgtcttacaacaaccaattgc

SEQ ID NO: 25576 - DNA, 261 bp, Zea mays
agcaacatagaaagcacaatagtgtaccatcaatggcagccaaaatattttgcatccttatgctccttggtctttctgcaagtgctgctacggcgaccattttcccgcaatgctcgtaagctcctatagcttcccttcttcacccgtacctctcaccagcggtgtcttcggtatgtgaaaacccaattcttcaaccctacaggatccaacaggcaatcacagctggcatcttacctttatcacccttgttcctccaacaat

SEQ ID NO: 25577 - DNA, 97 bp, Zea mays
tctctatctatatatgtaataatgcagtaagacgacacacattatcatgtgtggtatgaccaataatatatgcatggtcataataaagttttggttt

SEQ ID NO: 25578 - DNA, 261 bp, Zea mays
tgcctagcaattagctcatcgactccagattggagaactcgacaccatgaaggtgctgatcgttgcccttgctctcctggcgctcgctgcgagctccgcctccagtacaagcggcggctgtggctgccagacaccaccgtttcatctaccgcctccgttctatatgccgcctccgttctatctgccgccgcagcagcagccgcaaccatggcaatagcccactcaaccatcgcagctaagcccgtgccagcagttcggatc

SEQ ID NO: 25579 - DNA, 263 bp, Zea mays
ctggacgtcagcctagcaattagctcatcgactccagattggagaactcgacaccatgaaggtgctgatcgttgcccttgctctcctggcgctcgctgcgagcgccgcctccagtacaagcggcggctgtggctgccagacaccaccgtttcatctaccgcctccgttctatatgccgcctccgttctatctgccgcagcagcagcagccgcagccatggacataccccactcaaccaccgcagctaagcccgtgccagcagt

SEQ ID NO: 25580 - DNA, 265 bp, Zea mays
aatcctacaggctacaagaggccatcacagcaagcatcttacggtcgttagcattgaccgtccaacaaccatatgccctattgcaacaaccatccttagtgaatctgtatctccaaagaatcacagcacaacaactacaacaacggttgcttccaacaattaatcaagtagttgcagcgaaccttgctgcttaccttcagcaacaacaatttcttccattcaatcaactagctggggtgaaccctgctgcttacttgcaggcaca

SEQ ID NO: 25581 - DNA, 261 bp, Zea mays
caaccaagtagctctggcaaacctttctccctactctcagcaacaacaatttcttccattcaaccaactgtctacattgaaccgtgctgcttatttgcagcaacaactattaccattcagccagctagctactgcctactctcagcaacaacaacttcttccatttaaccaattggccgcactgaaccccgctgcttatttgcagcagcaaatactactaccatttagccagctagctgcagcaagccgtgcttccttctt

SEQ ID NO: 25582 - DNA, 260 bp, Zea mays
tgagaccagcaagcaacatagacagtagaatccattagcaacaatagagcaacaatggcgaccaagatattttccctccttatgctccttgctctttctacatgtgttgctaacgcgacaattttccctcaatgctcacaagctcctatagcttcacttcttcccccataccttccatcaattatagcttcagtatgtgaaaacccagctcttcaaccatataggcttcaacaagcaatcgcagcaagcatcataccttt

SEQ ID NO: 25583 - DNA, 254 bp, Zea mays
atcccccataccttccatcaatgaccgcttcagtatgtgaaaacccagcccttcaaccctacaggctccaacaagcaatcgtaacaagcaacttacctttatcacccctgttctttcaacaatcgccagccctatctttggtgcagtcattggtacaaaccatcagggcacaacagctgcagcaactcgtgctaccagtgatcagccaagtagctctggcaaacctttctccctactctcagcaacaacaattt

SEQ ID NO: 25584 - DNA, 258 bp, Zea mays
agcaagcctacaggctacaactagcgcttgcagcgagcgccttacaacaaccaattgcccaattgcaacaacaatccttggcacatctaaccctacaaaccattgcaacgcaacaacaacaacaacagtttctgccatcactgagccacctagccgtggtgaaccctgtcacctacttgcaacagcagctgcttgcatccaacccacttgctctggcgaacgtagctgcataccagcaacaacaacagctgcaacagt

SEQ ID NO: 25585 - DNA, 256 bp, Zea mays
ttgagaccaacaagcaacatagaaagtggaatccagtagcaacaacagagcaacaatggcgaccaagatattttccctccttatgctccttgctctttctgcatgtgttgctaacgcgacaattttccctcaatgctcacaagctcctatagcttcccttcttcccccataccttccatcaatgatagcttcagtatgtgaaaacccagctcttcagccctataggctccaacaagcaatcgcagcaagcaacata

SEQ ID NO: 25586 - DNA, 256 bp, Zea mays
gaactcgacaccatgaaggtgctgatcgttgcccttgctctcctggcgctcgctgcgaggccgcctccagtacaagcggcggctgtggctgccagacaccaccgtttcatctaccgcctccgttctatatgccgcctccgttctaacatccgccgcagcagcagccgcagccatggcaataccccactcaaccaccgcagctaagcccgtgccagcagttcggatcctgcggcgtcggcagcgtcggcagcccgtt

SEQ ID NO: 25587 - DNA, 258 bp, Zea mays
tggcgagcgtcttacaacaaccaattgaccaattgcatcaacaatccttggcacatctaactatacataccatcgcaacgcaacagcaacaacagttcctaccagcactgagccacctagccatggtgaaccctgtcgcctacttgcaacagcagctgcttgcatccaacccacttgctctagcaaacgtagttgcaaaccagcaacaactacgactgcaacagtttctgccagcgcttagtcaactagccatggtga

SEQ ID NO: 25588 - DNA, 256 bp, Zea mays
ggacaccaccgccatggcagccaagatgcttgcattgttcgctctcctagctctttgtgcaagcgccactagtgcgacccatattccagggcacttgccaccagtcatgccattgggtaccatgaacccatgcatgcagtactgcatgatgcaacaggggcttgccagcttgatggcgtgtccgtccctgatgctgcagcaactgttggccttaccgcttcagacgatgccagtgatgatgccacagatgatgacg

SEQ ID NO: 25589 - DNA, 257 bp, Zea mays
attgagaccaactagcaacatagaaagcacaatagtgtaccaacaatggcagccaaaatattttgcttccttatgctccttggtctttctgcaagtgttgctaccgcaaccattttcccacaatgctcacaagctcctatagcttcccttcttcccccatacctctcaccagcggtgtcttcaatgtgtgaaaacccaattgttcaaccctacaggatccaacaggcaatcgcaacaggcatcttaccattatcacc

SEQ ID NO: 25590 - DNA, 258 bp, Zea mays
accaactagcagcattgaactctcctgcttatttacagcagcaacaactactaccattcagccagctagctggtgtgagccctgctaccttcttgacacaaccacagttgttgccgttctaccagcacgttgcgcctaacgctggcaccctcttacaactgcaacaattgctgccattcaaccaacttgctttgacaaacccagcagtgttctaccaacaacccatcattggtggtgccctcttttagatttcttatg

SEQ ID NO: 25591 - DNA, 259 bp, Zea mays
gcaacatagaaagtggaatccagtagcaacaatagagcaacaatggcgaccaagatattttccctccttatgctccttgctctttctacatgtgttgctaacgcgacaattttccctcaatgctcacaagctcctatagcttcccttcttcccccataccttccatcaattatagcttcaatatgtgaaaacccagctcttcaaccatataggcttcaacaagcaatcgcagcaagcaacatacctttatcgcccttgt

SEQ ID NO: 25592 - DNA, 253 bp, Zea mays
tgagaccaactagcaacatagaaagcacaatagtgtaccaacaatggcagccaaaatattttgcctccttatgctccttggtctttctgcaagtgctgctacggcgaccattttcccacaatgctcacaagctcctatagcttcccttcttcccccgtacctctcaccatcggtgtcttcggtatgtgaaaacccaattcttcaaccctataggatccaacaggcaatcgcagctggcatcttacctttatca

SEQ ID NO: 25593 - DNA, 261 bp, Zea mays
cattgaactctgctgcttatttgcaacaacaattaccattcagccagctagttgctgcctacccccagcaatttcttccattcaaccaactagcagcattgaactctgctgcttatttacagcagcaacaactactaccattcagccagctagctgatgtgagccctgctgccttcttgacacaacaacagttgttgccgttctacctgcacgctatgcctaacgctggcaccctcttacaactgcaacaattgctgccat

SEQ ID NO: 25594 - DNA, 263 bp, Zea mays
tgccaccagtcatgccattgggtaccatgaacccatgcatgcagtactgcatgatgcaacaggggcttgccagcttgatggcgtgtccgtccctgatgctgcagcaactgttggccttaccgcttcagacgatgccagtgatgatgccacagatgatgacgcctaacatgatgtcaccattgatgatgccgagcatgatgtcaccaatggtcttgccgagcatgatgtcgcaaatgatgatgccacaatgtcactgcgacgcc

SEQ ID NO: 25595 - DNA, 266 bp, Zea mays
ggtgcatctgccacctccggttcacctgccacctccggtgcatctcccaccgccggtccacctgccgccgccggtccacctgccaccgccggtccatgtgccgccgccggttcatctgccgccgccaccatgccactaccctactcaaccgccccggcctcagcctcatccccagccacacccatgcccgtgccaacagccgcatccaagcccgtgccagctgcagggaacctgcggcgttggcagcaccccgatcctgggccagt

SEQ ID NO: 25596 - DNA, 245 bp, Zea mays
cagaaacacacctagcgaacgcactagcaacgacctaacaacaatggcttccaagacattatccctccttgcgcttcttgccctttttgtgagtgcaacaaatgcgttcattattccacaatgctcacttgctccgagtgccattattccacagttcctccctccagttacttcaatgggcttcgaacacccagctgtgcaagcctataggctacaacaagcgcttgcggcgagcgtcttagaac

SEQ ID NO: 25597 - DNA, 252 bp, Zea mays
gcaacatagaaagcacaatagtgtaccaacaatggcagccaaaatattctgcctccttatgctccttggtctttctgcaagtgctgctacggagaccattttcccgcaatgctcgcaatctcctatagcttcccctcttcctccgtacctctcaccagcggtgtcttcggcacgtgaaaacccaattcttcaaccctacaggatccaacaggcaatcgcagctggcatcttacctttatcattcatgctcct

SEQ ID NO: 25598 - DNA, 253 bp, Zea mays
caccgtttcatctaccgcctccgttctatatgccgcctccgttctatctgccgccgcagcagcagccgcagccatggcaataccccactcaaccaccgcagctaagcccgtgccagcagttcggatcctgcggcgtcggcagcgtcggcagcccgttcctgggccagtgcgtcgagttcctgaggcaccagtgcagcccggcggcgacgccctacggctcgccacagtgccaggcgctgcagcagcagtgctg

SEQ ID NO: 25599 - DNA, 252 bp, Zea mays
ctcccaccagttacttcaatgggcttcgaacacccagctgtgcaagcctataggctacaacaagcaattgcggcgagcgtcttacaacaaccaatttcccagttgcaacaacaatccttggcacatctaacaatacaaaccatcgcaacgcaacagcaacaacaattcctaccagcactgagccacctagccatggtgaaccctgccgcctacttgcaacagcagttgcttgcatcaaacccacttgctctg

SEQ ID NO: 25600 - DNA, 252 bp, Zea mays
gcagcaacaactattaccatttagccagctagctactgcctactctcagcaacaacaacttcttccatttaaccaattggccgcactgaaccccgctgcttatttgcagcagcaaatactactaccatttagccagctagctgcagcaaaccgtgcttccttcttgacacagcaacagttgctgcctttctaccagcagtttgcggctaaccccgcaaccctcttacaactacaacaattgttgccctttgt

SEQ ID NO: 25601 - DNA, 247 bp, Zea mays
cgccggcgttgagatgttggtttatcaggatctcctatctggcgacgagctcctgtcggattcattcacctacaaggagctcgagaacggcgtcctgtgggaggtcgagggaaagtgggtcacccaaggtcctgttgatgtggacattggtgccaatccatccgccgagggtggtgaggacgaaagcgttgatgacacagctgtgaaggtggttgatattgttgacacattccgtctacaggagcaa

SEQ ID NO: 25602 - DNA, 254 bp, Zea mays
ctggacgtcagcctagcaattagctcatcgactccagattggagaactcgacaccatgaaggcgctgatcgttgcccttgctctcctggcgctcgctgcgagcgccgcctccagtacaagcggcggctgtggctgctagacaccaccgtctcatctaccgcttccgttctatatgccgcctccgttctatctgccgccgcagcatcagccgcagccatggcaatactcatctcaaccaccgcagctaagcccgt

SEQ ID NO: 25603 - DNA, 253 bp, Zea mays
attgagaccaacaagcaacatagaaagtggaatccagtagcaacaacagagcaacaatggcgaccaagatattttccctccttatgctccttgctctttctgcatgtgttgctaacgcgacaattttccctcaatgctcacaagctcctatagcttcccttcttcccccataccttccatcaatgatagcttcagtatgtgataacccagctcttcagccctataggctccaacaagcaatcgcagcaagcaa

SEQ ID NO: 25604 - DNA, 249 bp, Zea mays
gaccattagctttatctactccagagcgcagaagaacccgatcgacaccatgagggtgttgctcgttgccctcgctctcctggctctcgctgcgagcgccacctccacgcatacaagcggcggctgcggctgccagccaccgccgccggttcatctaccgccgccggtgcatctgccacctccggttcacctgccacctccggtgcatctcccaacgccggtccacctgccgacgtcggtccatctgcc

SEQ ID NO: 25605 - DNA, 161 bp, Zea mays
atcgagccgcattggtacaaaccatcagggcacaacagctgcaacaactcgtgctaccagtgatcagccaagtagctctggcaaacctttctccctactctcagcaacaacaatttcttccattcaaccaactgtctacactgaaccctgctgctatttac

SEQ ID NO: 25606 - DNA, 201 bp, Zea mays
caacaactacaacaacttgtgctagcaaaccttgctgcctactctcagcaacagcagtttcttccattcaaccaactagctgcattgaactctgcttcttatttgcaacaacaacaactaccattcagccagctacctgctgcctacccccagcaatttcttccattcaaccaactggcagcattgaactctcctgcttat

SEQ ID NO: 25607 - DNA, 250 bp, Zea mays
acgcaaatcgtcactgacgttcattccgcttgcttgattgttccaggtattagcagtcgaccggttcctcggagcacgatgaagtttgttgctgcctacctgcttgctgtcctcgctgggaacgccagcccctccgctgacgatttgactgccattctggagtcagttggctgtgaagttgacaatgaaaagatggaactcctgctgtcccaactgagcggtaaggacatcaccggcctcattgccgcgg

SEQ ID NO: 25608 - DNA, 242 bp, Zea mays
gcaaagcggcagtgcgtagagaggatcgtcgaacagaacagcatgaagatggtcatcgttctcgtcgtgtgcctggctctgtcagctgccagcgcctctgcaatgcagatgccctgcccctgcgcggggctgcagggcttgtacggcgctggcgccggcctgacgacgatgatgggcgccggcgggctgtacccctacgcggagtacctgaagcagccgcagtgcagcccgctggcggcggc

SEQ ID NO: 25609 - DNA, 259 bp, Zea mays
ccaagaacctgctcaaggtgttcctcgacggcggcggcatcgtcgcccccagggctgtcatggagaaggccatcgcggggccggagtacaacaagctgccagccaccgccgccggttcatctaccgccgccggtgcatctgccacctccggttcacctgccacctccggtgcatctcccaccgccggtccacctgccgccgccggtccacctgccaccgccggtccatgtgccgccgccggttcatctgccgccgccac

SEQ ID NO: 25610 - DNA, 253 bp, Zea mays
ggtccatttggtggcacaaaacatcagggcacaacaactacaacaacttgtgctagcaaaccttgctgcatactctcagcaacatcagtttcttccattcaaccaactggctgcattgaactctgctgcttatttgcaacaacaattaccattcagccagctagttgctgcctacccccagcaatttcttccattcaaccaactagcagcattgaactctgctgcttatttacagcagcaacaactactacca

SEQ ID NO: 25611 - DNA, 259 bp, Zea mays
aacgagaacaagcctgtcacgaacatgccgtgacactcaagagatacacctagaacaaggccttcagatgctcaagatatttagggagcatgtcagcaagacgtccatcttggatgacttcgccttctatgagagtcgccagaagctgatgcaggataagaggtcgaaacagcagcaggtccaaaagcaggtctgggacagtaggacccccatttctgtcactggaagcgagcaacagcaggaagctgctaatgggaac

SEQ ID NO: 25612 - DNA, 254 bp, Zea mays
ggtgaaccctgccgtctacctacaactactttcatctagcccgctcgcggtgggcaatgcacctacgtacctacaacaacagttgctgcaacaaattgtaccagctctgactcagctagctgtggcaaaccctgctgcctacttacaacagttgcttccattcaaccaactggctgtgtcaaactctgctgcgtacctacaacagcgacaacagttacttaatccattggcagtggcataaccattggtcgcta

SEQ ID NO: 25613 - DNA, 229 bp, Zea mays
atcagcaaagcggcagtgcgtagagaggatcgtcgaacagaacagcatgaagatggtcatcgttctcgtcgtgtgcctggctctgtcagctgccagcgcctctgcaatgcagatgccctgcccctgcgcggggctgcagggcttgtacggcgctggcgccggcctgacgacgatgatgggcgccggcgggctgtacccctacgcggagtacctgaggcagccgcagtgc

SEQ ID NO: 25614 - DNA, 253 bp, Zea mays
ccgttctggattaattggtggcgcaccctggataagaataccatatccctttcagtggggtgctccaacttttgatgcgggtgaagctttcgcgatgatggcagcatcatttgttgctctcgtggagtccactggggccttcattgctgtctctaggtatgctagtgctacaccaatcccaccctctgttcttagccgtggtattggctggcagggcatcggtattcttctggatgggctatttgggactgga

SEQ ID NO: 25615 - DNA, 256 bp, Zea mays
atgtcgcctacttgcaacagcagttgcttgcatccaacccacttgctctggcaaacatagttgcataccaacaacaacaacaattgcaacagtttctaccagcgctcagtcaactagccatggtgaaccctgccgcctacctacaacagcaacaactgatttcatctagccctctcgctgtggttaatgcacctacatacctgcaacaacagttgctgcaacagattgtaccagctctgactcagctagctgtggc

SEQ ID NO: 25616 - DNA, 256 bp, Zea mays
agtcaatatgggagagtacttttgtgatatatgcaaattttatgatgatgatacagacaaagggcagtaccattgcatcgattgtggcatatgcagggttggtggcaaggaaaacttcttctactgtgtgaagtgtgggtcctgctattctgttatactccgtgataaccatcagtgtgtggagaactcaatgaggcagaattgcccaatctgttatgagtatctatttgactcattacaaggaacaagagttctg

SEQ ID NO: 25617 - DNA, 251 bp, Zea mays
aatctacactgaaccctgctgcttatttgcaacaacaactattaccattcagccagctagctactgcctactctcagcaacaacaacttcttccatttaaccaattggccgcactgaaccccgctgcttatttgcagcagcaaatactactaccatttagccagctagctgcagcaaaccgtgcttccttcttgacacagcaacagttgctgcctttctaccagcagtttgcggctaaccccgcaaccctc

SEQ ID NO: 25618 - DNA, 204 bp, Zea mays
actagttctagatcgcgagctgccgccctttttttttttttttcaattgttcattcaggtcattgctcacactatcactgccacccatgttcttacagcaaccctttgttggtgctgcattctagatagaaatatttgtgttgtatcgaataatgagttgacatgccatcgcgtgtgactcattattaacaataaaacaagttt

SEQ ID NO: 25619 - DNA, 244 bp, Zea mays
ctagcaacatagaaagcacaatagtgtaccaacaatggcagccaaaatattttgcttccttatgctccttggtctttctgcaagtcttgctaccgcaaccattttcccacaatgctcacaagctcctatagcttcccttcttcccccatacctctcaccagcggtgtcttcaatgtgtgaaaccccaattgttcaaccctacaggatccaacaggcaatcgcaacaggcatcttaccattatca

SEQ ID NO: 25620 - DNA, 203 bp, Zea mays
ggttactccatggagaacccaaactcattggtcttatgggaagctcagtttggtgatttttcaaatggagctcaagtgatatttgatcagttcctgagtagtggggagtcaaaatggctccgccagactggccttgtcgtttgccttcctcatggatatgatggtcaggggcctgaacattctagtgcaagattggaacgctt

SEQ ID NO: 25621 - DNA, 236 bp, Zea mays
cgccgctgccgccagcagcagcctgtacgagccagctctgatgcagcagcagcagcagctgctggcagcccagggtctcaaccccatggccatgatgatggcgcagaacatgccggccatgggtggactctaccagtaccagtaccagctgcccagctaccgcaccaacccctgtggcgtctccgctgccattccgccctactactgattcatgatatttgggaaatctcctctat

SEQ ID NO: 25622 - DNA, 257 bp, Zea mays
gaccaacaagcaacatagaaagtggaatccagtagcaacaacagagcaacaatggcgaccaagatattttccctccttatgctccttgctctttctgcatgtgttgctaacgcgacaattttccctcaatgctcacaagctcctatagcttcccttcttccctcataccttccatcaatgatagcttcagtatgtgaaaacccagctcttcagccctataggctccaacaagcaatcgcagcaagcaagataccttt

SEQ ID NO: 25623 - DNA, 174 bp, Zea mays
gatacttatgtactctgcaaaattttcaagaaaagtggccttggtccaaggattggggagcaatatggggctccgtttgacgaagccgaatgggacaatgcagaagctgaaacctctatatttcctttgatgacctcttcagaagtagtgaacccaacagagggaccacacact

SEQ ID NO: 25624 - DNA, 249 bp, Zea mays
tagcggaaataggaagaagggaatcaaggagaagatcaaggagaagctgcccggaggccacaaggacgaccagcacgccacggcgacgaccggcggcgcctacgggcagcagggacacaccggcagcgcctactggcagcagggacacaccggcggctcctacgccaccggcaccgagggcaccggcgagaattaaggcattatggacaagatcaaggaaaagctgcccggacagcactgatcggcgcc

SEQ ID NO: 25625 - DNA, 181 bp, Zea mays
attgagaccaactagcaacatagaaagcacaatagtgtaccaacaatggcagccaaaatattttgcttccttatgctccttggtctttctgcaagtgctgctaccgcaaccattttcccacaatgctcacaagctcctatagcttcctttcttcccccatacctctcaccagcggtgtctt

SEQ ID NO: 25626 - DNA, 249 bp, Zea mays
gttgccagcagctcaggcaggtggagccgcagcaccggtaccaggcgatcttcggcttggtcctccagtccatcctgcagcagcagccgcaaagcggccaggtcgcggggctgttggcggcgcagatagcgcacaactgacggcgatgtgcggcctgcagcagccgactccatgcccctacgctgctgccggcggtgtcccccactgaagaaactatgtgctgtagtatagccgctggctagctagcta

SEQ ID NO: 25627 - DNA, 249 bp, Zea mays
caacaagcgattgcggcgagcgtcttacaacaaccaattgcccaattgcaacaacaatccttggcacatctaacaatacaaaccatcgcaacgcaacagcaacaacagttcctaccagcactgagccacctagccatggtgaaccctgtcgcctacttgcaacagcagctgcttgcatccaacccacttgctctagcaaacgtagttgcaaaccagcaacaacaacaactgcaacagtttctgccagcg

SEQ ID NO: 25628 - DNA, 249 bp, Zea mays
gcaacaacaacaacaacaacagtttctgccatcactgagccacctagccgtggtgaaccctgtcacctacttgcaacagcagctgcttgcatccaacccacttgctctggcgaacgtagctgcataccagcaacaacaacagctgcaacagtttatgccagtgctcagtcaactagccatggtgaaccctgccgtctacctacaactactttcatctagcccgctcgcggtgggcaatgcacctacgta

SEQ ID NO: 25629 - DNA, 144 bp, Zea mays
ccgcaatgctcgcaagctcctatagcttcccttcttcccccgtacctctcaccatcggtgtcttcggtatgtgaaaacccaattcttcaaccctacaggatccaacaggcaatcgcagctggcatcttacctttatcacccttg

SEQ ID NO: 25630 - DNA, 246 bp, Zea mays
gaccaacaagcaacatagaaagtggaatccagtagcaacaatagagcaacaatggcgaccaagatattttccctccttatgctccttgctctttctgcatgtgttgctaacgcgacaattttccctcaatgctcacaagctcctatagcttcccttcttcccccataccttccatcaatgatagcttcagtatgtgaaaacccagctcttcaaccctataggctccaacaagcaatcgcagcaagc

SEQ ID NO: 25631 - DNA, 106 bp, Zea mays
gcctcctaccaacaacacatcattggtggtgccctcttttagattgcttattagttgtaattcaataataaagttttttggatgatgtatgtggccaaccagaaat

SEQ ID NO: 25632 - DNA, 246 bp, Zea mays
cagcctagcaattagctcatcgactccagattggagaactcgacaccatgaaggtgctgatcgttgcccttgctctcctggcgctcgctgcgagcgccgcctccagtacaagcggcggctgtggctgccagacaccaccgtttcatctaccgcctccgttctatatgccgcctccgttctatctgccgccgcagcagcagccgcagccatggcaataccccactcaacatccgcagctaagcccgt

SEQ ID NO: 25633 - DNA, 108 bp, Zea mays
gtcgaaccggaggttgccgccggcgctcccaagaagaggacgttccgcaagtacagctaccgcggcgtcgacctagatgcgcttctctacatgtccacggacgacctc

SEQ ID NO: 25634 - DNA, 199 bp, Zea mays
agcaacatagatagcacaatagtgtaccatcaatggcagccaaaatattttgcctccttatgctccttggtctttctgcaagtgctgctacggcgaccattttcccgcaatgctcgcaagctcgtatagcttcccttcttcccccgtacctctcatcagcggcgtcttcggtatgtgaaaacccaattcttcaacccta

SEQ ID NO: 25635 - DNA, 249 bp, Zea mays
atttgagcattcagaaacacacctagcgaacgcactagcaacgacctaacaacaatggcttccaagacattatccctccttgcgcttcttgccctttttgtgagtgcaacaaatgcgttcattattccacaatgctcacttgctccgagtgccattattccacagttcctccctccagttacttcaatgggcttcgaacacccagctgtgcaagcctataggctacaacaagcgcttgcggcgagcgtc

SEQ ID NO: 25636 - DNA, 251 bp, Zea mays
gttgctgactacatgaggaacctcgctgaagaggagccagagaagtaccagtctcacttcagtgagtacattaagaagggaattgaggctgatgacatggaagctctgtacaagaaggtccatgctgccatccgtgctgatccttctgtggtcaagtcaaccaagcagccaccaaaggagcacaagaggtacaaccccaagaaactgacgtacgagcagaggaaggccagtctcattgaaaggctcaacca

SEQ ID NO: 25637 - DNA, 263 bp, Zea mays
atcagtaccatcaatcatcattcatcttagtagtataggcaccaaatcaaatctgcaacatcaattatctaactccaaaaaccatgatgctggtgcttgtcgttcttgctttcattgctttagtatcaagtgtttcttgtacacagacaggcggctgcagctgtggtcaacaacaaagccatgagcagcaacatcatccacaacaacatcatccacaaaaacaacaacatcaaccaccaccacaacatcaccagcagcagcaa

SEQ ID NO: 25638 - DNA, 259 bp, Zea mays
atatggacctgaggagctcaggagcatgaaacgaatgacggttgaattggagaaactacgcctgttgtgtgagagaataattaagagagagaaggtgaagagagagacggttatgtgtgatcatgatatacttgccaaaacaaaggacactgttattttctccaacaaccgtcagccctattacagcagttacctttggtgcatttgttggcacaaaacatcaaggcacaacaactacaacaacttgtgctaggaaacc

SEQ ID NO: 25639 - DNA, 264 bp, Zea mays
ccaattggccgcactgaacccctctgcttatttccagcagcaaatactactaccatttggccagctagctacaacaagccccgcttccttcttgacacaacaacaagtgcttccgttctaccagcagtttgcgcctaacgctggcaccctcttacaactgcaacaattgctgccattcaaccaacttgctttgacaaacccaacaacgttctaccaacaacccatcattggcggtgccctcttttagattgcttatgagttata

SEQ ID NO: 25640 - DNA, 261 bp, Zea mays
atccacagaaggacaagcgtttcagtggctctgttaagttgccccatatccctcgtcccaagatgaaggtgtgcatgcttggtgatgcccagcatgttgaggaggccgagaagatgggacttgactacatggatgttgaggctctcaagaaaatgaacaagaacaagaagcttgttaagaggcttgccaagaagtaccatgctttcttggcatcagaggccatcatcaagcagattccccgtctccttggtcctggtctca

SEQ ID NO: 25641 - DNA, 264 bp, Zea mays
acatagtgaagtacactagcaacatcttagcaccaatgggagccaagatttttgccctccttgccctccttgctctttcagcaagcgctgctacctcgacttttattccacaatgctcacaacaatacctctctccggtgacagccgcgggatttcaatacccaactatacaatcctacatggtacaagaggccatccaagcaagcatcttacggtcattagcattaaccctccaacaaccatatgctctattgcaacagccat

SEQ ID NO: 25642 - DNA, 192 bp, Zea mays
gaagaacaatatgtttttcattgagacgtcggccaagacagctgataatataaaccaactgtttgaggaaattgcaaagaggttgcctaggccaacggcatcgtgacagaacacttgtgtgtattgcttgtaccatgtaatgcatgccagtccatatacacgggtactgtatggactacggaagacctctca

SEQ ID NO: 25643 - DNA, 181 bp, Zea mays
aacgacctaacaacaatggcttccaagacattatccctccttgcgcttcttgccctttttgtgagtgcaacaaatgcgttcattattccacaatgctcacttgctccgagtgccattattccacagttcctccctccagttacttcaatgggcttcgaacacccagctgtgcaagcctata

SEQ ID NO: 25644 - DNA, 186 bp, Zea mays
atgaccgcttcagtttgtgaaaacccagcccttcaaccctacaggctccaacaagcaatcgcaacaagcaacttacctttatcacccctgttctttcaacaatcgccagccctatctttggtgcagtcattggtacaaaccatcagggcacaacagctgcaacaactcgtgctaccagtgatcagc

SEQ ID NO: 25645 - DNA, 212 bp, Zea mays
ctcggagaccgcggccttcgctggcgcgcggatcgactggaaggagactccagaggcgcacgtgttcaaggccgacgtaccggggctgaagaaggaggaggtcaaggtggaggtcgaggacggcaacgtccttcagatcagcggcgagcgcaacaaggagcaggaggagaagacggacacctggcaccgcgtggagcggagcagcgggaggt

SEQ ID NO: 25646 - DNA, 96 bp, Zea mays
gacctgaatgaacaattgaaatgattgagtaataatgtgtcacgcatcaccatgggtggcagtgtcagtgtgagcaatgacctgaatgaacaattg

SEQ ID NO: 25647 - DNA, 226 bp, Zea mays
ctgccattataccacagttcctccgaccagttacttcaatgggcttcgaacacctagctgtgcaagcctacaagctacaacaagcgcttgcggcgagcgtcttacaacaaccaattaaccaattgcaacaacaatccttggcacatctaaccatacaaaccatcgcaacacaacagcaacaacagttcctaccagcactgagccaactagatgtggtgaaccctgt

SEQ ID NO: 25648 - DNA, 260 bp, Zea mays
gtgcgtcgagttcctgaggcaccagtgcagcccggcggcgacgccctacggctcgccacagtgccaggcgctgcagcagcagtgctgccaccagatcaggcaggtggagccgctgcaccggtaccaggcgacatacggtgtggtcctgcagtccttcctgcagcagcagccgcaggcgagctcgcggcgctgatggcggcccaggtagcgcacagctgacggcgatgtgcggcctgcagctgcagcagccaggtccctgc

SEQ ID NO: 25649 - DNA, 170 bp, Zea mays
cttccccagccagctagggtttgcagatgacgaccgcggcgcgccccacctgggcgccggccaagggcggcaacgagcaggggggcaccgcatcttcggcccctcccagaagttctcctcccgcgacctcgccgcgcacacctccctcaagccaagaaaagacggtcaac

SEQ ID NO: 25650 - DNA, 185 bp, Zea mays
cctattttgcctccttatgctccttggtctttctgcaagtgctgctacggcgaccattttcccgcaatgctcgcaagctcctatagcttcccttcttcccccgtacctctcaccagcggtgtgtttcggtatgttatttgagttgctcagatctgttaaaaattttgtgagctatgcagttcagt

SEQ ID NO: 25651 - DNA, 258 bp, Zea mays
atggtacttggtgctagcacctcatgatcctatgcaatcaagccttctcaatgctacactagaggataaaaacctttcagaaatcccaaatttcaggttattactgaagcagctggtcaccatggaggtgatacagtggacaagtctgtgggaattcttcaaggaggaatatgagaaggagaaggatcttcttgggggagctttgggtgccaaagcttcagaagatttgaggctgaggattatcgaacataatatctt

SEQ ID NO: 25652 - DNA, 151 bp, Zea mays
cccccactgaagaaactatgtgctgtagtatagccgctggctagctagctagttgagtcatttagcggcgatgattgagtaataatgtgtcacgcatcaccatgggtggcagtgtcagtgtgagcaatgacctgaatgaacaattgaaatg

SEQ ID NO: 25653 - DNA, 245 bp, Zea mays
ccacagttcctccgaccagttacttcaatgggcttcgaacacctagctgtgcaagcctacaggctacaacaagcgcttgcggcgagcgtcttacaacaaccaattaaccaattgcaacaacaatccttggcacatctaaccatacaaaccatcgcaacacaacagcaacaacagttcctaccagcactgagccaactagatgtggtgaaccctgtcgcctacttgcaacagcaggtgcttgcatc

SEQ ID NO: 25654 - DNA, 255 bp, Zea mays
cacaactacaacaacttgtgctagcaaaccttgctgcctactctcagcaacagcagtttcttccattcaaccaactagctgcattgaactctgcttcttatttgcaacaacaacaactaccattcagccagctacctgctgcctacccccagcaatttcttccattcaaccaactggcagcattgaactctcctgcttatttacagcagcaacaactactaccattcagccagctagctggtgtgagccctgcta

SEQ ID NO: 25655 - DNA, 163 bp, Zea mays
ctgccattattccacagttcctcccaccagttacttcaatgggcttcgaacacctagctgtgcaagccaacatgcaacaacaagcgcttgcggcgagcgtcttacaacaaccaattgcccaattgcaacaacaatccttgccacatctaacaatacaagccat

SEQ ID NO: 25656 - DNA, 153 bp, Zea mays
gttgcccttgctctcctggcgctcgctgcgaggccgcctccagtacaagcggcggctgtggctgccagacaccaccgtttcatctaccgcctccgttctatatagctcctccgttctatctgccgccgcagcagcagccgcagccatggcaat

SEQ ID NO: 25657 - DNA, 258 bp, Zea mays
gtccaagtatatcaacgtagcaaggtggtttaatcacattgatgcgctcgtgaggctgagcggaattactgcagagggccaaggtgtgaaggttgaatcgtcagcagttccttcagccccaactccagatgttgctgaagcacaggccccagttgctgaggaggacgacgacgatgatgttgacctttttggtgaggagaccgaagatgagaagaaggctgctgaagagcgtgctgcagctgccaaggcttctggcaa

SEQ ID NO: 25658 - DNA, 260 bp, Zea mays
caaaacatcagggcacaacaactacaacaacttgtgctagcaaaccttgctgcctactctcagcaacagcagtttcttccattcaaccaactaggttcattgaactctgcttcttatttgcaacaacaacaactaccattcagccagctacctgctgcctacccccagcaatttcttccattcaaccaactagcagcattgaactctcctgcttatttacagcagcaacaactactaccattcagccagctagctggtgt

SEQ ID NO: 25659 - DNA, 258 bp, Zea mays
gcagttacctttggtgcatttattggcacaaaacatcagggcacaacaactacaacaacttgtgctagcaaaccttgctgcctactctcagcaacagcagtttcttccattcaaccaactagctgcattgaactctgcttcttatttgcaacaacaacaactaccattcagccagctatctgctgcctacccccagcaatttcttccattcaaccaactgacagcattgaactctcctgcttatttacagcagcaaca

SEQ ID NO: 25660 - DNA, 245 bp, Zea mays
ctgtctacactgaaccctgctgcttatttgcagcaacaactattaccattcagccagctagctactgcctactctcagcaacaacaacttcttccatttaaccaattggccgcactgaaccccgctgcttatttgcagcagcaaatactactaccatttagccagctagctgcagcaaaccgtgcttccttcttgacacagcaacagttgctgcctttctaccagcagtttgcggctaaccccgc

SEQ ID NO: 25661 - DNA, 166 bp, Zea mays
cggcgcagagggtgcagatgacgagggtgacgagggcgatgactattgagtagccggttaataattagttcgctggtgcttaatggttgagttattttgagtatactctgtatgggtccactccattgcgtgctgctgctgtgtgtttccattttgtattttgtga

SEQ ID NO: 25662 - DNA, 252 bp, Zea mays
aacaatttcttccattcaaccaactgtctacattgaaccgtgctgcttatttgcagcaacaactattaccattcagccagctagctactgcctactctcagcaacaacaacttcttccatttaaccaattggccgcactgaaccccgctgcttatttgcagcagcaaatactactaccatttagccagctagctgcagcaagccgtgcttccttcttgacacagcaacagttgctgcctttctaccagcagt

SEQ ID NO: 25663 - DNA, 252 bp, Zea mays
caatcgccagccctatctttggtgcagtcattggtacaaaccatcagggcacagcagctgcagcaactcgtgctacctgtgatcaaccaagtagctctggcaaacctttctccctactctcagcaacaacaatttcttccattcaaccaactgtctacactgaaccctgctgcttatttgcagcaacaactattaccattcagccagctagctactgcctactctcagcaacaacaacttcttccatttaac

SEQ ID NO: 25664 - DNA, 170 bp, Zea mays
acagcaacaactgctttcatctagcccgctcgctgtggccaatgcacctacatacctgcaacaacaattgttgcaacagattgtaccagctctgactcagctagttgtggcaaaccctgctgcctacttgcaacagctgcttccattcaaccaactgactatgtcgaact

SEQ ID NO: 25665 - DNA, 253 bp, Zea mays
gtgaagaagaaaggctggcatgtggggaaagagatctttatgatctctggtgatactagccaagaagacagagaattggcaacggaccattttaacaactctgctgacgcaaaaattatgtttggttctatcaaggcatgtggggagggtatctccctcgttggtgcgtcgagagttgtcattctggacgtacacctgaacccatctgtcacccgtcaagcgattgggcgtgcattcaggcccggacagcaga

SEQ ID NO: 25666 - DNA, 158 bp, Zea mays
gtgtaccaacaatggcagccaaaatattttgcttccttatgctccttggtctttctgcaagtgttgctaccgcaaccattttcccacaatgctcacaagctcctatagcttcccttcttcccccatacctctcaccagcggtgtcttcaatgtgtgaa

SEQ ID NO: 25667 - DNA, 72 bp, Zea mays
ctcataccggcatgtgtttcctagagataatcaatatattgattgagctttatctcagaaaagagaaacgag

SEQ ID NO: 25668 - DNA, 211 bp, Zea mays
ctggtgtgagccctgctaccttcttgacacaaccacagttgttgccgttctaccagcacgctgcgcctaacgctggcaccctcttacaactgcaacaattgctgccattcaaccaacttgctttgacaaacctagcagtgttctaccaacaacccatcattggtggtgccctcttttagatttcttatgagttatagttcaataataaaaa

SEQ ID NO: 25669 - DNA, 250 bp, Zea mays
ccccagcaatttcttccattcaaccaactggcagcattgaactctgctgcttatttacaacagcaacagctaccaccattcagccagctagctgatgtgagccctgttgccttcttgacacaacaacagttgttgccgttctacctgcacgctgcgcctaacgctggcaccctcttacaactgcaacaattgctgccattcaaccaacttgctttgacaaacccaacaacgttctaccaacaacccatca

SEQ ID NO: 25670 - DNA, 246 bp, Zea mays
atcacaaacagtaagggcatccaagaggctgatcacccggaagaagggtactacataaggtctggaatcgtggtgatcctgaagaatgcaaccatcaacgatgggtctgtcatatagatcggctgcgtttgcgtctacaaaacaagaacctacaatggtattgcatcgatggatcgtgtaaccttggtatggtaagagccgcttgacaggaagtcgagcgttcgggcgcaagatgcgtagtctggc

SEQ ID NO: 25671 - DNA, 252 bp, Zea mays
gcagctgcagcaactcgtgctacctgtgatcaaccaagtagctctggcaaacctttctccctactctcagcaacaacaatttcttccattcaaccaactgtctacactgaaccctgctgcttatttgcagcaacaactattaccattcagccagctagctactgcctactctcagcaacaacaacttcttccatttaaccaattggccgcactgaaccccgctgcttatttgcagcagcaaatactactacc

SEQ ID NO: 25672 - DNA, 158 bp, Zea mays
gcaattagctcatcgactccagattggagaactcgacaccatgaaggtgctgatcgttgcccttgctctcctggcgctcgctgcgagcgcgcctccagtacaagcggcggctgtggctgccagacaccaccgtttcatctaccgcctccgttctatat

SEQ ID NO: 25673 - DNA, 242 bp, Zea mays
gatggtcatcgttctcgtcgtgtgcctggctctgtcagccgccagcgcctctgcaatgcagatgccctgcccctgcgcggggctgcagggcttgtacggcgctggcgccggcctgacgacgatgatgggcgccggcgggctgtacccccacgcggagtacctgaggcagccgcagtgcagcccgctggcggcggctgcctactacgccgggtgtgggcagccgagcgccatgttccagccgc

SEQ ID NO: 25674 - DNA, 262 bp, Zea mays
caccagtccagatcttattgcttcccttcatctgaataaccacggtgataccctggttgcgtcctactaccacttggtaaagaaccattcaggcactgctgttggagctgagttgtctcacagcatgtcgagaaatgagagcacgctaatcttcgggtcccagcactcgctggatccccacacgactatcaagacacgtttcaacaactacggcatggccagtgcccttgtccagcatgaatggcgtcccagtccttcgtca

SEQ ID NO: 25675 - DNA, 262 bp, Zea mays
  unsure (1)..(262): unsure at all n locations
gggataccaaacgcagatgtatccaccgtgtcgtcccggcaccaccgggccaaggatcggccgcgtgaggcttacgaaggcccgggagtacgccgcggggttgccgatgatgtgccggctgtcggagccccaggagtgcagcatcttctccggcggcgaccagtactagctaccagggttaaaaaaaaaagagtgagtcggcgcgacgtgcaaggcgcacatgtgtactgtgcgcgtgcanatccagaatgacgtagctctg

SEQ ID NO: 25676 - DNA, 257 bp, Zea mays
cttgcaatcacaacgaacagaagctctcgatctcaccgacaccgaggaagaagagatcaatggcgtccgagcagggagtcgtgatcgcgtgccacagcaaggctgagttcgacgcccacatgaccaaggcccaggaagccggcaagctggtggtcatcgacttcactgccgcctggtgcggtccatgccgcgccatcgccccactgttcgtcgaacacgccaagaagttcactcaggtcgtcttcctgaaggtggac

SEQ ID NO: 25677 - DNA, 257 bp, Zea mays
aatattttgcctccttatgctccttggtatttctgcaagtgctgctacggcgaccattttcccgcaatgctcacaagctcctatagcttcccttcttcccccgtacctctcaccagcggtgtcttcggtatgtgaaaacccaattcttcaaccctacaggatccaacaggcaatcgcagctggcatcttacctttatcacccttgttcctccaacaatcatcagccctattacagcagttacctttggtgcatttat

SEQ ID NO: 25678 - DNA, 256 bp, Zea mays
cgccgctgcctacccccagcaatttcttccattcaaccaactggcagcattgaactctgctgcttatttacaacagcaacagctaccaccattcagccagctagctgatgtgagccctgttgccttcttgacacaacaacagttgttgccgttctacctgcacgctgcgcctaacgctggcaccctcttacaactgcaacaattgctgccattcaaccaacttgctttgacaaacccaacaacgttctaccaacaa

SEQ ID NO: 25679 - DNA, 266 bp, Zea mays
ggaacaaacacatcggaccggtttgagttccgcatccataagacggtgatcgacctgatcagctccccagacgtggtgaagcagatcacctctatcaccattgagccgggtgttgaggtcgaggtgaccattgcagacgtgtaatgacgatctatatattcgtgttgcttttgtttttgtgctccccttgtgtgcctgtaagagagacatcgagttattgttagcttataatccttttgtagctgtatgtcttatctgtgggctgc

SEQ ID NO: 25680 - DNA, 252 bp, Zea mays
gtgttgctaacgcgacaattttccctcaatgctcacaagctcctatagcttcccttcttcccccataccttccatcaattatagcttcaatatgtgaaaacccagctcttcaaccatataggcttcaacaagcaatcgcagcaagcaacatacctttatcgcccttgttgtttcaacaatcgccagccctatctttggtgcagtcattggtacaaaccatcagggcacaacagctgcagcaactcgtgctac

SEQ ID NO: 25681 - DNA, 256 bp, Zea mays
ggacgtcagcctagcaattagctcatcgactccagattggagaactcgacaccatgaaggtgctgatcgttgcccttgctctcctggcgctcgctgcgagcgccgcctccagtacaagcggcggctgtggctgccagacaccaccgtttcatctaccgcctccgttctatatgccgcctccgttctatctgccgccgcagcagcagccgcagccatggcaataccccactcaaccaacgcagctaagcccgtgcca

SEQ ID NO: 25682 - DNA, 256 bp, Zea mays
gttgtttcaacaatcaccagccctatctttggtgcagtcattggtacaaaccatcagggcacaacagctgcagcaactcgtgctacctgtgatcaaccaagtagctctggcaaacctttctccctactctcagcaacaacaatttcttccattcaaccaactgtctacactgaaccctgctgcttatttgcagcaacaactattaccatttagccagctagctactgcctactctcagcaacaacaacttcttcca

SEQ ID NO: 25683 - DNA, 256 bp, Zea mays
gatcagcaaagcggcagtgcgtagagaggatcgtcgaacagaacagcatgaagatggtcatcgttctcgtcgtgtgcctggctctgtcagctgccagcgcctctgcaatgcagatgccctgcccctgcgcggggctgcagggcttgtacggcgctggcgccggcctgacgacgatgatgggcgccggcgggctgtacccctacgcggagtacctgaggcagccgcagtgcagcccgctggcggcggcgccctacta

SEQ ID NO: 25684 - DNA, 255 bp, Zea mays
tgcgtagagaggatcgtcgaacagaacagcatgaagatggtcatcgttctcgtcgtgtgcctggctctgtcagctgccagcgcctctgcaatgcagatgccctgcccctgcgcggggctgcagggcttgtacggcgctggcgccggcctgacgacgatgatgggcgccggcgggctgtacccctacgcggagtacctgaggcagccgcagtgcagcccgctggcggcggcgccctactacgccgggtgtgggcag

SEQ ID NO: 25685 - DNA, 259 bp, Zea mays
gcggcagtgcgtagagaggatcgtcgaacagaacagcatgaagatggtcatcgttctcgtcgtgtgcctggctctgtcagctgccagcgcctctgcaatgcagatgccctgcccctgcgcggggctgcagggcttgtacggcgctggcgccggcctgacgacgatgatgggcgccggcgggctgtacccctacgcggagtacctgaggcagccgcagtgcagcccgctggcggcggcgccctactacgccgggtgtggg

SEQ ID NO: 25686 - DNA, 210 bp, Zea mays
catctgctaagattcttcaggagcatcgtgatgagttgaagggtacagtagttcttgtcttccaaccagcagaagaaggtggcggtggggccaagaaaatgatagaagacagagctgtggaaaacatagatgccatttttgggcttcatatagctgactctgtgcctattggtgtgctggcatccaggccagggcctattatggctggga

SEQ ID NO: 25687 - DNA, 154 bp, Zea mays
tctcgccctcgctcctccgccgccgccgccgccgcatcaagcccccgccccgccgtcgcctgaggtagacaccaatccgccgccatggggcgtatgcacagccgcgggaagggtatctcatcgtcggcgcttccctacaagaggacgcctccta

SEQ ID NO: 25688 - DNA, 153 bp, Zea mays
gcttcccttcttcccccataccttccatcaatgatagcttcagtatgtgaaaacccagctcttcaaccctataggctccaacaagcaatcgcagcaagcaacatacctttatcacccttgtttcaacaatcgccagccctatctttggtgcag

SEQ ID NO: 25689 - DNA, 251 bp, Zea mays
gaagaacccgatcgacaccatgagggtgttgctcgttgccctcgctctcctggctctcgctgcgagcgccacctccacgcatacaagcagcggctgcggctgccagccaccgccgccggttcatctaccgccgccggtgcatctgccacctccggttcacctgccacctccggtgcatctcccaccgccggtccacctgccgccgccggtccacctgccaccgccggtccatgtgccgccgccggttcatc

SEQ ID NO: 25690 - DNA, 250 bp, Zea mays
aaccaagtagctctggcaaacctttctccctactctcagcaacaacaatttcttccattcaaccaactgtctacactgaaccctgctgcttatttgcagcaacaactattaccatttagccagctagctactgcctactctcagcaacaacaacttcttccatttaaccaattggccgcactgaaccccgctgcttatttgcagcagcaaatactactgccatttagcgagctagctgcagcaagtcgtg

SEQ ID NO: 25691 - DNA, 248 bp, Zea mays
tgaatacccatctatacaatcctacaggctacaagaggccatcacagcaagcatcttacggtcgttagcattgaccgtccaacaaccatatgccctattgcaacaaccatccttagtgaatctgtatctccaaagaatcacagcacaacaactacaacaacggttgcttccaacaattaatccagtagttgcagcgaaccttgctgcttaccttcagcaacaacaatttcttccattccatcaactag

SEQ ID NO: 25692 - DNA, 248 bp, Zea mays
agaccattagctttatctactccagagcgcagaagaacccgatcgacaccatgagggtgttgctcgttgccctcgctctcctggctctcgctgcgagcgccacctccacgcatacaagcggcggctgcggctgccagccaccgccgccggttcatctaccgccgccggtgcatctgccacctccggttcacctgccacctccggtgcatctcccaccgccggtccacctgccgccgccggtccacctg

SEQ ID NO: 25693 - DNA, 248 bp, Zea mays
gttccattattacacagttcctcccaccagttacttcaatgggcttcgaacacccagctgtgcaagcctataggctacaacaagcaattgcggcgagcgtcttacaacaaccaatttcccagttgcaacaacaatccttggcacatctaacaatacaaaccatcgcaacgcaacagcaacaacaattcctaccagcactgagccacctagccatggtgaaccctgccgcctacttgcaacagcagttg

SEQ ID NO: 25694 - DNA, 249 bp, Zea mays
gtctcgacgtctcgtctcgtctcgtctcgcctgcccgcagccccttggcttcgttccatccggcttctcggcggcggcggagaggagggggatggcgcaccggctgctgcgggacgcgcaggcggacgggtgggagcggtcggacttccccatcatctgcgagtcatgcctcggcgacaacccctacgtccggatgttaagagctgaatatgactaagaatgcaaaatttgtgcacgtccttttactgt

SEQ ID NO: 25695 - DNA, 252 bp, Zea mays
ctgcctactctcagcaacaacagtttcttccattcaaccaactaactgcattgaactctgcttcttatttgcaacaacaacaactaccattcagccagctatctgctgcctacccccagcaatttcttccattcaaccaactgacagctttgaactctcctgcttatttacagcagcaacaactactaccattcagccagctagctggtgtgagccctgctaccttcttgacacaaccacaattgttgccgt

SEQ ID NO: 25696 - DNA, 253 bp, Zea mays
ccaagcgaagccactagcaacgacctaacaccaatggctaccaagatattagccctccttgcgcttcttgcccttttagtgagcgcaacaaatgcgttcattattccacagtgctcacttgctcctagtgccagtattccacagttcctcccaccagttacttcaatgggcttcgaacatccagccgtgcaagcctacaggctacaactagcgcttgcggcgagcgccttacaacaaccaattgcccaattgc

SEQ ID NO: 25697 - DNA, 250 bp, Zea mays
cgcagccaaaatattttgcctccttatgctccttggtctttctgcaagtgctgctacggcgaccattttcccgcaatgctcgcaagctcctatagcttcccttcttcccccgtacctctcaccagcggtgtcttcggtatgtgaaaaccctattcttcaaccctacaggatccaacaggcaatcgcagctggcatcttacctttatcatccttgatcttccaacaatcatcagccctattactacagtta

SEQ ID NO: 25698 - DNA, 246 bp, Zea mays
cctgcacattgacccttaccacagcgacaaggccgcggatatcctggtcaacttctttgacaaatgcaaggcagatccgagctactgggacaagatctcacagggcggcctgcagagaatttatgagaagtacacctggaagctctactccgagaggctgatgaccctgaccggcgtgtacgggttctggaagtacgtgagcaccctggagaggcgcgagacccgccgctacatcgagatgttcta

SEQ ID NO: 25699 - DNA, 244 bp, Zea mays
agatatcttggcgaggacccacgaggaattcccaacaatcttatgccctatgttcagcaagttgcggttggtaggaggccagctctaacagttttaggaaatgactatgcaacaagagatgggactggggtccgagattacatccatgtggttgaccttgctgacggacatattgctgcattgcagaagctttttgagaactctagcatagggtgtgaagcgtacaaccttggaaccggaagag

SEQ ID NO: 25700 - DNA, 243 bp, Zea mays
agaggacctgccgggctgcccgcgggaggtgcagaggggattcgccgccaccctcgtcacggaggccgagtgcaacctggccaccatcagcggcgtcgccgaatgcccctggattctcggcggcggaacgatgccctccaagtaactgcgaagagcatagtgcatgaggaatgagcttgtagctagctcatatgtctgaataataagcacagcaagaagatgaatgcatttctcggatcgttc

SEQ ID NO: 25701 - DNA, 242 bp, Zea mays
agcagcagcagcagctgctggcagcccagggtctcaaccccatggccatgatgatggcgcagaacatgccggccatgggtggactctaccagtaccagctgcccagctaccgcaccaacccctgtggcgtctccgctgccattccgccctactactgattcatgatatttgggaaatctcctctatccatctctctctatctatatatgtaataatgcagtaagacgacacacattatcatg

SEQ ID NO: 25702 - DNA, 240 bp, Zea mays
ccaacacacctagcgaacgcactagcaacgacctaacaacaatggctaccaagatattatccctctttgcgcttcttgccctttttgtgagcgcaacaaatgcgttcattattccacaatgctcacttgctcctagtgccattattccacagttcctccctccagttacttcaatgggcttcgaacacccagctgtgcaagcctacaggctacaacaagcgcttgcggcgagcgtcttac

SEQ ID NO: 25703 - DNA, 243 bp, Zea mays
gaccaacaagcaacatagaaagtggaatccagtagcaacaatagagcaacaatggagaccaagatattttccctccttatgctccttgctctttctacatgtgttgctaacgcgacaattttccctcaatgctcacaagctcctatagcttccctttttcccccataccttccatcaattatagcttcagtatgtgaaaacccagctcttcaaccatataggcttcaacaagcaatcgcagca

SEQ ID NO: 25704 - DNA, 244 bp, Zea mays
attgcaacaacaatccttggcacatctaaccctacaaaccattgcaacgcaacaacaacaacaacagtttctgccatcactgagccacctagccgtggtgaaccctgtcacctacttgcaacagcagctgcttgcatccaacccacttgctctggcgaacgtagctgcataccagcaacaacaacagctgcaacagtttatgccagtgctcagtcaactagccatggtgaaccctgccgtctac

SEQ ID NO: 25705 - DNA, 245 bp, Zea mays
agaagaacccgatcgacaccatgagggtgttgctcgttgccctcgctctcctggctctcgctgcgagcgccacctccacgcatacaagccgcggctgcggctgccagccaccgccgccggttcatctaccgccgccggtgcatctgccacctccggttcacctgccacctccggtgcatctcccaccgccggtccacctgccgccgccggtccacctgccaccgccggtccatgtgccgccgccg

SEQ ID NO: 25706 - DNA, 245 bp, Zea mays
attttgagcattcagaaacacaccaagcgaacgcactagcaacaacctaacaacaatggctaccaagatattatccctccttgcgcttcttgcgctttttgcgagcgcaacaaatgcgtccattattccacaatgctcacttgctcctagttccattattccacagttcctcccaccagttacttcaatggccttcgaacacccagctgtgcaagcctataggctacaacaagcgattgcggcga

SEQ ID NO: 25707 - DNA, 247 bp, Zea mays
cgccggcaggtgcgcttctccaagcgccgctcggggctcttcaagaaggccttcgagctctccctgctctgcgacgccgaggtcgccctcatcgtcttctcccccgccggcaagctctacgagtacgcctccaccagcatagaggatacatataaccgctatcagcaattttctggagaaggaaggaatataaatgacgatcgaactagaaacgataacaaggatgaagcttcttcagatttgcagt

SEQ ID NO: 25708 - DNA, 246 bp, Zea mays
ccagcaacatagaaagtggaatccagtagcaacaatagagcaacaatggcgaccaagatattttccctccttatgctccttgctctttctgcatgtgttgctaacgcgacaattttccctcaatgctcacaagctcctatagcttcccttcttcccccataccttccatcaatgatagcttcagtatgtgaaaacccagctcttcaaccctataggctccaacaagcaatcgcagcaagcaacata

SEQ ID NO: 25709 - DNA, 269 bp, Zea mays
agacaagcagcaacaaccacaacagcctcagcaatatcagcagggccaggaaaaatcacaacagcaacaatgtcattgccaggagcagcaacagactacaaggtgcagctataactactatagcagtagctcaaatctagaaaattgtcatgaattcctaaggcagcagtgcagccctttggtaatgccttttctccaatcacgtttgatacaaccaagtagctgccaggtattgcagcaacaatgttgtcatgatcttaggcagattg

SEQ ID NO: 25710 - DNA, 268 bp, Zea mays
gcttatttgcagcaacaactattaccattcagccagctagctactgcctactctcagcaacaacaacttcttccatttaaccaattggccgcactgaaccccgctgcttatttgcagcagcaaatactactaccatttagccagctagctgtagcaaaccgtgcttccttcttgacacagcaacagttgctgcctttctaccagcagtttgcggctaaccccgcaaccctcttacaactacaacaattgttgccctttgtccaacttg

SEQ ID NO: 25711 - DNA, 265 bp, Zea mays
gcggcagtgcgtagagaggatcgtcgaacagaacagcatgaagatggtcatcgttctcgtcgtgtgcctggctctgtcagctgccagcgcctctgcaatgcagatgccctgcccctgcgcggggctgcagggcttgtacggcgctggcgcggcctgacgacgatgatgggcgccggcgggctgtacccctacgcggagtacctgaggcagccgcagtgcagcccgctggcggcggcgccctactacgccgggtgtgggcagacga

SEQ ID NO: 25712 - DNA, 264 bp, Zea mays
attgagaccaactagcaacatagaaagcacaatagtgtaccaacaatggcagccaaaatattttgcctccttatgctccttggtctttctgcaagtgctgctacggcgaccattttcccgcaatgctcgcaagctcctatagcttcccttcttcccccgtacctctcaccagcggtgtcttcggtatgtgaaaacccaattcttcaaccctacaggatccaacaggcaatcacagctggcatcttacctttatcacccttgttc

SEQ ID NO: 25713 - DNA, 264 bp, Zea mays
caacaatccttggcacatctaacaatacaaaccatcgcaacgcaacagcaacaacaattcctaccagcactgagccacctagccatggtgaaccctgccgcctacttgcaacagcagttgcttgcatcaaacccacttgctctggcaaacgtagttgcaaaccagccacaacaacagctgcaacagtttctgccagcgctcagtcaactagccatggtgaaccctgccgcctacctacaacagcaacaactgctttcatctagc

SEQ ID NO: 25714 - DNA, 263 bp, Zea mays
ccgccccggcctcagcctcatccccagccacacccatgcccgtgccaacagccgcatccaagcccgtgccagctgcagggaacctgcggcgttggcagcaccccgatcctgggccagtgcgtcgagtttctgaggcatcagtgcagcccgacggcgacgccctactgctcgcctcagtgccagtcgttgcggcacagtgttgccagcagctcaggcaggtggagccgcagcaccggtaccaggcgatcttcggcttggtcctc

SEQ ID NO: 25715 - DNA, 264 bp, Zea mays
gccctggagccgcgccacaaggtgcagtctgaggccggctccgtccagtacttcagccggttcaacgaagccgaccgggagctcacctgcgccggcatcttcgccgtccgcgtcgtcgtcgacgccatgggcctcctgctccctcgatactccaacgtccattctcttgtctacatcgtccaagggagagggatcattgggttctcgtttccgggatgccaagaggagacccagcagcagcagtatggatacggatatggatat

SEQ ID NO: 25716 - DNA, 240 bp, Zea mays
tagcaacatagaaagcacaatagtgtaccaacaatagcagccaaaatattttgcctccttatgctccttggtctttctgcaagtgctgctacggcgaccattttcccacaatgctcacaagctcctatagcttcccttcttcccccgtacctctcaccagcggtgtcttcggtatgtgaaaacccaattcttcaaccctataggatccaacaggcaatcgcagctggcatcttaccttta

SEQ ID NO: 25717 - DNA, 263 bp, Zea mays
agcagccaagatttttgccatccttgccctccttgctctttcagcaagcgttgctaccgcgactattattccacaatgctcacaacaatacctctctccggtgacagccgcgagatttgaatacccaactatacaatcctacaggctacaagaggccatcgcagcaagcatcttacggtcgttagcattgaccgtccaacaaccatatgccctattgcaacaaccatccttaatgaatctatatctccagagaatcgcagcac

SEQ ID NO: 25718 - DNA, 218 bp, Zea mays
caagctcctatagcttcccttcttcccccataccttccatcaatgatagcttcagtatgtgaaaacccagctcttcaaccctataggctccaacaagcaatcgcagcaagcaacatacctttatcacccttgtttcaacaatcgccagccctatctttggtgcagtcattggtacaaaccatcagggcacagcagctgcagcaactcgtgctacctgt

SEQ ID NO: 25719 - DNA, 261 bp, Zea mays
ggcgacatacggtgtggtcctgcagtccttcctgcagcagcagccgcaggcgagctcgcggcgctgatggcggcccaggtagcgcacagctgacggcgatgtgcggcctgcagctgcagcagccaggtccctgcccttgcaacgcagctgccggcggtgtctactactgaggaaactatgtactgtagtaataatgtaatggagccgctgactagctacctagctcgctagtttactcatttagcggcgatgagtaacgta

SEQ ID NO: 25720 - DNA, 200 bp, Zea mays
gcaattagctcatcgactccagattggagaactcgacaccatgaaggtgctgatcgttgcccttgctctcctggcgctcgctgcgagcgccgcctccagtacaagcggcggctgtggctgccagacaccaccgtttcatctaccgcctccgttctatatgccgcctccgttctatctgccgccgcagcagcagccgcagc

SEQ ID NO: 25721 - DNA, 260 bp, Zea mays
atgcaacagttgctgccctttgtccaacttgctttgacaaacccagcagccttctaccaacaacacatcattggcggtgccatcttttagattgcttattagttgtaattcaataatgaagttttttggctgatgtatgtggcctcctagaaataagaagttacatttccaaattctaatgtgctattggcctgcaagggtgttcgataattattttccctaagattgggaagcaagctataaatcatccttatagtgta

SEQ ID NO: 25722 - DNA, 262 bp, Zea mays
agaccattagctttatctactccagagcgcagaagaacccgatcgacaccatgagggtgttgctcgttgccctcgctctcctggctctcgctgcgagcgccacctccacgcatacaagctgcggctgcggctgccagccaccgccgccggttcatctaccgccgccggtgcatctgccacctccggttcacctgccacctccggtgcatctcccaacgccggtccacctgccgacgccggtccacctgccaccgccggtcca

SEQ ID NO: 25723 - DNA, 202 bp, Zea mays
catctctgctagtatagcaggtgatatggttcttgcttctgcttactcgcatgagttgccacgatatggtcttgaagttggtctgaccaactatgcagctgcctactgcactggccttctgttggctcgccgtgtgctcaagacccgtggtttagataaggaatatgagggcaatgttgaggccactggtgaggacttctct

SEQ ID NO: 25724 - DNA, 259 bp, Zea mays
agatattttccctccttatgctccttgctctttctacatgtgttgctaacgcgacaattttccctcaatgctcacaagctcctatagcttcccttcttcccccataccttccatcaattatagcttcaatatgtgaaaacccagctcttcaaccatataggcttcaacaagcaatcgcagcaagcaacatacctttatcgcccttgttgtttcaacaatcgccagccctatctttggtgcagtcattggtacaaaccat

SEQ ID NO: 25725 - DNA, 259 bp, Zea mays
aaacagcataatcttggtatttgcaaacaaacaggacctgagaggcacgatgagcacggacgaggtcagcgaagggctggggctgcacgacctcaggaacaggatctggcacatacaggggacctgcgcgctccgcggcgagggcctctacgacgggctcgactggcttgcgtccaccctgaagcagctgcaagaatcgggccacgcgacttcggtcgctggcccttccatctgatccagcgcaagtgagctcagtgcc

SEQ ID NO: 25726 - DNA, 257 bp, Zea mays
cagcaacaggtgttccctagaggtggtcgtggctatcgctatcctactggacgtggaatgcctgatcctggcatgcacagtgttggtgctgtgatgccaccttcatatgagatgggagggatgccaatgagagaagctgccccccaacctgttccaattggggcgctagcactgcacttgctaacgccccaccagatcagcagagacttatgcttggtgagaacctgtatcctcttgttgaacagctggaacgtgag

SEQ ID NO: 25727 - DNA, 214 bp, Zea mays
ccatgagggtgttgctcgttgccctcgctctcctggctctcgctgcgagcgccacctccacgcatacaagctgcggctgcggctgccagccaccgccgccggttcatctaccgccgccggtgcatctgccacctccggttcacctgccacctccggtgcatctcccaccgccggttcatctgccgccgccaccatgccactaccctactcaacc

SEQ ID NO: 25728 - DNA, 259 bp, Zea mays
gcaacaacaatccttgccacatctaacaatacaagccatcacaacgcaacagcaacaacagttcctaccagcactgagccacctagccatggtgaaccctgccgcctacttgcaagagcagctgcttgcatccaacccacttgctctggcgaacgtagttgcaaaccagcaacaacaacagctacaacagtttctgccaacgctcagtcaactagccatggtgaaccctgccgcctacgtacaacaacaacaactgctt

SEQ ID NO: 25729 - DNA, 254 bp, Zea mays
aaacaatcatcagccctattacagcagttacctttggtgcatttattggcacaaaacatcagggcacaacaactacaacaacttgtgctagcaaaccttgctgcctactctcagcaacagcagtttcttccattcaaccaactagctgcattgaactctgcttcttatttgcaacaacaacaactaccattcagccagctatctgctgcctacccccagcaatttcttccattcaaccaactgacagcattgaa

SEQ ID NO: 25730 - DNA, 220 bp, Zea mays
ctgggacaagatctcacagggcggcctgcagagaatctatgagaagtacacctggaagctctactccgagaggctgatgaccctgaccggcgtgtacgggttctggaagtacgtgagcaacctggagaggcgcgagacccgccgctacatcgagatgttctacgccctgaagtaccgtagcctggcaagccaggttccgctgtccttcgattagtacggg

SEQ ID NO: 25731 - DNA, 250 bp, Zea mays
cagggctgcagggcttgtacggcgctggcgcggcctgacgacgatgatgggcgccggcgggctgtacccctacgcggagtacctgaggcagccgcagtgcagcccgctggcggcggcgccctactacgccgggtgtgggcagacgagcgccatgtaccagccgctccggcaacagtgctgccagcagcagatgaggatgatggacgtgcagtccgtcgcgcacagctgcagatgatgatgcagcttgagc

SEQ ID NO: 25732 - DNA, 171 bp, Zea mays
atcttacaactgcaacagttgctgccctttgtccaacttgctttgacaaacccagcagccttctaccaacaacacatcattgacggtgccatcttttagattgcttattagttgtaattcaataatgaagttttttggctgatgtatgtggcctcctagaaataagaagtt

SEQ ID NO: 25733 - DNA, 251 bp, Zea mays
tacggcgctggcgcggcctgacgacgatgatgggcgccggcgggctgtacccctacgcggagtacctgaggcagccgcagtgcagcccgctggcggcggcgccatactacgccgggtgtgggcagacgagcgccatgtaccagccgctccggcaacagtgctgccagcagcagatgaggatgatggacgtgcagtccgtcgcgcagagctgcagatgatgatgcagcttgagcgtgccgctgccgccagca

SEQ ID NO: 25734 - DNA, 253 bp, Zea mays
gctgctcatcgtaccccagggctacctcgtcgccaccaaggcgcagggagaaggcttccagtacatcgccttcgagacgaaccctgacaccatggtcagccacgttgccgggaagaactccgtcctgagcgacttgccggccgccgtcatcgccagctcgtatgccatctccatggaggaagctgcagagctcaagaacggtaggaagcatgagctggctgtgcttactcctgctggcagtggcagctaccaa

SEQ ID NO: 25735 - DNA, 253 bp, Zea mays
attctgagcattcagaaacacaccaagcgaacgcactagcaacgacctaacaacaatggctaccaagatattagccctccttgcgcttcttgccctttttgtgagcgcaacaaatgcgttcattattccacaatgctcacttgctcctagtgccattattccacagttcctcccaccagttacttcaatgggcttcgaacacctagctgtgcaagccaacatgcaacaacaagcgcttgcggcgagcgtctta

SEQ ID NO: 25736 - DNA, 254 bp, Zea mays
aatttatcgcccttgttgtttcaacaatcgccagccctatctttggtgcagtcattggtacaaaccatcagggcacaacagctgcagcaactcgtgctacctctgatcaaccaagtagctctggcaaacctttctccctactctcagcaacaacaatttcttccattcaaccaactgtctacactgaaccctgctgcttatttgcagcaacaactattaccatttagccagctagctactgcctactctcagca

SEQ ID NO: 25737 - DNA, 253 bp, Zea mays
agcttcccttcttcccccataccttccatcaattatagcttcaatatgtgaaaacccagctcttcaaccatataggcttcaacaagcaatcgcagcaagcaacatacctttatcgcccttgttgtttcaacaatcgccagccctatctttggtgcagtcattggtacaaaccatcagggcacaacagctgcagcaactcgtgctacctctgatcaaccaagtagctctggcaaacctttctccctactctcag

SEQ ID NO: 25738 - DNA, 253 bp, Zea mays
tgggagtagccgttggcatctgcgggtttcagctcttccggaacatcaccggcaacccggaagtcagggtaaacaaggcagggagggcagccggcgtgcttgagaaccatgaggaggggaggcgttacgccatgcatggcctcagaagctttgtgcacgacaagacccccgagatcatgccagctatcaacaagttctttactgaccccaagtgaagcaaagcagctttggttggccgctgatgacgatggtt

SEQ ID NO: 25739 - DNA, 253 bp, Zea mays
atccttggcacatctaaccctacaaaccattgcaacgcaacaacaacaacaacagtttctgccatcactgagccacctagccgtggtgaaccctgtcacctacttgcaacagcagctgcttgcatccaacccacttgctctggcgaacgtagctgcataccagcaacaacaacagctgcaacagtttatgccagtgctcagtcaactagccatggtgaaccctgccgtctacctacaactactttcatctagc

SEQ ID NO: 25740 - DNA, 132 bp, Zea mays
attttgagcattcagaaacacacctagcgaacgtcactagcaacgacctaacaacaatggctaccaagatattatccctctttgggcttcttgccctttttgtgagcgcaacaaatgcgttcattattccac

SEQ ID NO: 25741 - DNA, 266 bp, Zea mays
cagaaacacacctagcgaacgcactagcaacgacctaacaacaatggcttccaagacattatccctccttgcgcttcttgccctttttgtgagtgcaacaaatgcgttcattattccacaatgctcacttgctccgagtgccattattccacagttcctccctccagttacttcaatgggcttcgaacacccagctgtgcaagcctataggctacaacaagcgcttgcggcgagcgtcttagaacaaccaattgcccaattacaac

SEQ ID NO: 25742 - DNA, 264 bp, Zea mays
ctttatcacccttgttcctccaacaatcatcagccctattacagcagttacctttggtgcatttattggcacaaaacatcagggcacaacaactacaacaacttgtgctagcaaaccttgctgcctactctcagcaacagcagtttcttccattcaaccaactagctgcattgaactctgcttcttatttgcaacaacaacaactaccattcagccagctatctgctgcctacccccagcaatttcttccattcaaccaactga

SEQ ID NO: 25743 - DNA, 263 bp, Zea mays
accaagcgaagccactagcaacaacctaacaacaatggctaccaagatattatccctccttgcgcttcttgcgctttttgcgagcgcaacaaatgcgtccattattccacaatgctcacttgctcctagttccattattccacagttcctcccaccagttacttcaatggccttcgaacacccagctgtgcaagcctataggctacaacaagcgattgcggcgagcgtcttacaacaaccaattgcccaattgcaacaacaat

SEQ ID NO: 25744 - DNA, 263 bp, Zea mays
agatctgatgaagtcaatttccttgctggtgtataagcatgaggaaagcgcgatcgaagagcgtgctagggattacaatgcaaactggatgactgcagttgagatgcttgatgatgaagtctatgttggggcggagaatggctataacttattcaccgtgcgcaagaacagtgatgctgccacagatgacgaaagggccaagcttgaggtcgttggggagtaccatctcggagagtttgtgaacagattccgccatggttcac

SEQ ID NO: 25745 - DNA, 263 bp, Zea mays
ctgatctccgcgaggttgtcaggattcaatatgtcgaccagcacattcgctacttcctgcacgctgttgggcaatgttagaacaacgcaggcctcccagacagcggtgaagagcccttcgtctctaagcttcttcagccaagttacgaaggttccaagcctgaagacctccaagaaactggatgtctccgccatggctgtatacaaggtgaagcttgtcgggcctgaaggtgaagagcacgagtttgatgctccagacgacgc

SEQ ID NO: 25746 - DNA, 267 bp, Zea mays
ccagcaatttcttccattcaaccaactgacagcattgaactctcctgcttatttacagcagcaacaactactaccattcagccagctagctggtgtgagccctgctaccttcttgacacaaccacagttgttgccgttctaccagcacgctgcgcctaacgctggcaccctcttacaactgcaacaattgctgccattcaaccaacttgctttgacaaacccagcagcattctaccaacaacccatcattggtggtgccctctttta

SEQ ID NO: 25747 - DNA, 269 bp, Zea mays
cacaatgctcacaagctcctatagcttcccttcttcccccgtacctctcaccaacggtgtcttcggtatgtgaaaacccaattcttcaaccctacaggatccaacaggcaatcgcagctggcatcttacctttatcacccttgttcctccaacaatcatcagccctattacagcagttacctttggtgcatttattggcacaaaacatcagggcacaacaactacaacaacttgtgctagcaaaccttgctgcctactctcagcaacag

SEQ ID NO: 25748 - DNA, 269 bp, Zea mays
agcaacatagaaagtggaatacagtagcaacaatagagcaacaatggcggccaagatattttccatccttatgctccttgctctttctgcatgtgttgctaacgcgaccatttttcctcaatactcacaagctcctatagctgcccttcttcccccataccttccatcaatgaccgcttcagtttgtgaaaacccagcccttcaaccctacaggctccaacaagcaatcgcaacaagcaacttacctttatcacccctgttctttcaac

SEQ ID NO: 25749 - DNA, 274 bp, Zea mays
aaaaatcacaacagcaacaatgtcattgccaggagcagcaacagactacaaggtgcagctataactactatagcagtagctcaaatctaaaaaattgtcatgaattcctaaggcagcagtgcagccctttggtaatgccttttctccaatcacgtttgatacaaccaagtagctgccaggtattgcagcaacaatgttgtcatgatcttaggcagattgagccacaatacattcaccaagcaatctacaacatggttcaatccataatccagga

SEQ ID NO: 25750 - DNA, 276 bp, Zea mays
caacaactacaacaacttgtgctagcaaaccttgctgcctactctcagcaacagcagtttcttccattcaaccaactagctgcattgaactctgcttcttatttgcaacaacaacaactaccattcagccagctacctgttgcctacccccagcaatttcttccattcaaccaactggcagcattgaactctcctgcttatttacagcagcaacaactactaccattcagccagctagctggtgtgagccctgctaccttcttgacacaaccacag

SEQ ID NO: 25751 - DNA, 256 bp, Zea mays
cgacgttgctgctcgatcccaaggcgctccgtgacaccatcgacatctttgtcgagcgagtacgatgacctagggatcaccgtggttgctggtgttgcagctagagggttcatttttggtcctcgtatcgctttagcgattggcgcaaaatttgtgcctttgacgaagccgtagaagttgacaggcgatgtgatctccgaagagtattctctggaatattgaactgacaagatagaaatgcatgtcggatctgtac

SEQ ID NO: 25752 - DNA, 249 bp, Zea mays
attttgagcattcagcaacacgcatagcggaccgactagcaacgacctagcaacaatggattccaacacattatccctccttgcgcttcttgtcctttttgtgagtgcaaccaatgcgttcattattccacaatgctcacttgctccgagtgccattattccacagttcctccctccagttacttcaatgggcttcgaacacacagctgtgaaagcctataggctacaacaagcgcttgcggcgagcgt

SEQ ID NO: 25753 - DNA, 259 bp, Zea mays
tggcaataccccactcaaccaccgcagctaagcccgtgccagcagttcggatcctgcggcgtcggcagcgtcggcagcccgttcctgggccagtgcgtcgagttcctgaggcaccagtgcagcccggcggcgacgccctacggctcgccacagtgccaggcgctgcagcagcagtgctgccaccagatcaggcaggtggagccgctgcaccggtaccaggcgacatacggtgtggtcctgcagtccttcctgcagcagc

SEQ ID NO: 25754 - DNA, 257 bp, Zea mays
accatacgaactcattaccaacaacctaacaacaatggctaccaagatattatccctccttgcgcttcttgcgctttttgcgagcgcaacaaatgcgttcattattccacaatgctcacttgctccaagttccattattacacagttcctcccaccagttacttcaatgggcttcgaacacccagctgtgcaagcctataggctacaacaagcaattgcggcgagcgtcttaccacaaccaatttcccagttgcaac

SEQ ID NO: 25755 - DNA, 262 bp, Zea mays
cagagcgaggcgacgccgaggcacctcatctccggcgaagggaaatggcgaccgttccaggggatctgatctggcagattgtgaggaagaacaactccttcctggtgaagcagtttggcaacggcaatgccaaggtgcagttcaccaaggagcccaacaacctctacaatttacactcctacaagtactctggcttagcaaacaagaaaactgtaacgatccagccagctgctggaaaggactcggctgtggtcctctctac

SEQ ID NO: 25756 - DNA, 265 bp, Zea mays
attacaacagttacctttggtgcatttattggcacaaaacatcagggcacaacaactacaacaacttgtgctagcaaaccttgctgcctactctcagcaacagcagtttcttccattcaaccaactaggttcattgaactctgcttcttatttgcaacaacaacaactaccattcagccagctacctgctgcctacccccagcaatttcttccattcaaccaactagcagcattgaactctcctgcttatttacagcagcaacaa

SEQ ID NO: 25757 - DNA, 265 bp, Zea mays
agatcagcaaagcggcagtgcgtagagaggatcgtcgaacagaacagcatgaagatggtcatcgttctcgtcgtgtgcctggctctgtcagctgccagcgcctctgcaatgcagatgccctgcccctgcgcggggctgcagggcttgtacggcgctggcgccggcctgacgacgatgatgggcgccggcgggctgtacccctacgcggagtacctgaggcagccgcagtgcagcccgctggcggcggcgccctactacgccgggt

SEQ ID NO: 25758 - DNA, 270 bp, Zea mays
gtgagccctgctaccttcttgacacaaccacagttgttgccgttctaccagcacgttgcgcctaacgctggcaccctcttacaactgcaacaattgctgccattcaaccaacttgctttgacaaacccagcagtgttctaccaacaacccatcattggtggtgccctcttttagatttcttatgagttatagttcaataataaagttttttatctgatgtttgtggcttcccagaaataagaaagtacatttctaaaaattaattaatta

SEQ ID NO: 25759 - DNA, 272 bp, Zea mays
cagcaacaacaacagctgcaacagtttatgccagtgctcagtcaactagccatggtgaaccctgccgtctacctacaactactttcatctagcccgctcgcggtgggcaatgcacctacgtacctacaacaacagttgctgcaacaaattgtaccagctctgactcagctagctgtggcaaaccctgctgcctacttacaacagttgcttccattcaaccaactggctgtgtcaaactctgctgcgtacctacaacagcgacaacagttact

SEQ ID NO: 25760 - DNA, 254 bp, Zea mays
gtgaagagcacgagtttgatgctccagacgacgcctacatccttgacgcagccgagactgccggtgtggagttgccatactcgtgccgtgctggggcttgctccacctgtgccggcaaaatcgagtctggttcggttgaccagtcggatgggtccttccttgatgacgggcagcaggaggaaggttatgtgctgacatgcgtctcctacccaaagtccgactgcgtcatccacacccacaaggaaggcgacctg

SEQ ID NO: 25761 - DNA, 252 bp, Zea mays
gcttccgacaatgtgaataaaattttggtaggcaacaaagctgacatggatgaaagcaaacgggctgtgccaacttcaagagggcaggctcttgctgatgagtatggcatcaaattttttgaaacgagtgcgaagacgaacctgaatgtggagcaggttttcttctccatagcaagagatatcaagcaaaggcttgctgaatctgattcaaagccagaggatcgcacgatcagtatcaacagacctgagggt

SEQ ID NO: 25762 - DNA, 246 bp, Zea mays
attgagaccaactagcaacatagaaagcacaatagtgtaccaacaatggcagccaaaatattttgcctccttatgctccttggtctttctgcaagtgctgctacggcgaccattttcccgcaatgctcgcaagctcctatagcttcccttcttcccccgtacctctcaccagcggtgtcttcggtatgtgaaaacccaattcttcaaccctacaggatccaacaggcaatcgcagctggcatctta

SEQ ID NO: 25763 - DNA, 251 bp, Zea mays
atgcaacaacacgaacagagccatgagcaacaccaaggacagagccatgagcaacaacatcaacaacaattccagggtcatgacaagcagcaacaaccacaacagcctcagcaatatcagcagggccaggaaaaatcacaacagcaacaatgtcattgccaggagcagcaacagactacaaggtgcagctataactactatagcagtagctcaaatctaaaaaattgtcatgaattcctaaggcagcagtg

SEQ ID NO: 25764 - DNA, 250 bp, Zea mays
gagaccaactagcaacatagaaagcacaatagtgtaccaacaatggcagccaaaatattttgcctccttatgctccttggtctttctgcaagtgctgctacggcgaccattttcccgcaatgctcgcaagctcctatagcttcccttcttcccccgtacctctcaccagcggtgtcttcggtatgtgaaaacccaattcttcaaccctacaggatccaacaggcaatcgcagctggcatcttacctttat

SEQ ID NO: 25765 - DNA, 228 bp, Zea mays
cagttacttaatccactagcggtggctaacccattggtcgctgccttcctacagcagcaacaattgctgccatacaaccagttctctttgatgaaccctgccttgtcgtggcagcaacccatcgttggtggtgccatcttttagattacatatgagatgtactcgataatggtgccctcatagcggcatgtgtttcctaaaaataatcaatatattgattgagattac

SEQ ID NO: 25766 - DNA, 252 bp, Zea mays
attttgagcattcagaaacacacctagcgaagcgcactagcaacgacctaacaacaatggcttccaagacattatccctccttgcgcttcttgccctttttgtgagtgcaacaaatgcgttcattattccacaatgctcacttgctccgagtgccattattccacagttcctccctccagttacttcaatgggcttcgaacacccagctgtgcaagcctataggctacaacaagcgcttgcggcgagcgtct

SEQ ID NO: 25767 - DNA, 252 bp, Zea mays
gttgtgcttccagtgagatcaaagaatgctcgtggccagcaaggctcatatccaattaagctgttctacacttcaaacatgcccatcattcttcactctgcgctgattaccaacctctattttatatcccagcttctctacaggaagtacagtggaaacttccttgttaaccttcttgggaagtggaaggagtctgaatactctggccattctattcctgttggtggtcttgcttactatgtaactgcccca

SEQ ID NO: 25768 - DNA, 255 bp, Zea mays
acctccttggacagatgcaaacaaggttcgagtccatgtcgcagaacattgtgtcaaagatagatgaaatgggaaccaagattgatgagctcgagcagagcatcaacgatctcaaagctgagatgggcactgagacgccggtcaagaagcctgatgagccaaagcctgctgactctgcctaacttgggtgtaacccagagattgttgtgtgaagatttgatgatggtgtgacaaatttcagcagtacgtgatcgt

SEQ ID NO: 25769 - DNA, 257 bp, Zea mays
gtgctgctacggcgaccattttcccgcaatgctcgcaagctcctatagcttcccttcttcccccgtacctctcaccagcggtgtcttcggtatgtgaaaacccaattcttcaaccctacaggatccaacaggcaatcacagctggcatcttacctttatcacccttgttcctccaacaatcatcagccctattacatcagttacctttggtgcatttattggcacaaaacttgcaggcacaacaactactacaattt

SEQ ID NO: 25770 - DNA, 258 bp, Zea mays
gcagtacacacccatcaccgaggcagctgcccatgatatcatgctgttcactgtctccaaatgcaccggccatgccggcaccaggctggggtgggcattggtgaaggatactaaggtggctcagaagatgatcaagtttatagagctcaacacaattggtgtatccaaggactctcaacttcgtgccgctaagattatcggggcaatatgtaatggctatgagccggtaccatcctctggtaaaacaagccaactctt

SEQ ID NO: 25771 - DNA, 261 bp, Zea mays
acaacaacagctacaacagtttctgccaacgctcagtcaactagccatggtgaaccctgccgcctacgtacaacaacaacaactgctttcatctagcccgctcgctgtgggcaatgcacctacatacctgcaacaacaattgttgcaacagattgtaccagctctgactcaactagctgtggcaaaccctgttgcctacttgcaacagctgcttccattcaaccaactgactctgtcgaactctgctgcgtacctacaaca

SEQ ID NO: 25772 - DNA, 243 bp, Zea mays
gagcattcagaaacacaccaagcgaacgcactagcaacaacctaacaacaatggctaccaagatattatccctccttgcgcttcttgcgctttttgcgagcgcaacaaatgcgtccattattccacaatgctcacttgctcctagttccattattccacagttcctcccaccagttacttcaatggccttcgaacacccagctgtgcaagcctataggctacaacaagcgattgcggcgagcg

SEQ ID NO: 25773 - DNA, 241 bp, Zea mays
agtgcgatttcgatctcgcagccaccttttttttgttctgttgtgtatctagtagttggaggagatatgcagtttgcacttgcattggacacgaactcaggtcctcaccagataagatcttgtgagggtgatgggattgacaggttggaaaaattaagtattgggggcagaaagcaggagaaagctttgagaaataggtgctttggtggtagagttgctgcaactacacaatgtattctta

SEQ ID NO: 25774 - DNA, 137 bp, Zea mays
agcttgtagtagctcatatgtctgaataataagcacagcaagaagatgaatgcatttctcggatcgttcatccggaacaataattaaaggggatccggatttgttcttgtgatataattaacgattcctgttatact

SEQ ID NO: 25775 - DNA, 238 bp, Zea mays
ataacaacaatggctaccaagatattatccctccttgcgcttcttgcgctttttgcgagcgcaacaaatgcgttcattattccacaatgctcacttgctccaagttccattattacacagttcctcccaccagttacttcaatgggcttcgaacacccagctgtgcaagcctataggctacaacaagcaattgcggcgagcgtcttacaacaaccaatttcccagttgcaacaacaat

SEQ ID NO: 25776 - DNA, 234 bp, Zea mays
caaagcggcagtgcgtagagaggatcgtcgaacagaacagcatgaagatggtcatcgttctcgtcgtgtgcctggctctgtcagctgccagcgcctctgcaatgcagatgccctgcccctgcgcggggctgcagggcttgtacggcgctggcgccgcctgacgacgatgatgggcgccggcgggctgtacccctacgcggagtacctgaagcagccgcagtgcagcccgctggc

SEQ ID NO: 25777 - DNA, 240 bp, Zea mays
agcgacgccctactgctcgcctcagtgccagtcgttgcggcacagtgttgccagcagctcaggcaggtggagccgcagcaccggtaccaggcgatcttcggcttggtcctccagtccatcctgcagcagcagccgcaaagcggccaggtcgcggggctgttggcggcgcagatagcgcacaactgacggcgatgtgcggcctgcagcagccgactccatgcccctacgctgctgccggcg

SEQ ID NO: 25778 - DNA, 242 bp, Zea mays
actgaaccctgctgcttatttgcagcaacaactataaccattcagccagctagctactgcctactctcagcaacaacaacttcttccatttaaccaattggccgcactgaaccccgctgcttatttgcagcagcaaatactactaccatttagccagctagctgcagcaaaccgtgcttccttcttgacacagcaacagttgctgcctttctaccagcagtttgcggctaaccccgcaaccc

SEQ ID NO: 25779 - DNA, 243 bp, Zea mays
actcctaggcaacagcagtttcttccattcaaccaactagctgcattgaactctgcttcttatttgcaacaacaacaactaccattcagccagctacctgctgcctacccccagcaatttcttccattcaaccaactggcagcattgaactctcctgcttatttacagcagcaacaactactaccattcagccagctagctggtgtgagccctgctaccttcttgatacaaccacagttgttg

SEQ ID NO: 25780 - DNA, 245 bp, Zea mays
actcagccctattacagcagttacctttggtgcatttattggcacaaaacatcagggcacaacaactacaacaacttgtgctagcaaaccttgctgcctactctcagcaacaacagtttcttccattcaaccaactagctgcattgaactctgcttcttatttgcaacaacaacaactaccattcagccagctatctgctgcctacccccagcaatttcttccattcaaccaactgacagctttg

SEQ ID NO: 25781 - DNA, 247 bp, Zea mays
acaactacaacaacttgtgctagcaaaccttgctgcctactctcagcaacagcagtttcttccattcaaccaactagctgcattgaactctgcttcttatttgcaacaacaacaactaccattcagccagctacctgctgcctacccccagcaatttcttccattcaaccaactggcagcattgaactctcctgcttatttacagcagcaacaactactaccattcagccagctagctggtgtgagc

SEQ ID NO: 25782 - DNA, 249 bp, Zea mays
agaccagcgaggcgagatcgtccgcgtggagccggagcacggctttcaccagctgaatccgtcgccgtcgtcgtcgtcgttttcgttcccatcgtcacaaggccagtaccaaacgtgccagcgcgacgtcgacaggcacaacgtctgcgccatggaggtgaggcacagcgtcgaacggctggaccaggccgacgcctacagccctgggagtgggaggatcacacgcctcaccagccacaagttccccgt

SEQ ID NO: 25783 - DNA, 252 bp, Zea mays
aatttcttccattcaaccaactgtctacactgaaccctgctgcttatttgcagcaacaactattaccatttagccagctagctactgcctactctcaacaacaacaacttcttccatttaaccaattggccgcactgaaccccgctgcttatttgcagcagcaaatactactaccatttagccagctagctacagcaagccgtgcttccttcttgacacaacaacagttgctgccgttctaccagcagtttg

SEQ ID NO: 25784 - DNA, 245 bp, Zea mays
gtcctgcagtccttcctgcagcagcagccgcaggcgagctcgcggcgctgatggcggcccaggtagcgcacagctgacggcgatgtgcggcctgcagctgcagcagccaggtccctgcccttgcaacgcagctgccggcggtgtctactactgaggaaactatgtactgtagtaataatgtaatggagccgctgactagctacctagctcgctagtttactcatttagcggcgatgagtaacgta

SEQ ID NO: 25785 - DNA, 200 bp, Zea mays
atatagcttcagtatgtgaaaacccagctcttcaaccatataggcttcaacaagcaatcgcagcaagcaacatacctttatcgcccttgttgtgtcaacaatcgccagccctatctttggtgcagtcattggtacaaaccatcagggcacaacagctgcagcaactcgtgctacctgtgatcaaccaagtagctctggca

SEQ ID NO: 25786 - DNA, 244 bp, Zea mays
agccaccgccttcaccaacgccgacctcggcgccaagcaaggtggacatgagcctggttggcgtgaggttccagtagaggatcctgtggtcaaagatgctgcacaccatgctgtgaaatcgatccaagagaggtccaactccctgtttccctacgaacttctcgagatccttcgtgcccatgcacaggttgtggaagactttgcaaaatttgacattctgatgaaactgaagagaggcagcaag

SEQ ID NO: 25787 - DNA, 239 bp, Zea mays
attcagaaacacaccaagcgaagctactagcaacgacctaacaacaatggctaccaagatattagccctccttgcgcttcttgccctttttgtgagcgcaacaaatgcgttcattattccacaatgctcacttgctcctagtgccattattccacagttcctcccaccagttacttcaatgggcttcgaacacctagctgtgcaagccaacatgcaacaacaagcgcttgcggcgagcg

SEQ ID NO: 25788 - DNA, 238 bp, Zea mays
cgtggctgccagacaccaccgtttcatctaccgcctccgttctatatgccgcctccgttctatctgccgccgcagcagcagccgcagccatggcaataccccactcaaccaccgcagctaagcccgtgccagcagttcggatcctgcggcgtcggcagcgtcggcagcccgttcctgggccagtgcgtcgagttcctgaggcaccagtgcagcccggcggcgacgccctacggctcgc

SEQ ID NO: 25789 - DNA, 238 bp, Zea mays
taagatattagccctccttgcgcttcttgccctttttgtgagcgcaacaaatgcgttcattattccacaatgctcacttgctcctagtgccattattccacagttcctcccaccagttacttcaatgggcttcgaacacctagctgtgcaagccaacatgcaacaacaagcgcttgcagcgagcgtcttacaacaaccaattgcccaattgcaacaacaatccttgccacatctaaca

SEQ ID NO: 25790 - DNA, 170 bp, Zea mays
ctcttacaactgcaacaattgctgccattcaaccaacttgctttgacaaacccaacagtgttctaccaacaacccatcattggtggtgccctcttttagattgcttatgagttatagttcaataatgaagttttttggatgatgtttgtggcgtcccagaaataagaaag

SEQ ID NO: 25791 - DNA, 238 bp, Zea mays
agtcacaagaccagagagagatcagccttgatggatttagaaatcgtcggttcaatgttcttgtggctactgatgttgcagggcgtggtattgatattcctgatgttgcacacgtgattaactatgagatgcctagttcagttgacacatacacacatcgcattggaagaacaggtcgtgctggaaagaagggggtggcaacttcatttttaactttagagaacactgatattttctt

SEQ ID NO: 25792 - DNA, 241 bp, Zea mays
acgatggagtcgcagccatccgccacatgatcgaggatgactgcgccgacaacggcatccctcttcctaacgtcaactccaagatcctatccaaggtaatcgagtactgcaacaagcacgtacatgccgccgcagccgcagccgccgcctcgaaggccggttccgacgacgtgggtgccgcctccgccaacagcaccgccgcctccggtgaggacctcaagaactgggatgcggacttcgt

SEQ ID NO: 25793 - DNA, 75 bp, Zea mays
catcgaataatgagttgacatgccatcgcgtgtgactcattattaacaataaaacaagtttcctcttattatcag

SEQ ID NO: 25794 - DNA, 249 bp, Zea mays
aggcgctgtatggagtcatgtggctccagccaattctcggcttcttcagaccagaaagacgcgtcaaggtgaggagcctatggtacttcttccactggctcctcgggatcgcgatctgcgccacggggatcgtcaacgtctacatcggcctccgcacctaccacgagaggaccgccaagagcgtgaggctctggacggcgctcctcaccgtcgaggtcgccttcctcgccttcttttacctcatggtag

SEQ ID NO: 25795 - DNA, 231 bp, Zea mays
aggttaggagccggattgacaggagtggtgaaggtgtctatgtacaggcatctacccttgggtctttggaagctctcactgagttcttgaagagccctgctgtgaatattcccttctgtgatttcagtatagggccagtgcataagaaggatgttatgaaggctagtgtcatgcttgagagaaagaaagaatatgcaactatcttggcctttgatgtcaaagtgatgcctg

SEQ ID NO: 25796 - DNA, 231 bp, Zea mays
aagcaacatacatagtgaagtacactagcaacatcttagcaccaatgggagccaagatttttgccctccttgccctccttgctctttcagcaagcgctgctacctcgacttttattccacaatgctcacaacaatacctctctccggtgacagccgcgggatttcaatacccaactatacaatcctacatggtacaagaggccatccaagcaagcatcttacggtcattag

SEQ ID NO: 25797 - DNA, 163 bp, Zea mays
agaaactatgtactgtagtaataatgtaatggagccgctgactagctacctagctcgctagtttactcatttagcggcgatgagtaacgtaggtacacccatcaccatgggtggcagtgtgagcaatgacctgaatgaaccattgaaatggaaaggaataata

SEQ ID NO: 25798 - DNA, 225 bp, Zea mays
ataaagtttgcgtccttagctgtggtatttctaccggtcttggtgcatcaattaatgttgcaaaacctccgaacggttcgacagtggctgttttcggtttaggagccgttggtcttgccgctgcagaaggtgcaaggattgctggagcgtcaaggatcattggtgtcgacctgaaccccagcagattcgaagaagctaggaagttcggttgcactgaatttgtga

SEQ ID NO: 25799 - DNA, 228 bp, Zea mays
atgaagatggtcatcgttctcgtcgtgtgcctggctctgtcagctgccagcgcctctgcaatgcagatgccctgcccctgcgcggggctgcagggcttgtacggcgctggcgcggcctgacgacgatgatgggcgccggcgggctgtacccctacgcggagtacctgatgcagccgcagtgcagcccgctggcggcggcgccctactacgccgggtgtgggcagccga

SEQ ID NO: 25800 - DNA, 231 bp, Zea mays
aaaggtgctgatcgttgcccttgctctcctggcgctcgctgcgaggccgcctccagtacaagccgcggctgtggctgccagacaccaccgtttcatctaccgcctccgttctatatgactgcctccgttctatctgccgccgcagcagcagccgcagccatggcaataccccactcaaccaccgcagctaagcccgtgccagcagttcggatcctgcggcgtcggcagcgt

SEQ ID NO: 25801 - DNA, 197 bp, Zea mays
atcagggcacaacagctgcacgcaactcgtgctacctctgatcaaccaagtacctctggcaaacctttctccctactctcagcaacaacaattccttccactcaaccaactcgtcacactgaaccctgctgcttacttgcagcaacaactactaccatttacccagctagctactgcctactctcagcaacaacaac

SEQ ID NO: 25802 - DNA, 79 bp, Zea mays
cagattgcttattagttgtaattcaataataaagttttttggatgatgtatgtggccaaccagaaataagaagttacat

SEQ ID NO: 25803 - DNA, 241 bp, Zea mays
agcagcagtgctgcaccagatcaggcaggtggagccgctgcaccggtaccaggcgacatacggtgtggtcctgcagtccttcctgcagcagcagccgctaggcgagctcgcggcgctgatggcggcccaggtagcgcacagctgacggcgatgtgcggcctgcagctgcagcagccaggtccctgcccttgcaacgcagctgccggcggtgtctactactgaggaaactatgtactgtagt

SEQ ID NO: 25804 - DNA, 197 bp, Zea mays
gatcagcaaagcggcagtgcgtagagaggatcgtcgaacagaacagcatgaagatggtcatcgttctcgtcgtgtgcctggctctgtcagctgccagcgcctctgcaatgcagatgccctgcccctgcgcggggctgcagggcttgtacggcgctggcgccggcctgacgacgatgatgggcgccggcgggctgtac

SEQ ID NO: 25805 - DNA, 258 bp, Zea mays
aaaagcacaatagtgtaccaacaatggcagccaaaatattttgcctccttatgctccttggtatttctgcaagtgctgctacggcgaccattttcccgcaatgctcacaagctcctatagcttcccttcttcccccgtacctctcaccagcggtgtcttcggtatgtgaaaacccaattcttcaaccctacaggatccaacaggcaatcgcagctggcatcttacctttatcacccttgttcctccaacaatcatcag

SEQ ID NO: 25806 - DNA, 256 bp, Zea mays
aacctacaggctacaacaagcgcttgcagcgagcgtcttacaacaaccaattgcccaattacaacaacaatccttggcacatctaaccatacaaaccatcgcaacgcaacagcaacaacaatttctaccagcactgagccaactagctgtggtgaaccctgtcgcctacttgcaacagcagttgcttgcatccaacccacttgctctggcaaacatagttgcataccaacaacaacaacaattgcaacagtttcta

SEQ ID NO: 25807 - DNA, 251 bp, Zea mays
gcagtttcttccattcaaccaactggctgcattgaactctgctgcttatttgcaacaacaactaccattcagtcagctagctgctgcctacccccagcaatttcttccattcaaccaactggcagcattgaactctgctgcttatttacaacagcaacagctaccaccattcagccagctagctgatgtgagccctgttgccttcttgacacaacaacagttgttgccgttctacctgcacgctgcgccta

SEQ ID NO: 25808 - DNA, 245 bp, Zea mays
agcaattagctcatcgactccagattggagaactcgacaccatgaaggtgctgatcgttgcccttgctctcctggcgctcgctgcgaggccgcctccagtacaagcggcggctgtggctgccagacaccaccgtttcatctaccgcctccgttctatatgccgcctccgttctatctgccgccgcagcagcagccgcagccatggcaaattcccactcaaccaccgcagctaagcccgtgccagc

SEQ ID NO: 25809 - DNA, 241 bp, Zea mays
ctcagcaacagcaatttcttccattcaaccaactagcagcattgaactctcctgcttatttacagcagcaacaactactaccattcagccagctagctggtgtgagccctgctaccttcttgacacaaccacagttgttgccgttctaccagcacgttgcgcctaacgctggcaccctcttacaactgcaacaattgctgccattcaaccaacttgctttgacaaacccagcagtgttcta

SEQ ID NO: 25810 - DNA, 240 bp, Zea mays
ccatcgagaaggacgtatacgacaacgtcgcgcacgcgttcgtgaagatcctacgcgacgagggcccgtcggagctgtaccgtgggctgacacccagcctgatcggcgtggtgccgtacgcggcctgtaacttctacgcctacgagacgctgaagcggctctaccgtcgcgcgaccgggcggcgtcccggcgcggacgtgggccccgtggcgacgctgctcatcgggtccgcggcgggcg

SEQ ID NO: 25811 - DNA, 241 bp, Zea mays
aagcggcagtgcgtagagaggatcgtcgaacagaacagcatgaagatggtcatcgttctcgtcgtgtgcctggctctgtcagctgccagcgcctctgcaatgcagatgccctgcccctgcgcggggctgcagggcttgtacggcgctggcgccggcctgacgacgatgatgggcgccggcgggctgtacccctacgcggagtacctgaagcagccgcagtgcagcccgctggcggcggcgc

SEQ ID NO: 25812 - DNA, 243 bp, Zea mays
tctaacaatacaaaccatcgcaacgcaacagcaacaacaattcctaccagcactgagccacctagccatggtgaaccctgccgcctacttgcaacagcagttgcttgcatcaaacccacttgctctggcaaacgtagttgcaaaccagccacaacaacagctgcaacagtttctgccagcgctcagtcaactagccatggtgaaccctgccgcctacctacaacagcaacaactgctttcatc

SEQ ID NO: 25813 - DNA, 243 bp, Zea mays
accggtgcagatcttcgtgtccaaccatttgattccagacgatatggagttccaatcaggagatgtgccgaactacacaacttctgatggatcggtgaaaattcaaaaagagagtgaggtgcggctgaagattattggtactcgtgtcgatgctacagaaattttttgcattggcacaataaaggatgattttctgggtgttatcagcgatcctggtgcggcagtgtaaatggtctaagaagc

SEQ ID NO: 25814 - DNA, 245 bp, Zea mays
agcagtcattggtacaaaccatcagggcagaacagttgcagcaactcgtgctaccagtgatcagccaagtagctctggcaaacctttcccactactctcagcaacaacaatttcttccattcaaccaactgtctatactgaaccctgctgcttatttgcagcaacaacaactactaccattcagccagctagctactgcctactctcagcagcaacaatttcttccatttaaccaattggccgca

SEQ ID NO: 25815 - DNA, 247 bp, Zea mays
gaccaagatactttccctccttatgctccttgctctttctgcatgtgttgctaacgcgacaattttccctcaatgctcacaagctcctatagcttcccttcttcccccataccttccatcaatgatagcttcagtatgtgaaaacccagctcttcaaccctataggctccaacaagcaatcgcagcaagcaacatacctttatcacccttgtttcaacaatcgccagccctatctttggtgcagtca

SEQ ID NO: 25816 - DNA, 143 bp, Zea mays
  unsure (1)..(143): unsure at all n locations
aagctacctagctcgctagtttactcatttagcggcgatgagtaacgtagtgncacccatcaccatgggtggcagtgtgagcaatgacctgaatgaaccattgaaatggaaaggaataatatataaggaaaaaagatgattgg

SEQ ID NO: 25817 - DNA, 252 bp, Zea mays
aaacaatccttgccacatctaacaatacaagccatcacaacgcaacagcaacaacagttcctaccagcactgagccacctagccatggtgaaccctgccgcctacttgcaagagcagctgcttgcatccaacccacttgctctggcgaacgtagttgcaaaccagcaacaacaacagctacaacagtttctgccaacgctcagtcaactagccatggtgaaccctgccgcctacgtacaacaacaacaactg

SEQ ID NO: 25818 - DNA, 247 bp, Zea mays
aactgctatggacacagataaagttaagatatatggagcacaggtccgggtggattcaatgtctaaggttgcagacattgaagctgctgagaagcagaaaatgagagagaaagtccaaaagatcatagctcacggaatcaactgtttcatcaacaggcagttaatctataacttccctgaggaactctatgctgacgctggcatacttgcaattgagcatgctgactttgagggcattgaacgtctg

SEQ ID NO: 25819 - DNA, 243 bp, Zea mays
attcagcattcaaaaacacaccaagcgaacgcactagcaacgacctaacaccaatggctaccaagatattagccctccttgcgcttcttgcccttttagtgagcgcaacaaatgcgttcattattccacagtgctcacttgctcctagtgccagtattccacagttcctcccaccagttacttcaatgggcttcgaacatccagccgtgcaagcctacaggctacaactagcgcttgctgcga

SEQ ID NO: 25820 - DNA, 242 bp, Zea mays
acaagctgtggcaaacattgttgctttcttgagacaacaacatttgttgccattttacccacaagttgtgggaaacattaatgccttcttgcaacagcaacaattgctaccattctacccacagaatgtggcaaacattgttgccttcttacaacaacaacaattgctaccatttagccaacatgctttgacgaatcctaccaccttattgcaaccgcccaccattggtggtgccatcttct

SEQ ID NO: 25821 - DNA, 238 bp, Zea mays
tgagcattcagaaacacacctagcgaacgcactagcaacgacctaacaacaatggctaccaagatattatccctctttgcgcttcttgccctttttgtgagcgcaacaaatgcgttcattattccacaatgctcacttgctcctagtgccattattccacagttcctccctccagttacttcaatgggcttcgaacacccagctgtgcaagcctacaggctacaacaagcgcttgcgg

SEQ ID NO: 25822 - DNA, 238 bp, Zea mays
cagcaacaacaacaactgcaacagtttctgccagcgcttagtcaactagccatggtgaaccctgccgcctacctacaacagcaacaactgctttcatctagcccgctcgctgtggccaatgcacctacatacctgcaacaagaattgttgcaacagattgtaccagctctaactcagctagctgtggcaaaccctgttgcctacttgcaacagctgcttccattcaaccaactaacta

SEQ ID NO: 25823 - DNA, 236 bp, Zea mays
aaccaacaagcaacatagaaagtggaatccagtagcaacaacagagcaacaatggcgaccaagatattttccctccttatgctccttgctctttctgcatgtgttgctaacgcgacaattttccctcaatgctcacaagctcctatagcttcccttcttcccccataccttccatcaatgatagcttcagtatgtgaaaacccagctcttcagccctataggctccaacaagcaat

SEQ ID NO: 25824 - DNA, 236 bp, Zea mays
cgacctaacaccaatggctaccaagatattagccctccttgcgcttcttgcccttttagtgagcgcaacaaatgcgttcattattccacagtgctcacttgctcctagtgccattattccacagttcctcccaccagttacttcaatgggcttcgaacatccagccgtgcaagcctacaggctacaactagcgcttgcggcgagcgccttacaacaaccaattgcccaattgcaac

SEQ ID NO: 25825 - DNA, 236 bp, Zea mays
agcttgctgcgattgcttgttggagcctatagggctgaagagctgggttttcacatactgaagctatcattgatggaaggtatgatggaagaagggaagctataggagcttgtgagcaacatacctttatcacccttgttgtttcaacaatcgccagccctatctttggtgcagtcattggtacaaaccatcagggcacagcagctgcagcaactcgtgctacctgtgatcaacca

SEQ ID NO: 25826 - DNA, 238 bp, Zea mays
atcaactagccatggtgaaccctgccgcctacgtacaacaacaacaactgctttcatctagcccgctcgctgtgggcaatgcacctacatacctgcaacaacaattgttgcaacagattgtaccagctctgactcaactagctgtggcaaaccctgttgcctacttgcaacagctgcttccattcaaccaactgactctgtcgaactctgctgcgtacctacaacagcgacaacagtt

SEQ ID NO: 25827 - DNA, 141 bp, Zea mays
aggaggaatggcggacgcaacaagcacgggcgcggccacgtcaagtacatccgctgctccaactgcgccaagtgctgccccaaggataaggctatcaagcggttcttggtgaggaacattgttgagcaggctgccgtgaga

SEQ ID NO: 25828 - DNA, 206 bp, Zea mays
atgtctatgaattgtgttagttgtattaccagtgtgtagtgaacaaaaagggagccagcttatgaggtgttgagatttctgaccaagaggtcgatttgggatttatggtagtctttcaatgaacctcttctagttcggtacttcttgcccagggaattttacaataaatcatcaagcaaattgttctacgacgttctgcagaaaaa

SEQ ID NO: 25829 - DNA, 243 bp, Zea mays
caactacaacaacttgtgctagcaaaccttgctgcatactctcagcaacatcagtttcttccattcaaccaactggctgcattgaactctgctgcttatttgcaacaacaattaccattcagccagctagttgctgcctacccccagcaatttcttccattcaaccaactagcagcattgaactctgctgcttatttacagcagcaacaactactaccattcagccagctagctgatgtgagc

SEQ ID NO: 25830 - DNA, 244 bp, Zea mays
acaagctacaggttttagaagatagcattcccagcttccaaagggctggtacaattgtgccaagaaaggacagattcagacgcagttctactcagatggtgaatgatccatacactctggtgatagcactcaatagctcaggtgctggagaaggcgaactttatgtggatgacgggaaaagttatgattaccagcaaggggcattcattcatcgccgatttgtctttgcagacaataagctaac

SEQ ID NO: 25831 - DNA, 240 bp, Zea mays
caaagcggcagtgcgtagagaggatcgtcgaacagaacagcatgaagatggtcatcgttctcgtcgtgtgcctggctctgtcagctgccagcgcctctgcaatgcagatgccctgcccctgcgcggggctgcagggcttgtacggcgctggcgccggcctgacgacgatgatgggcgccggcgggctgtacccctacgcggagtacctgaagcagccgcagtgcagcccgctggcggcgg

SEQ ID NO: 25832 - DNA, 237 bp, Zea mays
aagaaacacaccaagcgaacacattagcaacaacctaacaacaatggctaccaagatattatccctccttgcgcttcttgcgctttttgcgagcgcaacaaatgcgttcattattccacaatgctcacttgctccaagttccattattacacagttcctcccaccagttacttcaatgggcttcgaacacccagctgtgcaagcctataggctacaacaagcaattgcggcgagcgt

SEQ ID NO: 25833 - DNA, 225 bp, Zea mays
cagttacttaatccactagcggtggctaacccattggtcgttgccttcctacagcagcaacaattgctgccatacaaccagttctctttgatgaaccctgccgcctacttgcaacagcagttgcttgcatcaaacccacttgctctggcaaacgtattgcaaaccagccacaacaacagctgcaacagtttctgccagcgctcagtcaactagccatggtgaacc

SEQ ID NO: 25834 - DNA, 227 bp, Zea mays
caatgatagcttcagtatgtgaaaacccagctcttcagccctataggctccaacaagcaatcgcagcaagcaacatacctttatcacccttgttgtttcaacaatcgccagccctatctttggtgcagtcattggtacaaaccatcagggcacagcagctgcagcaactcgtgctacctgtgatcaaccaagtagctctggcaaacctttctccctactctcagcaa

SEQ ID NO: 25835 - DNA, 226 bp, Zea mays
aaagtggtttcttgagaagattgggcatgaaggtttaaataatctgttaaaagcttatgaagataaatcagcgtttgctatgtgcatcttctctcttgctcttggacctggagaggaaccaatcacatttgttggcaaaactgcgggaaagatcgtgcctgctagaggccctaattattttgggtgggatcctgtgttccagccagatggttttgaacaaacatat

SEQ ID NO: 25836 - DNA, 227 bp, Zea mays
caaagcggcagtgcgtagagaggatcgtcgaacagaacagcatgaagatggtcatcgttctcgtcgtgtgcctggctctgtcagctgccagcgcctctgcaatgcagatgccctgcccctgcgcggggctgcagggcttgtacggcgctggcgccggcctgacgacgatgatgggcgccggcgggctgtacccctacgcggagtacctgaagcagccgcagtgcagc

SEQ ID NO: 25837 - DNA, 227 bp, Zea mays
attttgagcattcagaaacacacctagcgaacgcactagcaacgacctaacaacaatggctaccaagatattatccctctttgcgcttcttgccctttttgtgagcgcaacaaatgcgttcattattccacaatgctcacttgctcctagtgccattattccacagttcctccctccagttacttcaatgggcttcgaacacccagctgtgcaagcctacaggctac

SEQ ID NO: 25838 - DNA, 227 bp, Zea mays
agctgatatcactatatcatgtgctcctgttgatgagagccgagcttctaaaaatgggctagtgaagattgatcatactggacgtgtacttcaattctttgaaaaaccaaagggtgctgatttgaattctatgagagttgagaccaacttcctgagctatgctatagatgatgcacagaaatatccataccttgcatcaatgggcatttatgtcttcaagaaagatg

SEQ ID NO: 25839 - DNA, 230 bp, Zea mays
gcaacatagaaagcacaatagtgtaccaacaatggcagccaaaatattttgcctccttatgctccttggtatttctgcaagtgctgctacggcgaccattttcccgcaatgctcacaagctcctatagcttcccttcttcccccgtacctctcaccagcggtgtcttcggtatgtgaaaacccaattcttcaaccctacaggatccaacaggcaatcgcagctggcatct

SEQ ID NO: 25840 - DNA, 256 bp, Zea mays
attttatgatgctagctcgagaacccatcatacctcgcactgataaaccatttaagacaagcatagtcttttcactagaagaaggacctggacagctctttaaggcacttgctgtatttgcactgagggacatcaacctcacaaagattgaaagtcgtccacacaaggaaaggcctcttcgggtatctgatgactgttcctcactcttaaagaactttgattaccttttttatgttgaccttgaagcatcaatggc

SEQ ID NO: 25841 - DNA, 254 bp, Zea mays
ctactatactatactctaggaagcaaggacaccaccgccatggcagccaagatgcttgcattgttcgctctcctagctctttgtgcaagcgccactagtgcgacccatattccagggcacttgccaccagtcatgccattgggtaccatgaacccatgcatgcagtactgcatgatgcaacaggggcttgccagcttgatggcgtgtccgtccctgatgctgcagcaactgttggccttaccgcttcagacgat

SEQ ID NO: 25842 - DNA, 253 bp, Zea mays
tcctctggaggtggcggcgctcctcccgtcttcttcttcttcttcctgtattcgcagtcgaccgtgtcctcggagcacgatgaaggttgttgctgcctacctgcttgctgtcctcgctgggaatgccagcccctccgctgaggatttgactggcattctggagtcagttggctgtgaagttgacaatgaaaggatggaactgctgctgtcccaactgagcggtaaggacatcaccgagctcattgccgcgggc

SEQ ID NO: 25843 - DNA, 248 bp, Zea mays
gcagcagcagccgcaggcgagctcgcggcgctgatggcggcccaggtagcgcacagctgacggcgatgtgcggcctgcagctgcagcagccaggtccctgcccttgcaacgcagctgccggcggtgtctactactgaggaaactatgtactgtagtaataatgtaatggagccgctggctagctacctagctcgctagtttactcatttagcggcgatgagtaacgtagttgcacccatcaccatggg

SEQ ID NO: 25844 - DNA, 249 bp, Zea mays
aatttatatttggacttcactcttccgggctatcctgaatatgttctcaaggaaggtggagagaatgcagaggtcaacatttgtaacttagaagagtatatttctttggttgtggatgctactgttaagaccggcataatgcggcaagtagaggcatttaaggcaggattcaatcaggtgtttgacatatcatcactgcaaatattttctcctcaagaacttgattatctgatttgtggtcgctgtgaa

SEQ ID NO: 25845 - DNA, 248 bp, Zea mays
gctcaatcaattcactcaaacctcttccccaaatcttcgattagattctcgttgacaagaagactagaaccgaacctgaccatgtcgctgatccgccgcagcaacgtgttcgatcccttctccctcgacctctgggacccctttgagggcttccccttcggctccggcagcagcagcagtctcttcccctcgttcccgcggaccagctcggagaccgcggccttcgctggcgcgcggatcgactggaa

SEQ ID NO: 25846 - DNA, 248 bp, Zea mays
cggcaacgacgaggttagcatgacgctgaacatttcggccgacctttcgtctcttttcacgtggaacacaaaacaggtgtttgtttttgtggcagcagagtatgagactccacagaatgctttgaatcaagtttccctttgggatggcattatacctgcaaaggagcatgccaagtttttgatccataccacaaacaagtacagatttattgaccagggaagcaatctaaagggcaaggaattcaact

SEQ ID NO: 25847 - DNA, 247 bp, Zea mays
cgcatgaagggatggaaggtatgcacaggacagataaagtggacgaacatccttctgggatgaggcacaccgatgacatgcccagtcagagttctagaattccaatgtcagttgatgttggggctgtgtttggcacacgacctgcacctaggccaacattgaacagtgcggacaagtctcgtttaaaacggaaacttgatatggatccagagtttggatacgcggagtagaaggaacacatgtttac

SEQ ID NO: 25848 - DNA, 248 bp, Zea mays
agaccaacaagcaacatagaaagtggaatacagtagcaacaatagagcaacaatggcggccaagatattttccatccttatgctccttgctctttctgcatgtgttgctaacgcgaccatttttcctcaatactcacaagctcctatagctgcccttcttcccccataccttccatcaatgaccgcttcagtttgtgaaaacccagcccttcaaccctacaggctccaacaagcaatcgcaacaagca

SEQ ID NO: 25849 - DNA, 247 bp, Zea mays
tggacgtcagcctagcaattagctcatcgactccagattggagaactcgacaccatgaaggtgctgatcgttgcccttgctctcctggcgctcgctgcgagaccgcctccagtacaagcagcggctgtggctgccagacaccaccgtttcatctaccgcctccgttctatatgccgcctccgttctatctgccgccgcagcagcagccgcagccatggcaataccccactcaaccaccgcagctaag

SEQ ID NO: 25850 - DNA, 248 bp, Zea mays
ccaactgtctacactgaaccctgctgcttatttgcagcaacaactattaccattcagccagctagctactgcctactctcagcaacaacaacttcttccatttaaccaattggccgcactgaaccccgctgcttatttgcagcagcaaatactactaccatttagccagctagctgcagcaaaccgtgcttccttcttgacacagcaacagttgctgcctttctaccagcagtttgcggctaaccccg

SEQ ID NO: 25851 - DNA, 248 bp, Zea mays
cagccagcaactgtgaacctgctggagattgaggatgaagagaccgacggctcttctgctgcgtgttgccgcatttgccttgaggctgagtctgagataggtgatgagctaatatcaccttgcatgtgcaagggaactcagcagtttgttcaccgttcttgtcttgaccactggcgatctgttaaggaaggatttgcattttcacactgcacaacttgcaaagctcagtttcatcttcgagtggaaac

SEQ ID NO: 25852 - DNA, 245 bp, Zea mays
caatcgccagccctatctttggtgcagtcattggtacaaaccatcagggcacagcagctgcagcaactcgtgctacctgtgatcaaccaagtagctctggcaaacctttctccctactctcagcaacaacaatttcttccattcaaccaactgtctacattgaaccgtgctgcttatttgcagcaacaactattaccattcagccagctagctactgcctactctcagcaacaacaacttcttcc

SEQ ID NO: 25853 - DNA, 244 bp, Zea mays
gaacccgatcgacaccatgagggtgttgctcgttgccctcgctctcctggctctcgctgcgagcgccacctccacgcatacaagcagcggctgcggctgccagccaccgccgccggttcatctaccgccgccggtgcatctgccacctccggttcacctgccacctccggtgcatctcccaccgccggtccacctgccgccgccggtccacctgccaccgccggtccatgtgccgccgccggtt

SEQ ID NO: 25854 - DNA, 242 bp, Zea mays
caccaagcgaacacattagcaacaacctaacaacaatggctaccaagatattatccctccttgcgcttcttgcgctttttgcgagcgcaacaaatgcgttcattattccacaatgctcacttgctccaagttccattattacacagttcctcccaccagttacttcaatgggcttcgaacacccagctgtgcaagcctataggctacaacaagcaattgcggcgagcgtcttacaacaacca

SEQ ID NO: 25855 - DNA, 243 bp, Zea mays
attgagaccaacaagcaacatagaaagtggaatccagtagcaacaatagagcaacaatggcgaccaagatattttccctccttatgctccttgctctttctgcatgtgttgctaacgcgacaattttccctcaatgctcacaagctcctatagcttcccttcttcccccataccttccatcaatgatagcttcagtatgtgaaaacccagctcttcaaccctataggctccaacaagcaatcg

SEQ ID NO: 25856 - DNA, 244 bp, Zea mays
gagaaaaaggaagatgctcctgctcctcccgagagcaaggcctccaagaagaagaaaaagaaggacaagagttcaaaggagggaaaagaaacacaagaagcacttgatgggtcagaggagactgccagtgcaggacctgatgaagatacttctgctgtggatgtgaaggagcgcttgaagaagatggcatcaatgaagaagaagaaatcgagcagagagacggacacagctgccaaaattgccg

SEQ ID NO: 25857 - DNA, 241 bp, Zea mays
gtcagcctagcaattagctcatcgactccagattggagaactcgacaccatgaaggtgctgatcgttgcccttgctctcctggcgctcgctgcgaggccgcctccagtacaagcggcggctgtggctgccagacaccaccgtttcatctaccgcctccgttctatatgccgcctccgttctatctgccgccgcagcagcagccgcagccatggcaataccccactcaaccaccgcagctaa

SEQ ID NO: 25858 - DNA, 239 bp, Zea mays
cggcacccgttcctgggccagtgcgtcgagttcctgaggcaccagtgcagcccggcggcgacgcctacggctcgccacagtgccaggcgctgcagcagcagtgctgccaccagatcaggcaggtggagccgctgcaccggtaccaggcgacatacggtgtggtcctgcagtccttcctgcagcagcagccgcagggcgagctcgcggcgctgatggcggcccaggtagcgcacagctga

SEQ ID NO: 25859 - DNA, 244 bp, Zea mays
atcgagccgctcgagccgattttgagcattcagaaacacaccaagcgaactacctatcaacgacataacaacaatggctaccaagatattagccctccttgcgcttcttgccctttttgtgagcgcaacaaatgcgttcattattccacaatgctcacttgctcctagtgccattataccacagttcctccgaccagttacttcaatgggcttcgaacacctagctgtgcaagcctacaagcta

SEQ ID NO: 25860 - DNA, 245 bp, Zea mays
acgtcttacaacaaccaattaaccaattgcaacaacaatccttggcacatctaaccatacaaaccatcgcaacacaacagcaacaacagttcctaccagcactgagccaactagatgtggtgaaccctgtcgcctacttgcaacagcaggtgcttgcatccaacccacttgctctggcaaacgtagctgcataccaacaacaacaacaattgcaacagtttctgccagcgctcagtcaactagcc

SEQ ID NO: 25861 - DNA, 242 bp, Zea mays
ccgcagcaccggtaccaggcgatcttcggcttggtcctccagtccatcctgcagcagcagccgcaaagcgccaggtcgcggggctgttggcggcgcagatagcgcacaactgacggcgatgtgcggcctgcagcagccgactccatgcccctacgctgctgccggcggtgtcccccactgaagaaactatgtgctgtagtatagccgctggctagctagctagttgagtcatttagcggcga

SEQ ID NO: 25862 - DNA, 240 bp, Zea mays
accattcaaccaactgtctacactgaaccctgctgcttatttgcagcaacaactattaccatttagccagctagctactgcctactctcagcaacaacaacttcttccatttaaccaattggccgcactgaaccccgctgcttatttgcagcagcaaatactactgccatttagcgagctagctgcagcaagtcgtgcttccttcttgacacagcaacagttgctgcctttctacaagca

SEQ ID NO: 25863 - DNA, 241 bp, Zea mays
aggaaaacggtggccgggagatggctcaagaaattatacggagaagcgagaatggtatacatgacgctagaaaagtagcagaggccgctgagaaaagtgtggatctcgaagggcgaataggtattaactagtaatttttggctttttgttgtaaccttttgattttgaacttgtttacactttgtaacatggtcgcaccttctcctccctcagagcctgccgagccatcgacagaccccca

SEQ ID NO: 25864 - DNA, 241 bp, Zea mays
cctagccatggtgaaccctgccgcctacttgcaacagcagttgcttgcatcaaacccacttgctctggcaaacgtagttgcaaaccagccacaacaacagctgcaacagtttctgccagcgctcagtcaactagccatggtgaaccctgccgcctacctacaacagcaacaactgctttcatctagcccgctcgctgtggccaatgcacctacatacctgcaacaacaattgttgcaacag

SEQ ID NO: 25865 - DNA, 86 bp, Zea mays
gcgttctaccaacaacccatcattggtggtgccctcttttagatttcttatgagttatagttcaataataaagttttttgtctgag

SEQ ID NO: 25866 - DNA, 238 bp, Zea mays
aaccgaacacattagcaacaacctaacaacaatggctaccaagatattatccctccttgcgcttcttgcgctttttgcgagcgcaacaaatgcgttcattattccacaatgctcacttgctccaagttccattattacacagttcctcccaccagttacttcaatgggcttcgaacacccagctgtgcaagcctataggctacaacaagcaattgcggcgagcgtcttacaacaacca

SEQ ID NO: 25867 - DNA, 237 bp, Zea mays
ctagccctctcgttgtgggtaatgcacctacatacctgcaacaacaattgctgcaacagattgtaccagctctgactcagctagctgtggcaaaccctgctgcctacttgcaacagctgcttccattcaaccaactgactgtgtcgaactctgctgcgtacctacaacagcgacaacagttacttaatccactagcagtgcctaacccattggtcactgccttcctacagcagcaac

SEQ ID NO: 25868 - DNA, 237 bp, Zea mays
atgaaattcaagagaaggcgggctggcaagacagactacagggccaggataaggctgattaaccaagacaaaaacaagtacaacacacccaaatacagatttgttgtgcgatttaccaacaaggacatcactgcacaaatcatatctgctagtatagcgggtgatatggttcttgcttctgcctactctcatgagttgccacgatatggtcttgaagttggtctgaccaactatgca

SEQ ID NO: 25869 - DNA, 236 bp, Zea mays
aacatagaaagtggaatccagtagcaacaatagagcaacaatggcgaccaagatattttccctccttatgctccttgctctttctacatgtgttgctaacgcgacaattttccctcaatgctcacaagctcctatagcttcccttcttcccccataccttccatcaattatagcttcaatatgtgaaaacccagctcttcaaccatataggcttcaacaagcaatcgcagcaagca

SEQ ID NO: 25870 - DNA, 236 bp, Zea mays
aaaacacaccaagcgaacgcactagcaacaacctaacaacaatggctaccaagatattatccctccttgcgcttcttgcgctttttgcgagcgcaacaaatgcgtccattattccacaatgctcacttgctcctagttccattattccacagttcctcccaccagttacttcaatggccttcgaacacccagctgtgcaagcctataggctacaacaagcgattgcggcgagcgtc

SEQ ID NO: 25871 - DNA, 238 bp, Zea mays
gtggctgccagacaccaccgtttcatctaccgcctccgttctatatgccgcctccgttctatctgccgccgcagcagcagccgcagccatggcaataccccactcaaccaccgcagctaagcccgtgccagcagttcggatcctgcggcgtcggcagcgtcggcagcccgttcctgggccagtgcgtcgagttcctgaggcaccagtgcagcccggcggcgacgcctacggctcgcca

SEQ ID NO: 25872 - DNA, 241 bp, Zea mays
acaaaccatcgcaacacaacagcaacaacagttcctaccagcactgagccaactagatgtggtgaaccctgtcgcctacttgcaacagcaggtgcttgcatccaacccacttgctctggcaaacgtagctgcataccaacaacaacaacaattgcaacagtttctgccagcgctcagtcaactagccatggtgaaccctgccgcctacctacaacagcaacaactgctttcatctagccct

SEQ ID NO: 25873 - DNA, 265 bp, Zea mays
agcccaaatcaaatctgcaacatcaattatctaactccaaaaaccatgaagctggtgcttgtggttcttgctttcattgctttagtatcaagtgtttcttgtacacagacaggcggctgcagctgtggtcaacaacaaagccatgagcagcaacatcatccacaacaacatcatccacaaaaacaacaacaacaacaacagttgcaacagtttctgccagcgctcagtcaactagccatggtgaaccctatcgcctacctacaac

SEQ ID NO: 25874 - DNA, 262 bp, Zea mays
accagtgatcagccaagtagctctggcaaacctttctccctactctcagcaacaacaatttcttccattcaaccaactgtctacactgaaccctgctgcttatttacaacaacaacaactactaccattcagccagctagctactgcctactctcagcagcaacaatttcttccatttaaccaattggccgcactgaacccctctgcttatttccagcagcaaatactactaccatttggccagctagctacaacaagcccc

SEQ ID NO: 25875 - DNA, 257 bp, Zea mays
atgtgtcattgacaatcaagcacttccatgccttttgaacctactgaccaccaaccacaagaaaagcatcaagaaagaagcatgctggacaatctcaaacatcacagctggtaacagggaacagattcaggccgtgattaatgcaaacataattgcacctctggtgcaacttctgcaaactgctgaatttgacatcaagaaagaagcagcctgggcaatttcaaatgccacttctggtggcacacatgatcagatca

SEQ ID NO: 25876 - DNA, 255 bp, Zea mays
tagcaacatagaaagcacaatagtgtaccaacaatggcagccaaaatattttgcctccttatgctccttggtctttctgcaagtgctgctacggcgaccattttcccgcaatgctcgcaagctcctatagcttcccttcttcccccgtacctctcaccagcggtgtcttcggtatgtgaaaacccaattcttcaaccctacaggatccaacaggcaatcacagctggcatcttacctttatcacccttgttcctc

SEQ ID NO: 25877 - DNA, 246 bp, Zea mays
aggcatcccgtgcctgctgcgttgagaagtgcttgcgtgctgctacccgtcccacgggaagccgagctcgatacacgttgccttcgtcgagctcaccccccggggtgcggctcgtcggctcgagatcgcccgcagcgtttgcctcgtgccgccgtcagcctatggccggcggcaccgaggacacctcgctggcgcttttggtctcggatgtggctcacgctgaaggccggagacgcgttggcgtca

SEQ ID NO: 25878 - DNA, 247 bp, Zea mays
gtgccagcagttcggatcctgcggcgtcggcagcgtcggcagcccgttcctgggccagtgcgtcgagttcctgaggcaccagtgcagcccggcggcgacgccctacggctcgccacagtgccaggcgctgcagcagcagtgctgccaccagatcaggcaggtggagccgctgcaccggtaccaggcgacatacggtgtggtcctgcagtccttcctgcagcagcagccgcagggcgagctcgcggcg

SEQ ID NO: 25879 - DNA, 244 bp, Zea mays
gtggctgccagacaccaccgtttcatctaccgcctccgttctatatgccgcctccgttctatctgccgccgcagcagcagccgcagccatggcaataccccactcaaccaccgcagctaagcccgtgccagcagttcggatcctgcggcgtcggcagcgtcggcagcccgttcctgggccagtgcgtcgagttcctgaggcaccagtgcagcccggcggcgacgccctacggctcgccacagtg

SEQ ID NO: 25880 - DNA, 227 bp, Zea mays
aaatcacaaggccatgtgcaacaacacgaacagagccatgagcaacaccaaggacagagccatgagcaacaacatcaacaacaattccagggtcatgacaagcagcaacaaccacaacagcctcagcaatatcagcagggccaggaaaaatcacaacagcaacaatgtcattgccaggagcagcaacagactacaaggtgcagctataactactatagcagtagctc

SEQ ID NO: 25881 - DNA, 241 bp, Zea mays
aagcaacatagaaagtggaatccagtagcaacaacagagcaacaatggcgaccaagatattttccctccttatgctccttgctctttctgcatgtgttgctaacgcgacaattttccctcaatgctcacaagctcctatagcttcccttcttcccccataccttccatcaatgatagcttcagtatgtgaaaacccagctcttcagccctataggctccaacaagcaatcgcagcaagcaa

SEQ ID NO: 25882 - DNA, 239 bp, Zea mays
cgctgctgaaggactctcatacctgcaccatgactgtaagcccgtgatcgtccatcgagatgtgaagtcgaacaacatcttgctcgacgcggagtatggtgccaagattgcagattttggtgttgcaaggactattggggatggcccggctaccatgtccatgattgcagggtcttgtggatacattgctcctgagtatgcctacactctccatgtcactgaaaagagtgacatatata

SEQ ID NO: 25883 - DNA, 243 bp, Zea mays
gcaaagcggcagtgcgtagagaggatcgtcaaacagaacagcatgaagatggtcatcgttctcgtcgtgtgcctggctctgtcagctgccagcgcctctgcaatgcagatgccctgcccctgcgcggggctgcagggcttgtacggcgctggcgccggcctgacgacgatgatgggcgccggcgggctgtacccctacgcggagtacctgaggcagccgcagtgcagcccgctggcggcggcg

SEQ ID NO: 25884 - DNA, 243 bp, Zea mays
gcaattagctcatcgactccagattggagaactcgacaccatgaaggtgctgatcgttgcccttgctctcctggcgctcgctgcgagcgccgcctccagtacaagcggcggctgtggctgccagacaccaccgtttcatctaccgcctccgttctatatgccgcctccgttctatctgccgccgcagcagcagccgcagccatggcaatacccctctcaaccaccgcagctaagcccgtgcca

SEQ ID NO: 25885 - DNA, 254 bp, Zea mays
cactcaaccaccgcagctaagcccgtgccagcagttcggatcctgcggcgtcggcagcgtcggcagcccgttcctgggccagtgcgtcgagttcctgaggcaccagtgcagcccggcggcgacgcctacggctcgccacagtgccaggcgctgcagcagcagtgctgccaccagatcaggcaggtggagccgctgcaccggtaccaggcgacatacggtgtggtcctgcagtccttcctgcagcagcagccgca

SEQ ID NO: 25886 - DNA, 254 bp, Zea mays
attgagaccaactagcaacatagaaagcacaatagtgtaccaacaatggcagctaaaatattttgcctccttatgctccttggtctttctgcaagtgctgctacggcgaccattttcccacaatgctcacaagctcctatagcttcccttcttcccccgtacctctcaccaacggtgtcttcggtatgtgaaaacccaattcttcaaccctacaggatccaacaggcaatcgcagctggcatcttacctttatc

SEQ ID NO: 25887 - DNA, 253 bp, Zea mays
aacaagcaacatagaaagtggaatccagtagcaacaacagagcaacaatggcgaccaagatattttccctccttatgctccttgctctttctgcatgtgttgctaacgcgacaattttccctcaatgctcacaagctcctatagcttcccttcttcccccataccttccatcaatgatagcttcagtatgtgaaaacccagctcttcagccctataggctccaacaagcaatcgcagcaagcaacataccttt

SEQ ID NO: 25888 - DNA, 193 bp, Zea mays
ctctcctagctctttgtgcaagcgccactagtgcgacccatattccagggcacttgccaccagtcatgccattgggtaccatgaacccatgcatgcagtactgcatgatgcaacaggggcttgccagcttgatggcgtgtccgtccctgatgctgcagcaactgttggccttaccgcttcagacgatgccagt

SEQ ID NO: 25889 - DNA, 248 bp, Zea mays
ccagccccccacaggagcttctctgaggaagttgctgcacttaaccgctactttggcggcctgaaatctggtggtaatgcttatgtgattggagatccagcaagacctggacagaagtggcacgtcttctacgccactgagtacccagagcaaccaatggttaaccttgagatgtgcatgactggtctggacaagaagaaagcttgtgtctttttcaagactaatgctgatgggaacacaacatgtgc

SEQ ID NO: 25890 - DNA, 242 bp, Zea mays
atttcaccttaaagattatataatcttgattataatctgaattatataatctagattataatttatcgtatgcaactgtttggtagtgtagattatacaagtatataagggtggtatggatcgtgatctaaatatttctttacaatttgttgtatataagggtggtatggatcgtgatctaaatatttctttacaatttgttaggtctctatatttattttattttaaaaataaatataaat

SEQ ID NO: 25891 - DNA, 240 bp, Zea mays
aagcgaacacattagcaacaacctaacaacaatggctaccaagatattatccctccttgcgcttcttgcgctttttgcgagcgcaacaaatgcgttcattattccacaatgctcacttgctccaagttccattattacacagttcctcccaccagttacttcaatgggcttcgaacacccagctgtgcaagcctataggctacaacaagcaattgcggcgagcgtcttacaacaaccaat

SEQ ID NO: 25892 - DNA, 241 bp, Zea mays
gaagaacccgatcgacaccatgagggtgttgctcgttgccctcgctctcctggctctcgctgcgagcgccacctccacgcatacaagctgcggctgcggctgccagccaccgccgccggttcatctaccgccgccggtgcatctgccacctccggttcacctgccacctccggtgcatctcccaccgccggtccacctgccgccgccggtccacctgccaccgccggtccatgtgccgccg

SEQ ID NO: 25893 - DNA, 236 bp, Zea mays
cttgctcctagtgccattattccacagttcctccctccagttactacaatgggcttcgaacacccagctgtgcaagcctacaggctacaacaagcgcttgcggcgagcgtcttacaacaaccaattgcccaattacaacaacaatccttggcacatctaaccatacaaaccatcgcaacgcaacagcaacaacaatttctaccagcactgagccaactagctgtggtgaaccctgt

SEQ ID NO: 25894 - DNA, 232 bp, Zea mays
agttgctgcaacaaattgtaccagctctgactcagctagctgtggcaaaccctgctgcctacttacaacagttgcttccattcaaccaactggctgtgtcaaactctgctgcgtacctacaacagcgacaacagttacttaatccattggcagtggctaacccattggtcgctaccttcctgcagcagcaacaacaattgctgccatacaaccagttctctttgatgaaccc

SEQ ID NO: 25895 - DNA, 231 bp, Zea mays
attcagaaacacaccaagcgaacagcattagcaacaacctaacaacaatggctaccaagatattatccctccttgcgcttcttgcgctttttgcgagcgcaacaaatgcgttcattattccacaatgctcacttgctccaagttccattattacacagttcctcccaccagttacttcaatgggcttcgaacacccagctgtgcaagcctataggctacaacaagcaattg

SEQ ID NO: 25896 - DNA, 236 bp, Zea mays
gtcggtttctactctgcctaccttgttgcagagagggttgtcgtgaccactaagcacaatgatgatgagcagtacgtgtgggagtctcaggctggtggctccttcactgtcgcacgtgatacctctggggagcaacttggcaggggtacaaagatgaccctctacctcaaggatgatcagttggagtaccttgaggagcgccgcctcaaggatctgatcaagaagcactccgagtt

SEQ ID NO: 25897 - DNA, 239 bp, Zea mays
gaccaacaagcaacatagaaagtggaatccagtagcaacaatagagcaacaatggcgaccaagatattttccctccttatgctccttgctctttctacatgtgttgctaacgcgacaattttccctcaatgctcacaagctcctatagcttcccttcttcccccataccttccatcaattatagcttcaatatgtgaaaacccagctcttcaaccatataggcttcaacaagcaatcgc

SEQ ID NO: 25898 - DNA, 97 bp, Zea mays
gaccaacaagcaacatagaaagtggaatccagtagcaacaatagagcaacaatggcgaccaagatattttccctccttatgctccttgctctttctg

SEQ ID NO: 25899 - DNA, 244 bp, Zea mays
cttaactggaaagcaaaatacggtattgaagagatgtgccgcgaccaatggaactgggccagcaagaacccttatggctatggatcacctgactctatcaagcagaatggtcaccaaacaaacggatccgctgactcctccaagcagaatggccaccgcacaaacggttcaactgactcacccaagcggaacggccaccatgcgtatgggtctgctgactcacccaagcgcaacgggcactgcg

SEQ ID NO: 25900 - DNA, 243 bp, Zea mays
ctacctagcaacgacttaacaacaatggctaccaagatattagccctccttgcgcttcttgccctttttgtgagcgcaacaaatgcgttcattattccacaatgctcacttgctcctagtgccattataccacagttcctccgaccagttacttcaatgggcttcgaacacctagctgtgcaagcctacaagctacaacaagcgcttgcggcgagcgtcttacaacaaccaattaaccaattg

SEQ ID NO: 25901 - DNA, 239 bp, Zea mays
caacactgagccacctagccgtggtgaaccctatcgcctacttgcaacaacagctgcttgcatccaacccacttgctttggcaaacgtagctgcataccaacaacaacaacagttgcaacagtttctgccagcgctcagtcaactagccatggtgaaccctatcgcctacctacaacagcaacaacttctttcatctagcccgctcgctatgggcaatgcacctacatacctgcaacaa

SEQ ID NO: 25902 - DNA, 235 bp, Zea mays
aacacacacacacacaaccagatctcccccaaatccacccgtcggcacctccgcttcaagatgcagatctttgtgaaaaccctgactggcaagactatcaccctcgaggtggagtcgtctgacaccattgacaacgttaaggccaagatccaggacaaggagggcatccccccagaccagcagcggctcatctttgctggcaaacagcttgaggacgggcgcacgcttgctgact

SEQ ID NO: 25903 - DNA, 237 bp, Zea mays
ctaatggttcagcaaaagaaatccctaatgacaagcctgccgtcactaagcctagtccctatgaagaactgattggagacatcaaggctagcctaggaagtgctccgacccctacccagctcaaggctgtgctggcctcatcaacccttcctccccaggacgtgatgaatgctctcctggaggctctctttggtggtgtgggtaagggattcaccaaagaggttgtgaagaacaaga

SEQ ID NO: 25904 - DNA, 233 bp, Zea mays
gtgatctcgttttttgcaagggattataccggaatatgtggttgcatttttttacgcaatatggcacgctctcgctagatgcttgtcagttctctcctgataagtcaagtctacgtctacccaggatgagaaaatatccaaagttggttcagcgattgcattggcgcctcgggcttgctcgtcgtagtcggatcgcaagggtcatcttccgccaaatcgaaattatctctact

SEQ ID NO: 25905 - DNA, 233 bp, Zea mays
caattttccctcaatgctcacaagctcctatagcttccctttttcccccataccttccatcaattatagcttcagtatgtgaaaacccagctcttcaaccatataggcttcaacaagcaatcgcagcaagcaacatacctttatcgcccttgttgtgtcaacaatcgccagccctatctttggtgcagtcattggtacaaaccatcagggcacaacagctgcagcaactcgtg

SEQ ID NO: 25906 - DNA, 229 bp, Zea mays
gcgatttcgatctcgcagccaccttttttttgttctgttgtgtatctagtagttggaggagatatgcagtttgcacttgcattggacacgaactcaggtcctcaccagataagatcttgtgagggtgatgggattgacaggttggaaaaattaagtattgggggcagaaagcaggagaaagctttgagaaataggtgctttggtggtagagttgctgcaactacacaat

SEQ ID NO: 25907 - DNA, 154 bp, Zea mays
atgccgcctccgttctatctgccgccgcagcagcagccgcagccatggcaataccccactcaaccaccgcagctaagcccgtgccagcagttcggatcctgcggcgtcggcagcgtcggcagcccgttcctgggccagtgcgtcgagttcctga

SEQ ID NO: 25908 - DNA, 223 bp, Zea mays
cagaaacacaccaagcgaagctactagcaacgacctaacaacaatggctaccaagatattagccctccttgcgcttcttgccctttttgtgagcgcaacaaatgcgttcattattccacaatgctcacttgctcctagtgccattattccacagttcctcccaccagttacttcaatgggcttcgaacacctagctgtgcaagccaacatgcaacaacaagcg

SEQ ID NO: 25909 - DNA, 226 bp, Zea mays
aaaacattgtcaccaggattccgtatgaaccctatacagtttgagaaggatgatgataccaatttccatatggacttgattgctggttttgctaacatgcgggccaggaactacagcatccctgaagttgacaagttgaaggcgaagttcatagcgggaagaatcatcccggccatcgccacctcaactgcgatggccaccggccttgtctgcctggagctttaca

SEQ ID NO: 25910 - DNA, 226 bp, Zea mays
ctttctccctactctcagcaacaacaatttcttccattcaaccaactgtctacactgaaccctgctgcttatttgcagcaacaactattaccatttagccagctagctactgcctactctcagcaacaacaacttcttccatttaaccaattggccgcactgaaccccgctgcttatttgcagcagcaaatactactaccatttagccagctagctgcagcaaacc

SEQ ID NO: 25911 - DNA, 230 bp, Zea mays
tacagcattgaactctgctgcttatttacagcagcaacaactactaccattcagccagctagctgatgtgagccctgctgccttcttgacacaacaacagttgttgccgatctacctgcacgctatgcctaacgctggcaccctcttacaactgcaacaattgctgccattcaaccaacttgctttgacaaactcaacagtgttctaccaacaacccatcattggtggtg

SEQ ID NO: 25912 - DNA, 229 bp, Zea mays
caactacaacaacttgtgctagcaaaccttgctgcctactctcagcaacagcagtttcttccattcaaccaactagctgcattgaactctgcttcttatttgcaacaacaacaactaccattcagccagctacctgctgcctacccccagcaatttcttccattcaaccaactggcagcattgaactctcctgcttatttacagcagcaacaactactaccattcagcc

SEQ ID NO: 25913 - DNA, 245 bp, Zea mays
agttcctgaggcatcagtgcagcccgacggcgacgccctactgctcgcctcagtgccagtcgttgcggcacagtgttgccagcagctcaggcaggtggagccgcagcaccggtaccaggcgatcttcggcttggtcctccagtccatcctgcagcagcagccgcaaagcggcaggtcgcggggctgttggcggcgcagatagcgcagaactgacggcgatgtgcggcctgcagcagccgactcca

SEQ ID NO: 25914 - DNA, 242 bp, Zea mays
catcgttctcgtcgtgtgcctggctctgtcagctgccagcgcctctgcaatgcagatgccctgcccctgcgcggggctgcagggcttgtacggcgctggcgcggcctgacgacgatgatgggcgccggcgggctgtacccctacgcggagtacctgaggcagccgcagtgcagcccgctggcggcggcgccctactacgccgggtgtgggcagacgagcgccatgtaccagccgctccggca

SEQ ID NO: 25915 - DNA, 241 bp, Zea mays
gatcgagtccatgacgtgcggtctgccaacgatcgcgacctgccatggtggccctgctgagatcatcgtggacggggtatctggcctgcacattgacccttaccacagcgacaaggccgcggatatcctggtcaacttctttgacaaatgcaaggcagatccgagctactgggacaagatctcacagggcggcctgcagagaatttatgagaagtacacctggaagctctactccgagagg

SEQ ID NO: 25916 - DNA, 239 bp, Zea mays
ctgcaatgcagatgccctgcccctgcgcggggctgcagggcttgtacggcgctggcgcggcctgacgacgatgatgggcgccggcgggctgtacccctacgcggagtacctgaagcagccgcagtgcagcccgctggcggcggcgccctactacgccgggtgtgggcagccgagcgccatgttccagccgctccggcaacagtgctgccagcagcagatgaggatgatggacgtgcagt

SEQ ID NO: 25917 - DNA, 239 bp, Zea mays; identical to SEQ ID NO: 25329

SEQ ID NO: 25918 - DNA, 205 bp, Zea mays
accaacaatggcagctaaaatattttgcctccttatgctccttggtctttctgcaagtgctgctacggcgaccattttcccacaatgctcacaagctcctatagcttcccttcttcccccgtacctctcaccaacggtgtcttcggtatgtgaaaacccaattcttcaaccctacaggatccaacaggcaatcgcagctggcatc

SEQ ID NO: 25919 - DNA, 240 bp, Zea mays
agagaccaacaagcaacatagaaagtggaatccagtagcaacaacagagcaacaatggcgaccaagatattttccctccttatgctccttgctctttctgcatgtgttgctaacgcgacaattttccctcaatgctcacaagctcctatagcttcccttcttcccccataccttccatcaatgatagcttcagtatgtgaaaacccagctcttcagccctataggctccaacaagcaatc

SEQ ID NO: 25920 - DNA, 239 bp, Zea mays
aagacccacaacctcaaccgtctcgaggcccagcgcaatgacctcaactcccgagttagaatgctcagggaagagttgcagttgcttcaagagcctggctcatatgttggtgaggtggtgaaggtcatggggaaatcaaaggttctggtgaaggtacaccccgaaggcaaatatgttgttgatatagataagagcattgatatcacaaagatcacaccttcaacaagagtcgctcttcg

SEQ ID NO: 25921 - DNA, 247 bp, Zea mays
actggtgttttcactgaccaggagaaggctgcagctcacttgaagggtggtgccaagaaggttgtcatctctgctcctagcaaggatgcccccatgtttgtcgttggtgtcaacgagaaggagtacaagtctgacattaacattgtctccaatgctagctgcacaaccaactgccttgctcctcttgctaaggtcatcaatgacaagttcggtatcgttgagggtctgatgaccactgtccatgcca

SEQ ID NO: 25922 - DNA, 240 bp, Zea mays
agaaaagattaatgttcatggaggagctgtatctttaggacatcctctcgggtgcagtggtgctcgcattttggttacccttattggtgttctcagggcgaagagtggcaagatcggagttgctggtgtctgcaacggtggaggcggacatcagctcttgttctggagctcgcataagaaatctagaccttgtagttcgcaaaagttccctgaggtgatcttgtagtcttattttccgtt

SEQ ID NO: 25923 - DNA, 239 bp, Zea mays
cggatgatggacgtgcagtccgtcgcgcacagctgcagatgatgatgcagcttgagcgtgccgctgccgccagcagcagcctgtacgagccagctctgatgcagcagcagcagcagctgctggcagcccagggtctcaaccccatggccatgatgatggcgcagaacatgccggccatgggtggactctaccagtaccagctgcccagctaccgcaccaacccctgtggcgtctccgct

SEQ ID NO: 25924 - DNA, 236 bp, Zea mays
agggagctcgaggcggcggaggaaggcgttcgccacagtcgctgatttccctgggacacagatgggtctctcctttgggaagctgttcagccgcctcttcgccaagaaggagatgaggattctcatggtcgggctcgatgccgccggtaagaccaccatcctctacaagctcaagctcggcgagatcgtcaccaccatccccactatcggattcaatgttgaaactgttgagtata

SEQ ID NO: 25925 - DNA, 234 bp, Zea mays
cattttgagcattcagaaacacaccaagcgaacacattagcaacaacctaacaacaatggctaccaagatattatccctccttgcgcttcttgcgctttttgcgagcgcaacaaatgcgttcattattccacaatgctcacttgctccaagttccattattacacagttcctcccaccagttacttcaatgggcttcgaacacccagctgtgcaagcctataggctacaacaag

SEQ ID NO: 25926 - DNA, 236 bp, Zea mays
catcttaccattatcacccttgttcctccaacaaccgtcagccctattacagcagttacctttggtccatttggtggcacaaaacatcagggcacaacaactacaacaacttgtgctagcaaaccttgctgcatactctcagcaacatcagtttcttccattcaaccaactggctgcattgaactctgctgcttatttgcaacaacaattaccattcagccagctagttgctgcct

SEQ ID NO: 25927 - DNA, 236 bp, Zea mays
ctggacgtcagcctagcaattagctcatcgactccagattggagaactcgacaccatgaaggtgctgatcgttgcccttgctctcctggcgctcgctgcgagcgaccgcctccagtacaagcggcggctgtggctgccagacaccaccgtttcatctaccgcctccgttctatatgccgcctccgttctatctgccgccgcagcagcagccgcatccatggcaataccccactcaa

SEQ ID NO: 25928 - DNA, 237 bp, Zea mays
cgcagtttcttccattcaaccaactggctgcattgaactctgctgcttatttgcaacaacaactaccattcagtcagctagctgctgcctacccccagcaatttcttccattcaaccaactggcagcattgaactctgctgcttatttacaacagcaacagctaccaccattcagccagctagctgatgtgagccctgttgccttcttgacacaacaacagttgttgccgttctacc

SEQ ID NO: 25929 - DNA, 237 bp, Zea mays
attgagaccagcaagcaacatagaaagtagaatccattagcaacaatagagcaacaatggcgaccaagatattttccctccttatgctccttgctctttctacatgtgttgctaacgcgacaattttccctcaatgctcacaagctcctatagcttcccttcttcccccataccttccatcaattatagcttcagtatgtgaaaacccagctcttcaaccatataggcttcaacaag

SEQ ID NO: 25930 - DNA, 221 bp, Zea mays
aggcgggagtactcggcatctacggcctcatcatcgccgtcatcatctccaccgggatcaaccccaaggccaagccctacttcctcttcgacggctacgcgcacctctcctccggactcgcctgcagcctcgctggcctcgctgccggcatggccatcggcatcgtcggagacccggagttagggcgaatgcacagcagccaaagttgtttgtgggcatga

SEQ ID NO: 25931 - DNA, 243 bp, Zea mays
ggaactgcatgatccaggatctctcctggaagggccctgccaagaactgggagaacgtgctgctcagcctcggggtcgccggcagcagccaggggtcgaaggcgaggagatcgcgccgctcgccaaggagaacgtggccgcgccctgaagagttcggcctgcagggcccctgatctcgcgcgtggtgcaaagatgttgggacatcttcttatatatgctgtttcgtttatgtgatatggacaa

SEQ ID NO: 25932 - DNA, 238 bp, Zea mays
tcaacgtggagaggtcgtttgccgagaagcactacgccgatctcgcctccaagcccttcttccagggcctcgttgactacatcatctctggccctgtggtggccatggtctgggagggcaagagcgtcgtcacaactggccgcaagatcattggcgccactaaccccctggcttctgagcccggcaccatccgtggcgactttgctgtcgacattggcaggaatgtcattcatggaag

SEQ ID NO: 25933 - DNA, 234 bp, Zea mays
ctctcagcaacatcagtttcttccattcaaccaactggctgcattgaactctgctgcttatttgcaacaacaattaccattcagccagctagttgctgcctacccccagcaatttcttccattcaaccaactagcagcattgaactctgctgcttatttacagcagcaacaactactaccattcagccagctagctgatgtgagccctgctgccttcttgacacaacaacagtt

SEQ ID NO: 25934 - DNA, 235 bp, Zea mays
cagaaacacaccaagcgaagtcgactagcaacgacctaacaacaatggctaccaagatattagccctccttgagcttcttgacctttttgtgagcgcaacaaatgcgttcattattccacaatgctcacttgctcctagtgccattattccacagttcctcacaccagttacttcaatgggcttcgaacacctagctgtgcaagccaacatgcaacaacaagcgcttgcggcgag

SEQ ID NO: 25935 - DNA, 233 bp, Zea mays
tagcaacatagaaagcacaatagtgtaccaacaatggcagccaaaatattttgcttccttatgctccttggtctttctgcaagtgctgctaccgcaaccattttcccacaatgctcacaagctcctatagcttcctttcttcccccatacctctcaccagcggtgtcttcagtatgtgaaaacccaattcttcaaccctacaggatccaacaggcaatcgcagcaggcatctt

SEQ ID NO: 25936 - DNA, 234 bp, Zea mays
agccgctgccgccagcagcagcctgtacgagccagctctgatgcagcagcagcagcagctgctggcagcccagggtctcaaccccatggccatgatgatggcgcagaacatgccggccatgggtggactctaccagtaccagtaccagctgcccagctaccgcaccaacccctgtggcgtctccgctgccattccgccctactactgattcatgatatttgggaaatctcctct

SEQ ID NO: 25937 - DNA, 230 bp, Zea mays
caactacaacaacttgtgctagcaaaccttgctgcctactctcagcaacagcagtttcttccattcaaccaactagctgcattgaactctgcttcttatttgcaacaacaacaactaccattcagccagctatctgctgcctacccccagcaatttcttccattcaaccaactgacagcattgaactctcctgcttatttacagcagcaacaactactaccattcagcca

SEQ ID NO: 25938 - DNA, 231 bp, Zea mays
agctcatcgactccagattggagaactcgacaccatgaaggtgctgatcgttgcccttgctctcctggcgctcgctgcgagtgccgcctccagtacaagcggcggctgtggctgccagacaccaccgtttcatctaccgcctccgttctatatgccgcctccgttctatctgccgccgcagctgcagccgcagccatggcaataccccactcaaccaccgcagctaagccc

SEQ ID NO: 25939 - DNA, 230 bp, Zea mays
gcttatctgtatgatggttactgggaagatatcggtaccattgcggcattttataatgcaaacttgggaataaccaagaagccaataccagatttcagcttctatgaccgttttgctccaatttatacacaacctcgacacctgccaccttcaaaggttcttgatgctgatgtgacagacagtgttattggtgaaggatgtgttattaaaaactgcaagataaaccattc

SEQ ID NO: 25940 - DNA, 231 bp, Zea mays
gttcaagacccacccgatgaacttcctgaacgaaaggaccctgaaggggaccttctttggcaactataagccacgcactgatctgccaaatgtggtggagctgtacatgaaaaaggagctggaggtggagaagttcatcacgcacagcgtcccgttcgccgagatcaacaaggcgttcgacctgatgcccaagggggagggcatccgctgcatcatccgcatggagaacta

SEQ ID NO: 25941 - DNA, 230 bp, Zea mays
agagagccgagcttctaaaaatgggctagtgaagattgatcatactggacgtgtacttcaattctttgaaaaaccaaagggtgctgatttgaattctatgagagttgagaccaacttcctgagctatgctatagatgatgcacagaaatatccataccttgcatcaatgggcatttatgtcttcaagaaagatgcacttttagaccttctcaagtcaaaatatattcaat

SEQ ID NO: 25942 - DNA, 228 bp, Zea mays
cagcctagcaattagctcatcgactccagattggagaactcgacaccatgaaggtgctgatcgttgcccttgctctcctggcgctcgctgcgaggccgcctccagtacaagcggcggctgtggctgccagacaccaccgtttcatctaccgcctccgttctatatgccgcctccgttctatctgccgccgcagcagcagccgcaaccatggcaataccccactcaacc

SEQ ID NO: 25943 - DNA, 234 bp, Zea mays
tgccgcctccgttctatctgccgccgcagcagcagccgcagccatggcaataccccactcaaccaccgcagctaagcccgtgccagcagttcggatcctgcggcgtcggcagcgtcggcagcccgttcctgggccagtgcgtcgagttcctgaggcaccagtgcagcccggcggcgacgccctacggctcgccacagtgccaggcgctgcagcagcagtgctgccaccagatca

SEQ ID NO: 25944 - DNA, 68 bp, Zea mays
agccgctgcaccggtaccaggcgacatacggtgtggtcctgcagtccttcctgcagcagcagccgcag

SEQ ID NO: 25945 - DNA, 238 bp, Zea mays
gcaagtgctgctacggcgaccattttcccgctatgctcgcaagctcctatagcttcccttcttcccccgtacctctcaccagcggtgtcttcggtatgtgaaaacccaattcttcaaccctacaggatccaacaggcaatcacagctggcatcttacctttatcacccttgttcctccaacaatcatcagccctattacatcagttacctttggtgcatttattggcacaaaacatca

SEQ ID NO: 25946 - DNA, 127 bp, Zea mays
cagtgcagcccgacggcgacgccctactgctcgcctcagtgccagtcgttgcggcacagtgttgccagcagctcaggcaggtggagccgcagcaccggtaccaggcgatcttcggcttggtcctcca

SEQ ID NO: 25947 - DNA, 228 bp, Zea mays
atccagatcagcaaagcggcagtgcgtagagaggatcgtcgaacagaacagcatgaagatggtcatcgttctcgtcgtgtgcctggctctgtcagctgccagcgcctctgcaatgcagatgccctgcccctgcgcggggctgcagggcttgtacggcgctggcgccggcctgacgacgatgatgggcgccggcgggctgtacccctacgcggagtacctgaggcagcc

SEQ ID NO: 25948 - DNA, 207 bp, Zea mays
tggacgtcagcctagcaattagctcatcgactccagattggagaactcgacaccatgaaggtgctgatcgttgcccttgctctcctggcgctcgctgcgagcgccgcctccagtacaagcagcggctgtggctgccagacaccaccgtttcatctaccgcctccgttctatatgccgcctccgttctatctgccgccgcagcagcag

SEQ ID NO: 25949 - DNA, 245 bp, Zea mays
caacaacaattgcttccgttctaccagcagtttgtagctaaccccgcaaccctcttacaactgcaacagtagctgccctttgtccaacttgctttgacaaacccagcagccttctaccaacaacacatcattggcggtgccatcttttagattgcttattagttgtaattcaataatgaagttttttggctgatgtatgtggcctcctagaaataagaagttacatttccagattctaatgtgct

SEQ ID NO: 25950 - DNA, 263 bp, Zea mays
attgagaccaactagcaacatagaaagcacaatagtgtaccaacaatggcagccaaaatattttgcttccttatgctccttggtctttctgcaagtgctgctaccgcaaccattttcccacaatgctcacaagctcctatagcttcctttcttcccccatacctctcaccagcggtgtcttcagtatgtgaaaacccaattcttcaaccctacaggatccaacaggcaatcgcagcaggcatcttacctttatcacccttgtt

SEQ ID NO: 25951 - DNA, 217 bp, Zea mays
ggtgaaccctgctgcttacttgcaggcacaacagctactaccattcaaccaacttgtcgggagccctgctgccatcttattgcagcaacagttgctgccattccgtctacaagttgttgcaaacattgctgctttcttgcaacaacaacaattgctgccattttacccacaggttgtgggaaacattaacgccttcttgcaacaacaacaattgctg

SEQ ID NO: 25952 - DNA, 260 bp, Zea mays
cagttacctttggtgcatttattggcacaaaacatcagggcacaacaactacaacaacttgtgctagcaaaccttgctgcctactctcagcaacagcagtttcttccattcaaccaactagctgcattgaactctgcttcttatttgcaacaacaacaactaccattcagccagctacctgctgcctacccccagcaatttcttccattcaaccaactggcagcattgaactctcctgcttatttacagcagcaacaact

SEQ ID NO: 25953 - DNA, 221 bp, Zea mays
taggaaacattaacgccttcttgcaacagcaacagttgctaccattctacccacaggatgtggcaaacaatgtcgccttcttacaacaacaacaattgctgccatttaaccaacttgctttgacgaatcctaccaccttattgcagcagcccaccattggtggtgccatcttctagatttttttatgccttatactgtaataataaagttctcatactggt

SEQ ID NO: 25954 - DNA, 257 bp, Zea mays
atgcagtcattggtacaaaccatcagggcacaacagctgcagcaactcgtgctacctgtgatcaaccaagtagctctggcaaacctttctccctactctcagcaacaacaatttcttccattcaaccaactgtctacactgaaccctgctgcttatttgcagcaacaactattaccatttagccagctagctactgcctactctcagcaacaacaacttcttccatttaaccaattggccgcactgaaccccgctgc

SEQ ID NO: 25955 - DNA, 257 bp, Zea mays
caattgtcgacgatcttgtgtccatcgacactctaattgaggaccaccttacgcaagagcccatcaatgagtacgtccagagttgcgacattgtggctttcaacaagatctagagttcagtttctgagattgggcaacggcagcggctcagctcgtcaagtttgtgctgggatgccagtttatcccttctagtctattacagaaatgttgttcggagctgagtctattataaacatcttggtctgagtttattgttg

SEQ ID NO: 25956 - DNA, 260 bp, Zea mays
agcgcacaactgacggcgatgtgcggcctgcagcagccgactccatgcccctacgctgctgccggcggtgtcccccactgaagaaactatgtgctgtagtatagccgctggctagctagctagttgagtcatttagcggcgatgattgagtaataatgtgtcacgcatcaccatgggtggcagtgtcagtgtgagcaatgacctgaatgaacaattgaaatgaaaagaaaaaaagtactccatctgttccaaattaaaaa

SEQ ID NO: 25957 - DNA, 264 bp, Zea mays
ctttatcgcccttgttgtttcaacaatcgccagccctatctttggtgcagtcattggtacaaaccatcagggcacaacagctgcagcaactcgtgctacctctgatcaaccaagtagctctggcaaacctttctccctactctcagcaacaacaatttcttccattcaaccaactgtctacactgaaccctgctgcttatttgcagcaacaactattaccatttagccagctagctactgcctactctcagcaacaacaacttc

SEQ ID NO: 25958 - DNA, 265 bp, Zea mays
cggcagtgcgtagagaggatcgtcgaacagaacagcatgaagatggtcatcgttctcgtcgtgtgcctggctctgtcagctgccagcgcctctgcaatgcagatgccctgcccctgcgcggggctgcagggcttgtacggcgctggcgccggcctgacgacgatgatgggcgccggcgggctgtacccctacgcggagtacctgaagcagccgcagtgcagcccgctggcggcggcgccctactacgccgggtgttggcagacga

SEQ ID NO: 25959 - DNA, 248 bp, Zea mays
ccgacgtcaccgaggtgaagggttccgacgaggttgggccggcgctcaagcggcagatcctcatctccaccgtgcttatgaccgccggcatcgccgccgtcaccttcctcggcctgccgcccagcttcaccctcttcgacttcggcaacgacaagcacgtcaagaactggcacctattcatctgcgtgtcggccggtctgtgggcggggctcgtgatcggctacgtcaccgagtacttcacgagcaac

SEQ ID NO: 25960 - DNA, 256 bp, Zea mays
agcatccaacccacttgctctggcaaacatagttgcataccaacaacaacaacaattgcaacagtttctaccagcgctcagtcaactagccatggtgaaccctgccgcctacctacaacagcaacaactgatttcatctagccctctcgctgtggttaatgcacctacatacctgcaacaacagttgctgcaacagattgtaccagctctgactcagctagctgtggcaaaccctgctgcctacttgcaacagctg

SEQ ID NO: 25961 - DNA, 255 bp, Zea mays
aaccaacaatcacaaggccatgtgcaacaacacgaacagagccatgagcaacaccaaggacagagccatgagcaacaacatcaacaacaattccagggtcatgacaagcagcaacaaccacaacagcctcagcaatatcagcagggccaggaaaaatcacaacagcaacaatgtcattgccaggagcagcaacagactacaaggtgcagctataactactatagcagtagctcaaatctagaaaattgtcatgaa

SEQ ID NO: 25962 - DNA, 256 bp, Zea mays
caacaagcaacatagaaagtggaatacagtagcaaaaatagagcaacaatggcggccaagatattttccatccttatgctccttgctctttctgcatgtgttgctaacgcgaccatttttcctcaatactcacaagctcctatagctggccttcttcccccataccttccatcaatgaccgctttagtatgtgaaaacccagcccttcaaccctacaggatccagcaagcaatcgcaacaagcaacttacctttat

SEQ ID NO: 25963 - DNA, 254 bp, Zea mays
ctcgagcccggtgtggtcctgcagtccttcctgcagcagcagccgcagggcgagctcgcggcgctgatggcggcccaggtagcgcacagctgacggcgatgtgcggcctgcagctgcagcagccaggtccctgcccttgcaacgcagctgccggcggtgtctactactgaggaaactatgtactgtagtaataatgtaatggagccgctggctagctacctagctcgctagtttactcatttagcggcgatgag

SEQ ID NO: 25964 - DNA, 254 bp, Zea mays
cagttgcagcaactcgtgctaccagtgatcagccaagtagctctggcaaacctttccccctactctcagcaacaacaatttcttccattcaaccaactgtctatactgaaccctgctgcttatttgcagcaacaacaactactaccattcagccagctagctactgcctactctcagcagcaacaatttcttccatttaaccaattggccgcactgaacccctctgcttatttccagcagcaaatactactacc

SEQ ID NO: 25965 - DNA, 253 bp, Zea mays
aaacggttacgatgatactgtacgaggtgctcaggctgtacccgccggcggtgacgctgaaccgaagaacgttcaaagacatgcagatcggaggcatcacgtaccctgcgggggtgatcctggagctccccgtgatcgtcgtccaccacgaccccgacgtctggggcaaggacgcgcacgagttcaggccggagaggttcgccgaggggatctccaaggcgaccaaggaccagcagccggcgttcttcccgtt

SEQ ID NO: 25966 - DNA, 253 bp, Zea mays
aaccgcagcaccaccaccaacaacaacaacaacagcaccaacaacaacatcaatgtgaaggccaacaacaacatcaccaacaatcacaaggccatgtgcaacaacacgaacagagccatgagcaacaccaaggacagagccatgagcaacaacatcaacaacaattccagggtcatgacaagcagcaacaaccacaacagcctcagcaatatcagcagggccaggaaaaatcacaacagcaacaatgtcattg

SEQ ID NO: 25967 - DNA, 252 bp, Zea mays
agcaaagcggcagtgcgtagagaggatcgtcgaacagaacagcatgaagatggtcatcgttctcgtcgtgtgcctggctctgtcagctgccagcgcctctgcaatgcagatgccctgcccctgcgcggggctgcagggcttgtacggcgctggcgccggcctgacgacgatgatgggcgccggcgggctgtacccctacgcggagtacctgaggcagccgcagtgcagcccgctggcggcggcgccctacta

SEQ ID NO: 25968 - DNA, 252 bp, Zea mays
cgtactgcataccagcaacaacaacagctgcaacagtttatgccagtgctcagtcaactagccatggtgaaccctgccgtctacctacaactactttcatctagcccgctcgcggtgggcaatgcacctacgtacctacaacaacagttgctgcaacaaattgtaccagctctgactcagctagctgtggcaaaccctgctgcctacttacaacagttgcttccattcaaccaactggctgtgtcaaactct

SEQ ID NO: 25969 - DNA, 253 bp, Zea mays
acggctcgaggcagccgcagccatggcaataccccactcaaccaccgcagctaagcccgtgccagcagttcggatcctgcggcgtcggcagcgtcggcagcccgttcctgggccagtgcgtcgagttcctgaggcaccagtgcagcccggcggcgacgccctacggctcgccacagtgccaggcgctgcagcagcagtgctgccaccagatcaggcaggtggagcgctgcaccggtaccagccgacatacggt

SEQ ID NO: 25970 - DNA, 157 bp, Zea mays
ctttgataaaccctgtcttgtagaggccatcacagcaacccatcgttggaggtgccatcttttagattacatatgagatgtactcgataatggtgccctcatagcggcatgtgtttcctagaaataatcaatatattgattgagatttatctcgata

SEQ ID NO: 25971 - DNA, 259 bp, Zea mays
tgggccagtgcgtcgagtttctgaggcatcagtgcagcccgacggcgacgccctactgctcgcctcagtgccagtcgttgcggcagcagtgttgccagcagctcaggcaggtggagccgcagcaccggtaccaggcgatcttcggcttggtcctccagtccatcctgcagcagcagccgcaaagcggccaggtcgcggggctgttggcggcgcagatagcgcacaactgacggcgatgtgcggcctgcagcagccgact

SEQ ID NO: 25972 - DNA, 251 bp, Zea mays
agtgtaccaacaatggcagccaaaatattttgcttccttatgctccttggtctttctgcaagtattgctaccgcaaccattttcccacaatgctcacaagctcctatagcttcccttcttcccccatacctctcaccagcggtgtcttcaatgtgtgaaaccccaattgttcaaccctacaggatccaacaggcaatcgcaacaggcatcttaccattatcacccttgttcctccaacaaccgtcagccct

SEQ ID NO: 25973 - DNA, 248 bp, Zea mays
agcgaacgtagctgcataccagcaacaacaacagctgcaacagtttatgccagtgctcagtcaactagccatggtgaaccctgccgtctacctacaactactttcatctagcccgctcgcggtgggcaatgcacctacgtacctacaacaacagttgctgcaacaaattgtaccagctctgactcagctagctgtggcaaaccctgctgcctacttacaacagttgcttccattcaaccaactggctg

SEQ ID NO: 25974 - DNA, 248 bp, Zea mays; identical to SEQ ID NO: 25973

SEQ ID NO: 25975 - DNA, 248 bp, Zea mays
acagttcctcccaccagttacttcaatgggcttcgaacacctagctgtgcaagccaacatgcaacaacaagcgcttgcggcgagcgtcttacaacaaccaattgcccaattgcaacaacaatccttgccacatctaacaatacaagccatcacaacgcaacagcaacaacagttcctaccagcactgagccacctagccatggtgaaccctgccgcctacttgcaagagcagctgcttgcatccaacc

SEQ ID NO: 25976 - DNA, 244 bp, Zea mays
cattggtcagggttcagtgatcaaaggatgggacgagggagttatgaccatgcaagtgggtgaagttgctcgtatccagtgcacgcctgattatgcttatggagccggcgggttcccagcctggggaattcaaccaaactcagtgcttgtgttcgagattgaagtcctcagtgcccagtaattcgcatctgtcagctatggaaacgttggccatgcttctcaagtaatgaaataattccgttgt

SEQ ID NO: 25977 - DNA, 245 bp, Zea mays
cattcagccagctacctgctgcctacccccagcaatttcttccattcaaccaactggcagcattgaactctcctgcttatttacagcagcaacaactactaccattcagccagctagctggtgtgagccctgctaccttcttgatacaaccacagttgttgccgttctaccagcacgctgcgcctaacgctggcaccctcttacaactgcaacaattgctgccattcaaccaacttgctttgaca

SEQ ID NO: 25978 - DNA, 245 bp, Zea mays
ctatactatactctaggaagcaaggacaccaccgccatggcagccaagatgcttgcattgttcgctctcctagctctttgtgcaagcgccactagtgcgacccatattccagggcacttgccaccagtcatgccattgggtaccatgaacccatgcatgcagtactgcatgatgcaacaggggcttgccagcttgatggcgtgtccgtccctgatgctgcagcaactgttggccttaccgcttca

SEQ ID NO: 25979 - DNA, 246 bp, Zea mays
gcatgtgttgctaacgcgacaattttccctcaatgctcacaagctcctatagcttcccttcttcccccataccttccatcaatgatagcttcagtatgtgaaaacccagctcttcagccctataggctccaacaagcaatcgcagcaagcaacatacctttatcacccttgttgtttcaacaatcgccagccctatctttggtgcagtcattggtacaaaccatcagggcacagcagctgcagcaa

SEQ ID NO: 25980 - DNA, 244 bp, Zea mays
agcaaagcggccaggtcgcggggctgttggcggcgcagatagcgcacaactgacggcgatgtgcggcctgcagcagccgactccatgcccctacgctgctgccggcggtgtcccccactgaagaaactatgtgctgtagtatagccgctggctagctagctagttgagtcatttagcggcgatgattgagtaataatgtgtcacgcatcaccatgggtggcagtgtcagtgtgagcaatgacct

SEQ ID NO: 25981 - DNA, 246 bp, Zea mays
gaagcatccagatgctgattccctttacgtggaggagattgatgttggagaggacgcgccgagaacagtagtcagtggccttgttaaattcatacctcttgaagaaatgcagagccggaaagtttgcgtgctctgcaatctgaaaccggtggcaatgcgtggcataaaatcacatgcaatggttctggctgcatcgaatgaggaccacacgaaggtatagtaatcttcaaatacagtaaactcttt

SEQ ID NO: 25982 - DNA, 245 bp, Zea mays
gtgcgtagagaggatcgtcgaacagaacagcatgaagatggtcatcgttctcgtcgtgtgcctggctctgtcagctgccagcgcctctgcaatgcagatgccctgcccctgcgcggggctgcagggcttgtacggcgctggcgccggcctgacgacgatgatgggcgccggcgggctgtacccctacgcggagtacctgaggcagccgcagtgcagcccgctggcggcggcgccctactacgccg

SEQ ID NO: 25983 - DNA, 251 bp, Zea mays
ggtcttcagaccattagctttatctactccagagcgcagaagaacccgatcgacaccatgagggtgttgctcgttgccctcgctctcctggctctcgctgcgagcgccacctccacgcatacaagcagcggctgcggctgccagccaccgccgccggttcatctaccgccgccggtgcatctgccacctccggttcacctgccacctccggtgcatctcccaccgccggtccacctgccgccgccggtcca

SEQ ID NO: 25984 - DNA, 253 bp, Zea mays
acgcaacgcaacagcaacaacaatttctaccagcactgagccaactagctgtggtgaaccctgtcgcctacttgcaacagcagttgcttgcatccaacccacttgctctggcaaacatagttgcataccaacaacaacaacaattgcaacagtttctaccagcgctcagtcaactagccatggtgaaccctgccgcctacctacaacagcaacaactgatttcatctagccctctcgctgtggttaatgcacc

SEQ ID NO: 25985 - DNA, 253 bp, Zea mays
gtttcagctatgccagttatgaggttatgggcttggatgccactgctctgtcttatggtgaccttgtcaagagggtccttcggtgctttggcccctcggagttttccgttgccgtgaccatcttcggcgggcgtggccatgccgggacatggggaaaggcacttggtgcagaggtctatgactgcaacaacatggtggagcaggagctgcctggaggcgggctcctcgtgtaccagagcttctgtgctgctga

SEQ ID NO: 25986 - DNA, 199 bp, Zea mays
tggatttctttgatccatcaaggaaagatgatttcctcttcatctctggcacaaagatgcgcactcttgccaagaaccgagagagtcccccagatggttttatgtgcccgggtggctggaaggtactcgttgaatactatgacagcttggtgccatctgagggcagcagcaagctgcgtgaaccaattgcagcctaaaa

SEQ ID NO: 25987 - DNA, 249 bp, Zea mays
aaattgttgcaacagattgtaccagctctaactcagctagctgtggcaaaccctgttgcctacttgcaacagctgcttccattcaaccaactaactatgtcgaactctgttgcgtacctacaacagcgacaacagttacttaatccattggcagtggctaacccattggtcgctgccttcctacagcagcaacaattgctgccatacaaccggttctctttgatgaatcctgtcttgtcgaggcagcaa

SEQ ID NO: 25988 - DNA, 255 bp, Zea mays
gttctagatcgcgatcggcctcagtcgcacatatctactatactatactctaggaagcaaggacaccaccgccatggcagccaagatgcttgcattgttcgctctcctagctctttgtgcaagcgccactagtgcgacccatattccagggcacttgccaccagtcatgccattgggtaccatgaacccatgcatgcagtactgcatgatgcaacaggggcttgccagcttgatggcgtgtccgtccctgatgct

SEQ ID NO: 25989 - DNA, 253 bp, Zea mays
acgaggccgaggactacgtggtggtcaagcacgcggcgctgttcacgtccaccgtgatgagccggctcctggcgcggcccaacgtgaagctgttcaacgccgtggcggtggaggacctgatcgtgcggcgggggcgcgtcggcggcgtggtcaccaactgggcgctcgtgtccatgaaccacgacacgcagtcgtgcatggaccccaacgtgatggaggccaaggtggtggtcagctcctgcggccacgacgg

SEQ ID NO: 25990 - DNA, 254 bp, Zea mays
aaaatcctcccaagagctgtactagatcatagtgtgcaggcatgcatttttacgggctattgggaggatgttggaacaatcaaatcattctttgatgcaaacttggccctcactgagcagccttccaagattgatttttacgatccaaaaacacctttcttcactgcaccccgatgcttgcctccgacgcaattggacaagtgcaagatgaaatatgcatttatctcagatggttgcttactgagagaatgcaa

SEQ ID NO: 25991 - DNA, 253 bp, Zea mays
agcagagcggcagtgcgtagagaggatcgtcgaacagaacggcgtggagatggtcatcgttctcgtcgtgtgcctggctctgtcagctggcagcgcctctgcagtgcagatgccctgcccctgcgcggggctgcagggcttgtacggcgctggcgccgcctgacgacgatgatgggcgccggcgggctgtgcccctacgcggagtgcctgaggcagccgcagtgcagcccgctggcggcggcgccctactacg

SEQ ID NO: 25992 - DNA, 248 bp, Zea mays
  unsure (1)..(248): unsure at all n locations
acagccgcatccaagcccgtgccagctgcagggaacctgcagcgnttggcagcaccccgatcctgggccagtgcgtcgagttcctgaggcatcagtgcagcccgacggcgacgccctactgctcgcctcagtgccagtcgttgcggcacagtgttgccagcagctcaggcaggtggagccgcagcaccggtaccaggcgatcttcggcttggtcctccagtccatcctgcagcagcagccgcaaagcg

SEQ ID NO: 25993 - DNA, 254 bp, Zea mays
cacgcaacagcaacaacagttcctaccagcactgagccacctagccatggtgaaccctgtcgcctacttgcaacagcagctgcttgcatccaacccacttgctctagcaaacgtagttgcaaaccagcaacaacaacaactgcaacagtttctgccagcgcttagtcaactagccatggtgaaccctgccgcctacctacaacagcaacaactgctttcatctagcccgctcgctgtggccaatgcacctacat

SEQ ID NO: 25994 - DNA, 251 bp, Zea mays
tgcagcagcagccgcaaagcggccaggtcgcggggctgttggcggcgcagatagcgcacaactgacggcgatgtgcggcctgcagcagccgactccatgcccctacgctgctgccggcggtgtcccccactgaagaaactatgtgctgtagtatagccgctggctagctagctagttgagtcatttagcggcgatgattgagtaataatgtgtcacgcatcaccatgggtggcagtgtcagtgtgagcaat

SEQ ID NO: 25995 - DNA, 249 bp, Zea mays
atacctacaacagcgacaacagttacttaatccactagcagtggctaacccattggtcgctgccttcctacagcagcaacaattgctgccatacaaccagttctctttgataaaccctgtcttgtcgaggcagcaacccatcgttggaggtgccatcttttagattacatatgagatgtactcgataatggtgccctcattccggcatgtgtttcctagaaataatcaatatattgattgagctttatc

SEQ ID NO: 25996 - DNA, 248 bp, Zea mays
gcaactgcaattctctttctgacaacgatcaacttcgtcctgtttcatttcctgacattcatccctcaagtgcaggtatcacagagggattttcaatgtgcgctggggactttgtagaggtctacagcgaggaaagccaagaatctgcatgggatgctgttgtaacttgctttttcctggatacggcacacaatatcgttgaatacatcgagatcatatcaaaagttctcaaggatggtggggtctgg

SEQ ID NO: 25997 - DNA, 248 bp, Zea mays
acaagtgctgctacggcgaccattttcccacaatgctcacaagctcctatagcttcccttcttcccccgtacctctcaccagcggtgtcttcggtatgtgaaaacccaattcttcaaccctataggatccaacaggcaatcgcagctggcatcttacctttatcacccttgttcctccaacaatcatcagccctattacagcagttacctttggtgcatttattggcacaaaacatcagggcacaaca

SEQ ID NO: 25998 - DNA, 249 bp, Zea mays
acacagttcctcccaccagttacttcaatgggcttcgaacacccagctgtgcaagcctataggctacaacaagcaattgcggcgagcgtcttacaacaaccaatttcccagttgcaacaacaatccttggcacatctaacaatacaaaccatcgcaacgcaacagcaacaacaattcctaccagcactgagccacctagccatggtgaaccctgccgcctacttgcaacagcagttgcttgcatcaaac

SEQ ID NO: 25999 - DNA, 247 bp, Zea mays
gctcaggcaggtggagccgcagcaccggtaccaggcgatcttcggcttggtcctccagtccatcctgcagcagcagccgcaaagcggccaggtcgcggggctgttggcggcgcagatagcgcacaactgacggcgatgtgcggcctgcagcagccgactccatgcccctacgctgctgccggcggtgtcccccactgaagaaactatgtgctgtagtatagccgctggctagctagctagttgagtc

SEQ ID NO: 26000 - DNA, 246 bp, Zea mays
acttcgaaggcattttccgtgctatggatggactttcagtgactattcgacttctggaccctcccctccacgagttccttccagaagggaacgtcgaggaaatcgtgcgtgaactgtgttctgagacgggagccaaccaggaggatgccctcgcacggatcgaaaagctttcggaagtaaacccgatgcttggcttccgtggctgcaggcttggtatatcgtaccctgagctaacagaaatgcaag

SEQ ID NO: 26001 - DNA, 238 bp, Zea mays
cagcaaagcggcagtgcgtagagaggatcgtcgaacagaacagcatgaagatggtcatcgttctcgtcgtgtgcctggctctgtcagctgccagcgcctctgcaatgcagatgccctgcccctgcgcggggctgcatggcttgtacggcgctggcgccggcctgacgacgatgatgggcgccggcgggctgtacccctacgcggagtacctgaagcagccgcagtgcagcccgctggc

SEQ ID NO: 26002 - DNA, 246 bp, Zea mays
cttcaatgggcttcgaacacccagcagtgcaagcctatacgctacaacaagcaattgcggcgagcgtcttacaacaaccaatttcccagttgcaacaacaatccttggcacatctaacaatacaaaccatcgcaacgcaacagcaacaacaattcctaccagcactgagccacctagccatggtgaaccctgccgcctacttgcaacagcagttgcttgcatcaaacccacttgctctggcaaacg

SEQ ID NO: 26003 - DNA, 246 bp, Zea mays
ccagcaacaacaatttcttccattcaaccaactgtctacactgaaccctgctgcttatttgcagcaacaactattaccattcagccagctagctactgcctactctcagcaacaacaacttcttccatttaaccaattggccgcactgaaccccgctgcttatttgcagcagcaaatactactaccatttagccagctagctgcagcaaaccgtgcttccttcttgacacagcaacagttgctgcc

SEQ ID NO: 26004 - DNA, 245 bp, Zea mays
attttgagcattcagaaacacaccaagcgaacgcactagcaacgacctaacaacaatggctaccaagatattagccctccttgcgcttcttgccctttttgtgtagcgcaacaaatgcgttcattattccacgatgctcacttgctcctagtgccattattccacagttcctctcaccagttacttcaatgggcttcgaacacctagctgtgcaagccaacatgctacaactagcgcttgcggcg

SEQ ID NO: 26005 - DNA, 236 bp, Zea mays
aactagcaacatagacagcacaatagtgtaccaacaatggcagccacaatattttgcctccttatgctccttggtctttctgcaagtgctgctacggcgaccattttcgcgcaatgctcgcaagctcctatagcttcccttcgtcccccgtacctctcaccagcggtgtcttcggtatgtgaatacccaattcttcaaccctacacgatccaacaggcaatcacagcttgcatctt

SEQ ID NO: 26006 - DNA, 245 bp, Zea mays
cccataccttccatcaatgatagcttcagtatgtgaaaacccagctcttcaaccctataggctccaacaagcaatcgcagcaagcaacatacctttatcacccttgtttcaacaatcgccagccctatctttggtgcagtcattggtacaaaccatcaaggcacagcagctgcagcaactcgtgctacctgtgatcaaccaagtagctctggcaaacctttctccctactatcagcaacaacaat

SEQ ID NO: 26007 - DNA, 244 bp, Zea mays
attgagaccaactagcaacatagaaagcacaatagtgtaccaacaatggcagccaaaatattttgcttccttatgctccttggtctttctgcaagtgctgctaccgcaaccattttcccacaatgctcacaagctcctatagcttcctttcttcccccatacctctcaccagcggtgtcttcagtatgtgaaaacccaattcttcaaccctacaggatccaacaggcaatcgcagcaggcatct

SEQ ID NO: 26008 - DNA, 114 bp, Zea mays
catttagcggcgatgattgagtaataatgtgtcacgcatcaccatgggtggcagtgtcagtgtgagcaatgacctgaatgaacaattgaaatgaaaagaaaaaagtattgttcc

SEQ ID NO: 26009 - DNA, 246 bp, Zea mays
ctaacaatacaagccatcacaacgcaacagcaacaacagttcctaccagcactgagccacctagccatggtgaaccctgccgcctacttgcaagagcagctgcttgcatccaacccacttgctctggcgaacgtagttgcaaaccagcaacaacaacagctacaacagtttctgccaacgctcagtcaactagccatggtgaaccctgccgcctacgtacaacaacaacaactgctttcatctagc

SEQ ID NO: 26010 - DNA, 241 bp, Zea mays
gcaacatagaaagcacaatagtgtaccaacaatggcagccaaaatattttgcctccttatgctccttggtctttctgcaagtgctgctacggcgaccattttcccgcaatgctcgcaagctcctatagcttcccttcttcccccgtacctctcaccagcggtgtcttcggtatgtgaaaacccaattcttcaaccctacaggatccaacaggcaatcacagctggcatcttacctttatca

SEQ ID NO: 26011 - DNA, 244 bp, Zea mays
aacaattgctgcaacagattgtaccagctctgactcagctagctgtggcaaaccctgctgcctacttgcaacagctgcttccattcaaccaactgactgtgtcgaactctgctgcgtacctacaacagcgacaacagttacttaatccactagcagtgcctaacccattggtcactgccttcctacagcagcaacaattgctaccatacagccagttctctttgatgaaccctgccttgtcgtg

SEQ ID NO: 26012 - DNA, 242 bp, Zea mays
caacgcaacagcaacaacagttcctagcagcactgagccacctagccatggtgaaccctgccgcctacttgcaagagcagctgcttgcatccaacccacttgctctggcgaacgtagttgcaaaccagcaacaacaacagctacaacagtttctgccaacgctcagtcaactagccatggtgaaccctgccgcctacgtacaacaacaacaactgctttcatctagcccgctcgctgtgggc

SEQ ID NO: 26013 - DNA, 243 bp, Zea mays
agcaaagcggcagtgcgtagagaggatcgtcgaacagaacagcatgaagatggtcatcgttctcgtcgtgtgcctggctctgtcagctgccagcgcctctgcaatgcagatgccctgcccctgcgcggggctgcagggcttgtacggcgctggcgccggcctgacgacgatgatgggcgccggcgggctgtacccctacgcggagtacctgaggcagccgcagtgcagcccgctggcggcggc

SEQ ID NO: 26014 - DNA, 126 bp, Zea mays
agtcccgctccaagaaggtttgctacaagtgtggtaagcccggtcattttattgctaaatgtcctatatctagtgacagtgaccgaggcgacgacaagaaggggagaagaaaggagaagaaaaggt

SEQ ID NO: 26015 - DNA, 148 bp, Zea mays
agcaacatagaaagcacaatagtgtaccaacaatggcagccaaaatattttgcttccttatgctccttggtctttctgcaagtgctgctaccgcaaccattttcccacaatgctcacaagctcctatagcttcctttcttcccccata

SEQ ID NO: 26016 - DNA, 124 bp, Zea mays
gacgtggacctgcccgttgacaagttcaccagcctcgccgagatgatcccggaacgcgccaggttcaacgacgacggcatgtaccgttccatcgacatctacttgaaggcgcatccgtatctga

SEQ ID NO: 26017 - DNA, 90 bp, Zea mays
aatggagaccaagatattttccctccttatgctccttgctctttctacatgtgttgctaacgcgacaattttccctcaatgctcacaagc

SEQ ID NO: 26018 - DNA, 95 bp, Zea mays
acctgaggcaccagtgcagcccggcggcgacgccctacggctcgccacagtgccaggcgctgcagcagcagtgctgccaccagatcaggcaggtg

SEQ ID NO: 26019 - DNA, 256 bp, Zea mays
ccaacaagcaacatagaaagtggaatccagtagcaacaacagagcaacaatggcgaccaagatattttccctccttatgctccttgctctttctgcatgtgttgctaacgcgacaattttccctcaatgctcacaagctcctatagcttcccttcttcccccataccttccatcaatgatagcttcagtatgtgaaaacccagctcttcagccctataggctccaacaagcaatcgcagcaagcaacataccttta

SEQ ID NO: 26020 - DNA, 143 bp, Zea mays
cagggaacatgcaccatccattatatttatggatgaaattgactctatcggatctgctagaatggagtctggaactggcaacggtgacagtgaagttcagcgtactatgcttgaacctctaaaccagcttgatggttttgaag

SEQ ID NO: 26021 - DNA, 136 bp, Zea mays
tacaccatgagcaacaccaaggacagagccatgagcaacaacatcaacaacaattccagggtcatgacaagcagcaacaaccacaacagcctcagcaatatcagcagggccaggaaaaatcacaacagcaacaatg

SEQ ID NO: 26022 - DNA, 140 bp, Zea mays
aagagtggtacttcttctaccagaaggaccgcaagtacccgacggggctgagggcgaaccgggccaccgaggccggttactggaaggcgacgggcaaggacaaggaggtctacaacgccgcggaaggggtggcggtactg

SEQ ID NO: 26023 - DNA, 144 bp, Zea mays
tagcaacatagaaagcacaatagtgtaccaacaatggcagccaaaatattttgcctccttatgctccttggtctttctgcaagtgctgctacggcgaccattttcccgcaatgctcgcaagctcctatagcttcccttcttccc

SEQ ID NO: 26024 - DNA, 141 bp, Zea mays
caacgacctaacaccaatggctaccaagatattagccctccttgcgcttcttgcccttttagtgagcgcaacaaatgcgttcattattccacagtgctcacttgctcctagtgccattattccacagttcctcccaccagt

SEQ ID NO: 26025 - DNA, 140 bp, Zea mays
aggggtattagtatcgcgccatgttggtatcattactttttacaatgaggtatttgttccagcagcgaacctgttcctggtgtcactaatatcatctggtactcatccagaagacaagaagaatgctagtggccaaattc

SEQ ID NO: 26026 - DNA, 175 bp, Zea mays
gatcagcaaagcggcagtgcgtagagaggatcgtcgaacagaacagcatgaagatggtcatcgttctcgtcgtgtgcctggctctgtcagctgccagcgcctctgcaatgcagatgccctgcccctgcgcggggctgcagggcttgtacggcgctggcgccggcctgacgacgat

SEQ ID NO: 26027 - DNA, 181 bp, Zea mays
acctatctttggtgcagtcattggtacaaaccatcagggcacagcagctgcagcaactcgtgctacctgtgatcaaccaagtagctctggcaaacctttctccctactctcagcaacaacaatttcttccattcaaccaactgtctacactgaaccctgctgcttatttgcagcaacaact

SEQ ID NO: 26028 - DNA, 158 bp, Zea mays
atcgtttggttattctgtgaagcagccaagccaggctattgttatgaaaatttgtcgtctgtaagcatgtgaacttccgatgttgccacatgctggatcagtctgaataagtaagtatgcagctctaggtggtcagctgcgtctaccacaatgagcat

SEQ ID NO: 26029 - DNA, 148 bp, Zea mays
ctggcgctcgctgcgaggacgcctccagtacaagcggcggctgtggctgccagacaccaccgtttcatctaccgcctccactctatatgccgcctccgttctatctgccgccgcagcagcagccgcagccatggcaataccccactca

SEQ ID NO: 26030 - DNA, 115 bp, Zea mays
gccatatgccctattgcaacaaccatccttagtgcatctgtatctccaaagaatcgcgacacaacaactacaacaacagttgctaccaacaatcaatcaagtagttgcagcgaac

SEQ ID NO: 26031 - DNA, 137 bp, Zea mays
ctagccatggtgaaccctgccgcctacctacaacagcaacaactgatttcatctagccctctcgctgtggttaatgcacctacatacctgcaacaacagttgctgcaacagattgtaccagctctgactcagctagc

SEQ ID NO: 26032 - DNA, 145 bp, Zea mays
ctggacgtcagcctagcaattagctcatcgactccagattggagaactcgacaccatgaaggtgctgatcgttgcccttgctctcctggcgctcgctgcgagcgccgcctccagtacaagcagcggctgtggctgccagacacca

SEQ ID NO: 26033 - DNA, 147 bp, Zea mays
aaccctataggctccaacaagcaatcgcagcaagcaacatacctttatcacccttgtttcaacaatcgccagccctatctttggtgcagtcattggtacaaaccatcaaggcacagcagctgcagcaactcgtgctacctgtgatca

SEQ ID NO: 26034 - DNA, 124 bp, Zea mays
atcgaagctgtcaggatgtccaagcgcgccggatggggagtgatggcaagccacaggagtggcgagacagaggacaccttcattgctgacctctcagttggcctgtctacgggccaaatcaaga

SEQ ID NO: 26035 - DNA, 136 bp, Zea mays
agcaatcacagctggcatcttacctttatcacccttgttcctccaacaatcatcagccctattacatcagttacctttggtgcatttattggcacaaaacatcagggcacaacaactacaacaacttgtgctagca

SEQ ID NO: 26036 - DNA, 128 bp, Zea mays
aactggcattggtgttggtgcagcttatcatggtcttcggcctattatagagtttatgacatttaatttctcgatgcaggctattgatcatatcatcaattcagctgccaagtcaaactatatgtcag

SEQ ID NO: 26037 - DNA, 118 bp, Zea mays
ccgcaccgggcgcagacgtgcgtgtgcgacatcaagttgttgttctcggtgcagcgtccctgcgcgcggacgtccattcggccctaaggacccatcgagcgaccgagcttgtcctctg

SEQ ID NO: 26038 - DNA, 239 bp, Zea mays
cagaaacacaccaagcgaacgcgactagcaacaacctaacaacaatggctaccaagatattatccctccttgcgcttcttgcgctttttgcgagcgcaacaaatgcgtccattattccacaatgctcacttgctcctagttccattattccacagttcctcccaccagttacttcaatggccttcgaacacccagctgtgcaagcctataggctacaacaagcgattgcggcgagcgtc

SEQ ID NO: 26039 - DNA, 213 bp, Zea mays
attttccctccttatgctccttgctctttctgcatgtgttgctaacgcgacaattttccctcaatgctcacaagctcctatagcttcccttcttcccccataccttccatcaatgatagcttcagtatgtgaaaacccagctcttcagccctataggctccaacaagcaatcgcagcaagcaacatacctttatcacccttgttgtttcaaca

SEQ ID NO: 26040 - DNA, 208 bp, Zea mays
gcagcaacagactacaaggtgcagctataactactatagcagtagctcaaatctaaaaaattgtcatgaattcctaaagcagcagtgcagccctttggtaatgccttttctccaatcacgtttgatacaaccaagtagctgccaggtattgcagcaacaatgttgtcatgatcttaggcagattgagccacaatacattcaccaagca

SEQ ID NO: 26041 - DNA, 261 bp, Zea mays
actagttgtggcaaaccctgctgcctacttgcaacagctgcttccattcaaccaactgactatgtcgaactctgctgcgtacctacaacagcgacaacagttacttaatccactagcagtggctaacccattggtcgctgccttcctacagcagcaacaattgctgccatacaaccagttctctttgataaaccctgtcttgtcgaggcagcaacccatcgttggaggtgccatcttttagattacatatgagatgtactc

SEQ ID NO: 26042 - DNA, 262 bp, Zea mays
caatggcgaccaagatattttccctccttatgctccttgctctttctacatgtgttgctaacgcgacaattttccctcaatgctcacaagctcctatagcttcccttcttcccccataccttccatcaattatagcttcaatatgtgaaaacccagctcttcaaccatataggcttcaacaagcaatcgcagcaagcaacatacctttatcgcccttgttgtttcaacaatcgccagccctatctttggtgcagtcattggt

SEQ ID NO: 26043 - DNA, 260 bp, Zea mays
tgtaaggacttgttcgtttgtgtcggattggtgggtcggaatgatttctagccgggttgcttttctaatttatataaactttaattagctggaataattccgggtgcaatccgatgtaaacgaacaaggtctaatagtttcaagacctttaaccaaatcatatggcggggaagctgcgtccagtaataggttaacaaggcagccagctggggtgtagaactctgtctgctctcagctgcatacacatagactgtaatggt

SEQ ID NO: 26044 - DNA, 259 bp, Zea mays
ccgccgccggtgcatctgccacctccggttcacctgccacctccggtgcatctcccaccgccggtccacctgccgccgccggtccacctgccaccgccggtccatgtgccgccgccggttcatctgccgccgccaccatgccactaccctactcaaccgccccggcctcagcctcatccccagccacacccatgcccgtgccaacagccgcatccaagcccgtgccagctgcagggaacctgcggcgttggcagcaccc

SEQ ID NO: 26045 - DNA, 260 bp, Zea mays
cattattccacagttcctccctccagttacttcaatgggcttcgaacacccagctgtgcaagcctataggctacaacaagcgcttgcggcgagcgtcttagaacaaccaattgcccaattacaacaacaatccttagcacatctaaccatacaaaccatcgcaacgcagcagcaacaagcactgagccacctagccgtggtgaaccctatcgcctacttgcaacaacagctgcttgcatccaacccacttgctttggcaa

SEQ ID NO: 26046 - DNA, 255 bp, Zea mays
cccgctgcttatttgcagcagcaaatactactaccatttagccagctagctgcagcaaaccgtgcttccttcttgacacagcaacagttgctgcctttctaccagcagtttgcggctaaccccgcaaccctcttacaactacaacaattgttgccctttgtccaacttgctttgacagaccgagcggcctcctaccaacaacacatcattggtggtgccctcttttagattgcttattagttgtaattcaataat

SEQ ID NO: 26047 - DNA, 252 bp, Zea mays
cagaccaactagcaacatagaaagcacaatagtgtaccaacaatggcagccaaaatattttgcttccttatgctccttggtctttctgcaagtgctgctaccgcaaccattttcccacaatgctcacaagctcctatagcttcctttcttcccccatacctctcaccagcggtgtcttcagtatgtgaaaacccaattcttcaaccctacaggatccaacaggcaatcgcagcaggcatcttacctttatca

SEQ ID NO: 26048 - DNA, 112 bp, Zea mays
caagaaagtacatttctagattcttatgtgcttctagtctccaaatgtggtcgatagttattttgctctaagatcgggagtaatgaggtataaatcatcgttgtggtgtgct

SEQ ID NO: 26049 - DNA, 254 bp, Zea mays
taagatgttcaacgaatggactctggaactgaaggccatggctgataggatcattaacatgaggcaacaactatttaatgcgctgaaatccagaggaacccctggtgattggagccatatcattaagcaaattgggatgtttactttcactgggctgaatagcgaacaagtcgcattcatgaggcaggaataccacatttatatgacatctgatgggaggatcagcatggccggtttgagcatgaggactgtgc

SEQ ID NO: 26050 - DNA, 87 bp, Zea mays
tctccgttctatctgccgccgcagcagcagccgcagccatggcaataccccactcatccaccgcagctaagcccgttccagcagttc

SEQ ID NO: 26051 - DNA, 251 bp, Zea mays
cccgctttgccaagtggcgtgctgttctcaagattggccccaacgagccgtcacagcttgccattgacctgaatgctcagggtctggctcgctacgccatcatctgccaggagaacggtctggtgccaattgttgagcctgagatccttgttgatggccctcatgacattgatcgctgcgcttacgtcactgagacagtccttgctgcctgctacaaggctctcaacgagcaccatgtcctcctggagggt

SEQ ID NO: 26052 - DNA, 252 bp, Zea mays
acggcggtggcggcggctacggtggtggcggcggcggctacggtggtggtggcggcggctacggcggtggcaaccgtggcggcggctacggcaactccgacgggaactggaggaactgagcggtggggcccgcgcggccaagttatcctgttcgctaccgtgttgtttaccctagtccagagtgtttatcttcgttcgtctcgtgtttgttgttgcccatctgtgtttttgattgaaggtcgctctgtgtca

SEQ ID NO: 26053 - DNA, 252 bp, Zea mays
atacctacaacagcgacaacagttacttaatccattggtagtggctaacccattggtcgccgccttcctacagcagcaacaattgctgccatacaaccagttctctttgatgaatcctgtcttgtcgaggcagcaacccatcgttggaggtgccatcttttagattacatatgagatgtactcgataatggtgccctcataccgacgtgtgtttcctagaaataatcaatatattgattgagatttatctcg

SEQ ID NO: 26054 - DNA, 252 bp, Zea mays
cagcagctgcagcaactcgtgctacctgtgatcaaccaagtagctctggcaaacctttctccctactctcagcaacaacaatttcttccattcaaccaactgtctacattgaaccgtgctgcttatttgcagcaacaactattaccattcagccagctagctactgcctactctcagcaacaacaacttcttccatttaaccaattggccgcactgaaccccgctgcttatttgcagcagcaaatactacta

SEQ ID NO: 26055 - DNA, 250 bp, Zea mays
cagcaacagcagtttcttccattcaaccaactaggttcattgaactctgcttcttatttgcaacaacaacaactaccattcagccagctacctgctgcctacccccagcaatttcttccattcaaccaactagcagcattgaactctcctgcttatttacagcagcaacaactactaccattcagccagctagctggtgtgagccctgctaccttcttgacacaaccacagttgttgccgttctaccagc

SEQ ID NO: 26056 - DNA, 249 bp, Zea mays
ctgcaacagttgctgccctttgtccaacttgctttgacaaaaccagcagccttctaccaacaacacatcattggcggtgccatcttttagattgcttattagttgtaattcaataatgaagttttttggctgatgtatgtggcctcctagaaataagaagttacatttccaaattctaatgtgctattggcctgcaagggtgttcgataattattttccctaagattgggaagcaagctataaatcatc

SEQ ID NO: 26057 - DNA, 250 bp, Zea mays
ccaacatagaaagcacaatagtgtaccaacaatggcagctaaaatattttgcctccttatgctccttggtctttctgcaagtgctgctacggcgaccattttcccacaatgctcacaagctcctatagcttcccttcttcccccgtacctctcaccaacggtgtcttcggtatgtgaaaacccaattcttcaaccctacaggatccaacaggcaatcgcagctggcatcttacctttatcacccttgttc

SEQ ID NO: 26058 - DNA, 246 bp, Zea mays
gccggcgggctgtacccctacgcggagtacctgacgcagccgcagtgcagcccgctggcggcggcgccctactacgccgggtgtgggcagccgagcgccatgttccagccgctccggcaacagtgctgccagcagcagatgaggatgatggacgtgcagtccgtcgcgcagagctgcagatgatgatgcagcttgagcgtgccgctgccgccagcagcagcctgtacgagccagctctgatgcagc

SEQ ID NO: 26059 - DNA, 251 bp, Zea mays
agccgctgccgccagcagcagcctgtacgagccagctctgatgcagcagcagcagcagctgctggcagcccagggtctcaaccccatggccatgatgatggcgcagaacatgccggccatgggtggactctaccagtaccagtaccagctgcccagctaccgcaccaacccctgtggcgtctccgctgccattccgccctactactgattcatgatatttgggaaatctcctctatccatccctctctatc

SEQ ID NO: 26060 - DNA, 251 bp, Zea mays
cgcaacagcaacaacagttcctaccagcactgagccacctagccatggtgaaccctgtcgcctacttgcaacagcagctgcttgcatccaacccacttgctctagcaaacgtagttgcaaaccagcaacaacaacaactgcaacagtttctgccagcgcttagtcaactagccatggtgaaccctgccgcctacctacaacagcaacaactgctttcatctagcccgctcgctgtggccaatgcacctaca

SEQ ID NO: 26061 - DNA, 253 bp, Zea mays
attttgcttccttatgctccttggtctttctgcaagtgctgctaccgcaaccattttcccacaatgctcacaagctcctatagcttcctttcttcccccatacctctcaccagcggtgtcttcagtatgtgaaaacccaattcttcaaccctacaggatccaacaggcaatcgcagcaggcatcttacctttatcacccttgttcctccaacaaccgtcagccctattacagcagttacctttggtgcatttg

SEQ ID NO: 26062 - DNA, 251 bp, Zea mays
atgatagtgaaattgattctgatgcacagtttgtttattcagtaagagaaagcttgcaattgtttctgcaagcttcagacctgtatgacccagaagatgtgctcgatgtcatagcagaatcagagctatggctggaaaaggcaatattgtataggaagatgggccaagagaatattgtacttcagatactagcattgaagctggaggatagtgaagctgctgagcagtattgcgcagagattggtcgagat

SEQ ID NO: 26063 - DNA, 252 bp, Zea mays
catcaacgggatcatgcggaaggcggtgcgagacgtggaggtgagaggccacctggtccccaagggctggcgcgtcctcgtctacttccgcgccgtccacctcgacgccgccgtccacgacgacccgcacgccttcaacccctggaggtggaaggagaggcccgacgtcgtagccatgagcggcttcaccccgttcggcggcggccagaagctgtgccctgggctcgacctggcaaggctcgaggcctccat

SEQ ID NO: 26064 - DNA, 249 bp, Zea mays
atccagtagcaacaatagagcaacaatggcgaccaagatactttccctccttatgctccttgctctttctgcatgtgttgctaacgcgacaattttccctcaatgctcacaagctcctatagcttcccttcttcccccataccttccatcaatgatagcttcagtatgtgaaaacccagctcttcaaccctataggctccaacaagcaatcgcagcaagcaacatacctttatcacccttgtttcaaca

SEQ ID NO: 26065 - DNA, 250 bp, Zea mays; identical to SEQ ID NO: 25478

SEQ ID NO: 26066 - DNA, 250 bp, Zea mays
atcctgttgactatggacgcccaccaaacgaggtgaatctagttgactggctaaaaatgatggttgccagcaggcggtcagaagaagtagtggatcccaccatagagacacgaccttcgacgagagctctaaagcgtgcacttttgacagctctgaggtgtgtggatccagattcagagaagagaccgaagatgggtcaagttgtccggatgctggaatcggatgatccaattcctcgaggggacagaag

SEQ ID NO: 26067 - DNA, 246 bp, Zea mays
cctgcgcggggctgcagggcttgtacggcgctggcgcggcctgacgacgatgatgggcgccggcgggctgtacccctacgcggagtacctgaggcagccgcagtgcagcccgctggcggcggcgccctactacgccgggtgtgggcagacgagcgccatgtaccagccgctccggcagcccagggtctcaaccccatggccatgatgatggcgcagaacatgccggccatgggtggactctaccag

SEQ ID NO: 26068 - DNA, 247 bp, Zea mays
gcacaatagtgtaccaacaatggcagccaaaatattttgcctccttatgctccttggtctttctgcaagtgctgctacggcgaccattttcccgcaatgctcgcaagctcctatagcttcccttcttcccccgtacctctcaccagcggtgtcttcggtatgtgaaaacccaattcttcaaccctacaggatccaacaggcaatcgcagctggcatcttacctttatcacccttgttcctccaacaa

SEQ ID NO: 26069 - DNA, 246 bp, Zea mays
gtgttgctaacgcgacaattttccctcaatgctcacaagctcctatagcttcccttcttcccccataccttccatcaattatagcttcagtatgtgaaaacccagctcttcaaccatataggcttcaacaagcaatcgcagcaagcaacatacctttatcgcccttgttgtttcaacaatcaccagccctatctttggtgcagtcattggtacaaaccatcagggcacaacagctgcagcaactcg

SEQ ID NO: 26070 - DNA, 244 bp, Zea mays
caaacacaccaagcgaacacattagcaacaacctaacaacaatggctaccaagatattatccctccttgcgcttcttgcgctttttgcgagcgcaacaaatgcgttcattattccacaatgctcacttgctccaagttccattattacacagttcctcccaccagttacttcaatgggcttcgaacacccagctgtgcaagcctataggctacaacaagcaattgcggcgagcgtcttacaaca

SEQ ID NO: 26071 - DNA, 244 bp, Zea mays
cggacgtacctggtggccgccgtgatgtctagcctcggagtcacgtccatggccgtcgccgccgtgtactatcgcttcagctggcaaatggagggcggcgaggtgccggtgatcgagacgctgggcacgttcgcgctctccgtcggggcggcggtcgggatggagttctgggcgcggtgggcgcaccgggcgctgtggcacgcctccctgtggcacatgcacgagtcgcaccaccggccgcgcg

SEQ ID NO: 26072 - DNA, 243 bp, Zea mays
caaagcggcagtgcgtagagaggatcgtcgaacagaacagcatgaagatggtcatcgttctcgtcgtgtgcctggctctgtcagctgccagcgcctctgcaatgcagatgccctgcccctgcgcggggctgcagggcttgtacggcgctggcgccggcctgacgacgatgatgggcgccggcgggctgtacccctacgcggagtacctgatgcagccgcagtgcagcccgctggcggcggcgc

SEQ ID NO: 26073 - DNA, 109 bp, Zea mays
gcgtagagaggatcgtcgaacagaacagcatgaagatggtcatcgttctcgtcgtgtgcctggctctgtcagctgccagcgcctctgcaatgcagatgctctgaccctg

SEQ ID NO: 26074 - DNA, 270 bp, Zea mays
gatcagcaaagcggcagtgcgtagagaggatcgtcgaacagaacagcatgaagatggtcatcgttctcgtcgtgtgcctggctctgtcagctgccagcgcctctgcaatgcagatgccctgcccctgcgcggggctgcagggcttgtacggcgctggcgccggcctgacgacgatgatgggcgccggcgggctgtacccctacgcggagtacctgaggcagccgcagtgcagcccgctggcggcggcgccctactacgccgggtgtgggc

SEQ ID NO: 26075 - DNA, 271 bp, Zea mays
gcagcaacagactacaaggtgcagctataactactatagcagtagctcaaatctaaaaaattgtcatgaattcctaaggcagcagtgcagccctttggtaatgccttttctccaatcacgtttgatacaaccaagtagctgccaggtattgcagcaacaatgttgtcatgatcttaggcagattgagccacaatacattcaccaagcaatctacaacatggttcaatccataatccaggaggagcaacaacaacaaccatgtgagttatgt

SEQ ID NO: 26076 - DNA, 220 bp, Zea mays
caacagctgcttccattcaaccaactgactgtgtcgaactctgctgcgtacctacaacagcgacaacagttacttaatccactagcagtgcctaacccattggtcactgccttcctacagcagcaacaattgctaccatacagccagttctctttgatgaaccctgccttgtcgtggcagcaacccatcgttggaggtgccatcttttagattacatatg

SEQ ID NO: 26077 - DNA, 217 bp, Zea mays
gccagctagctgcagcaagccgtgcttccttcttgacacagcaacagttgctgcctttctaccagcagtttgcggctaaccccgcaaccctcttacaactacaacaattgttgccctttgtccaacttgctttgacaaacccagcagcctcctaccaacaacacatcattggtggtgccctcttttagattgcttattagttgtaattcaataataa

SEQ ID NO: 26078 - DNA, 266 bp, Zea mays
ctgctgcttatttacaacaacaacaactactaccattcagccaactagctactgcctactctcagcagcaacaatttcttccatttaaccaattggccgcactgaacccctctgcttatttccagcagcaaatactactaccatttggccagctagctacaacaagccccacttcctttttgaaacaacaacaattgcttccgttctaccagcagtttgtggctaaccccgcaaccctcttacaactgcaacagttgctgcccttt

SEQ ID NO: 26079 - DNA, 265 bp, Zea mays
tagaagggtatctcatcgtcggcgcttccctacaagaagacgcctcctacctggctcaagaccgctgcctccgacgtggaggagatgatcacaaaggcagcgaagaagggacagatgccgtcgcagatcggcgtcctgctccgtgaccagcacggtatcccccttgtcaagagcgtcaccggcagcaagatcctccgcatcctcaaggcccatgggctggcaccagaaatccccgaggacctgtacttcctcatcaagaaggcgg

SEQ ID NO: 26080 - DNA, 262 bp, Zea mays
tcgaactctgctgcgtacctacaacagcgacaacagttacttaatccactagcggtggctaacccattggtcgctgccttcctacagcagcaacaattgctgccatacaaccagttctctttgatgaaccctgccttgtcgtggcagcaacccatcgttggtggtgccatcttttagattacatatgagatgtactcgataatggtgccctcatagcggcatgtgtttcctaaaaataatcaatatattgattgagctttat

SEQ ID NO: 26081 - DNA, 265 bp, Zea mays
tgcggcgttggcagcaccccgatcctgggccagtgcgtcgagtttctgaggcatcagtgcagcccgacggcgacgccctactgctcgcctcagtgccagtcgttgcggcagcagtgttgccagcagctcaggcaggtggagccgcagcaccggtaccaggcgatcttcggcttggtcctccagtccatcctgcagcagcagccgcaaagcggccaggtcgcggggctgttggcggcgcagatagcgcactaactgacggcgatgt

SEQ ID NO: 26082 - DNA, 184 bp, Zea mays
gcaattagctcatcgactccagattggagaactcgacaccatgaaggtgctaatcgttgcccttgctctcctggcgctcgctgcgagctccgcctccagtacaagctgcggctgtggctgccagacaccaccgtttcatctaccgcctccgttctatatgccgcctccgttctatctgccgccg

SEQ ID NO: 26083 - DNA, 117 bp, Zea mays
acattgcaacgcaacaacaacaacaacagtttctgccatcactgagccacctagccgtggtgaaccctgtcacgtacttgcaacagcagctgcttgcatccaacccacttggtctgg

SEQ ID NO: 26084 - DNA, 265 bp, Zea mays
acgggatcaactttgctgatggatctgtacaggtattagcggctacacaaatgcctgaagagccatctggatggttccagggtacagcagactctatcagaaaatttatctgggtactcgaggattattacagtcacaaatccattgacaacattgtaatcttgagtggcgatcagctttatcggatgaattacatggaacttgtgcagaaacatgtcgaggacgatgctgatatcactatatcatgtgctcctgttgatgagag

SEQ ID NO: 26085 - DNA, 267 bp, Zea mays
gagcgtcttacaacaaccaattgcccaattgcaacaacaattcctaccagcactgagccacctagccatggtgaaccctgccgcctacttgcaacagcagttgcttgcatcaaacccacttgctctggcaaacgtagttgcaaaccagccacaacaacagctgcaacagtttctgccagcgctcagtcaactagccatggtgaaccctgccgcctacctacaacagcaacaactgctttcatctagcccgctcgctgtggccaatgc

SEQ ID NO: 26086 - DNA, 258 bp, Zea mays
agcagttacctttggtgcatttattggcacaaaacatcagggcacaacaactacaacaacttgtgctagcaaaccttgctgcctactctcagcaacagcagtttcttccattcaaccaactagctgcattgaactctgcttcttatttgcaacaacaacaactaccattcagccagctacctgttgcctacccccagcaatttcttccattcaaccaactggcagcattgaactctcctgcttatttacagcagcaac

SEQ ID NO: 26087 - DNA, 256 bp, Zea mays
ctttggtgcatttattggcacaaaacatcagggcacaacaactaccacaacttgtgctagcaaaccttgctgcctactctcagcaacagcagtttcttccattcaaccaactaggttcattgaactctgcttcttatttgcaacaacaacaactaccattcagccagctacctgctgcctacccccagcaatttcttccattcaaccaactagcagcattgaactctcctgcttatttacagcagcaacaactact

SEQ ID NO: 26088 - DNA, 255 bp, Zea mays
ctgagaccaactagcaacatagaaagcacaatagtgtaccaacaatggcagccaaaatattttgcctccttatgctccttggtctttctgcaagtgctgctacggcgaccattttcccgcaatgctcgcaagctcctatagcttcccttcttcccccgtacctctcaccagcggtgtcttcggtatgtgaaaacccaattcttcaaccctacaggatccaacaggcaatcacagctggcatcttacctttatcac

SEQ ID NO: 26089 - DNA, 257 bp, Zea mays
tccgagcccaggagcagccccgcgccaggaggaagtttgttcttttaacaatatgtcgagggaggagaatgtttacatggccaagttggctgagcaggctgaaaggtatgaggagatggttgagtatatggagaaggtggctaagactgtagatgtggaagagctcactgttgaggagcgtaaccttctgtctgttgcatacaagaatgtgattggggctcgccgcgcttcatggcgcattgtttcttccattgaac

SEQ ID NO: 26090 - DNA, 217 bp, Zea mays
attttgagcattcagaaacacaccaagcgaacgctactagcaacgacctaacaacaatggctaccaagatattagccctccttgcgcttcttgccctttttgtgagcgcaacaaatgcgttcattattccacaatgctcacttgctcctagtgccattattccacagttcctctcaccagttacttcaatgggcttcgaacacctagctgtgcaagc

SEQ ID NO: 26091 - DNA, 119 bp, Zea mays
ctagtatagccgctggctagctagctagttgagtcatttagcggcgatgattgagtaataatgtgtcacgcatcaccatgggtggcagtgtcagtgtgagcaatgacctgaatgaacaa

SEQ ID NO: 26092 - DNA, 260 bp, Zea mays
cgccgccggtgcatctgccacctccggttcacctgccacctccggtgcatctcccaccgccggtccacctgccgccgccggtccacctgccaccgccggtccatgtgccgccgccggttcatctgccgccgccaccatgccactaccctactcaaccgccccggcctcagcctcatccccagccacacccatgcccgtgccaacagccgcatccaagcccgtgccagctgcagggaacctgcggcgttggcagcaccccg

SEQ ID NO: 26093 - DNA, 258 bp, Zea mays
gcgacaacgggaccacggtgttcgacgacgtgctccgtgcggggcagctgctcatcgtaccccagggctacctcgtcgccaccaaggcgcagggagaaggcttccagtacatcgccttcgagacgaaccctgacaccatggtcagccacgttgccgggaagaactccgtcctgagcgacttgccggccgccgtcatcgccagctcgtatgccatctccatggaggaagctgcagagctcaagaacggtaggaagcatg

SEQ ID NO: 26094 - DNA, 257 bp, Zea mays
caacaatccttggcacatctaaccctacaaaccattgcaacgcaacaacaacaacaacaacagtttctgccatcactgagccacctagccgtggtgaaccctgtcacctacttgcaacagcagctgcttgcatccaacccacttgctctggcgaacgtagctgcataccagcaacaacaacagctgcaacagtttatgccagtgctcagtcaactagccatggtgaaccctgccgtctacctacaactactttcatc

SEQ ID NO: 26095 - DNA, 253 bp, Zea mays
caacggcaggggtggtgacggcggcacaagggcggcggcagcaagggcagcaactaggccagtggctaggcaccactggtttttagatgttagtgtagattagtagtagaaatagtattaacaaaataatgtagtagtagttagtagtatagagtagtggaatgtaatgtagtagtagtagggaaagcatcaactcataacgagttgatttgtaagttctgtagcttcgctttatgaagaatgattttgtcta

SEQ ID NO: 26096 - DNA, 254 bp, Zea mays
attggatattacgagtcactggtttcaaatgtacagttctttcttgtcaggtaagactagccacaaggatgtaaaacacacaggcaattggcttctgaaattatattatgggtacaggccattcatggccttctgctgtgtttcttgtgaggttttatatattttcctgtttctctttgctgatgaggagtcaacaagcttgcttagtgtatgcaaaggcatcctgaaccaaagtcccgtcgttatcttggtgt

SEQ ID NO: 26097 - DNA, 250 bp, Zea mays
cggcaagcagctggaggatggtcgcaccttggctgactacaacatccagaaggagagcaccctccacctggtgctccgcctcaggggtggtatgcagatttttgtgaagacattgactggcaagaccatcaccttggaggtggagtcgtctgacacaatcgataatgtcaaagccaagatccaggacaaggagggcattccaccggaccagcagcgcctgatctttgctggcaagcagctggaggatggc

SEQ ID NO: 26098 - DNA, 253 bp, Zea mays
atacaaaccatcgcaacgcaacagcaacaacaattcctaccagcactgagccacctagccatggtgaaccctgccgcctacttgcaacagcagttgcttgcatcaaacccacttgctctggcaaacgtagttgcaaaccagccacaacaacagctgcaacagtttctgccagcgctcagtcaactagccatggtgaaccctgccgcctacctacaacagcaacaactgctttcatctagcccgctcgctgtgg

SEQ ID NO: 26099 - DNA, 254 bp, Zea mays
ctatactatactctaggaagcaaggacaccaccgccatggcagccaagatgcttgcattgttcgctctcctagctctttgtgcaagcgccactagtgcgacccatattccagggcacttgccaccagtcatgccattgggtaccatgaacccatgcatgcagtactgcatgatgcaacaggggcttgccagcttgatggcgtgtccgtccctgatgctgcagcaactgttggccttaccgcttcagacgatgcc

SEQ ID NO: 26100 - DNA, 198 bp, Zea mays
agcaacatagaaagcacaatagtgtaccaacaatggcagccaaaatattttgcttccttatgctccttggtctttctgcaagtattgctaccgcaaccattttcccacaatgctcacaagctcctatagcttcccttcttcccccatacctctcaccagcggtgtcttcaatgtgtgaaaccccaattgttcaaccct

SEQ ID NO: 26101 - DNA, 253 bp, Zea mays
agcaaagcggcagtgcgtagagaggatcgtcgaacagaacagcatgaagatggtcatcgttctcgtcgtgtgcctggctctgtcagctgccagcgcctctgcaatgcagatgccctgcccctgcgcggggctgcagggcttgtacggcgctggcgccggcctgacgacgatgatgggcgccggcgggctgtacccctacgcggagtacctgaggcagccgcagtgcagcccgctggcggcggcgccctactac

SEQ ID NO: 26102 - DNA, 251 bp, Zea mays
ctagcaacatagaaagcacaatagtgtaccaacaatggcagccaaaatattttgcctccttatgctccttggtctttctgcaagtgctgctacggcgaccattttcccgcaatgctcgcaagctcctatagcttcccttcttcccccgtacctctcaccagcggtgtcttcggtatgtgaaaacccaattcttcaaccctacaggatccaacaggcaatcgcagctggcatcttacctttatcacccttgt

SEQ ID NO: 26103 - DNA, 251 bp, Zea mays
aaagccactcccaaacccccgcttccagaaccttctcgaagctccccgccgcctcctccactcgcaccgatggcgaaggaaccaatgcgcgtgctcgtcactggcgccgcaggacaaattggatatgccctggttcccatgattgctaggggtgttatgcttggtgcagaccagcctgttattctgcacatgcttgacattccgccagcagctgaagcccttaatggtgttaagatggagttggttgatgc

SEQ ID NO: 26104 - DNA, 249 bp, Zea mays
gcacattagcaacaacctaacaacaatggctaccaagatattatccctccttgcgcttcttgcgctttttgcgagcgcaacaaatgcgttcattattccacaatgctcacttgctccaagttccattattacacagttcctcccaccagttacttcaatgggcttcgaacacccagctgtgcaagcctataggctacaacaagcaattgcggcgagcgtcttacaacaaccaatttcccagttgcaaca

SEQ ID NO: 26105 - DNA, 249 bp, Zea mays
gtttctgccatcactgagccacctagccgtggtgaaccctgtcacctacttgcaacagcagctgcttgcatccaacccacttgctctggcgaacgtagctgcataccagcaacaacaacagctgcaacagtttatgccagtgctcagtcaactagccatggtgaaccctgccgtctacctacaactactttcatctagcccgctcgcggtgggcaatgcacctacgtacctacaacaacagttgctgca

SEQ ID NO: 26106 - DNA, 250 bp, Zea mays
acaagctcctatagcttcccttcttcccccataccttccatcaatgatagcttcagtatgtgaaaacccagctcttcagccctataggctccaacaagcaatcgcagcaagcaacatacctttatcacccttgttgtttcaacaatcgccagccctatctttggtgcagtcattggtacaaaccatcagggcacagcagctgcagcaactcgtgctacctgtgatcaaccaagtagctctggcaaacctt

SEQ ID NO: 26107 - DNA, 254 bp, Zea mays
ccacaatgctcacttgctcctagtgccattattccacagttcctccctccagttacttcaatgggcttcgaacacccagctgtgcaagcctacaggctacaacaagcgcttgcggcgagcgtcttacaacaaccaattgcccaattacaacaacaatccttggcacatctaaccatacaaaccatcgcaacgcaacagcaacaacaatttctaccagcactgagccaactagctgtggtgaaccctgtcgccta

SEQ ID NO: 26108 - DNA, 256 bp, Zea mays
cgcagtgcgtagagaggatcgtcgaacagaacagcatgaagatggtcatcgttctcgtcgtgtgcctggctctgtcagctgccagcgcctctgcaatgcagatgccctgcccctgcgcggggctgcagggcttgtacggcgctggcgccggcctgacgacgatgatgggcgccggcgggctgtacccctacgcggagtacctgaggcagccgcagtgcagcccgctggcggcggcgccctactacgccgggtgtgg

SEQ ID NO: 26109 - DNA, 67 bp, Zea mays
ccataataaagttttttggatgatgtatgtggccaaccagaaataagaagttacatttccagattct

SEQ ID NO: 26110 - DNA, 250 bp, Zea mays
aaaaatcacaacagcaacaatgtcattgccaggagcagcaacagactacaaggtgcagctataactactatagcagtagctcaaatctaaaaaattgtcatgaattcctaaggcagcagtgcagccctttggtaatgccttttctccaatcacgtttgatacaaccaagtagctgccaggtattgcagcaacaatgttgtcatgatcttaggcagattgagccacaatacattcaccaagcaatctacaa

SEQ ID NO: 26111 - DNA, 250 bp, Zea mays
ccttgctctttctgcatgtgttgctaacgcgaccatttttcctcaatactcacaagctcctatagctgcccttcttcccccataccttccatcaatgaccgctttagtatgtgaaaacccagcccttcaaccctacaggatccagcaagcaatcgcaacaagcaacttacctttatcacacctgttctttcaacaatcgccagccctatctttggtgcagtcattggtacaaaccatcagggcagaacag

SEQ ID NO: 26112 - DNA, 247 bp, Zea mays
agaaggggaagctctacattcatttcacagtggagttccccgactcgctggcgccagagcagtgcaaggctctcgagtcggtacttccgccaaagccttcgtccaagctgacagacatggagatcgatgaatgcgaggagacgaccatgcatgatgtgaacaacatcgaggaagagatgcgcaggaagcaggctcatgctgctcaggaggcctacgaggaggatgacgagatgcctggcggagccaa

SEQ ID NO: 26113 - DNA, 245 bp, Zea mays
agcaaagcggcagtgcgtagagaggatcgtcgaacagaacagcatgaagatggtcatcgttctcgtcgtgtgcctggctctgtcagctgccagcgcctctgcaatgcagatgccctgcccctgcgcggggctgcagggcttgtacggcgctggcgccggcctgacgacgatgatgggcgccggcgggctgtacccctacgcggagtacctgaggcagccgcagtgcagcccgctggcggcggcgc

SEQ ID NO: 26114 - DNA, 246 bp, Zea mays
gatcagcaaagcggcagtgcgtagagaggatcgtcgaacagaacagcatgaagatggtcatcgttctcgtcgtgtgcctggctctgtcagctgccagcgcctctgcaatgcagatgccctgcccctgcgcggggctgcagggcttgtacggcgctggcgccggcctgacgacgatgatgggcgccggcgggctgtacccctacgcggagtacctgaggcagccgcagtgcagcccgctggcggcgg

SEQ ID NO: 26115 - DNA, 245 bp, Zea mays
ccatggaggcggcacagcagccgccgccgcatggaggaggaggaggacaggggggctactactacccctgcagccgggcaggagaaggataccaaacgcagatgtatccaccgtgtcgtcccggcaccaccgggccaaggatcggccgcgtgaggcttacgaaggcccgggagtacgccgcggggttgccgatgatgtgccggctgtcggagccccaggagtgcagcatcttctccggcggcgac

SEQ ID NO: 26116 - DNA, 245 bp, Zea mays
ggccgccgtacagaattctgtgtgaaggcccatgccttgaagggccaatcttgtgttcaccggaggctaatcgtgggggatggatttgtgacaattacaaaaggtgaaagtattagaagtttctttgagcatgctgaagaagctgaggaagaggatgaagatgatgtagtggacagagacagcaatgaccctgatggtgatatcgctcatccacaaaagcatgctaagagccctgaacttgcaag

SEQ ID NO: 26117 - DNA, 247 bp, Zea mays
caacaagcaacatagaaagtggaatccagtagcaacaacagagcaacaatggcgaccaagatattttccctccttatgctccttgctctttctgcatgtgttgctaacgcgacaattttccctcaatgctcacaagctcctatagcttcccttcttcccccataccttccatcaatgatagcttcagtatgtgaaaacccagctcttcagccctataggctccaacaagcaatcgcagcaagcaaca

SEQ ID NO: 26118 - DNA, 251 bp, Zea mays
aatgtcaccaatggtcttgccgagcatgatgtcgcaaatgatgatgccacaatgtcactgcgacgccgtctcgcagattatgctgcaacagcagttaccattcatgttcaacccaatggccatgacgattccacccatgttcttacagcaaccctttgttggtgctgcattctagatagaaatatttgtgttgtatcgaataatgagttgacatgccatcgcgtgtgactcattattaacaataaaacaag

SEQ ID NO: 26119 - DNA, 254 bp, Zea mays
gaacccgatcgacaccatgagggtgttgctcgttgccctcgctctcctggctctcgctgcgagcgccacctccacgcatacaagcagcggctgcggctgccagccaccgccgccggttcatctaccgccgccggtgcatctgccacctccggttcacctgccacctccggtgcatctcccaccgccggtccacctgccgccgccggtccacctgccaccgccggtccatgtgacgccgccggttcatctgccgc

SEQ ID NO: 26120 - DNA, 250 bp, Zea mays
tccaccgcagctaagcccgtgccagcagttcggatcctgcggcgtcggcagcgtcggcagcccgttcctgggccagtgcgtcgagttcctgaggcaccagtgcagcccggcggcgacgccctacggctcgccacagtgccaggcgctgcagcagcagtgctgccaccagatcaggcaggtggagccgctgcaccggtaccaggcgacatacggtgtggtcctgcagtccttcctgcagcagcagccgcag

SEQ ID NO: 26121 - DNA, 245 bp, Zea mays
aacagttgctgcaacaaattgtaccagctctgactcagctagctgtggcaaaccctgctgcctacttacaacagttgcttccattcaaccaactggctgtgtcaaactctgctgcgtacctacaacagcgacaacagttacttaatccattggcagtggctaacccattggtcgctaccttcctgcagcagcaacaacaattgctgccatacaaccagttctctttgatgaaccctgccttgcag

SEQ ID NO: 26122 - DNA, 240 bp, Zea mays
ctgcaggacctgggcgttggcagcaccccgatcctgggccagtgcgtcgagttcctgaggcatcagtgcagcccgacggcgacgccctactgctcgcctcagtgccagtcgttgcggcagcagtgttgccagcagctcaggcaggtggagccgcagcaccggtaccaggcgatcttcggcttggtcctccagtccatcctgcagcagcagccgcaaagcgctcaggtcgcggggctgttg

SEQ ID NO: 26123 - DNA, 242 bp, Zea mays
agatcagcaaagcggcagtgcgtagagaggatcgtcgaacagaacagcatgaagatggtcatcgttctcgtcgtgtgcctggctctgtcagctgccagcgcctctgcaatgcagatgccctgcccctgcgcggggctgcagggcttgtacggcgctggcgccggcctgacgacgatgatgggcgccggcgggctgtacccctacgcggagtacctgaagcagccgcagtgcagcccgctggc

SEQ ID NO: 26124 - DNA, 243 bp, Zea mays
agcaacatagaaagcacaatagtgtaccaacaatggcagccaaaatattttgcctccttatgctccttggtctttctgcaagtgctgctacggcgaccattttcccgcaatgctcgcaagctcctatagcttcccttcttcccccgtacctctcaccagcggtgtcttcggtatgtgaaaacccaattcttcaaccctacaggatccaacaggcaatcgcagctggcatcttacctttatcac

SEQ ID NO: 26125 - DNA, 240 bp, Zea mays
caatgggcttcgaacacccagctgtgcaagcctataggctacaacaagcaattgcggcgagcgtcttacaacaaccaatttcccagttgcaacaacaatccttggcacatctaacaatacaaaccatcgcaacgcaacagcaacaacaattcctaccagcactgagccacctagccatggtgaaccctgccgcctacttgcaacagcagttgcttgcatcaaacccacttgctctggcaa

SEQ ID NO: 26126 - DNA, 237 bp, Zea mays
agctcatcgactccagattggagaactcgacaccatgaaggtgctgatcgttgcccttgctctcctggcgctcgctgcgagcgcgcctccagtacaagcagcggctgtggctgccagacaccaccgtttcatctaccgcctccgttctatatgccgcctccgttctatctgccgccgcagcagcagccacttccatggcaataccccactcaaccaccgcagctaagcccgtgccag

SEQ ID NO: 26127 - DNA, 241 bp, Zea mays
gttctatatgccgcctccgttctatctgccgccgcagcagcagccgcagccatggcaataccccactcaaccaccgcagctaagcccgtgccagcagttcggatcctgcggcgtcggcagcgtcggcagcccgttcctgggccagtgcgtcgagttcctgaggcaccagtgcagcccggcggcgacgccctacggctcgccacagtgccaggcgctgcagcagcagtgctgccaccagatc

SEQ ID NO: 26128 - DNA, 238 bp, Zea mays
gcgacgcactagcaacgacctaacaccaatggctaccaagatattagccctccttgcgcttcttgcccttttagtgagcgcaacaaatgcgttcattattccacagtgctcacttgctcctagtgccagtattccacagttcctcccaccagttacttcaatgggcttcgaacatccagccgtgcaagcctacaggctacaactagcgcttgcggcgagcgccttacaacaaccaatt

SEQ ID NO: 26129 - DNA, 238 bp, Zea mays
attgagaccaactagcaacatagaaagcacaatagtgtaccaacaatggcagccaaaatattttgcctccttatgctccttggtctttctgcaagtgctgctacggcgaccattttcccgcaatgctcgcaagctcctatagcttcccttcttcccccgtacctctcaccagcggtgtcttcggtatgtgaaaacccaattcttcaaccctacaggttccaacaggcattcacagctg

SEQ ID NO: 26130 - DNA, 242 bp, Zea mays
gtcaccggcaccggcatcaacccggccaggagcctgggcgccgccgtcatctacaacaaggacaagccctgggacgaccactggatcttctgggtgggccctctcgtgggcgctgccatcgcggccttctaccaccagtacatcctccgggctggcgccatcaaggccctcggctccttcaggagcaacgcgtgatgagcggggcttggctgtggagcaatggcgggcgacctacgggcggg

SEQ ID NO: 26131 - DNA, 237 bp, Zea mays
caacaacaattgcttccgttctaccagcagtttgtggctaaccccgcaaccctcttacaactgcaacagttgctgccctttgtccaacttgctttgacaaacccagcagccttctaccaacaacacatcattggcggtgccatcttttagattgcttattagttgtaattcaataatgaagttttttggctgatgtatgtggcctcctagaaataagaagttacatttccaaattct

SEQ ID NO: 26132 - DNA, 248 bp, Zea mays
acaacaacaacaaccgcagcaccaacaacaacaacaacaacaacagcaccaacaacaacatcaatgtgaaggccaacaacaacatcaccaacaatcacaaggccatgtgcaacaacacgaacagagccatgagcaacaccaaggacagagccatgagcaacaacatcaacaacaattccagggtcatgacaagcagcaacaaccacaacagcctcagcaatatcagcagggccaggaaaaatcacaac

SEQ ID NO: 26133 - DNA, 157 bp, Zea mays
ccaggtcaagagaacctgctatgctcaggcatcccagattcggcagattcgccgcaagatggttgagattatgatcaaccaggcttctacatgtgaccttaaagaacttgtttctaagttcattccggaagttattggcaaagagattgagaagtct

SEQ ID NO: 26134 - DNA, 167 bp, Zea mays
caatagtgtaccaacaatggcagctaaaatattttgcctccttatgctccttggtctttctgcaagtgctgctacggcgaccattttcccacaatgctcacaagctcctatagcttcccttcttcccccgtacctctcaccaacggtgtcttcggtatgtgaaaacc

SEQ ID NO: 26135 - DNA, 176 bp, Zea mays
cccaattgcaacaacaatccttggcacatctaaccctacaaaccattgcaacgcaacaacaacaacaacagtttctgccatcactgagccacctagccgtggtgaaccctgtcacctacttgcaacagcagctgcttgcatccaacccacttgctctggcgaacgtagctgcatac

SEQ ID NO: 26136 - DNA, 259 bp, Zea mays
cctgtacttgcacacgaaattataaagagaaatgaagaatccggtggggtcaagatcaacttcaagggatattcactatgtaatcccgctattgatgttgacatagagaacaatgcacatgttccatatgcatttcgaatgggtttgatttcagatgaattgtttcagagtttagttactacatgtaatggaaagtattggaataactccaatccatcatgccaagagaacatggagcaattttatactcaaatcaaag

SEQ ID NO: 26137 - DNA, 180 bp, Zea mays
agaaagtggaatccagtagcaacaacagagcaacaatggcgaccaagatattttccctccttatgctccttgctctttctgcatgtgttgctaacgcgacaattttccctcaatgctcacaagctcctatagcttcccttcttcccccataccttccatcaatgatagcttcagtatgtg

SEQ ID NO: 26138 - DNA, 255 bp, Zea mays
cgtcatacatacagaggtttctttgccaggccatataatatgtacaaaagatatatgtacccagctacatcatattattatctccactttctcaatcagcttgatgcctgacgactccaagatctccaatgcttcacgcacgcaaatgcagagtcagtaccgttgcgcgtcatggtaattccacaagggcaaacatgaaaactaagtagcacctggaatgtagatttccggttgcagaggcctgatcactccgtt

SEQ ID NO: 26139 - DNA, 251 bp, Zea mays
gacaccaccgccatggcagccaagatgcttgcattgttcgctctcctagctctttgtgcaagcgccactagtgcgacccatattccagggcacttgccaccagtcatgccattgggtaccatgaaccatgcatgcagtactgcatgatgcaacaggggcttgccagcttgatggcgtgtccgtccctgatgctgcagcaactgttggccttaccgcttcagacgatgccagtgatgatgccacagatgatg

SEQ ID NO: 26140 - DNA, 250 bp, Zea mays
tctatatgccgcctccgttctatctgccgccgcagcagcagccgcagccatggcaataccccactcaaccaccgcagctaagcccgtgccagcagttcggatcctgcggcgtcggcagcgtcggcagcccgttcctgggccagtgcgtcgagttcctgaggcaccagtgcagcccggcggcgacgccctacggctcgccacagtgccaggcgctgcagcagcagtgctgccaccagatcaggcaggtgga

SEQ ID NO: 26141 - DNA, 252 bp, Zea mays
ggacgtcagcctagcaattagctcatcgactccagattggagaactcgacaccatgaaggtgctgatcgttgcccttgctctcctggcgctcgctgcgagcgccgcctccagtacaagcggcggctgtggctgccagacaccaccgtttcatctaccgcctccgttctatatgccgcctccgttctatctgccgccgcagcagcagccgcagccatggcaataccccactcaaataccgcagctaagcccgt

SEQ ID NO: 26142 - DNA, 144 bp, Zea mays
aatctgagaagtttgatggaaagggtatttcagaacaaactgacaccaagttgacagagaaggccattgttttctctcaatggactagaatgctagacttgcttgaagtccatttgaaagcttctcatgtgacatatcgaaggc

SEQ ID NO: 26143 - DNA, 266 bp, Zea mays
ctggcatcttacctttatcacccttgttcctccaacaatcatcagccctattacagcagttacctttggtgcatttattggcacaaaacatcagggcacaacaactacaacaacttgtgctagcaaaccttgctgcctactctcagcaacagcagtttcttccattcaaccaactagctgcattgaactctgcttcttatttgcaacaacaacaactaccattcagccagctatctgctgcctacccccagcaatttcttccattc

SEQ ID NO: 26144 - DNA, 184 bp, Zea mays
cgtcacctagcaattagctcatcgactccagattggagaactcgacaccatgaaggtgctgatcgttgcccttgctctcctggcgctcgctgcgagcgccgcctccagtacaagcggcggctgtggctgccagacaccaccgtttcatctaccgcctccgttctatatgccgcctccgttctat

SEQ ID NO: 26145 - DNA, 264 bp, Zea mays
agcgaggatgacatccacaagagcgtaaagtacaatgtgtgggcaagcacaaccaacggaaacaagaagcttgatgctgcttaccaagaagctcagtcaaagggatctgcatgccctatattcttgttcttctcagtgaatacaagtgggcagtttgttggtgttgctgaaatgactggcgccgttgattttgagaaaaccctagagtattggcaacaggacaagtggaacggctccttctctgttaagtggcacattgtcaag

SEQ ID NO: 26146 - DNA, 262 bp, Zea mays
attagctcatcgactccagattggagaactcgacaccatgaaggtgctgatcgttgcccttgctctcctggcgctcgctgcgagcgccgcctccagtacaagcggcggctgtggctgccagacaccaccgtttcatctaccgcctccgttctatatgccgcctccgttctatctgccgccgcagcagcagccgcagccatggcaataccccactcaaccaccgcagctaagcccgtgccagcagttcggatcctgcggcgtc

SEQ ID NO: 26147 - DNA, 259 bp, Zea mays
atccaatccagatcagcaaagcggcagtgcgtagagaggatcgtcgaacagaacagcatgaagatggtcatcgttctcgtcgtgtgcctggctctgtcagctgccagcgcctctgcaatgcagatgccctgcccctgcgcggggctgcagggcttgtacggcgctggcgccggcctgacgacgatgatgggcgccggcgggctgtacccctacgcggagtacctgaggcagccgcagtgcagcccgctggcggcggcgc

SEQ ID NO: 26148 - DNA, 220 bp, Zea mays
gggaaacattaacgccttcttgcaacagcaacagttgctaccattctacccacaggatgtggcaaacaatgtcgccttcttacaacaacaacaattgctgccatttaaccaacttgctttgacgaatcctaccaccttattgcagcagcccaccattggtggtgccatcttctagatttttttatgctttatactgtaataataaagttctcatactgat

SEQ ID NO: 26149 - DNA, 251 bp, Zea mays
cacagcaagcatcttacggtcgttagcattgaccgtccaacaaccatatgccctattgcaacaaccatccttagtgaatctgtatctccaaagaatcacagcacaacaactacaacaacggttgcttccaacaattaatcaagtagttgcagcgaaccttgctgcttaccttcagcaacaacaatttcttccattcaatcaactagctggggtgaaccctgctgcttacttgcaggcacaacagctactac

SEQ ID NO: 26150 - DNA, 245 bp, Zea mays
tgcagcaactcgtgctacctctgatcaaccaagtagctctggcaaacctttctccctactctcagcaacaacaatttcttccattcaaccaactgtctacactgaaccctgctgcttatttgcagcaacaactattaccatttagccagctagctactgcctactctcagcaacaacaacttcttccatttaaccaattggccgcactgaaccccgctgcttatttgcagcagcaaatactacta

SEQ ID NO: 26151 - DNA, 243 bp, Zea mays
gtgcgtagagaggatcgtcgaacagaacagcatgaagatggtcatcgttctcgtcgtgtgcctggctctgtcagctgccagcgcctctgcaatgcagatgccctgcccctgcgcggggctgcagggcttgtacggcgctggcgccggcctgacgacgatgatgggcgccggcgggctgtacccctacgcggagtacctgaggcagccgcagtgcagcccgctggcggcggcgccctactacgc

SEQ ID NO: 26152 - DNA, 246 bp, Zea mays
aaagcacaatagtgtaccaacaatggcagccaaaatattttgcctccttatgctccttggtatttctgcaagtgctgctacggcgaccattttcccgcaatgctcacaagctcctatagcttcccttcttcccccgtacctctcaccagcggtgtcttcggtatgtgaaaacccaattcttcaaccctacaggatccaacaggcaatcgcagctggcatcttacctttatcacccttgttcctcca

SEQ ID NO: 26153 - DNA, 242 bp, Zea mays
attgagtttgaagttgctgattgcaccacaaagacatacccagaccacatgtttgatgtcatctacagtcgtgacactatccttcatatacaagataaaccctccttgtttaaaagtttcttcaaatggctgaaacctgggggaaaggttctaatcagtgattactgcaagagtcctggaaaaccatcagaagagtttgcaacatacattaagcagaggggttatgatctccatgatgtgga

SEQ ID NO: 26154 - DNA, 148 bp, Zea mays
tttgagcattcagaaacacaccaagcgaacgctactagcaacgacctaacaacaatggctaccaagatattagccctccttgcgcttcttgccctttttgtgagcgcaacaaatgcgttcattattccacaatgctcacttgctccta

SEQ ID NO: 26155 - DNA, 260 bp, Zea mays
ggaaccctagcaccgccgcatccgcagccatgggtatcgacctcgttgccggtgggaggaacaagaagaccaagcgcacagcgccgaagtccgacgatgtttatctcaagctccttgtcaagctctaccgtttcttggtcaggaggaccaagagcaacttcaatgctgtcattctcaagaggctcttcatgagcaaaaccaatcgcccaccaatctccatgcgccgccttgtcaagttcatggaaggaaaggagaagaac

SEQ ID NO: 26156 - DNA, 211 bp, Zea mays
caattgtgtagagcgctttgaccatcattgcccctgggttggacaatgcattgggcagcgcaattaccggtactttttcatgtttgtttcttcctcgactcttctctgcatttatgtatttgcaatgtcagccttgtacatcaagtttatcatggatgaggattatccaacagtatggaaggctttcaaacactctcccgcttctttgggg

SEQ ID NO: 26157 - DNA, 256 bp, Zea mays
cggatcctgcggcgtcggcagcgtcggcagcccgttcctgggccagtgcgtcgagttcctgaggcaccagtgcagcccggcggcgacgccctacggctcgccacagtgccaggcgctgcagcagcagtgctgccaccagatcaggcaggtggagccgctgcaccggtaccaggcgacatacggtgtggtcctgcagtccttcctgcagcagcagccgccaggcgagctcgcggcgctgatggcgggccaggtagcg

SEQ ID NO: 26158 - DNA, 251 bp, Zea mays
aggaagcaaggacaccaccgccatggcagccaagatgcttgcattgttcgctctcctagctctttgtgcaagcgccactagtgcgacccatattccagggcacttgccaccagtcatgccattgggtaccatgaacccatgcatgcagtactgcatgatgcaacaggggcttgccagcttgatggcgtgtccgtccctgatgctgcagcaactgttggccttaccgcttcagacgatgccagtgatgatgc

SEQ ID NO: 26159 - DNA, 246 bp, Zea mays
ccaagcgtgacgcaaaacaacaaaatatatgacgaagtatgaacgtgcgcgcattcttggtacacgagccttgcagataagcatgaatgctccagtcatggttgagcttgagggagaaactgaccctcttgagattgcgatgaaggagcttagagcgcgcaagatacccttcacgatcagacggtacctacctgatggaagttatgaagactggggagtagacgagctcattgtggaggactcctg

SEQ ID NO: 26160 - DNA, 240 bp, Zea mays
gaagagtttggctaaaacagaaggtaggccagagcccgcattgtatggaagcgagcacatccgtcctcttagcatagacgacttcaaatccgcccatgagcaggtttgcgcgagcgtttcatccgactcggcaaacatgaacgagcttctccaatggaacgacctgtacggtgaaggcgggtcgaggaagaggaaagcgctgagctacttcatgtgacggcgagagacataaaaccagaa

SEQ ID NO: 26161 - DNA, 238 bp, Zea mays
gcaacatagaaagtggaatccagtagcaacaacagagcaacaatggcgaccaagatattttccctccttatgctccttgctctttctgcatgtgttgctaacgcgacaattttccctcaatgctcacaagctcctatagcttcccttcttcccccataccttccatcaatgatagcttcagtatgtgaaaacccagctcttcagccctataggctccaacaagcaatcgcagcaagca

SEQ ID NO: 26162 - DNA, 237 bp, Zea mays
attataagcgcaaggaaatacaaggaaataagagtacagagatgccaactggtaggctgagcggcaacatcacccaggactgggagccggtggttctgcgccgtacgaagccgaaggggtccgacctcaagtcgtcgaaggcggtgaaccaggcgctgcggtcgggcgcggccgtggagacggtgcgcaagtcagcggcgggcatgaacaagcactccacgacggtggcgcccgcgc

SEQ ID NO: 26163 - DNA, 236 bp, Zea mays
gtcttacaacaaccaattgcccaattgcaacaacaatccttgccacatctaacaatacaagccatcacaacgcaacagcaacaacagttcctaccagcactgagccacctagccatggtgaaccctgccgcctacttgcaagagcagctgcttgcatccaacccacttgctctggcgaacgtagttgcaaaccagcaacaacaacagctacaacagtttctgccaacgctcagtca

SEQ ID NO: 26164 - DNA, 239 bp, Zea mays
cacggacttacttgaatactcttcaacagctcagaataaagagtggtcttatagatcatattggaatcgaacctttgatgatggaagctcttgagaagattgagaaggatattaagaaaccacttttaaggagtgacaagaagaacatggccacccttatggcagagtttgacaagattaacgcaaagcttggcattcggaaggaggatcttcctaagatcgagaaagaacttgaattg

SEQ ID NO: 26165 - DNA, 166 bp, Zea mays
gcaaagcggcagtgcgtagagaggatcgtcgaacagaacagcatgaagatggtcatcgttctcgtcgtgtgcctggctctgtcagctgccagcgcctctgcaatgcagatgccctgcccctgcgcggggctgcagggcttgtacggcgctggcgccggcctgacga

SEQ ID NO: 26166 - DNA, 208 bp, Zea mays
atacaacaaagccatgagcagcaacatcatccacaacaacatcatccacaaaaacaacaacatcaaccaccaccacaacatcaccagcagcagcaacaccaacaacaacaagttcacatgcaaccacaaaaacatcagcaacaacaagaagttcatgttcaacaacaacaacaacaaccgcagcaccaccaccagcaacaacaacaac

SEQ ID NO: 26167 - DNA, 262 bp, Zea mays
caacctacaaaccattgcaacgcaacaacaacaacaacagtttctgccatcactgagccacctagccgtggtgaaccctgtcacctacttgcaacagcagctgcttgcatccaacccacttgctctggcgaacgtagctgcataccagcaacaacaacagctgcaacagtttatgccagtgctcagtcaactagccatggtgaaccctgccgtctacctacaactactttcatctagcccgctcgcggtgggcaatgcacct

SEQ ID NO: 26168 - DNA, 222 bp, Zea mays
aactcattcctattggacaatgttgataagatccgacatattaaaggttttattgtacagggacgttatgatgtttgttgccctatgatgtctgcttgggatcttcacaaggcttggcctgaagcagaattcaaggtggtagcggatgcagggcactcggccaatgaagttggcatcgctgccgaactgaggtcagccaccgataaactgagagacttgctg

SEQ ID NO: 26169 - DNA, 267 bp, Zea mays
gtcccaactatgtccccgggcagaagaaggatctgtatgtcaagagtgtccagcgtactgttatctggatgggaaagaagcaagagtcggttgaggatgttccgtgtggtaacactgttgctatggttggtctggatcagttcatcacgaagaatgctacactcactaatgagaaggagactgacgcttgcccaatcagagcaatgaagttctccgtctctcctgttgtgcgtgttgctgttcagtgcaaggttgcctctgaccttc

SEQ ID NO: 26170 - DNA, 193 bp, Zea mays
tgctcatgagcgccgaggagaagttcccaggcaaggtgcgcgccgtggtcaagttcaacgcggcgctggcgcaccacatcatggccggcgccgacgtgctcgccgtcaccagccgcttcgagccctgcggcctcatccagctgcaggggatgcgatacggaacgccctgcgcctgcgcgtccaccggtggact

SEQ ID NO: 26171 - DNA, 268 bp, Zea mays
tgcccgacggcgacgccctactgctcgcctcagtgccagtcgttgcggcacagtgttgccagcagctcaggcaggtggagccgcagcaccggtaccaggcgatcttcggcttggtcctccagtccatcctgcagcagcagccgcaaagcggccaggtcgcggggctgttggcggcgcagatagcgcacacactgacggcgatgtgcggcctgcagcagccgactccatgcccctacgctgctgccggcggtgtcccccactgaagaaa

SEQ ID NO: 26172 - DNA, 194 bp, Zea mays
ccgcaacaaatgcgttcattattccacaatgctcacttgctcctagtgccattattccacagttcctcccaccagttacttcaatgggcttcgaacacctagctgtgcaagccaacatgcaacaacaagcgcttgcggcgagcgtcttacaacaaccaattgcccaattgcaacaacaatccttgccacatcta

SEQ ID NO: 26173 - DNA, 270 bp, Zea mays
ctgaggcagccgcagtgcagcccgctggcggcggcgccctactacgccgggtgtgggcagccgagcgccatgttccagccgctccggcaacagtgctgccagcagcagatgaggatgatggacgtgcagtccgtcgcgcacagctgcagatgatgatgcagcttgagcgtgccgctgccgccagcagcagcctgtacgagccagctctgatgcagcagcagcagcagctgctggcagcccagggtctcaaccccatggccatgatgatgg

SEQ ID NO: 26174 - DNA, 274 bp, Zea mays
gcacaatagtgtaccaacaatggcagccaaaatattttgcctccttatgctccttggtctttctgcaagtgctgctacggcgaccattttcccgcaatgctcgcaagctcctatagcttcccttcttcccccgtacctctcaccagcggtgtcttcggtatgtgaaaacccaattcttcaaccctacaggatccaacaggcaatcgcagctggcatcttacctttatcacccttgttcctccaacaatcatcagccctattacaacagttacct

SEQ ID NO: 26175 - DNA, 275 bp, Zea mays
gcgcggacaacacgggcgccaagaacctctacatcatctccgtcaagggcatcaagggccgcctcaaccgcctcccgtccgcctgcgttggcgacatggtcatggccaccgtcaagaaggggaagcccgacctcaggaagaaggtgatgcccgccgtcatcgtccgccagcgcaagccgtggcgccgcaaggacggtgtctacatgtacttcgaagataatgctggagtgattgtgaatcccaagggtgagatgaaaggttccgctatcactgga

SEQ ID NO: 26176 - DNA, 267 bp, Zea mays
tctcaccagcggtgtcttcagtatgtgaaaacccaattcttcaaccctacaggatccaacaggcaatcgcagcaggcatcttacctttatcacccttgttcctccaacaaccgtcagccctattacagcagttacctttggtgcatttgttggcacaaaacatcaaggcacaacaactacaacaacttgtgctaagaaaccttgctgcctactctcagcaacagcagtttcttccattcaaccaactggctgcattgaactctgctg

SEQ ID NO: 26177 - DNA, 263 bp, Zea mays
ccctgcccttgcaacgcaggccgcacatcgccgtcagctgatggcggcccaggtagcgcacagctgacggcgatgtgcggcctgcagctgcagcagccaggtccctgcccttgcaacgcagctgccggcggtgtctactactgaggaaactatgtactgtagtaataatgtaatggagccgctgactaactaactagctcgctagtttactcatttagcggcgatgagtaacgtagtgtcacccatcaccatgggtggcagtg

SEQ ID NO: 26178 - DNA, 226 bp, Zea mays
ccaagatgcttgcattgttcgctctcctagctctttgtgcaagcgccactagtgcgacccatattccagggcacttgccaccagtcatgccattgggtaccatgaacccatgcatgcagtactgcatgatgcaacaggggcttgccagcttgatggcgtgtccgtccctgatgctgcagcaactgttggccttaccgcttcagacgatgccagtgatgatgccaca

SEQ ID NO: 26179 - DNA, 263 bp, Zea mays
caggccaacttgggaggttgaagaggaaatcgaatacaggaactaccaaacatgccagtacaacactactccgcaggaagcttttacagtggctcaagatatcatgaagacgatgctagaaaaggggtacgtgctcagcaaggatgctttggctaaggctagagcctttgatgagtcctatggattaacagctgcagcagcagccagggctgcagagctgagcaagagaattggtttaactgatagggtcaatgctggtgttg

SEQ ID NO: 26180 - DNA, 262 bp, Zea mays
gtcaaacggatattatgaaaagattgcagatggggttagatgtttctaccttggagatctttggaattcattctatgagtggagcgcctgtggcgttggtacttcagtgtgcatcgctccgggtgagacagtggttcaatacttcgtgccatatctttcagcaattcagttgtacaccaacacgagaaatgctcctgtttcacaaagcatgatttatgatggaagattcgatcggaataaccattatagtgtcgggatgtac

SEQ ID NO: 26181 - DNA, 263 bp, Zea mays
attttgagcattcagaaacacacctagcgaacgcagctagcaacgacctaacaacaatggcttccaagacattatccctccttgcgcttcttgccctttttgtgagtgcaacaaatgcgttcattattccacaatgctcacttgctccgagtgccattattccacagttcctccctccagttacttcaatgggcttcgaacacccagctgtgcaagcctataggctacaacaagcgcttgcggcgagcgtcttagaacaacca

SEQ ID NO: 26182 - DNA, 263 bp, Zea mays
gagaccaacaagcaacatagaaagtggaatccagtagcaacaatagagcaacaatggcgaccaagatactttccctccttatgctccttgctctttctgcatgtgttgctaacgcgacaattttccctcaatgctcacaagctcctatagcttcccttcttcccccataccttccatcaatgatagcttcagtatgtgaaaacccagctcttcaaccctataggctccaacaagcaatcgcagcaagcaacatacctttatca

SEQ ID NO: 26183 - DNA, 265 bp, Zea mays
ccccgccttcgagttcaccgacgagtcgctacagtggatcgaccgcatgttggactacaatgtgctcggaggaaagtgcaatcgcgggctctctgtcattgatagctacaggatattgaagggtgttgatgttctgagcaaggaggagacatttcttgcttgcacccttggctggtgcattgaatggcttcaagcttattttcttgtgcttgatgatattatggacaactcccagacacggcgtggccaaccttgctgggttaga

SEQ ID NO: 26184 - DNA, 263 bp, Zea mays
attatttagaccaactagcaacatagaaagcacaatagtgtaccaacaatggcagccaaaatattttgcctccttatgctccttggtatttctgcaagtgctgctacggcgaccattttcccgcaatgctcacaagctcctatagcttcccttcttcccccgtacctctcaccagcggtgtcttcggtatgtgaaaacccaattcttcaaccctacaggatccaacaggcaatcgcagctggcatcttacctttatcaccctt

SEQ ID NO: 26185 - DNA, 271 bp, Zea mays
agcggatcgacgcccgcaaccagctggagacgtacgtgtacaacatgaagaacacggtgggcgacaaggacaagctcgcggacaagctggatgcggaggagaaggagaaggtggaggaggccctcaaggaggcgttggagtggctggacgacaaccagtcggccgagaaggaggactacgaggagaagctcaaggaggtggaggccgtgtgcaaccccatcgtgtcggccgtgtaccagcggtcgggcggcgccctggcggtgacgctgac

SEQ ID NO: 26186 - DNA, 258 bp, Zea mays
ggacgtcagcctagcaattagctcatcgactccagattggagaactcgacaccatgaaggtgctgatcgttgcccttgctctcctggcgctcgctgcgagcgccgcctccagtacaagcggcggctgtggctgccagacaccaccgtttcatctaccgcctccgttctatatgccgcctccgttctatctgccgccgcagcagcagccgcagccatggcaataccccactcaaccaattcagctaagcccgtgccagc

SEQ ID NO: 26187 - DNA, 263 bp, Zea mays
actacaacaacttgtgctaggaaaccttgctgcctactctcagcaacagcagtttcttccattcaaccaactggctgcattgaactctgctgcttatttgcaacaacaactaccattcagtcagctagctgctgcctacccccagcaatttcttccattcaaccaactggcagcattgaactctgctgcttatttacaacagcaacagctaccaccattcagccagctagctgatgtgagccctgttgccttcttgacacaac

SEQ ID NO: 26188 - DNA, 224 bp, Zea mays
aaccatcaaggcacagcagctgcagcaactcgtgctacctgtgatcaaccaagtagctctggcaaacctttctccctactatcagcaacaacaatttcttccattcaaccaactatctacactgaaccctgctgcttatttgcagcaacaactattaccattcagccagctagctactgcctactctcatcaacaacaacttcttccatttaacaattggccgc

SEQ ID NO: 26189 - DNA, 255 bp, Zea mays
caagctcctatagcttcccttcttcccccatacctctcaccagcggtgtcttcaatgtgtgaaaccccaattgttcaaccctacaggatccaacaggcaatcgcaacaggcatcttaccattatcacccttgttcctccaacaaccgtcagccctattacagcagttacctttggtccatttggtggcacaaaacatcagggcacaacaactacaacaacttgtgctagcaaaccttgctgcatactctcagcaa

SEQ ID NO: 26190 - DNA, 227 bp, Zea mays
gaagatgaagtacctccgcttcctccgcaagcggatgaacaccaagccgtcccacgggcccatccacttccgcgcccccgccaagatcctgtggcgcaccatccgcgggatgattccgcacaagaccaagaggggggaggcggctctggcgaggctcaagacgtacgaaggcgtcccgccgccgtacgacaagaccaagcgtatggtcatccctgacgctctaaagg

SEQ ID NO: 26191 - DNA, 255 bp, Zea mays
caaatgcgttcattattccacaatgctcacttgctcctagtgccattattccacagttcctccctccagttacttcaatgggcttcgaacacccagctgtgcaagcctacaggctacaacaagcgcttgcggcgagcgtcttacaacaaccaattgcccaattacaacaacaatccttggcacatctaaccatacaaaccatcgcaacgcaacagcaacaacaatttctaccagcactgagccaactagctgtgg

SEQ ID NO: 26192 - DNA, 253 bp, Zea mays
acttgctctggcaaacgtagctgcataccaacaacaacaacaattgcaacagtttctgccagcgctcagtcaactagccatggtgaaccctgccgcctacctacaacagcaacaactgctttcatctagccctctcgttgtgggtaatgcacctacatacctgcaacaacaattgctgcaacagattgtaccagctctgactcagctagctgtggcaaaccctgctgcctacttgcaacagctgcttccattc

SEQ ID NO: 26193 - DNA, 255 bp, Zea mays
cagcccgttcctgggccagtgcgtcgagttcctgaggcaccagtgcagcccggcggcgacgccctacggctcgccacagtgccaggcgctgcagcagcagtgctgccaccagatcaggcaggtggagccgctgcaccggtaccaggcgacatacggtgtggtcctgcagtccttcctgcagcagcagccgcagggcgagctcgcggcgctgatggcggcccaggtagcgcacagctgacggcgatgtgcggtctg

SEQ ID NO: 26194 - DNA, 258 bp, Zea mays
agcaaaccttgctgcctactctcagcaacagcagtttcttccattcaaccaactagctgcattgaactctgcttcttatttgcaacaacaacaactaccattcagccagctacctgctgcctacccccagcaatttcttccattcaaccaactggcagcattgaactctcctgcttatttacagcagcaacaactactaccattcagccagctagctggtgtgagccctgctaccttcttgatacaaccacagttgtt

SEQ ID NO: 26195 - DNA, 261 bp, Zea mays
acttgctctggcgaacgtagctgcataccagcaacaacaacagctgcaacagtttatgccagtgctcagtcaactagccatggtgaaccctgccgtctacctacaactactttcatctagcccgctcgcggtgggcaatgcacctacgtacctacaacaacagttgctgcaacaaattgtaccagctctgactcagctagctgtggcaaaccctgctgcctacttacaacagttgcttccattcaaccaactggctgtgtc

SEQ ID NO: 26196 - DNA, 251 bp, Zea mays
tattttgagcattcagaaacacaccaagcgaactacctagcaacgacttaacaacaatggctaccaagatattagccctccttgcgcttcttgccctttttgtgagcgcaacaaatgcgttcattattccacaatgctcacttgctcctagtgccattataccacagttcctccgaccagttacttcaatgggcttcgaacacctagctgtgcaagcctacaagctacaacaagcgcttgcggcgagcgtc

SEQ ID NO: 26197 - DNA, 232 bp, Zea mays
gctgcattgaactctgcttcttatttgcaacaacaacaactaccattcagccagctatctgctgcctacccccagcaatttcttccattcaaccaactgacagcattgaactctcctgcttatttacagcagcaacaactactaccattcagccagctagctggtgtgagccctgctaccttcttgacaccaccacagttgttgccgttctaccagcacgctgcgcctaacg

SEQ ID NO: 26198 - DNA, 257 bp, Zea mays
cctgaagccgaagcctccgggcctgtgggagctgaccaacctggcggcccaggtcggcctcgacgccgggctcgtgtacctgtgcggctggaggtcgctggcctaccttgtcctctccacgttcgtcggcggcggcatgcaccccatggcgggccacttcatctcggagcactacgtgttcagccccgagcaggagacctactcgtactacgggcccctgaacctggtggcgtggcacgtggggtaccacaacgagc

SEQ ID NO: 26199 - DNA, 270 bp, Zea mays
gccagccctatctttggtgcagtcattggtacaaaccatcaaggcacagcagctgcagcaactcgtgctacctgtgatcaaccaagtagctctggcaaacctttctccctactatcagcaacaacaatttcttccattcaaccaactatctacactgaaccctgctgcttatttgcagcaacaactattaccattcagccagctagctactgcctactctcatcaacaacaacttcttccatttaaccaattggccgcactgaacctcgc

SEQ ID NO: 26200 - DNA, 270 bp, Zea mays
cagaattcgcattgcagattatgtgcgctacagaaagatcacttccaacatgaatgaacgctttccagatgctacatcagaagagctcgatgtgagtgatgctacatgtattatttgccgtgaggagatgactacagcaaagaaactgctctgtgggcatctgttccatgtgcattgtctaaggtcgtggctagaacgccaacacacttgccccacgtgcagagctccaatcattcccgcagataatggacatgctgtatcagcacgaca

SEQ ID NO: 26201 - DNA, 270 bp, Zea mays
agcctataggctacaacaagcgattgcagcgagcgtcttacaacaaccaattgcccaattgcaacaacaatccttggcacatctaacaatacaaaccatcgcaacgcaacagcaacaacagttcctaccagcactgagccacctagccatggtgaaccctgtcgcctacttgcaacagcagctgcttgcatccaacccacttgctctagcaaacgtagttgcaaaccagcaacaacaacaactgcaacagtttctgccagcgcttagtca

SEQ ID NO: 26202 - DNA, 264 bp, Zea mays
agcaagatcgaggctgaactgagcaatatctgtgatggcatcttgaagctgcttgactcccacatagtgccttcttctactgctgctgaatcaaaggtcttctacctcaagatgaagggtgactatcacaggtatcttgcggaatttaagactggtgctgagaggaaggaatctgctgagagcacaatggtggcctataaggctgctcaggacattgctctggctgagctggcacctacccatccgataaggctgggacttgct

SEQ ID NO: 26203 - DNA, 268 bp, Zea mays
agcaaagcggcagtgcgtagagaggatcgtcgaacagaacagcatgaagatggtcatcgttctcgtcgtgtgcctggctctgtcagctgccagcgcctctgcaatgcagatgccctgcccctgcgcggggctgcagggcttgtacggcgctggcgccggcctgacgacgatgatgggcgccggcgggctgtacccctacgcggagtacctgaggcagccgcagtgcagcccgctggcggcggcgccctactacgccgggtgtgggcag

SEQ ID NO: 26204 - DNA, 253 bp, Zea mays
gccgagcatgatgtcgcaaatgatgatgccacaatgtcactgcgacgccgtctcgcagattatgctgcaacagcagttaccattcatgttcaacccaatggccatgacgattccacccatgttcttacagcaaccctttgttggtgctgcattctagatagaaatatttgtgttgtatcgaataatgagttgacatgccatcgcgtgtgactcattattaacaataaaacaagtttcctcttattatcttttt

SEQ ID NO: 26205 - DNA, 269 bp, Zea mays
atgctccttgctctttctgcatgtgttgctaacgcgacaattttccctcaatgctcacaagctcctatagcttcccttcttcccccataccttccatcaatgatagcttcagtatgtgaaaacccagctcttcaaccctataggctccaacaagcaatcgcagcaagcaacatacctttatcacccttgtttcaacaatcgccagccctatctttggtgcagtcattggtacaaaccatcaaggcacagcagctgcagcaactcgtgct

SEQ ID NO: 26206 - DNA, 272 bp, Zea mays
attatttataccaactaccaacatacatagtgaagtacactagcaacatcttagcaccaatggcagccaagatttttgcgctccttgccctccttgctctttcagcaagtgttgctaccgcgactattattccacaatgctcacaacaatacctctctccagtgatagccgcgagatttgaatacccatctatacaatcctacaggctacaagaggccatcacagcaagcatcttacggtcgttagcattgaccgtccaacaaccatatgcc

SEQ ID NO: 26207 - DNA, 275 bp, Zea mays
cattcagccagctagctactgcctactctcagcagcaacaatttcttccatttaaccaattggccgcactgaacccctctgcttatttccagcagcaaatactactaccatttggccagctagctacaacaagccccacttcctttttgaaacaacaacaattgcttccgttctaccagcagtttgtggctaaccccgcaaccctcttacaactgcaacagttgctgccctttgtccaacttgctttgacaaacccagcagccttctaccaacaa

SEQ ID NO: 26208 - DNA, 273 bp, Zea mays
agcaaagcggcagtgcgtagagaggatcgtcgaacagaacagcatgaagatggtcatcgttctcgtcgtgtgcctggctctgtcagctgccagcgcctctgcaatgcagatgccctgcccctgcgcggggctgcagggcttgtacggcgctggcgccggcctgacgacgatgatgggcgccggcgggctgtacccctacgcggagtacctgatgcagccgcagtgcagcccgctggcggcggcgccctactacgccgggtgtgggcagccgag

SEQ ID NO: 26209 - DNA, 268 bp, Zea mays
tgctcattgtattaccagttcccacttccaggttgctgaaagagcgctcttcgtatggaacaatgataacattatcagcttgattgcacaaaaccgccaagtgatcatgcctcttgtcgttccagcgctagagcagaacattcagaatcactggaaccaggcggtcctgaatctgaccgtgaatgtcaagaaaatgttatctgagatggacgacgatctcttctcgtcatgcctggccaagtacaaggacgaaaaagaaaaacgcgtg

SEQ ID NO: 26210 - DNA, 266 bp, Zea mays
aatagatctcctcgccgcctcacccgtctcctcctccgcagcttccccgcgatcccgaccatggagggcgacggtaccaaccttgatgcggcgatagagtcgctcctgaatgtcgagaagcagatgaggctggccggagatgtcgccggcactcggaaggccgtcatcgacatcgtcgagctctgctacaaggccggcgcgtggaagacgctaaacgaccagatcgttctcctatctaagaggagaggccagcttaagcaggctat

SEQ ID NO: 26211 - DNA, 267 bp, Zea mays
  unsure (1)..(267): unsure at all n locations
attttcagcattcaaaaacacaccaagcgaacgnagctagcaacgacctaacaccaatggctaccaagatattagccctccttgcgcttcttgcccttttagtgagcgcaacaaatgcgttcattattccacagtgctcacttgctcctagtgccagtattccacagttcctcccaccagttacttcaatgggcttcgaacatccagccgtgcaagcctacaggctacaactagcgcttgcggcgagcgccttacaacaaccaattg

SEQ ID NO: 26212 - DNA, 267 bp, Zea mays
cgagcgtcttacaacaaccaattgcccaattacaacaacaatccttggcacatctaaccatacaaaccatcgcaacgcaacagcaacaacaatttctaccagcactgagccaactagctgtggtgaaccctgtcgcctacttgcaacagcagttgcttgcatccaacccacttgctctggcaaacatagttgcataccaacaacaacaacaattgcaacagtttctaccagcgctcagtcaactagccatggtgaaccctgccgcct

SEQ ID NO: 26213 - DNA, 265 bp, Zea mays
tagcaacatagaaagcacaatagtgtaccaacaatggcagctaaaatattttgcctccttatgctccttggtctttctgcaagtgctgctacggcgaccattttcccacaatgctcacaagctcctatagcttcccttcttcccccgtacctctcaccaacggtgtcttcggtatgtgaaaacccaattcttcaaccctacaggatccaacaggcaatcgcagctggcatcttacctttatcacccttgttcctccaacaatcat

SEQ ID NO: 26214 - DNA, 261 bp, Zea mays
gcaaattgcaccaagaaatccatcgagaggccgtcgacaggggaattaatggcgtcgtcgtctagcagcagccaccgccgcctcatcctcgcagccgccgtcctgctctccgtgctcgcggctgccagcgccagtgccgggacctcctgcgtgccggggtgggccatcccgcacaacccgctcccgagctgccgctggtacgtgaccagccggacctgcggcatcgggccgcgcctcccgtggccggagctgaagaggaga

SEQ ID NO: 26215 - DNA, 264 bp, Zea mays
ggtacagtggtccaggacccagaacttggacaggtcattcagctccagggtgatcagaggaagaacgtctcgaatttcctcgtccaggccggcattgtgaagaaggagcacatcaagattcatggtttctgagcaaccgccgggtccatagcaaaccaaccctgcatgcagggccagcttattatatataatatctgaggtggagcatatctatctggctgtgtactacaagcaggcctagtacgccgcctgcgcgttcctcct

SEQ ID NO: 26216 - DNA, 265 bp, Zea mays
gtggaatacagtagcaacaatagagcaacaatggcggccaagatattttccatccttatgctccttgctctttctgcatgtgttgctaacgcgaccatttttcctcaatactcacaagctcctatagctgcccttcttcccccataccttccatcaatgaccgcttcagtttgtgaaaacccagcccttcaaccctacaggctccaacaagcaatcgcaacaagcaacttacctttatcacccctgttctttcaacaatcgccag

SEQ ID NO: 26217 - DNA, 266 bp, Zea mays
gcttgagcgtgccgctgccgccagcagcagcctgtacgagccagctctgatgcagcagcagcagcagctgctggcagcccagggtctcaaccccatggccatgatgatggcgcagaacatgccggccatgggtggactctaccagtaccagtaccagctgcccagctaccgcaccaacccctgtggcgtctccgctgccattccgccctactactgattcatgatatttgggaaatctcctctatccatccctctctatctatata

SEQ ID NO: 26218 - DNA, 268 bp, Zea mays
caggagttgaggaagcgatgaattggctcctctcgcacatggatgatccagatataaacgacccaatatcaaaagattcacgtgcttatgagccatctgttgacgaagcaagtgttcaaactctcatctcctttggattccaggaagacattgccataaaggccctgaaagcttctggtggtaatatcgagaaagctacagactggattttcagccaccccgaagcatctacctcagcatctgctgattcttccactagcaatgtaaa

SEQ ID NO: 26219 - DNA, 269 bp, Zea mays
agaccattagctttatctactccagagcgcagaagaacccgatcgacaccatgagggtgttgctcgttgccctcgctctcctggctctcgctgcgagcgccacctccacgcatacaagcagcggctgcggctgccagccaccgccgccggttcatctaccgccgccggtgcatctgccacctccggttcacctgccacctccggtgcatctcccaccgccggtccacctgccgccgccggtccacctgccaccgccggtccatgtgccg

SEQ ID NO: 26220 - DNA, 263 bp, Zea mays
acctactctcagcaacaacaatttcttccattcaaccaactgtctacactgaaccctgctgcttatttgcagcaacaactattaccattcagccagctagctactgcctactctcagcaacaacaacttcttccatttaaccaattggccgcactgaaccccgctgcttatttgcagcagcaaatactactaccatttagccagctagctgcagcaaaccgtgcttccttcttgacacagcaacagttgctgcctttctacca

SEQ ID NO: 26221 - DNA, 260 bp, Zea mays
atggagcactactgcttagaagatgctcatattgtcaacctcttctcgttctcaaaggcttatggaatgatggggtggcgtgtaggatacattgcatttccaaatgaagctgatggcttccatgatcagctcctcaaggtgcaagacaacataccgatctgcgcctccatcatcgggcagcgcctggcgctctactcgctggaggccggccccgagtggatcaaagaacgggtgaaagacctggtgaaaaaccgggcgct

SEQ ID NO: 26222 - DNA, 258 bp, Zea mays
gaagcacagagtctttgaggtttgcctagctgatcttcagggcgacgaggatcaagcttacaggaaaatcaggctccgtgctgaagatgtgcagggcaggaatgtgctcacaaacttttggggcatggattttaccactgataaactcagatccctagtgaagaagtggcagacattaatcgaagcccatgttgatgtcaagacaaccgacaactacatgttgcgtttgttctgcatcggcttcaccaagaggcgccc

SEQ ID NO: 26223 - DNA, 257 bp, Zea mays
ccttgttcctccaacaaccgtcagccctattacagcagttacctttggtccatttggtggcacaaaacatcagggcacaacaactacaacaacttgtgctagcaaaccttgctgcatactctcagcaacatcagtttcttccattcaaccaactggctgcattgaactctgctgcttatttgcaacaacaattaccattcagccagctagttgctgcctacccccagcaatttcttccattcaaccaactagcagca

SEQ ID NO: 26224 - DNA, 255 bp, Zea mays
ccggtaccaggcgatcttcggcttggtcctccagtccatcctgcagcagcagccgcaaagcggccaggtcgcggggctgttggcggcgcagatagcgcacaactgacggcgatgtgcggcctgcagcagccgactccatgcccctacgctgctgccggcggtgtcccccactgaagaaactatgtgctgtagtatagccgctggctagctagctagttgagtcatttagcggcgatgattgagtaataatgtgtc

SEQ ID NO: 26225 - DNA, 256 bp, Zea mays
caattagctcatcgactccagattggagaactcgacaccatgaaggtgctgatcgttgcccttgctctcctggcgctcgctgcgagcgccgcctccagtacaagcggcggctgtggctgccagacaccaccgtttcatctaccgcctccgttctatatgccgcctccgttctatctgccgccgcagcagcagccgcagccatggcaatacaccactcaaccaccgcagctaagcccgtgccagcagttcggatcct

SEQ ID NO: 26226 - DNA, 257 bp, Zea mays
ataagaaggagaaggagctgaggagccaaatcatcgttgatgctgaagagtttaagaaagcttttgttgagaagagaaagctcaatgctgagacaagcaagggccaaaaccgtgacagggagaagcttttcctagcaaaccaggaaaagttccatgctggtgcagataagcaatactggaaggcgatatctgaacttatcccacatgagattgctaacatcgagaagagaggggcaaggaaagacaaggagaagaag

SEQ ID NO: 26227 - DNA, 257 bp, Zea mays
aacagctaccaccattcagccagctagctgatgtgagccctgttgccttcttgacacaacaacagttgttgccgttctacctgcacgctgcgcctaacgctggcaccctcttacaactgcaacaattgctgccattcaaccaacttgctttgacaaacccaacaacgttctaccaacaacccatcattggcggtgccctcttttagattgcttatgagttatagttcaataatgaagttttttggatgatgtttgtg

SEQ ID NO: 26228 - DNA, 260 bp, Zea mays
attttgagcattcagaaacacaccaagcgaacgcatctagcaacgacctaacaacaatggctaccaagatattagccctccttgcgcttcttgccctttttgtgagcgcaacaaatgcgttcattattccacaatgctcacttgctcctagtgccattattccacagttcctcccaccagttacttcaatgggcttcgaacacctagctgtgcaagccaacatgcaacaacaagcgcttgcggcgagcgtcttacaacaa

SEQ ID NO: 26229 - DNA, 260 bp, Zea mays
gatcagcaaagcggcagtgcgtagagaggatcgtcgaacagaacagcatgaagatggtcatcgttctcgtcgtgtgcctggctctgtcagctgccagcgcctctgcaatgcagatgccctgcccctgcgcggggctgcagggcttgtacggcgctggcgccggcctgacgacgatgatgggcgccggcgggctgtacccctacgcggagtacctgaggcagccgcagtgcagcccgctggcggcggcgccctactacgcc

SEQ ID NO: 26230 - DNA, 259 bp, Zea mays
cttgctccacctgtgccggcaaaatcgagtctggttcggttgaacagtcggatgggtccttccttgatgacgggcagcaggaggaaggttatgtgctgacatgcgtctcctacccaaagtccgactgcgtcatccacacccacaaggaaggcgacctgtactagggctagggattttcaatttggcgagggaccaaaaatgctctcgagtggtgctttgtcaagcaaagctccatctgcgcgccctaccccgttgtgcg

SEQ ID NO: 26231 - DNA, 266 bp, Zea mays
caactgtctacactgaaccctgctgcttatttgcagcaacaactattaccattcagccagctagctactgcctactctcagcaacaacaacttcttccatttaaccaattggccgcactgaaccccgctgcttatttgcagcagcaaatactactaccatttagccagctagctgcagcaaaccgtgcttccttcttgacacagcaacagttgctgcctttctaccagcagtttgcggctaaccccgcaaccctcttacaactaca

SEQ ID NO: 26232 - DNA, 263 bp, Zea mays
agcccgtgccagcagttcggatcctgcggcgtcggcagcgtcggcagcccgttcctgggccagtgcgtcgagttcctgaggcaccagtgcagcccggcggcgacgccctacggctcgccacagtgccaggcgctgcagcagcagtgctgccaccagatcaggcaggtggagccgctgcaccggtaccaggcgacatacggtgtggtcctgcagtccttcctgcagcagcagccgccaggcgagctcgcggcgctgatggcggc

SEQ ID NO: 26233 - DNA, 262 bp, Zea mays
ccgatcgacaccatgagggtgttgctcgttgccctcgctctcctggctctcgctgcgagcgccacctccacgcatacaagccgcggctgcggctgccagccaccgccgccggttcatctaccgccgccggtgcatctgccacctccggttcacctgccacctccggtgcatctcccaccgccggtccacctgccgccgccggtccacctgccaccgccggtccatgtgccgccgccggttcatctgccgccgccaccatgcc

SEQ ID NO: 26234 - DNA, 260 bp, Zea mays
cggcaatcgcaacaggcatcttaccattatcacccttgttcctccaacaaccgtcagccctattacagcagttacctttggtccatttggtggcacaaaacatcagggcacaacaactacaacaacttgtgctagcaaaccttgctgcatactctcagcaacatcagtttcttccattcaaccaactggctgcattgaactctgctgcttatttgcaacaacaattaccattcagccagctagttgctgcctacccccag

SEQ ID NO: 26235 - DNA, 258 bp, Zea mays
ccataccttgcatcaatgggcatttatgtcttcaagaaagatgcacttttagaccttctcaagtcaaaatatattcaattacatgactttggatctgaaatcctcccaagagctgtactagatcatagtgtgcaggcatgcatttttacgggctattgggaggatgttggaacaatcaaatcattctttgatgcaaacttggccctcactgagcagccttccaagtttgatttttatgatccaaaaacacctttcttc

SEQ ID NO: 26236 - DNA, 259 bp, Zea mays
acattccacagttcctcccaccagttacttcaatgggcttcgaacatccagccgtgcaagcctacaggctacaactagcgcttgcagcgagcgccttacaacaaccaattgcccaattgcaacaacaatccttggcacatctaaccctacaaaccattgcaacgcaacaacaacaacaacaacagtttctgccatcactgagccacctagccgtggtgaaccctgtcacctacttgcaacagcagctgcttgcatccaa

SEQ ID NO: 26237 - DNA, 256 bp, Zea mays
agggcacaacaactacaacaacttgtgctagcaaaccttgctgcctactctcagcaacagcagtttcttccattcaaccaactagctgcattgaactctgcttcttatttgcaacaacaacaactaccattcagccagctacctgctgcctacccccagcaatttcttccattcaaccaactggcagcattgaactctcctgcttatttacagcagcaacaactactaccgatcagccagctagctggtgtgagcc

SEQ ID NO: 26238 - DNA, 250 bp, Zea mays
gcggcagtgcgtagagaggatcgtcgaacagaacagcatgaagatggtcatcgttctcgtcgtgtgcctggctctgtcagctgccagcgcctctgcaatgcagatgccctgcccctgcgcggggctgcagggcttgtacggcgctggcgccggcctgacgacgatgatgggcgccggcgggctgtacccctacgcggagtacctgaggcagccgcagtgcagcccgctggcggcggcgccctactacgcc

SEQ ID NO: 26239 - DNA, 257 bp, Zea mays
tcaacaacttgtgctagcaaaccttgctgcctactctcagcaacagcagtttcttccattcaaccaactagctgcattgaactctgcttcttatttgcaacaacaacaactaccattcagccagctacctgctgcctacccccagcaatttcttccattcaaccaactggcagcattgaactctcctgcttatttacagcagcaacaactactaccattcagccagctagctggtgtgagccctgctaccttcttga

SEQ ID NO: 26240 - DNA, 258 bp, Zea mays
caatgggcttcgaacacccagctgtgcaagcctataggctacaacaagcgcttgcagcgagcgtcttagaacaaccaattgcccaattacaacaacaatccttggcacatctaaccatacaaaccatcgcaacgcagcagcaacaagcactgagccacctagccgtggtgaaccctatcgcctacttgcaacaacagctgcttgcatccaacccacttgctttggcaaacgtagctgcataccaacaacaacaacagt

SEQ ID NO: 26241 - DNA, 255 bp, Zea mays
attgccctagaaaaggcagccctgtcagacgaatattttatcaagaggaagctgtatccaaatgtggatttctactctgggctaatttatagggcaatgggattccctacagaattttttcctgtgctgtttgctattcctcgcatgggtggctggctagcgcattggaaagagtcactcgatgatcctgacactaagattataaggccccaacaggtatacaccggcttctggcttaggcactatacccccgtc

SEQ ID NO: 26242 - DNA, 252 bp, Zea mays
ccgatcgacaccatgagggtgttgctcgttgccctcgctctcctggctctcgctgcgagcgccacctccacgcatacaagccgcggctgcggctgccagccaccgccgccggttcatctaccgccgccggtgcatctgccacctccggttcacctgccacctccggtgcatctcccaccgccggtccacctgccgccgccggtccacctgccaccgccggtccatgtgccgccgccggttcatctgccgccg

SEQ ID NO: 26243 - DNA, 253 bp, Zea mays
ctgcaacaactcgtgctaccagtgatcagccaagtagctcaggcaaacctttctccctactctcagcaacaacaatttcttccattcaaccaactgtctacactgaaccctgctgcttatttacaacaacaacaactactaccattcagccagctagctactgcctactctcagcagcaacaatttcttccatttaaccaattggccgcactgaacccctctgcttatttccagcagcaaatactactaccat

SEQ ID NO: 26244 - DNA, 252 bp, Zea mays
ctagcaacatagaaagcacaatagtgtaccaacaatggcagccaaaatattttgcctccttatgctccttggtctttctgcaagtgctgctacggcgaccattttcccacaatgctcacaagctcctatagcttcccttcttcccccgtacctctcaccagcggtgtcttcggtatgtgaaaacccaattcttcaaccctataggatccaacaggcaatcgcagctggcatcttacctttatccaccttgtt

SEQ ID NO: 26245 - DNA, 248 bp, Zea mays
ccgccgtgctggggcttgctccacctgtgccggcaaaatcgagtctggttcggttgaccagtcggatgggtccttccttgatgacgggcagccggaggaaggttatgtgctgacatgcgtctcctacccaaagtccgactgcgtcatccacacccacaaggaaggcgacctgtactagggctagggctttccaatttggcgagggacaaaaaatgctctcgagtggtgtgttgtcaagcaaagctcct

SEQ ID NO: 26246 - DNA, 250 bp, Zea mays
aaagcggcagtgcgtagagaggatcgtcgaacagaacagcatgaagatggtcatcgttctcgtcgtgtgcctggctctgtcagctgccagcgcctctgcaatgcagatgccctgcccctgcgcggggctgcagggcttgtacggcgctggcgccggcctgacgacgatgatgggcgccggcgggctgtacccctacgcggagtacctgaggcagccgcagtgcagcccgctggcggcggcgccctactac

SEQ ID NO: 26247 - DNA, 249 bp, Zea mays
cttagggatggctactacattcatggtcagtgtgccatcattatgtttgatgtcacttctaggctgacatacaagaatgttccgacatggcacagggatctgtgcagggtctgtgagaacatccccattgttctttgtggtaacaaggttgatgtcaagaacaggcaagtcaaggccaagcaagttacattccaccggaagaagaacttgcagtactatgagatttctgccaagagcaattacaacttt

SEQ ID NO: 26248 - DNA, 252 bp, Zea mays
caggacagcgagatgttcaacgaatggactctggaactgaaggccatggctgataggatcattaacatgaggcaacaactatttaatgcgctgaaatccagaggaacccctggtgattggagccatatcattaagcaaattgggatgtttactttcactgggctgaatagcgaacaagtcgcattcatgaggcaggaataccacatttatatgacatctgatgggaggatcagcatggccggtttgagcatg

SEQ ID NO: 26249 - DNA, 253 bp, Zea mays
acgtcttacaacaaccaatttcccagttgcaacaacaatccttggcacatctaacaatacaaaccatcgcaacgcaacagcaacaacaattcctaccagcactgagccacctagccatggtgaaccctgccgcctacttgcaacagcagttgcttgcatcaaacccacttgctctggcaaacgtagttgcaaaccagccacaacaacagctgcaacagtttctgccagcgctcagtcaactagccatggtgaa

SEQ ID NO: 26250 - DNA, 254 bp, Zea mays
ctactaccattcagccagctagctggtgtgagccctgctaccttcttgacacaaccacagttgttgccgttctaccagcacgttgcgcctaacgctggcaccctcttacaactgcaacaattgctgccattcaaccaacttgctttgacaaacccagcagtgttctaccaacaacccatcattggtggtgccctcttttagatttcttatgagttatagttcaataataaagttttttatctgatgtttgtggc

SEQ ID NO: 26251 - DNA, 251 bp, Zea mays
gttacttcaatggccttcgaacacccagctgtgcaagcctataggctacaacaagcgattgccgcgagcgtcttacaacaaccaattgcccaattgcaacaacaatccttggcacatctaacaatacaaaccatcgcaacgcaacagcaacaacagttcctaccagcactgagccacctagccatggtgaaccctgtcgcctacttgcaacagcagctgcttgcatccaacccacttgctctagcaaacgt

SEQ ID NO: 26252 - DNA, 249 bp, Zea mays
ctgctgccatcttattgcagcaacagttgctgccattccgtctacaagttgttgcaaacattgctgctttcttgcaacaacaacaattgctgccattttacccacaggttgtgggaaacattaacgccttcttgcaacaacaacaattgctgccattctacccacaggatgtggcaaacattgtcgccttcttacaacaacagcaattgctgccatttagccaactcgctttgacgaatcctaccacct

SEQ ID NO: 26253 - DNA, 247 bp, Zea mays
caaagcggcagtgcgtagagaggatcgtcgaacagaacagcatgaagatggtcatcgttctcgtcgtgtgcctggctctgtcagctgccagcgcctctgcaatgcagatgccctgcccctgcgcggggctgcagggcttgtacggcgctggcgccggcctgacgacgatgatgggcgccggcgggctgtacccctacgcggagtacctgaggcagccgcagtgcagcccgctggcggcggcgcccta

SEQ ID NO: 26254 - DNA, 246 bp, Zea mays
ggtatgcagatctttgtgaagaccttgactggcaagaccataaccctggaggttgagagctccgacaccatcgacaacgtgaaggcaaagatccaggacaaagagggcatccccccagaccagcagcgtctgatcttcgctggcaagcagctggaggatggccgcaccctagcagactacaacatccagaaggagagcactctccacctggtgctccgcctccgtggtggtcagtaagccatggtt

SEQ ID NO: 26255 - DNA, 247 bp, Zea mays
cgctatggcgctggtgcccttctccaaagtgggaagacaggacttatttcctcggttggcaaccttgcggctccagttgaagaatggactgttggtggaacagcattaacatcactgatggatgttgagaggaggcacggcaagttcaagccagtgatcaagaaggctatggtcgaacttgatgctgcacctttcaagaaatatgcatcgatgcgtgatgagtgggccctcaagaacagatacatca

SEQ ID NO: 26256 - DNA, 231 bp, Zea mays
cgtgccgcctgcagcagccgactccatgcccctacgctgctgccggcggtgtcccccactgaagaaactatgtgctgtagtatagccgctggctagctagctagttgagtcatttagcggcgatgattgagtaataatgtgtcacgcatcaccatgggtggcagtgtcagtgtgagcaatgacctgaatgaacaattgacatgaaaagaaaaaaagtactccatctgttcc

SEQ ID NO: 26257 - DNA, 241 bp, Zea mays
caacaacagctgcaacagtttatgccagtgctcagtcaactagccatggtgaaccctgccgtctacctacaactactttcatctagcccgctcgcggtgggcaatgcacctacgtacctacaacaacagttgctgcaacaaattgtaccagctctgactcagctagctgtggcaaaccctgctgcctacttacaacagttgcttccattcaaccaactggctgtgtcaaactctgctgcgt

SEQ ID NO: 26258 - DNA, 244 bp, Zea mays
caaccaactagctgcattgaactctgcttcttatttgcaacaacaacaactaccattcagccagctacctgttgcctacccccagcaatttcttccattcaaccaactggcagcattgaactctcctgcttatttacagcagcaacaactactaccattcagccagctagctggtgtgagccctgctaccttcttgacacaaccacagttgttgccgttctaccagcacgctgcgcctaacgct

SEQ ID NO: 26259 - DNA, 244 bp, Zea mays
ccggacgcgccccgatccagatccaggggcgtaacatggcatcaaaacgtatcctcaaggaattaaaggacctgcaaaaggaccctccaacgtcatgcagtgctggtcctgctggtgaggatatgttccactggcaggcaaccatcatgggtcctcctgatagtccatatgctggaggtgttttcttagtgaacattcatttccccccggactaccctttcaagcctccaaaggtatcttttaa

SEQ ID NO: 26260 - DNA, 244 bp, Zea mays
catggagattactggcttcagtgctccagtaagagagcagatctacaagatagcttcagtgaacctatgctccaatatcactggtcaaatccttgcgagcctcgtcatgaatccaccaaaggttggagacgaatcatatgcttcctacaaggcagagaaagatggaatccttgagtctttagctcgtcgtgcaaaggcgttggaggatgcattcaacaagcttgagggattttcatgtaacaag

SEQ ID NO: 26261 - DNA, 249 bp, Zea mays
gacaagccattgcttcccttcagcaaggcagacgaacaagaagataagaaggatgtgccgaggccggtgacatactcctactctttctttcacctcatcttctccctggccagcatgtactcggcaatgctcttgactggttggtcaacttcggttggtgagagcggaaagcttgtggatgttgggtggccatctgtctgggtcaggattgcaacccagtgggcgacggcaggtctgttcatatggtcg

SEQ ID NO: 26262 - DNA, 256 bp, Zea mays
ggttgaactatgagcgccgtggcggtttcgtcgtcgctgaacccggacgcgccgctcttcatcccggcggcgctgctgcaggtggaggacttctcgccgcagtggtgggacctcatcaccaccactgcctggttccgcgaccactggtcccgcgagcgcgcccacctggacgagatggccgagcagatcgacgcggccggcctcctccccgacgacgaggacctcttctacgacgaccagctcgagcagggccccg

SEQ ID NO: 26263 - DNA, 256 bp, Zea mays
cggctcgaggccgaccggcggcggcggcgaggtgatggcgatggacccggacgcggtggacgcaagccttcgtggagcactactaccggacgttcgacaccaaccgcgcggcgctggtggggctgtatcaggagacctccatgctcaccttcgagggccagaagttccagggcccatccgccattgccggcaagctcggatctcttcccttccaggcctgcgagcaccagatcgtcaccgtcgactgccagccgtc

SEQ ID NO: 26264 - DNA, 255 bp, Zea mays
acattgtaatcttgagtggcgatcagctttatcggatgaattacatggaacttgtgcagaaacatgtcgaggacgatgctgatatcactatatcatgtgctcctgttgatgagagccgagcttctaaaaatgggctagtgaagattgatcatactggacgtgtacttcaattctttgaaaaaccaaagggtgctgatttgaattctatgagagttgagaccaacttcctgagctatgctatagatgatgcacaga

SEQ ID NO: 26265 - DNA, 256 bp, Zea mays
cagcaacaatgttgtcatgatcttaggcagattgagccacaatacattcaccaagcaatctacaacatggttcaatccataatccaggaggagcaacaacaacaaccatgtgagttatgtggatctcaacaagctactcaaagtgcggtggcaatcttgacagcagcacaatacctaccatcaatgtgcggcttgtaccactcatactaccaaaataatccatgcagcagcaatgacattagtggtgtttgcaatt

SEQ ID NO: 26266 - DNA, 255 bp, Zea mays
attttgagcattcagaaacacacctagcgaacgcactagcaacgacctaacaacaatggctaccaagatattatccctctttgcgcttcttgccctttttgtgagcgcaacaaatgcgttcattattccacaatgctcacttgctcctagtgccattattccacagttcctccctccagttacttcaatgggcttcgaacacccagctgtgcaagcctacaggctacaacaagcgcttgcggcgagcgtcttaca

SEQ ID NO: 26267 - DNA, 254 bp, Zea mays
ctcaccagcggtgtcttcggtatgtgaaaacccaattcttcaaccctacaggatccaacaggcaatcacagctggcatcttacctttatcacccttgttcctccaacaatcatcagccctattacatcagttacctttggtgcatttattggcacaaaacatcagggcacaacaactacaacaacttgtgctagcaaaccttgctgcctactctcagcaacagcagtttcttccattcaaccaactagctgcat

SEQ ID NO: 26268 - DNA, 254 bp, Zea mays
gccagcagttcggatcctgcggcgtcggcagcgtcggcagcccgttcctgggccagtgcgtcgagttcctgaggcaccagtgcagcccggcggcgacgcctacggctcgccacagtgccaggcgctgcagcagcagtgctgccaccagatcaggcaggtggagccgctgcaccggtaccaggcgacatacggtgtggtcctgcagtccttcctgcagcagcagccgcagggcgagctcgcggcgctgatggcgg

SEQ ID NO: 26269 - DNA, 258 bp, Zea mays
ctctgcttcttatttgcaacaacaacaactaccattcagccagctatctgctgcctacccccagcaatttcttccattcaaccaactgacagcattgaactctcctgcttatttacagcagcaacaactactaccattcagccagctagctggtgtgagccctgctaccttcttgacacaaccacagttgttgccgttctaccagcacgctgcgcctaacgctggcaccctcttacaactgcaacaattgctgccatt

SEQ ID NO: 26270 - DNA, 255 bp, Zea mays
ctgagccacctagccgtggtgaaccctgtcacctacttgcaacagcagctgcttgcatccaacccacttgctctggcgaacgtagctgcataccagcaacaacaacagctgcaacagtttatgccagtgctcagtcaactagccatggtgaaccctgccgtctacctacaactactttcatctagcccgctcgcggtgggcaatgcacctacgtacctacaacaacagttgctgcaacaaattgtaccagctctg

SEQ ID NO: 26271 - DNA, 253 bp, Zea mays
ctggacgtcagcctagcaattagctcatcgactccagattggagaactcgacaccatgaaggtgctgatcgttgcccttgctctcctggcgctcgctgcgagcgccgcctccagtacaagcggcggctgtggctgccagacaccaccgtttcatctaccgcctccgttctatatgccgcctccgttctatctgccgccgcagcagcagccgcaagcatggcaataccccactcaaccaccgcagctaagcccg

SEQ ID NO: 26272 - DNA, 253 bp, Zea mays
aagcaacatagaaagtagaatccattagcaacaatagagcaacaatggcgaccaagatattttccctccttatgctccttgctctttctacatgtgttgctaacgcgacaattttccctcaatgctcacaagctcctatagcttcccttcttcccccataccttccatcaattatagcttcagtatgtgaaaacccagctcttcaaccatataggcttcaacaagcaatcgcagcaagcaacatacctttatc

SEQ ID NO: 26273 - DNA, 249 bp, Zea mays
gtcgaacagaacagcatgaagatggtcatcgttctcgtcgtgtgcctggctctgtcagctgccagcgcctctgcaatgcagatgccctgcccctgcgcggggctgcagggcttgtacggcgctggcgccggcctgacgacgatgatgggcgccggcgggctgtacccctacgcggagtacctgaggcagccgcagtgcagcccgctggcggcggcgccctactacgccgggtgtgggcagacgagcgcc

SEQ ID NO: 26274 - DNA, 251 bp, Zea mays
attttcagcattcaaaaacacaccaagcgaacgcactagcaacgacctaacaccaatggctaccaagatattagccctccttgcgcttcttgcccttttagtgagcgcaacaaatgcgttcattattccacagtgctcacttgctcctagtgccagtattccacagttcctcccaccagttacttcaatgggcttcgaacatccagccgtgcaagcctacaggctacaactagcgcttgcggcgagcgcct

SEQ ID NO: 26275 - DNA, 147 bp, Zea mays
ccactagctacctagctcgctagcttactcatttagcggcgatgagtaacgtagtgtcacccatcaccatgggtggcagtgtgagcaatgacctgaatgaaccattgaaatggaaaggaataatatataaggaaaaaagatgattgg

SEQ ID NO: 26276 - DNA, 250 bp, Zea mays
gatttgaattctatgagagttgagaccaacttcctgagctatgctatagatgatgcacagaaatatccataccttgcatcaatgggcatttatgtcttcaagaaagatgcacttttagaccttctcaagtcaaaatatattcaattacatgactttggatctgaaatcctcccaagagctgtactagatcatagtgtgcaggcatgcatttttacgggctattgggaggatgttggaacaatcaaatcat

SEQ ID NO: 26277 - DNA, 251 bp, Zea mays
gcaattagctcatcgactccagattggagaactcgacaccatgaaggtgctgatcgttgcccttgctctcctggcgctcgctgcgagcgccgcctccagtacaagcggcggctgtggctgccagacaccaccgtttcatctaccgcctccgttctatatgccgcctccgttctatctgccgccgcagcagcagccgcagccatggcaattccccactcaaccaccgcagctaagcccgtgccagcagttcg

SEQ ID NO: 26278 - DNA, 251 bp, Zea mays
ccattgcaacgcaacaacaacaacaacaacagtttctgccatcactgagccacctagccgtggtgaaccctgtcacctacttgcaacagcagctgcttgcatccaacccacttgctctggcgaacgtagctgcataccagcaacaacaacagctgcaacagtttatgccagtgctcagtcaactagccatggtgaaccctgccgtctacctacaactactttcatctagcccgctcgcggtgggcaatgca

SEQ ID NO: 26279 - DNA, 244 bp, Zea mays
atagtgtagtggtggccagtagcacaacctaataagcgcatgaactaattgcttgcgtgtgtagttaagtaccgatcggtaattttatattgcgagtaaataaatggacctgtagtggtggagtaaaaaaaaaaaaaaaaaaaaaaaaaaaaaaaaaaaaaaaaaaaaaaaaaaaaaaaaaaaaaaaaaaaaaaaaaaaaaaaaaaaaaaaaaaaaaaaaaaaaaaaaaaaaagtaaaagaccc

SEQ ID NO: 26280 - DNA, 251 bp, Zea mays
atctaaccatacaaaccatcgcaacacaacagcaacaacagttcctaccagcactgagccaactagatgtggtgaaccctgtcgcctacttgcaacagcaggtgcttgcatccaacccacttgctctggcaaacgtagctgcataccaacaacaacaacaattgcaacagtttctgccagcgctcagtcaactagccatggtgaaccctgccgcctacctacaacagcaacaactgctttcatctagccct

SEQ ID NO: 26281 - DNA, 251 bp, Zea mays
gtgcttcatcattccttccctgtttctcttttcctgccccgcaatgtccgattggagcacaagacattgaagcttctgaagtattggacctggcaatttgttattgttaggccagtatgttccattctgattattgcactccagcttcttgggctgtaccccagctgggtcagctggacgtttagtattatactgaacttttcagtctccatggccttatatgcattggttctcttctaccacttgtttgc

SEQ ID NO: 26282 - DNA, 255 bp, Zea mays
aaccaattgcccaattacaacaacaatccttggcacatctaaccatacaaaccatcgcaacgcagcagcaacaagcactgagccacctagccgtggtgaaccctatcgcctacttgcaacaacagctgcttgcatccaacccacttgctttggcaaacgtagctgcataccaacaacaacaacagttgcaacagtttctaccagcgctcagtcaactagccatggtgaaccctatcgcctacctacaacagcaac

SEQ ID NO: 26283 - DNA, 247 bp, Zea mays
attttgagcattcagaaacacaccaagcgaacaccattagcaacaacctaacaacaatggctaccaagatattatccctccttgcgcttcttgcgctttttgcgagcgcaacaaatgcgttcattattccacaatgctcacttgctccaagttccattattacacagttcctcccaccagttacttcaatgggcttcgaacacccagctgtgcaagcctataggctacaacaagcaattgcggcgag

SEQ ID NO: 26284 - DNA, 245 bp, Zea mays
ctatactctaggaagcaaggacaccaccgccatggcagccaagatgcttgcattgttcgctctcctagctctttgtgcaagcgccactagtgcgacccatattccagggcacttgccaccagtcatgccattgggtaccatgaacccatgcatgcagtactgcatgatgcaacaggggcttgccagcttgatggcgtgtccgtccctgatgctgcagcaactgttggccttaccgcttcagacga

SEQ ID NO: 26285 - DNA, 244 bp, Zea mays
agttactgggaagatatcggtaccattgcggcattttataatgcaaacttgggaataaccaagaagccaataccagatttcagcttctatgaccgttttgctccaatttatacacaacctcgacacctgccaccttcaaaggttcttgatgctgatgtgacagacagtgttattggtgaaggatgtgttattaaaaactgcaagataaaccattctgtagttggactccgatcttgcatatctg

SEQ ID NO: 26286 - DNA, 243 bp, Zea mays
aaggtttcacggtaagtactgttgaagaggaggctgcctataatgctcgactcacgaaagataaggaaactttcaagacgatcatgaataacttgaatttgtcatatccaaagatgatggatgtagctgtacctgccaatttggtctgcggtatccaggatccaccaccgaagatctgagctgttccagtggaagcctgcaactgcacttctggttgtttatgaactctggatcgccaccaga

SEQ ID NO: 26287 - DNA, 242 bp, Zea mays
gcacaacaactacaacaacttgtgctaggaaaccttgctgcctactctcagcaacagcagtttcttccattcaaccaactggctgcattgaactctgctgcttatttgcaacaacaactaccattcagtcagctagctgctgcctacccccagcaatttcttccattcaaccaactggcagcattgaactctgctgcttatttacaacagcaacagctaccaccattcagccagctagctga

SEQ ID NO: 26288 - DNA, 244 bp, Zea mays
gttgcttccaacaattaatcaagtagttgcagcgaaccttgctgcttaccttcagcaacaacaatttcttccattcaatcaactagctggggtgaaccctgctgcttacttgcaggcacaacagctactaccattcaaccaacttgtcgggagccctgctgccatcttattgcagcaacagttgctgccattccgtctacaagttgttgcaaacattgctgctttcttgcaacaacaacaattg

SEQ ID NO: 26289 - DNA, 240 bp, Zea mays
ctactatactatactctaggaagcaaggacaccaccgccatggcagccaagatgcttgcattgttcgctctcctagctctttgtgcaagcgccactagtgcgacccatattccagggcacttgccaccagtcatgccattgggtaccatgaacccatgcatgcagtactgcatgatgcaacaggggcttgccagcttgatggcgtgtccgtccctgatgctgcagcaactgttggcctta

SEQ ID NO: 26290 - DNA, 242 bp, Zea mays
ctgaggaaacagctatttcttcattgaagaggtcgcttggtgctctgaacacacaccttgcttcaaacacataccttgttgggcatgctgttactctagctgacattgtaatgacatgcaacctctaccatggaattgcacggatcttgaccaagaccttcacgtctgatttccctcatgtcgagaggtatttctggaccatggttaaccagcctaacttcaagaaggtcattggtgaggtc

SEQ ID NO: 26291 - DNA, 244 bp, Zea mays
ccaacaagcaacatagaaagtggaatccagtagcaacaatagagcaacaatggcgaccaagatattttccctccttatgctccttgctctttctgcatgtgttgctaacgcgacaattttccctcaatgctcacaagctcctatagcttcccttcttcccccataccttccatcaatgatagcttcagtatgtgaaaacccagctcttcaaccctataggctccaacaagcaatcgcagcaagc

SEQ ID NO: 26292 - DNA, 246 bp, Zea mays
cctagccatggtgaaccctgccgcctacttgcaacagcagttgcttgcatcaaacccacttgctctggcaaacgtagttgcaaaccagccacaacaacagctgcaacagtttctgccagcgctcagtcaactagccatggtgaaccctgccgcctacctacaacagcaacaactgctttcatctagcccgctcgctgtggccaatgcacctacatacctgcaacaacaattgttgcaacagattgt

SEQ ID NO: 26293 - DNA, 246 bp, Zea mays
ccgccgccgacgcagcagcaggagacgcgccaaggagagcccgcaaggaggcgactatgagggccaagtggaagaagaagcgcatgaggaggctgaagaggaagcgccgaaagatgaggcagagatccaagtaggctgatggggattgtggatggtggtgtcggcatagttgtgttacgtttcttcgatgcgtgagttcatggagagatgtcacatcctagttcgtcgtcaccgtttgccatgggt

SEQ ID NO: 26294 - DNA, 247 bp, Zea mays
aggcgccggcgggctgtacccctacgcggagtacctgaggcagccgcagtgcagcccgctggcggcggcgccctactacgccgggtgtgggcagccgagcgccatgttccagccgctccggcaacagtgctgccagcagcagatgaggatgatggacgtgcagtccgtcgcgcacagctgcagatgatgatgcagcttgagcgtgccgctgccgccagcagcagcctgtacgagccagctctgatgc

SEQ ID NO: 26295 - DNA, 270 bp, Zea mays
aagcaacatagaaagtggaatccagtagcaacaatagagcaacaatggcgaccaagatattttccctccttatgctccttgctctttctacatgtgttgctaacgcgacaattttccctcaatgctcacaagctcctatagcttcccttcttcccccataccttccatcaattatagcttcaatatgtgaaaacccagctcttcaaccatataggcttcaacaagcaatcgcagcaagcaacatacctttatcgcccttgttgtttcaac

SEQ ID NO: 26296 - DNA, 270 bp, Zea mays
caggcaatcgcaacaggcatcttaccattatcacccttgttcctccaacaaccgtcagccctattacagcagttacctttggtccatttggtggcacaaaacatcagggcacaacaactacaacaacttgtgctagcaaaccttgctgcatactctcagcaacatcagtttcttccattcaaccaactggctgcattgaactctgctgcttatttgcaacaacaattaccattcagccagctagttgctgcctacccccagcaatttctt

SEQ ID NO: 26297 - DNA, 270 bp, Zea mays
agaaagtggaatccagtagcaacaatagagcaacaatggcgaccaagatactttccctccttatgctccttgctctttctgcatgtgttgctaacgcgacaattttccctcaatgctcacaagctcctatagcttcccttcttcccccataccttccatcaatgatagcttcagtatgtgaaaacccagctcttcaaccctataggctccaacaagcaatcgcagcaagcaacatacctttatcacccttgtttcaacaatcgccagccc

SEQ ID NO: 26298 - DNA, 268 bp, Zea mays
cagaccattagctttatctactccagagcgcagaagaacccgatcgacaccatgagggtgttgctcgttgccctcgctctcctggctctcgctgcgagcgccacctccacgcatacaagcggcggctgcggctgccagccaccgccgccggttcatctaccgccgccggtgcatctgccacctccggttcacctgccacctccggtgcatctcccaccgccggtccacctgccgccgccggtccacctgccaccgccggtccatgtgc

SEQ ID NO: 26299 - DNA, 263 bp, Zea mays
tgcagtcattggtacaaaccatcagggcacagcagctgcagcaactcgtgctacctgtgatcaaccaagtagctctggcaaacctttctccctactctcagcaacaacaatttcttccattcaaccaactgtctacactgaaccctgctgcttatttgcagcaacaactattaccattcagccagctagctactgcctactctcagcaacaacaacttcttccatttaaccaattggccgcactgaaccccgctgcttatttg

SEQ ID NO: 26300 - DNA, 260 bp, Zea mays
cgatcctgggccagtgcgtcgagttcctgaggcatcagtgcagcccgacggcgacgccctactgctcgcctcagtgccagtcgttgcggcacagtgttgccagcagctcaggcaggtggagccgcagcaccggtaccaggcgatcttcggcttggtcctccagtccatcctgcagcagcagccgcaaagcggccaggtcgcggggctgttggcggcgcagatagcgcacaactgacggcgatgtgcggcctgcagcagcc

SEQ ID NO: 26301 - DNA, 217 bp, Zea mays
ctagcaacatagaaagcacaatagtgtaccaacaatggcagccaaaatattttgcttccttatgctccttggtctttctgcaagtgttgctaccgcaaccattttcccacaatgctcacaagctcctatagcttcccttcttcccccatacctctcaccagcggtgtcttcaatgtgtgaaaacccaattgttcaaccctacaggattcaacaggca

SEQ ID NO: 26302 - DNA, 264 bp, Zea mays
atcaaaacttaaagaacacatgcagtattgtgtggatcaccctgaagaggttagcaagctggccaaagtgaaggcgcaggtttcagaagtcaagggtgttatgatggaaaacattgaaaaggttctggatcgtggagagaagattgagctgcttgtcgacaagaccgagaatcttcgctcacaggcacaagatttcagacagcagggaacaaatgtcaggagaaagatgtggttacagaacatgaaaatcaagctcatcgtcct

SEQ ID NO: 26303 - DNA, 262 bp, Zea mays; identical to SEQ ID NO: 26042

SEQ ID NO: 26304 - DNA, 261 bp, Zea mays
gtgttgccagcagctcaggcaggtggagccgcagcaccggtaccaggcgatcttcggcttggtcctccagtccatcctgcagcagcagccgcaaagcggccaggtcgcggggctgttggcggcgcagatagcgcagcaactgacggcgatgtgcggcctgcagcagccgactccatgcccctacgctgctgccggcggtgtcccccactgaagaaactatgtgctgtagtatagccgctggctagctagctagttgagtca

SEQ ID NO: 26305 - DNA, 262 bp, Zea mays
gtcaaggccaagatccaggacaaggaagggatcccgccggaccagcagcggctgatctttgccgggaagcagctggaggatggccgcacccttgcggactataacatccaaaaggagtctacgctccacctcgtgcttaggctccgcggtggaatcattgagccctctctgcaggcgctcgctcgcaagtacaaccaggacaagatgatctgccgcaaatgctatgcacgactgcaccctagggctgtcaactgccgcaaga

SEQ ID NO: 26306 - DNA, 258 bp, Zea mays
ctgagccacctagccgtggtgaaccctgtcacctacttgcaacagcagctgcttgcatccaacccacttgctctggcgaacgtagctgcataccagcaacaacaacagctgcaacagtttatgccagtgctcagtcaactagccatggtgaaccctgccgtctacctacaactactttcatctagcccgctcgcggtgggcaatgcacctacgtacctacaacaacagttgctgcaacaaattgtaccagctctgact

SEQ ID NO: 26307 - DNA, 260 bp, Zea mays
agtgatagccgcgagatttgaatacccatctatacaatcctacaggctacaagaggccatcacagcaagcatcttacggtcgttagcattgaccgtccaacaaccatatgccctattgcaacaaccatccttagtgaatctgtatctccaaagaatcacagcacaacaactacaacaacggttgcttccaacaattaatcaagtagttgcagcgaaccttgctgcttaccttcagcaacaacaatttcttccattcaatc

SEQ ID NO: 26308 - DNA, 262 bp, Zea mays
agcaaagcggcagtgcgtagagaggatcgtcgaacagaacagcatgaagatggtcatcgttctcgtcgtgtgcctggctctgtcagctgccagcgcctctgcaatgcagatgccctgcccctgcgcggggctgcagggcttgtacggcgctggcgccggcctgacgacgatgatgggcgccggcgggctgtacccctacgcggagtacctgatgcagccgcagtgcagcccgctggcggcggcgccctactacgccgggtgt

SEQ ID NO: 26309 - DNA, 270 bp, Zea mays
ggaatccagtagcaacaatagagcaacaatggcgaccaagatattttccctccttatgctccttgctctttctacatgtgttgctaacgcgacaattttccctcaatgctcacaagctcctatagcttcccttcttcccccataccttccatcaattatagcttcaatatgtgaaaacccagctcttcaaccatataggcttcaacaagcaatcgcagcaagcaacatacctttatcgcccttgttgtttcaacaatcgccagccctatc

SEQ ID NO: 26310 - DNA, 265 bp, Zea mays
gaggacaccttcgtcgtcactagactcgaccctgatggcaaaaagtttgatagagtttctcgtgttgaagctcgcagcgagcagttagatatgtatatgcagctagatgttgccacagatgtttatcctatgcatgctggcgagaaatttaacatggttatagcgcctactctgaatttggatggcacccctgacactggctactatactcaggctggcagaaaaactctggcagacaattatgagtacgtcatgcaagggaagc

SEQ ID NO: 26311 - DNA, 265 bp, Zea mays
aaacaacaagttcacatgcaaccacaaaaacatcagcaacaacaagaagttcatgttcaacaacaacaacaacaaccgcagcaccaacaacaacaacaacaacaacagcaccaacaacaacatcaatgtgaaggccaacaacaacatcaccaacaatcacaaggccatgtgcaacaacacgaacagagccatgagcaacaccaaggacagagccatgagcaacaacatcaacaacaattccagggtcatgacaagcagcaacaac

SEQ ID NO: 26312 - DNA, 261 bp, Zea mays
gtagctctggcaaacctttctccctactctcagcaacaacaatttcttccattcaaccaactgtctacactgaaccctgctgcttatttgcagcaacaactattaccattcagccagctagctactgcctactctcagcaacaacaacttcttccatttaaccaattggccgcactgaaccccgctgcttatttgcagcagcaaatactactaccatttagccagctagctgcagcaaaccgtgcttccttcttgacacag

SEQ ID NO: 26313 - DNA, 259 bp, Zea mays
acaacatcaacaacaattccagggtcatgacaagcagcaacaaccacaacagcctcagcaatatcagcagggccaggaaaaatcacaacagcaacaatgtcattgccaggagcagcaacagactacaaggtgcagctataactactatagcagtagctcaaatctaaaaaattgtcatgaattcctaaggcagcagtgcagccctttggtaatgccttttctccaatcacgtttgatacaaccaagtagctgccaggta

SEQ ID NO: 26314 - DNA, 257 bp, Zea mays
gtcagcctagcaattagctcatcgactccagattggagaactcgacaccatgaaggtgctgatcgttgcccttgctctcctggcgctcgctgcgagaccgcctccagtacaagcggcggctgtggctgccagacaccaccgtttcatctaccgcctccgttctatatgccgcctccgttctatctgccgccgcagcagcagccgcagccatggcaataccccactcaaccaccgcagctaagcccgtgccagcagtt

SEQ ID NO: 26315 - DNA, 257 bp, Zea mays
aacaatcgccagccctatctttggtgcagtcattggtacaaaccatcagggcacagcagctgcagcaactcgtgctacctgtgatcaaccaagtagctctggcaaacctttctccctactctcagcaacaacaatttcttccattcaaccaactgtctacactgaaccctgctgcttatttgcagcaacaactattaccattcagccagctagctactgcctactctcagcaacaacaacttcttccatttaaccaa

SEQ ID NO: 26316 - DNA, 258 bp, Zea mays
gttccccgaccacaccgttcctccgagcccaggagcagccccgcgccaggaggaagtttgttcttttaacaatatgtcgagggaggagaatgtttacatggccaagttggctgagcaggctgaaaggtatgaggagatggttgagtatatggagaaggtggctaagactgtagatgtggaagagctcactgttgaggagcgtaaccttctgtctgttgcatacaagaatgtgattggggctcgccgcgcttcatggcg

SEQ ID NO: 26317 - DNA, 258 bp, Zea mays
tgcaagtgctgctacggcgaccattttcccacaatgctcacaagctcctatagcttcccttcttcccccgtacctctcaccagcggtgtcttcggtatgtgaaaacccaattcttcaaccctataggatccaacaggcaatcgcagctggcatcttacctttatcacccttgttcctccaacaatcatcagccctattacagcagttacctttggtgcatttattggcacaaaacatcagggcacaacaactacaaca

SEQ ID NO: 26318 - DNA, 257 bp, Zea mays
gaacaatccagtgtgcctatcagtgtccactatgaccacggcatttccaagtcagacttgcttcaagctcttgaagcgggatttgattcagtcatggtggatggttctcatctaactttaggggataacatcttatacacaaagagcatatcttccttggctcatgcaaaaggtttacttgtggaagctgagttgggtaggctctcaggctctgaagatggcatgaccgttgaagaatatgaagcaagatttactga

SEQ ID NO: 26319 - DNA, 261 bp, Zea mays
agagaccaacaagcaacatagaaagtggaatccagtagcaacaatagagcaacaatggcgaccaagatactttccctccttatgctccttgctctttctgcatgtgttgctaacgcgacaattttccctcaatgctcacaagctcctatagcttcccttcttcccccataccttccatcaatgatagcttcagtatgtgaaaacccagctcttcaaccctataggctccaacaagcaatcgcagcaagcaacataccttta

SEQ ID NO: 26320 - DNA, 203 bp, Zea mays
agatattagccctccttgcgcttcttgcccttttagtgagcgcaacaaatgcgttcattattccacagtgctcacttgctcctagtgccagtattccacagttcctcccaccagttacttcaatgggcttcgaacatccagccgtgcaagcctacaggctacaactagcgcttgcggcgagcgccttacaacaaccaattgcc

SEQ ID NO: 26321 - DNA, 256 bp, Zea mays
agaaagtggaatccagtagcaacaacagagcaacaatggcgaccaagatattttccctccttatgctccttgctctttctgcatgtgttgctaacgcgacaattttccctcaatgctcacaagctcctatagcttcccttcttcccccataccttccatcaatgatagcttcagtatgtgaaaacccagctcttcagccctataggctccaacaagcaatcgcagcaagcaacatacctttatcacccttgttgtt

SEQ ID NO: 26322 - DNA, 251 bp, Zea mays
caacaactgctttcatctagcccgctcgctgtgggcaatgcacctacatacctgcaacaacaattgttgcaacagattgtaccagctctgactcaactagctgtggcaaaccctgttgcctacttgcaacagctgcttccattcaaccaactgactctgtcgaactctgctgcgtacctacaacagcgacaacagttacttaatccattggtagtggctaacccattggtcgccgccttcctacagcagca

SEQ ID NO: 26323 - DNA, 254 bp, Zea mays
ctcctcctcgcctcctctccctagcctccacgacgcaagggagagtgacggaaagcgacgcggcgcgagcgagtgagggccaaggggaagaggggaagcaccgcaccaggacccttgttcgccgccgccgcctctgatctccgcgaggttgtcaggattcaatatgtcgaccagcacattcgctacttcctgcacgctgttgggcaatgttagaacaacgcaggcctcccagacagcggtgaagagcccttcgt

SEQ ID NO: 26324 - DNA, 252 bp, Zea mays
atattttgagcattcagaaacacaccaagcgaacatcattagcaacaacctaacaacaatggctaccaagatattatccctccttgcgcttcttgcgctttttgcgagcgcaacaaatgcgttcattattccacaatgctcacttgctccaagttccattattacacagttcctcccaccagttacttcaatgggcttcgaacacccagctgtgcaagcctataggctacaacaagcaattgcggcgagcgt

SEQ ID NO: 26325 - DNA, 250 bp, Zea mays
  unsure (1)..(250): unsure at all n locations
gtcctaaggaggacttcgggatcaaatacaacatgggaaatggtgggcctgctcctgaatctgttaccgacaagattttctctaatacaacgacaatctctgaatacctcatctctgaagacctaccagatgttgatatttctgttgtcggtgtcaccagcttcagtggacccganatcccctttgatgtggatgtttttgactctagtgtagattacataaagttaatgaagacaatttttgacttcga

SEQ ID NO: 26326 - DNA, 253 bp, Zea mays
caacaagcaacatagaaagtggaatccagtagcaacaacagagcaacaatggcgaccaagatattttccctccttatgcttcttgctctttctgcatgtgttgctaacgcgacaattttccctcaatgctcacaagctcctatagcttcccttcttcccccataccttccatcaatgatagcttcagtatgtgaaaacccagctcttcagccctataggctccaacaagcaatcgcagcaagcaacatacctt

SEQ ID NO: 26327 - DNA, 250 bp, Zea mays
tggaattgaagggtccattccctaagaagatgcttcgaaagggtgcctttactatgcaacacttcgatcaagatctcaattttcatgctaccgaggaggatcctgtgacaaaaacggctgtgagaaggttaattttgaacattaaaccaaaggatgttggttctttgtttccgaactttcctggcgaggatccaaaaatgctatccagttttaaggatcttcttgataaaatatttacattagatccaga

SEQ ID NO: 26328 - DNA, 209 bp, Zea mays
acgcgacaattttccctcaatgctcacaagctcctatagcttcccttcttcccccataccttccatcaattatagcttcaatatgtgaaaacccagctcttcaaccatataggcttcaacaagcaatcgcagcaagcaacatacctttatcgcccttgttgtttcaacaatcgccagccctatctttggtgcagtcttggtacaaccat

SEQ ID NO: 26329 - DNA, 211 bp, Zea mays
attttgagcattcagaaacacaccaagcgaacttacctagcaacgacttaacaacaatggctaccaagatattagccctccttgcgcttcttgccctttttgtgagcgcaacaaatgcgttcattattccacaatgctcacttgctcctagtgccattataccacagttcctccgaccagttacttcaatgggcttcgaacacctagctgt

SEQ ID NO: 26330 - DNA, 160 bp, Zea mays
agttacttcaatgggcttcgaacatccagccgtgcaagcctacaggctacaactagcgcttgcggcgagcgccttacaacaaccaattgcccaattgcaacaacaatccttggcacatctaaccctacaaaccattgcaacgcaacaacaacaacaacaa

SEQ ID NO: 26331 - DNA, 158 bp, Zea mays
catcagttacctttggtgcatttattggcacaaaacatcagggcacaacaactacaacaacttgtgctagcaaaccttgctgcctactctcagcaacagcagtttcttccattcaaccaactagctgcattgaactctgcttcttatttgcaacaaca

SEQ ID NO: 26332 - DNA, 281 bp, Zea mays
attgagaccaactagcaacatagaaagcacaatagtgtaccaacaatggcagccaaaatattttgcttccttatgctccttggtctttctgcaagtgctgctaccgcaaccattttcccacaatgctcacaagctcctatagcttcctttcttcccccatacctctcaccagcggtgtcttcagtatgtgaaaacccaattcttcaaccctacaggatccaacaggcaatcgcagcaggcatcttacctttatcacccttgttcctccaacaaccgtcagc

SEQ ID NO: 26333 - DNA, 279 bp, Zea mays
cagccatggcaataccccactcaaccaccgcagctaagcccgtgccagcagttcggatcctgcggcgtcggcagcgtcggcagcccgttcctgggccagtgcgtcgagttcctgaggcaccagtgcagcccggcggcgacgccctacggctcgccacagtgccaggcgctgcagcagcagtgctgccaccagatcaggcaggtggagccgctgcaccggtaccaggcgacatacggtgtggtcctgcagtccttcctgcagcagcagccgcagggcgag

SEQ ID NO: 26334 - DNA, 274 bp, Zea mays
cagccaagtagctctggcaaacctttctccctactctcagcaacaacaatttcttccattcaaccaactgtctacactgaaccctgctgcttatttacaacaacaacaactactaccattcagccagctagctactgcctactctcagcagcaacaatttcttccatttaaccaattggccgcactgaacccctctgcttatttccagcagcaaatactactaccatttggccagctagctacaacaagcccacttcctttttgaaacaacaac

SEQ ID NO: 26335 - DNA, 272 bp, Zea mays
agcagatgtcttgacttaccgtgaaattgagcagtctacagcaataccagccgctgacctgaagcgatgcctccagtcactagctcttgtgaagggtaagcaagtcctgcggaaagagccgatgagcagggacattgccgatgatgacagcttctgcgtgaacgacaagttcaccagcaagctcttcaaggtgaagatcggcaccgtggtggcgcagaaggagaccgaccccgagaagctagagacgcggcagcgggtggaggaggacagga

SEQ ID NO: 26336 - DNA, 198 bp, Zea mays
gagcgactgtgtcgagcaggagagagcgcgatggggaagatgcggcagctgatctgcctcgtggccgccgtcgccgccgcggccatcctcctgacagcgtcggccaagaagtccggcgacgtcaccgagcttcagatcggcgtcaagtacaagcctgagtcatgtacgctgcaagcacacaaaggagacaaaattaag

SEQ ID NO: 26337 - DNA, 272 bp, Zea mays
aacgcgacaattttccctcaatgctcacaagctcctatagcttcccttcttcccccataccttccatcaatgatagcttcagtatgtgaaaacccagctcttcaaccctataggctccaacaagcaatcgcagcaagcaacatacctttatcacccttgtttcaacaatcgccagccctatctttggtgcagtcattggtacaaaccatcaaggcacagcagctgcagcaactcgtgctacctgtgatcaaccaagtagctctggcaaacct

SEQ ID NO: 26338 - DNA, 284 bp, Zea mays
agctccatcacgctcgccatacgcatggacaacctgtacctcgtgggcttcaggaccccgggcggggtgtggtgggagttcggcaaggacggcgacacccacctcctcggcgacaaccccaggtggctcggcttcggcggcaggtaccaggacctcatcggcaacaagggtctggagaccgtcaccatgggccgcgccgaaatgaccagggccgtcaacgacctggcgaagaagaagaagatggcgacactggaggaggaggatgtgcagatgcagatgcagat

SEQ ID NO: 26339 - DNA, 279 bp, Zea mays
ggcgctcgctgcgagcgcgcctccagtacaagcggcggctgtggctgccagacaccaccgtttcatctaccgcctccagtctatatgccgcctccgttctatctgccgccgcagcagcagccgcagccatggcaataccccactcaaccaccgcagctaagcccgtgccagcagttcggatcctgcggcgtcggcagcgtcggcagcccgttcctggggcagtgcgtcgagttcctgaggcaccagtgcagcccggcggcgacgcctacggctcgcaca

SEQ ID NO: 26340 - DNA, 201 bp, Zea mays
caactacaacaacttgtgctagcaaaccttgctgcctactctcagcaacagcagtttcttccattcaaccaactagctgcattgaactctgcttcttatttgcaacaacaacaactaccattcagccagctatctgctgcctacccccagcaatttcttccattcaaccaactgacagcattgaactctcctgcttattta

SEQ ID NO: 26341 - DNA, 270 bp, Zea mays
caagtgcgatttcgatctcgcagccaccttttttttgttctgttgtgtatctagtagttggaggagatatgcagtttgcacttgcattggacacgaactcaggtcctcaccagataagatcttgtgagggtgatgggattgacaggttggaaaaattaagtattgggggcagaaagcaggagaaagctttgagaaataggtgctttggtggtagagttgctgcaactacacaatgtattcttacctcagatgcttgtcctgaaactcttc

SEQ ID NO: 26342 - DNA, 200 bp, Zea mays
ggcaagactatcaccttggaggtggagagctctgacaccattgacaatgtgaaggccaagatccaggacaaggagggcattcccccagaccagcagcgtctgatctttgcgggcaagcagctggaggatggccgcactctcgcggactacaacatccagaaggagagcacccttcaccttgttctccgcctcaggggtgg

SEQ ID NO: 26343 - DNA, 273 bp, Zea mays
aagcaacatagaaagtggaatccagtagcaacaatagagcaacaatggcgaccaagatattttccctccttatgctccttgctctttctgcatgtgttgctaacgcgacaattttccctcaatgctcacaagctcctatagcttcccttcttcccccataccttccatcaatgatagcttcagtatgtgaaaacccagctcttcaaccctataggctccaacaagcaatcgcagcaagcaacatacctttatcacccttgtttcaacaatcgc

SEQ ID NO: 26344 - DNA, 270 bp, Zea mays
gcgtggccttgcgctggtggtctttgctgccactgcaggtgcttcttcgtgctatttcctgtcgaagatgattgggaagccactggtgttcacactgtggccagataagctcagcttcttccagagacaggttgctaaaagaagagagaagttgttgaattacatgcttttcctcagggtgaccccaacattgccaaataccttcatcaacttagcttcacccatagtagatgtcccctaccatatattcttactgggaactctcattgg

SEQ ID NO: 26345 - DNA, 267 bp, Zea mays
attgagaccagcaagcaacatagaaagtagaatccattagcaacaatagatcaacaatggcgaccaagatattttccctccttatgctccttgctctttctacatgtgttgctaacgcgacaattttccctcaatgctcacaagctcctatagcttcccttcttcccccataccttccatcaattatagcttcagtatgtgaaaacccagctcttcaaccatataggcttcaacaagcaatcgcagcaagcaacatacctttatcgc

SEQ ID NO: 26346 - DNA, 262 bp, Zea mays
cacaagctcctatagcttcccttcttcccccataccttccatcaatgatagcttcagtatgtgaaaacccagctcttcagccctataggctccaacaagcaatcgcagcaagcaacatacctttatcacccttgttgtttcaacaatcgccagccctatctttggtgcagtcattggtacaaaccatcagggcacagcagctgcagcaactcgtgctacctgtgatccaccaagtagctctggcaaacctttctccctagtc

SEQ ID NO: 26347 - DNA, 192 bp, Zea mays
caaggcgctcaacgagcaccatgtcctcctggagggtaccctcctgaagcccaacatggtgactccaggctccgactccaagaaggtgacccctgaggtgattgctgagtacaccgtccgtaccctccagaggaccgtccctgctgctgtgcctgctgttgtcttcctctctggtggacagagcgaggagga

SEQ ID NO: 26348 - DNA, 183 bp, Zea mays
gcctagcaattagctcatcgactccagattggagaactcgacaccatgaaggtgctgatcgttgcccttgctctcctggcgctcgctgcgagcgccgcctccagtacaagcggcggctgtggctgccagacaccaccgtttcatctaccgcctccgttctatatgccgcctccgttctatctg

SEQ ID NO: 26349 - DNA, 199 bp, Zea mays
gcagtttgcggctaaccccgcaaccctcttacaactacaacaattgttgccctttgtccaacttgctttgacagaccgagcggcctcctaccaacaacacatcattggtggtgccctcttttagattgcttattagttgtaattcaataataaagttttttggatgatgtatgtggccaaccagaaataagaagttaca

SEQ ID NO: 26350 - DNA, 197 bp, Zea mays
actagttctagatcgcgagcagccgccctttttttttttttttttatgaccatgcatatattattggtcataccacacatgataatgtgtgtcgtcttactgcattattacatatatagatagagagaaatggatgtctggagatctgaattattcgtatttgctgaaaccgttaatatggatatccgtatccttat

SEQ ID NO: 26351 - DNA, 197 bp, Zea mays
tagcaacatagaaagcacaatagtgtaccaacaatggcagccaaaatattttgcttccttatgctccttggtctttctgcaagtgctgctaccgcaaccattttcccacaatgctcacaagctcctatagcttcctttcttcccccatacctctcaccagcggtgtcttcagtatgtgaaaacccaattcttcaacc

SEQ ID NO: 26352 - DNA, 267 bp, Zea mays
gtcctccagtccatcctgcagcagcagccgcaaagcggccaggtcgcggggctgttggcggcgcagatagcgcacaactgacggcgatgtgcggcctgcaacagccgactccatgcccctacgctgctgccggcggtgtcccccactgaagaaactatgtgctgtagtatagccgctggctagctagctagttgagtcatttagcggcgatgattgagtaataatgtgtcacgcatcaccatgggtggcagtgtcagtgtgagcaat

SEQ ID NO: 26353 - DNA, 267 bp, Zea mays
gagactgggcatcaagatgtggtccatgatattgccatggattactacgggaagcgcctagctacagcctcctctgataacacaataaagatcattggcgtaagtggaacctcacaccagcagcttgcaaccttgagtggacaccagggcccagtatggcaagtcgcatgggctcatcccaagtttggttccatgcttgcatcctgcagctacgacggccgggtgatcatctggaaggaaggaagcaagcctgatgaatgggcacta

SEQ ID NO: 26354 - DNA, 264 bp, Zea mays
gcaattagctcatcgactccagattggagaactcgacaccatgaaggtgctgatcgttgcccttgctctcctggcgctcgctgcgagcgccgcctccagtacaagcggcggctgtggctgccagacaccaccgtttcatctaccgcctccgttctatatgccgcctccgttctatctgccgccgcagcagcagccgcagccatggcaataccccactcgaccaccgcagctaagcccgtgccagcagttcggatcctgcggcgt

SEQ ID NO: 26355 - DNA, 264 bp, Zea mays
ctgacatatgagcagaggaaggccagcctcattgaaaggctcaaccaactcaactcctccggtggtgctgatgacgacgatgaggacgacgagtaaagtttagtgccatcgaagtggtgctatctcaatccagcgatcagcaattgtgtactgtcttatgcggggacctgtagtactgcaataggcatttttgtttaagttttgcgaggtgaacaaaactgtttctgttagtttcgagcttgagctctcaatgtttactcttta

SEQ ID NO: 26356 - DNA, 264 bp, Zea mays
ctggacgtcagcctagcaattagctcatcgactccagattggagaactcgacaccatgaaggtgctgatcgttgcccttgctctcctggcgctcgctgcgagcgccgcctccagtacaagcggcggctgtggctgccagacaccaccgtttcatctaccgcctccgttctatatgccgcctccgttctatctgccgccgcagcagcagccgcagccatggcaataccccactcaaccaccgcagctaagcccgtgccagcagtt

SEQ ID NO: 26357 - DNA, 181 bp, Zea mays
ccctcttacaactgcaacaattgctgccattcaaccaacttgctttgacaaacccagcagtgttctaccaacaacccatcattggtggtgccctcttttagatttcttatgagttatagttcaataataaagttttttatctgatgtttgtggcttcccagaaataagaaagtacatttct

SEQ ID NO: 26358 - DNA, 258 bp, Zea mays
cccggacgagttgcagttggatctcagatcggtgatcacataaacaatggtgaaggctgttgctgtgcttggtagcagcgatggtgtcaagggcaccatctttttcacccaagtgggagatggccctaccactgtcaccggaagtgtctctggcctcaagcctggcctccatgggtttcatgtgcatgcgcttggtgacaccaccaatggctgcatgtcaactggaccacactacaatcctgcgagcaaggaacatgg

SEQ ID NO: 26359 - DNA, 259 bp, Zea mays
aacgcaacaacaacaacaacaacagtttctgccatcactgagccacctagccgtggtgaaccctgtcacctacttgcaacagcagctgcttgcatccaacccacttgctctggcgaacgtagctgcataccagcaacaacaacagctgcaacagtttatgccagtgctcagtcaactagccatggtgaaccctgccgtctacctacaattactttcatctagcccgctcgcggtgggcaatgcacctacgtacctacaa

SEQ ID NO: 26360 - DNA, 184 bp, Zea mays
caaagcggcagtgcgtagagaggatcgtcgaacagaacagcatgaagatggtcatcgttctcgtcgtgtgcctggctctgtcagctgccagcgcctctgcaatgcagatgccctgcccctgcgcggggctgcagggcttgtacggcgctggcgccggcctgacgacgatgatgggcgccggcgg

SEQ ID NO: 26361 - DNA, 257 bp, Zea mays
gctccttgctctttctgcatgtgttgctaacgcgacaattttccctcaatgctcacaagctcctatagcttcccttcttcccccataccttccatcaatgatagcttcagtatgtgaaaacccagctcttcaaccctataggctccaacaagcaatcgcagcaagcaacatacctttatcacccttgtttcaacaatcgccagccctatctttggtgcagtcattggtacaaaccatcagggcacagcagctgcagc

SEQ ID NO: 26362 - DNA, 257 bp, Zea mays
atcgtcgaacagaacagcatgaagatggtcatcgttctcgtcgtgtgcctggctctgtcagctgccagcgcctctgcaatgcagatgccctgcccctgcgcggggctgcagggcttgtacggcgctggcgccggcctgacgacgatgatgggcgccggcgggctgtacccctacgcggagtacctgaggcagccgcagtgcagcccgctggcggcggcgccctactacgccgggtgtgggcagacgagcgccatgta

SEQ ID NO: 26363 - DNA, 262 bp, Zea mays
  unsure (1)..(262): unsure at all n locations
ctcccaccgccggtccacctgccgncgccggtccacctgccaccgccggtccatgtgccgccgccggttcatctgccgccgccaccatgccactaccctactcaaccgccccggcctcagcctcatccccagccacacccatgcccgtgccaacagccgcatccaagcccgtgccagctgcagggaacctgcggcgttggcagcaccccgatcctgggccagtgcgtcgagtttctgaggcatcagtgcagcccgacggcga

SEQ ID NO: 26364 - DNA, 260 bp, Zea mays
tatagccaacacacacacaaatactctccattccattccatctcaaaggatagaataatgggcggtctctccaccaagcttttcgtggtcctcctcctgctcgtttgttacaccgggacgcaaggcgggccggtgactatggtgtcggcgaggaagtgcgagtcgcagagcttccgcttcaagggaccttgctcgagggacgccaactgcgcaaacgtctgcctgaccgaagtttcaccggcggcgtgtgcaagggccta

SEQ ID NO: 26365 - DNA, 263 bp, Zea mays
cacaatgctcacttgctccgagtgccattattccacagttcctccctccagttacttcaatgggcttcgaacacccagctgtgcaagcctataggctacaacaagcgcttgcggcgagcgtcttagaacaaccaattgcccaattacaacaacaatccttagcacatctaaccatacaaaccatcgcaacgcagcagcaacaagcactgagccacctagccgtggtgaaccctatcgcctacttgcaacaacagctgcttgca

SEQ ID NO: 26366 - DNA, 263 bp, Zea mays
ctcaccagcggtgtcttcagtatgtgaaaacccaattcttcaaccctacaggatccaacaggcaatcgcagcaggcatcttacctttatcacccttgttcctccaacaaccgtcagccctattacagcagttacctttggtgcatttgttggcacaaaacatcaaggcacaacaactacaacaacttgtgctaggaaaccttgctgcctactctcagcaacagcagtttcttccattcaaccaactggctgcattgaactctg

SEQ ID NO: 26367 - DNA, 208 bp, Zea mays
cttccgtggccaggatgttcccaagtttgtaatggacgaggtctatgacatggagctctacgagtggaccaaggtggacatctctgatgaggcccagaaggagcgcgtcaatgcgatgattgaggaccaggagccctttgagggcgaggccttgcttgacgcgaaatgcttcaagtgagtgtgcttgcctggagacagaactgtttag

SEQ ID NO: 26368 - DNA, 263 bp, Zea mays
aacacctagctgtgcaagccaacatgcaacaacaagcgcttgcggcgagcgtcttacaacaaccaattgcccaattgcaacaacaatccttgccacatctaacaatacaagccatcacaacgcaacagcaacaacagttcctaccagcactgagccacctagccatggtgaaccctgccgcctacttgcaagagcagctgcttgcatccaacccacttgctctggcgaacgtagttgcaaaccagcaacaacaacagctacaa

SEQ ID NO: 26369 - DNA, 263 bp, Zea mays
cttacctttatcacccttgttcctccaacaatcatcagccctattacaacagttacctttggtgcatttattggcacaaaacatcagggcacaacaactacaacaacttgtgctagcaaaccttgctgcctactctcagcaacagcagtttcttccattcaaccaactaggttcattgaactctgcttcttatttgcaacaacaacaactaccattcagccagctacctgctgcctacccccagcaatttcttccattcaacc

SEQ ID NO: 26370 - DNA, 260 bp, Zea mays
gccaggcgctgcagcacatgctgccaccagatcaggcaggtggagccgctgcaccggtaccaggcgacatacggtgtggtcctgcagtccttcctgcagcagcagccgcagggcgagctcgcggcgctgatggcggcccaggtagcgcacagctgacggcgatgtgcggcctgcagctgcagcagccaggtccctgcccttgcaacgcagctgccggcggtgtctactactgaggaaactatgtactgtagtaataatgt

SEQ ID NO: 26371 - DNA, 255 bp, Zea mays
gtcagcctagcaattagctcatcgactccagattggagaactcgacaccatgaaggtgctgatcgttgcccttgctctcctggcgctcgctgcgagcgcgcctccagtacaagcggcggctgtggctgccagacaccaccgtttcatctaccgcctccgttctatatgccgcctccgttctatctgccgccgcagcagcagccgcagccatggcaataccccactcaaccaccgcagctaagcccgtgtcagcag

SEQ ID NO: 26372 - DNA, 113 bp, Zea mays
tagcttcagtatgtgaaaacccagctcttcaaccctataggctccaacaagcaatcgcagcaagcaacatacctttatcacccttatttcaacaatcggcagccctatctttg

SEQ ID NO: 26373 - DNA, 257 bp, Zea mays
  unsure (1)..(257): unsure at all n locations
accatgagcaacaacatcnacaacaattccagggtcatgacaagcagcaacaaccacaacagcctcagcaatatcagcagggccaggaaaaatcacaacagcaacaatgtcattgccaggagcagcaacagactacaaggtgcagctataactactatagcagtagctcaaatctaaaaaattgtcatgaattcctaaggcagcagtgcagccctttggtaatgccttttctccaatcacgtttgatacaaccaagt

SEQ ID NO: 26374 - DNA, 255 bp, Zea mays
cagtgctgccagcagcagatgaggatgatggacgtgcagtccgtcgcgcacagctgcagatgatgatgcagcttgagcgtgccgctgccgccagcagcagcctgtacgagccagctctgatgcagcagcagcagcagctgctggcagcccagggtctcaaccccatggccatgatgatggcgcagaacatgccggccatgggtggactctaccagtaccagtaccagctgcccagctaccgcaccaacccctgtg

SEQ ID NO: 26375 - DNA, 252 bp, Zea mays
  unsure (1)..(252): unsure at all n locations
atncagcgctcgagccgctcgagcgctcacttctcgatggcgcgtctcgaccgcgtgaagcccatgacaggactggacgagatgtacggcaagaacgcgcgcctgagggagctggcgaacctcgtgatcgttgccggtgaccacggcaaggagtccaaggacagggaggagcaggcggagttcaagaagatgtacagcctcatcgacgagtacaagttgaagggccatatccggtggatctcggcgcagatg

SEQ ID NO: 26376 - DNA, 257 bp, Zea mays
gtgccgccgccggttcatctgccgccgccaccatgccactaccctactcaaccgccccggcctcagcctcatccccagccacacccatgcccgtgccaacagccgcatccaagcccgtgccagctgcagggaacctgcggcgttggcagcaccccgatcctgggccagtgcgtcgagttcctgaggcatcagtgcagcccgacggcgacgccctactgctcgcctcagtgccagtcgttgcggcacagtgttgccag

SEQ ID NO: 26377 - DNA, 256 bp, Zea mays
attacaacaacaatccttggcacatctaaccatacaaaccatcgcaacgcaacagcaacaacaatttctaccagcactgagccaactagctgtggtgaacactgtcgcctacttgcaacagcagttgcttgcatccaacccacttgctctggcaaacatagttgcataccaacaacaacaacaattgcaacagtttctaccagcgctcagtcaactagccatggtgaaccctgccgcctacctacaacagcaacaa

SEQ ID NO: 26378 - DNA, 237 bp, Zea mays
cgcagaacatgccggccatgggtggactctaccagtaccagtaccagctgcccagctaccgcaccaacccctgtggcgtctccgctgccattccgccctactactgattcatgatatttgggaaatctcctctatccatccctctctatctatatatgtaataatgcagtaagacgacacacattatcatgtgtggtatgaccaataatatatgcatcataataaagttttggtttt

SEQ ID NO: 26379 - DNA, 257 bp, Zea mays
caatagtgtaccaacaatggcagccaaaatattttgcctccttatgctccttggtctttctgcaagtgctgctacggcgaccattttcccgcaatgctcgcaagctcctatagcttcccttcttcccccgtacctctcaccagcggtgtcttcggtatgtgaaaacccaattcttcaaccctacaggatccaacaggcaatcacagctggcatcttacctttatcacccttgttcctccaacaatcatcagccctat

SEQ ID NO: 26380 - DNA, 128 bp, Zea mays
  unsure (1)..(128): unsure at all n locations
ggaacaaacacatgggaccggtttgagttccgcatccataagacggtgatcgacctgatcagctcnccagacgtggtgaagcagatcacctctatcaccattgagccgggtgttgaggtcgaggtgac

SEQ ID NO: 26381 - DNA, 256 bp, Zea mays
atatgatagaattataaaaaatattgaaaggggggaagcaagaatatcccgcaaggatgagattatgaaggctattgggaagaagttagaccgctacaagaacccatggttagagttgaaaattcaatatggccaaaataaagggaagttctataatgaggaatgtgaccgctttatgctttgcatggtgcacaaacttggatatgggaactgggatgaactgaaagctgccttccgtatgtctcccttgttccga

SEQ ID NO: 26382 - DNA, 253 bp, Zea mays
gaacagaacagcatgaagatggtcatcgttctcgtcgtgtgcctggctctgtcagctgccagcgcctctgcaatgcagatgccctgcccctgcgcggggctgcagggcttgtacggcgctggcgccggcctgacgacgatgatgggcgccggcgggctgtacccctacgcggagtacctgaggcagccgcagtgcagcccgctggcggcggcgccctactacgccgggtgtgggcagccgagcgccatgttcc

SEQ ID NO: 26383 - DNA, 256 bp, Zea mays
aaagcacaatagtgtaccaacaatggcagccaaaatattttgcctccttatgctccttggtctttctgcaagtgctgctacggcgaccattttcccacaatgctcacaagctcctatagcttcccttcttcccccgtacctctcaccagcggtgtcttcggtatgtgaaaacccaattcttcaaccctataggatccaacaggcaatcgcagctggcatcttacctttatcacccttgttcctccaacaatcatca

SEQ ID NO: 26384 - DNA, 241 bp, Zea mays
ctgacggcgatgtgcggcctgcagcagccgactccatgcccctacgctgctgccggcggtgtcccccactgaagaaactatgtgctgtagtatagccgctggctagctagctagttgagtcatttagcggcgatgattgagtaataatgtgtcacgcatcaccatgggtggcagtgtcagtgtgagcaatgacctgaatgaacaattgaaatgaaaagaaaaaaagtactccatctgttcc

SEQ ID NO: 26385 - DNA, 251 bp, Zea mays
  unsure (1)..(251): unsure at all n locations
aacacaccaagcgaagtnactagcaacaacctaacaacaatggctaccaagatattatccctccttgcgcttcttgcgctttttgcgagcgcaacaaatgcgtccattattccacaatgctcacttgctcctagttccattattccacagttcctcccaccagttacttcaatggccttcgaacacccagctgtgcaagcctataggctacaacaagcgattgcggcgagcgtcttacaacaaccaattgc

SEQ ID NO: 26386 - DNA, 249 bp, Zea mays
attggtacaaaccatcaaggcacagcagctgcagcaactcgtgctacctgtgatcaaccaagtagctctggcaaacctttctccctactatcagcaacaacaatttcttccattcaaccaactatctacactgaaccctgctgcttatttgcagcaacaactattaccattcagccagctagctactgcctactctcatcaacaacaacttcttccatttaaccaattggccgcactgaacctcgctgc

SEQ ID NO: 26387 - DNA, 253 bp, Zea mays
tagcaacatagaaagcacaatagtgtaccaacaatggcagctaaaatattttgcctccttatgctccttggtctttctgcaagtgctgctacggcgaccattttcccacaatgctcacaagctcctatagcttcccttcttcccccgtacctctcaccaacggtgtcttcggtatgtgaaaacccaattcttcaaccctacaggatccaacaggcaatcgcagctggcatcttacctttatcacccttgttcc

SEQ ID NO: 26388 - DNA, 252 bp, Zea mays
caaagcggcagtgcgtagagaggatcgtcgaacagaacagcatgaagatggtcatcgttctcgtcgtgtgcctggctctgtcagctgccagcgcctctgcaatgcagatgccctgcccctgcgcggggctgcagggcttgtacggcgctggcgccggcctgacgacgatgatgggcgccggcgggctgtacccctacgcggagtacctgaggcagccgcagtgcagcccgctggcggcggcgccctactacg

SEQ ID NO: 26389 - DNA, 252 bp, Zea mays
gcattcagaaacacaccaagcgaacacattagcaacaacctaacaacaatggctaccaagatattatccctccttgcgcttcttgcgctttttgcgcgcgcaacaaatgcgttcattattccacaatgctcacttgctccaagttccattattacacagttcctcccaccagttacttcaatgggcttcgaacacccagctgtgcaagcctataggctacaacaagcaattgcggcgagcgtcttacaacaa

SEQ ID NO: 26390 - DNA, 253 bp, Zea mays
ctagcaacatagaaagcacaatagtgtaccaacaatggcagccaaaatattttgcctccttatgctccttggtctttctgcaagtgctgctacggcgaccattttcccgcaatgctcgcaagctcctatagcttcccttcttcccccgtacctctcaccagcggtgtcttcggtatgtgaaaacccaattcttcaaccctacaggatccaacaggcaatcacagctggcatcttacctttatcacccttgttc

SEQ ID NO: 26391 - DNA, 252 bp, Zea mays
cagcattcaaaaacacaccaagcgaacgcactagcaacgacctaacaccaatggctaccaagatattagccctccttgcgcttcttgcccttttagtgagcgcaacaaatgcgttcattattccacagtgctcacttgctcctagtgccattattccacagttcctcccaccagttacttcaatgggcttcgaacatccagccgtgcaagcctacaggctacaactagcgcttgcggcgagcgccttacaac

SEQ ID NO: 26392 - DNA, 249 bp, Zea mays
tattttcagcattcaaaaacacaccaagcgaacgcactagcaacgacctaacaccaatggctaccaagatattagccctccttgcgcttcttgcccttttagtgagcgcaacaaatgcgttcattattccacagtgctcacttgctcctagtgccattattccacagttcctcccaccagttacttcaatgggcttcgaacatccagccgtgcaagcctacaggctacaactagcgcttgcggcgagcg

SEQ ID NO: 26393 - DNA, 252 bp, Zea mays
gaaagcacaatagtgtaccaacaatggcagccaaaatattttgcctccttatgctccttggtctttctgcaagtgctgctacggcgaccattttcccgcaatgctcgcaagctcctatagcttcccttcttcccccgtacctctcaccagcggtgtcttcggtatgtgaaaacccaattcttcaaccctacaggatccaacaggcaatcgcagctggcatcttacctttatcacccttgttcctccaacaat

SEQ ID NO: 26394 - DNA, 252 bp, Zea mays
ccgcaccctggcggattacaacatccagaaggagagcactctccacctggtgctccgcctcaggggtggcatgcagatttttgtgaagacattgactggcaagactatcaccttggaggtggagagctctgacaccattgacaatgtgaaggccaagatccaggacaaggagggcattcccccagaccagcagcgtctgatctttgcgggcaagcagctggaggatggccgcactctcgcggactacaacat

SEQ ID NO: 26395 - DNA, 253 bp, Zea mays
ctggacgtcagcctagcaattagctcatcgactccagattggagaactcgacaccatgaaggtgctgatcgttgcccttgctctcctggcgctcgctgcgagcgcgcctccagtacaagcggcggctgtggctgccagacaccaccgtttcatctaccgcctccgttctatatgccgcctccgttctatctgccgccgcagcagcagtcgcagccatggcaataccccactcaaccaacggagctaagcccgt

SEQ ID NO: 26396 - DNA, 251 bp, Zea mays
gtgcgtagagaggatcgtcgaacagaacagcatgaagatggtcatcgttctcgtcgtgtgcctggctctgtcagctgccagcgcctctgcaatgcagatgccctgcccctgcgcggggctgcagggcttgtacggcgctggcgccggcctgacgacgatgatgggcgccggcgggctgtacccctacgcggagtacctgaggcagccgcagtgcagcccgctggcggcggcgccctactacgccgggtgtg

SEQ ID NO: 26397 - DNA, 261 bp, Zea mays
cgtcgagttcctgaggcatcagtgcagcccgacggcgacgccctactgctcgcctcagtgccagtcgttgcggcagcagtgttgccagcagctcaggcaggtggagccgcagcaccggtaccaggcgatcttcggcttggtcctccagtccatcctgcagcagcagccgcaaagcggccaggtcgcggggctgttggcggcgcagatagcgcacaactgacggcgatgtgcggcctgcagcagccgactccatgcccctac

SEQ ID NO: 26398 - DNA, 257 bp, Zea mays
agagaggatcgtcgaacagaacagcatgaagatggtcatcgttctcgtcgtgtgcctggctctgtcagctgccagcgcctctgcaatgcagatgccctgcccctgcgcggggctgcagggcttgtacggcgctggcgccggcctgacgacgatgatgggcgccggcgggctgtacccctacgcggagtacctgaggcagccgcagtgcagcccgctggcggcggcgccctactacgccgggtgtgggcagacgagcg

SEQ ID NO: 26399 - DNA, 262 bp, Zea mays
cgcaacaacaacaacaacagtttctgccatcactgagccacctagccgtggtgaaccctgtcacctacttgcaacagcagctgcttgcatccaacccacttgctctggcgaacgtagctgcataccagcaacaacaacagctgcaacagtttatgccagtgctcagtcaactagccatggtgaaccctgccgtctacctacaactactttcatctagcccgctcgcggtgggcaatgcacctacgtacctacaacaacagtt

SEQ ID NO: 26400 - DNA, 261 bp, Zea mays
ccttcaccttgttctccgcctcagaggtggtatgcagatctttgtaaagaccctgactggaaaaaccataaccctggaggttgagagctcggacaccatcgacaatgtgaaggcgaagatccaggacaaggagggcatccccccggaccagcagcgtctgatcttcgccggcaaacagctggaggatggccgcaccctagcagactacaacatccaaaaggagagcaccctccaccttgtgctccgtctccgtggtggtca

SEQ ID NO: 26401 - DNA, 258 bp, Zea mays
agcaacaacctaacaacaatggctaccaagatattatccctccttgcgcttcttgcgctttttgcgagcgcaacaaatgcgttcattattccacaatgctcacttgctccaagttccattattacacagttcctcccaccagttacttcaatgggcttcgaacacccagctgtgcaagcctataggctacaacaagcaattgcggcgagcgtcttacaacaaccaatttcccagttgcaacaacaatccttggcacat

SEQ ID NO: 26402 - DNA, 258 bp, Zea mays
ggcgatcttcggcttggtcctccagtccatcctgcagcagcagccgcaaagcgccaggtcgcggggctgttggcggcgcagatagcgcacaactgacggcgatgtgcggcctgcagcagccgactccatgcccctacgctgctgccggcggtgtcccccactgaagaaactatgtgctgtagtatagccgctggctagctagctagttgagtcatttagcggcgatgattgagtaataatgtgtcacgcatcaccatg

SEQ ID NO: 26403 - DNA, 257 bp, Zea mays
cgcaatgctcgcaagctcctatagcttcccttcttcccccgtacctctcaccagcggtgtcttcggtatgtgaaaacccaattcttcaaccctacaggatccaacaggcaatcacagctggcatcttacctttatcacccttgttcctccaacaatcatcagccctattacatcagttacctttggtgcatttattggcacaaaacatcagggcacaacaactacaacaacttgtgctagcaaaccttgctgcctac

SEQ ID NO: 26404 - DNA, 256 bp, Zea mays
atgagttgcaatactgtaacgaggtggcctccgaactgaaatcaagagggctacgtgttgaagtctgtcatggagagcgcctaccaaagctaataaggaatgctgaaacacaaaaggtgccactcatggcagttgttggtcctaaagaagttcaagccaggaccctgactatcaggtccaggcacaacggggagatcggcacgatgcccgtcgatgaattcatcaccaggcttcaacttgctgtcgcaaacaaatc

SEQ ID NO: 26405 - DNA, 258 bp, Zea mays
ctggacgtcagcctagcaattagctcatcgactccagattggagaactcgacaccatgaaggtgctgatcgttgcccttgctctcctggcgctcgctgcgagcgccgcctccagtacaagcggcggctgtggctgccagacaccaccgtttcatctaccgcctccgttctatatgccgcctccgttctatctgccgccgcagcagcagccgcagccatggcaataccccactcaaccaccgacagctaagcccgtgcc

SEQ ID NO: 26406 - DNA, 253 bp, Zea mays
attttcagcattcaaaaacacaccaagcgaacgcactagcaacgacctaacaccaatggctaccaagatattagccctccttgcgcttcttgcccttttagtgagcgcaacaaatgcgttcattattccacagtgctcacttgctcctagtgccagtattccacagttcctcccaccagttacttcaatgggcttcgaacatccagccgtgcaagcctacaggctacaactagcgcttgcggcgagcgcctta

SEQ ID NO: 26407 - DNA, 253 bp, Zea mays
atccaggacaaagagggcatccccccagaccagcagcgtctgatcttcgctggcaagcagctggaggatggccgcaccctagcagactacaacatccagaaggagagcactctccacctggtgctccgcctccgtggtggtcagtaagccatggttcatttaagctgctgctgtacctgggtatctgcgtcgtctggtgccctctggtgtacctctatatggatgtcgtcgtctaataaacatctgtggtttg

SEQ ID NO: 26408 - DNA, 249 bp, Zea mays
gaaacacaccaagcgaagctactagcaacgacctaacaacaatggctaccaagatattagccctccttgcgcttcttgccctttttgtgagcgcaacaaatgcgttcattattccacaatgctcacttgctcctagtgccattattccacagttcctcccaccagttacttcaatgggcttcgaacacctagctgtgcaagccaacatgcaacaacaagcgcttgcggcgagcgtcttacaacaaccaa

SEQ ID NO: 26409 - DNA, 252 bp, Zea mays
ggctccttcactgtcacacgtgatacctctggggagcaacttggcaggggtacaaagatgaccctttacctcaaggatgatcagttagagtatcttgaggagcgccgctgaaggatctgatcaagaagcactcagagttcatcagctacccaatctctctctggatcgagaagaccactgagaaggaaatatctgatgatgaggacgaggaagataagaaggacgaggagggcaaggttgaggatgttgatg

SEQ ID NO: 26410 - DNA, 252 bp, Zea mays
ccccaatctcttggtcagcaacctgtgacattcttcagggaggttcttgctctttgtgatcatccgtgcctcttggaaaaagaggaaaccaaatcattgttcagtgctgatgcaatttctcgagcaaagcagattcttgcaactattcctggaagggcaacaggtgcatatagtcacagtcagggtatcaaaggactgcgtgatgcaattgctgctggaatcatgtcacgtgatggattccctgcaaatgca

SEQ ID NO: 26411 - DNA, 253 bp, Zea mays
ctccgtgttcagttaaaaattagtacagaatcccttgctcatgaacatgctgaattcatgaataagatgcagcaagagcatgctagttggcttagcaggatacaattagaaagagaagatctgaagaaagatattgatatccagagaaccgagttactgaattctgcaaaggctaggcagatggaaatagattcatatttgagggaaaaagaagaggagtttgaacagaaaaaatccaaggaacttgaataca

SEQ ID NO: 26412 - DNA, 252 bp, Zea mays
acagcagttacctttggtgcatttgttggcacaaaacatcaaggcacaacaactacaacaacttgtgctaggaaaccttgctgcctactctcagcaacagcagtttcttccattcaaccaactggctgcattgaactctgctgcttatttgcaacaacaactaccattcagtcagctagctgctgcctacccccagcaatttcttccattcaaccaactggcagcattgaactctgctgcttatttacaaca

SEQ ID NO: 26413 - DNA, 146 bp, Zea mays
agccagttctctttgatgaaccctgccttgtcgtggcagcaacccatcgttggaggtgccatcttttagattacatatgagatgtaatcgataatggtgccctcataccggcatgtgtttcctagaaataatcaatatattgattg

SEQ ID NO: 26414 - DNA, 249 bp, Zea mays
cccagctcttcaaccctataggctccaacaagcaatcgcagcaagcaacatacctttatcacccttgtttcaacaatcgccagccctatctttggtgcagtcattggtacaaaccatcaaggcacagcagctgcagcaactcgtgctacctgtgatcaaccaagtagctctggcaaacctttctccctactatcagcaacaacaatttcttccattcaaccaactatctacactgaaccctgctgctta

SEQ ID NO: 26415 - DNA, 250 bp, Zea mays
gagaccaacaagcaacatagaaagtggaatccagtagcaacaatagagcaacaatggcgaccaagatactttccctccttatgctccttgctctttctgcatgtgttgctaacgcgacaattttccctcaatgctcacaagctcctatagcttcccttcttcccccataccttccatcaatgatagcttcagtatgtgaaaacccagctcttcaaccctataggctccaacaagcaatcgcagcaagcaa

SEQ ID NO: 26416 - DNA, 261 bp, Zea mays
ctggctgtgtcaaactctgctgcgtacctacaacagcgacaacagttacttaatccattggcagtggctaacccattggtcgctaccttcctgcagcagcaacaacaattgctgccatacaaccagttctctttgatgaaccctgccttgcagcaacccatcgttggaggtgccatcttttagattacatatgagatgtactcgacaatggtgccctcataccgacatgtgtttcctagaaataatcaatatattgattga

SEQ ID NO: 26417 - DNA, 248 bp, Zea mays
gaagatggtcatcgttctcgtcgtgtgcctggctctgtcagctgccagcgcctctgcaatgcagatgccctgcccctgcgcggggctgcagggcttgtacggcgctggcgccggcctgacgacgatgatgggcgccggcgggctgtacccctacgcggagtacctgaggcagccgcagtgcagcccgctggcggcggcgccctactacgccgggtgtgggcagacgagcgccatgtaccagccgctcc

SEQ ID NO: 26418 - DNA, 248 bp, Zea mays
tagaaagcacaatagtgtaccaacaatggcagccaaaatattttgcctccttatgctccttggtctttctgcaagtgctgctacggcgaccattttcccgcaatgctcgcaagctcctatagcttcccttcttcccccgtacctctcaccagcggtgtcttcggtatgtgaaaacccaattcttcaaccctacaggatccaacaggcaatcgcagctggcatcttacctttatcacccttgttcctcc

SEQ ID NO: 26419 - DNA, 249 bp, Zea mays
cttgctcctagtgccagtattccacagttcctcccaccagttacttcaatgggcttcgaacatccagccgtgcaagcctacaggctacaactagcgcttgcggcgagcgccttacaacaaccaattgcccaattgcaacaacaatccttggcacatctaaccctacaaaccattgcaacgcaacaacaacaacaacagtttctgccatcactgagccacctagccgtggtgaaccctgtcacctacttg

SEQ ID NO: 26420 - DNA, 246 bp, Zea mays
ggctctatgtatttaaagatggtgaaccactgaatgaaccactgtatgttcatcggatgacctgctacctttttggaagagaaaggaaagttgcagatgtccccacagatcatccctcctgcagcaagcaacatgcagttcttcaatacagacttgtggagaaggagcaactagatggcatgatgacaaagaaaataaggccttatctgatggatcttgatagtacaaatggaactttcatcaatg

SEQ ID NO: 26421 - DNA, 240 bp, Zea mays
caacaatggcagctaaaatattttgcctccttatgctccttggtctttctgcaagtgctgctacggcgaccattttcccacaatgctcacaagctcctatagcttcccttcttcccccgtacctctcaccaacggtgtcttcggtatgtgaaaacccaattcttcaaccctacaggatccaacaggcaatcgcagctggcatcttacctttatcacccttgttcctccaacaatcatcag

SEQ ID NO: 26422 - DNA, 246 bp, Zea mays
cagcaagcaacatagaaagtagaatccattagcaacaatagagcaacaatggcgaccaagatattttccctccttatgctccttgctctttctacatgtgttgctaacgcgacaattttccctcaatgctcacaagctcctatagcttcccttcttcccccataccttccatcaattatagcttcagtatgtgaaaacccagctcttcaaccatataggcttcaacaagcaatcgcagcaagcaac

SEQ ID NO: 26423 - DNA, 244 bp, Zea mays
cgttctcgtcgtgtgcctggctctgtcagctgccagcgcctctgcaatgcagatgccctgcccctgcgcggggctgcagggcttgtacggcgctggcgccggcctgacgacgatgatgggcgccggcgggctgtacccctacgcggagtacctgaggcagccgcagtgcagcccgctggcggcggcgccctactacgccgggtgtgggcagccgagcgccatgttccagccgctccggcaacag

SEQ ID NO: 26424 - DNA, 247 bp, Zea mays
cagaattctgcacacctgagagctgcccaacaatgacagctggcccaaagtatgagtacagatgggctgatggtgtgcagataaagaaacccatagaggtatcagcaccaaaatatatggagtatctgatggattggattgaaggccagcttgacgatgaatccatatttcctcaaaaacttggcacaccattcccaccaaacttcaaggaagtagtgaagacgatattcaagcgcttgtttcgtgt

SEQ ID NO: 26425 - DNA, 247 bp, Zea mays
agagcatgagcaacaccaaggacagagccatgagcaacaacatcaacaacaattccagggtcatgacaagcagcaacaaccacaacagcctcagcaatatcagcagggccaggaaaaatcacaacagcaacaatgtcattgccaggagcagcaacagactacaaggtgcagctataactactatagcagtagctcaaatctaaaaaattgtcatgaattcctaaggcagcagtgcagccctttggta

SEQ ID NO: 26426 - DNA, 247 bp, Zea mays
attccacagttcctcccaccagttacttcaatgggcttcgaacacctagctgtgcaagccaacatgcaacaacaagcgcttgcggcgagcgtcttacaacaaccaattgcccaattgcaacaacaatccttgccacatctaacaatacaagccatcacaacgcaacagcaacaacagttcctaccagcactgagccacctagccatggtgaaccctgccgcctacttgcaagagcagctgcttgcat

SEQ ID NO: 26427 - DNA, 250 bp, Zea mays
attattgagaccagcaagcaacatagacagtagaatccattagcaacaatagagcaacaatggcgaccaagatattttccctccttatgctccttgctctttctacatgtgttgctaacgcgacaattttccctcaatgctcacaagctcctatagcttcccttcttcccccataccttccatcaattatagcttcagtatgtgaaaacccagctcttcaaccatataggcttcaacaagcaatcgcagc

SEQ ID NO: 26428 - DNA, 259 bp, Zea mays
cacagttcctcccaccagttacttcaatgggcttcgaacatccagccgtgcaagcctacaggctacaactagcgcttgcggcgagcgccttacaacaaccaattgcccaattgcaacaacaatccttggcacatctaaccctacaaaccattgcaacgcaacaacaacaacaacaacagtttctgccatcactgagccacctagccgtggtgaaccctgtcacctacttgcaacagcagctgcttgcatccaacccact

SEQ ID NO: 26429 - DNA, 258 bp, Zea mays; identical to SEQ ID NO: 26306

SEQ ID NO: 26430 - DNA, 260 bp, Zea mays
cggtgggcaatgcacctacgtacctacaacaacagttgctgcaacaaattgtaccagctctgactcagctagctgtggcaaaccctgctgcctacttacaacagttgcttccattcaaccaactggctgtgtcaaactctgctgcgtacctacaacagcgacaacagttacttaatccattggcagtggctaacccattggtcgctaccttcctgcagcagcaacaacaattgctgccatacaaccagttctctttgatg

SEQ ID NO: 26431 - DNA, 259 bp, Zea mays
cccgcaaccctcttacaactacaacaattgttgccctttgtccaacttgctttgacaaacccagcagcctcctaccaacaacacatcattggtggtgaactattttagattgcttattagttgtaattcaataataaagttttttggatgatgtatgtggccaaccagaaataagaagttacatttccagattctaaaaaaaaaaaaaaaaaaaaaaaaaaaaaaaaaaaaaaaaaaaaaaaaaaaaaaaaaataaaaa

SEQ ID NO: 26432 - DNA, 258 bp, Zea mays
cactcattggtgattattgtgtgaggaaacgagatggcatggacaatttatggatcatgaagccttggaacatggcgagaacaatcgataccacagttactggtgatttgtctgctatcatcagacttatggagacaggccccaagatatgccaaaaatatattgaacgccctgcacttttccaaggaaggaagtttgatcttcggtacattgttttggtccgtagtatccgccctttggaaatatttctgtctgatg

SEQ ID NO: 26433 - DNA, 259 bp, Zea mays
gcttgatctgtggtaagggtttcaaaagagatgctaacctaaggatgcacatgaggggccatggagatgagtacaagactccagctgctcttgccaaacccacaaaagattatggtgcagatcatgcaccggttacaaggtactcatgcccatttgtgggttgcaaacggaacaaggagcacaggaagttccagcctctcaaaacaatcttgtgtgtgaagaaccattacaagagaagccactgtgacaagagctacac

SEQ ID NO: 26434 - DNA, 258 bp, Zea mays
cttacctttatcacccttgttcctccaacaatcatcagccctattacagcagttacctttggtgcatttattggcacaaaacatcagggcacaacaactacaacaacttgtgctagcaaaccttgctgcctactctcagcaacagcagtttcttccattcaaccaactagctgcattgaactctgcttcttatttgcaacaacaacaactaccattcagccagctacctgttgcctacccccaacaatttcttccatt

SEQ ID NO: 26435 - DNA, 256 bp, Zea mays
gcaacatagaaagcacaatagtgtaccaacaatggcagccaaaatattttgcctccttatgctccttggtctttctgcaagtgctgctacggcgaccattttcccacaatgctcacaagctcctatagcttcccttcttcccccgtacctctcaccagcggtgtcttcggtatgtgaaaacccaattcttcaaccctataggatccaacaggcaatcgcagctggcatcttacctttatcacccttgttcctccaa

SEQ ID NO: 26436 - DNA, 258 bp, Zea mays
cttgcaacagcagctgcttgcatccaacccacttgctctggcgaacgtagctgcataccagcaacaacaacagctgcaacagtttatgccagtgctcagtcaactagccatggtgaaccctgccgtctacctacaactactttcatctagcccgctcgcggtgggcaatgcacctacgtacctacaacaacagttgctgcaacaaattgtaccagctctgactcagctagctgtggcaaaccctgctgcctacttaca

SEQ ID NO: 26437 - DNA, 256 bp, Zea mays
ggcaggtggagccgctgcaccggtaccaggcgacatacggtgtggtcctgcagtccttcctgcagcagcagccgcagggcgagctcgcggcgctgatggcggcccaggtagcgcacagctgacggcgatgtgcggtctgcagctgcagcagccaggtccctgcccttgcaacgcagctgccggcggtgtctactactgaggaaactatgtactgtagtaataatgtaatggagccgctgactagctacctataggg

SEQ ID NO: 26438 - DNA, 254 bp, Zea mays
agaccaactagcaacatagaaagcacaatagtgtaccaacaatggcagctaaaatattttgcctccttatgctccttggtctttctgcaagtgctgctacggcgaccattttcccacaatgctcacaagctcctatagcttcccttcttcccccgtacctctcaccaacggtgtcttcggtatgtgaaaacccaattcttcaaccctacaggatccaacaggcaatcgcagctggcatcttacctttatcaccc

SEQ ID NO: 26439 - DNA, 254 bp, Zea mays
gaaaacccaattcttcaaccctacaggatccaacaggcaatcgcagcaggcatcttacctttatcacccttgttcctccaacaaccgtcagccctattacagcagttacctttggtgcatttgttggcacaaaacatcaaggcacaacaactacaacaacttgtgctaggaaaccttgctgcctactctcagcaacagcagtttcttccattcaaccaactggctgcattgaactctgctgcttatttgcaaca

SEQ ID NO: 26440 - DNA, 254 bp, Zea mays
cagggaacctggttcgttggcagcaccccgatcctgggccagtgcgtcgagttcctgaggcatcagtgcagcccgacggcgacgccctactgctcgcctcagtgccagtcgttgcggcagcagtgttgccagcagctcaggcaggtggagccgcagcaccggtaccaggcgatcttcggcttggtcctccagtccatcctgcagcagcagccgcaaagcggccaggtcgcggggctgttggcggcgcagatagc

SEQ ID NO: 26441 - DNA, 255 bp, Zea mays
cagtagcaacaatagagcaacaatggcgaccaagatattttccctccttatgctccttgctctttctacatgtgttgctaacgcgacaattttccctcaatgctcacaagctcctatagcttcccttcttcccccataccttccatcaattatagcttcaatatgtgaaaacccagctcttcaaccatataggcttcaacaagcaatcgcagcaagcaacatacctttatcgcccttgttgtttcaacaatcgcc

SEQ ID NO: 26442 - DNA, 256 bp, Zea mays
ccagattggagaactcgacaccatgaaggtgctgatcgttgcccttgctctcctggcgctcgctgcgagcgccgcctccagtacaagcggcggctgtggctgccagacaccaccgtttcatctaccgcctccgttctatatgccgcctccgatgctatctgccgccgcagcagcagccgcagccatggcaataccccactcaaccaccgcagctaagcccgtgccagcagttcggatcctgcggcgtcggcagcgt

SEQ ID NO: 26443 - DNA, 255 bp, Zea mays
ggacgtcagcctagcaattagctcatcgactccagattggagaactcgacaccatgaaggtgctgatcgttgcccttgctctcctggcgctcgctccgagcgccgcctccagtacaagcggcggctgtggctgccagacaccaccgtttcatctaccgcctccgttctatatgccgcctccgttctatctgccgccgcagcaagagccgcagccatggcaataccccactcaaccaccgcagctaagcccgtgcc

SEQ ID NO: 26444 - DNA, 100 bp, Zea mays
aattgagtaataatgtgtcacgcatcaccatgggtggcagtgtcagtgtgagcaatgacctgaatgaacaattgaaatgaaaagaaaaaagtattgttcc

SEQ ID NO: 26445 - DNA, 254 bp, Zea mays
agctcatcgactccagattggagaactcgacaccatgaaggtgctgatcgttgcccttgctctcctggcgctcgctgcgagcgcgcctccagtacaagcggcggctgtggctgccagacaccaccgtttcatctaccgcctccgttctatatgccgcctccgttctatcagccgccgcagcagcagccgcagccatggcaataccccactcaaccaccgcagctaagcccgtgccagcagttcggatcctgcgg

SEQ ID NO: 26446 - DNA, 253 bp, Zea mays
ggatcgtcgaacagaacagcatgaagatggtcatcgttctcgtcgtgtgcctggctctgtcagctgccagcgcctctgcaatgcagatgccctgcccctgcgcggggctgcagggcttgtacggcgctggcgccggcctgacgacgatgatgggcgccggcgggctgtacccctacgcggagtacctgaggcagccgcagtgcagcccgctggcggcggcgccctactacgccgggtgtgggcagacgagcgc

SEQ ID NO: 26447 - DNA, 256 bp, Zea mays
gatacgacatggcctacatgtttgcatacagcatgagagagaagacccacgctcaccggaactacgaggacgatgtacccgaaggtgtgaaacagaggcggctcatggaactgatcaacactttccgcgagaccacgaagaagaactacgactctcaagtcggcacagtgcagctcgttctcgtggaggggcccaacaagcgtgctcccaaaacggaagtgatagggaagactgatcggggccacaaggtgtcgtt

SEQ ID NO: 26448 - DNA, 249 bp, Zea mays
gagcgaagtccgtgaagcacatcttgccaaatctttgtactttataagggtcggtgagaaggaaaaggccctggaacagcttaaagtcactgaaggaaaaactgtagctgttggccaaaagatggatcttgtgttccacactttgcagattggttttttctacatggattttgatctgatatcaaaatccatcgataaggcaaagaacttgtttgaggaaggaggcgattgggagaggaagaacagatt

SEQ ID NO: 26449 - DNA, 248 bp, Zea mays
gcactagcaacaacctaacaacaatggctaccaagatattatccctccttgcgcttcttgcgctttttgcgagcgcaacaaatgcgtccattattccacaatgctcacttgctcctagttccattattccacagttcctcccaccagttacttcaatggccttcgaacacccagctgtgcaagcctataggctacaacaagcgattgcggcgagcgtcttacaacaaccaattgcccaattgcaacaa

SEQ ID NO: 26450 - DNA, 247 bp, Zea mays
agctcatcgactccagattggagaactcgacaccatgaaggtgctgatcgttgcccttgctctcctggcgctcgctgcgagtccgcctccagtacaagcggcggctgtggctgccagacaccaccgtttcatctaccgcctccgttctatatgccgcctccgttctatctgccgccgcaacagcagccgcagccatggcaataccccactcaaccaccgcagctaagcccgtgccagcagttcggat

SEQ ID NO: 26451 - DNA, 248 bp, Zea mays
gaccaactagcaacatagaaagcacaatagtgtaccaacaatggcagccaaaatattttgcctccttatgctccttggtctttctgcaagtgctgctacggcgaccattttcccacaatgctcacaagctcctatagcttcccttcttcccccgtacctctcaccagcggtgtcttcggtatgtgaaaacccaattcttcaaccctataggatccaacaggcaatcgcagctggcatcttacctttat

SEQ ID NO: 26452 - DNA, 249 bp, Zea mays
cagcctcatccccagccacacccatgcccgtgccaacagccgcatccaagcccgtgccagctgcagggaacctgcggcgttggcagcaccccgatcctgggccagtgcgtcgagtttctgaggcatcagtgcagcccgacggcgacgccctactgctcgcctcagtgccagtcgttgcggcagcagtgttgccagcagctcaggcaggtggagccgcagcaccggtaccaggcgatcttcggcttggtc

SEQ ID NO: 26453 - DNA, 248 bp, Zea mays
ctgctgtgaagtactcccgtgggacgttcatctttcctggtgcacagccagccccccacaggagcttctctgaggaagttgctgcacttaaccgctactttggcggcctgaaatctggtggtaatgcttatgtgattggagatccagcaagacctggacagaagtggcacgtcttctacgccactgagtacccagagcaaccaatggttaaccttgagatgtgcatgactggtctggacaagaagaaa

SEQ ID NO: 26454 - DNA, 248 bp, Zea mays
cagagagagagaccgacgcgccggcagatcccaagctcaccctagagggggaagagggcgaccgaagcggcgatgggtttcatcatggccttcgcggagaatctgatcctccgtctgatggaggacccggacaagcgcgaccaggttcggcgggagcatgtctacaagatgaaggagcggtgcgagcgcactaaggcggcgtggagcctccctctgcgcccctacggcttctggaccttcgaccgctt

SEQ ID NO: 26455 - DNA, 247 bp, Zea mays
cgagcgtcttacaacaaccaatttcccagttgcaacaacaatccttggcacatctaacaatacaaaccatcgcaacgcaacagcaacaacaattcctaccagcactgagccacctagccatggtgaaccctgccgcctacttgcaacagcagttgcttgcatcaaacccacttgctctggcaaacgtagttgcaaaccagccacaacaacagctgcaacagtttctgccagcgctcagtcaactagc

SEQ ID NO: 26456 - DNA, 248 bp, Zea mays
tcggatcctgcggcgtcggcagcgtcggcagcccgttcctgggccagtgcgtcgagttcctgaggcaccagtgcagcccggcggcgacgccctacggctcgccacagtgccaggcgctgcagcagcagtgctgccaccagatcaggcaggtggagccgctgcaccggtaccaggcgacatacggtgtggtcctgcagtccttcctgcagcagcagccgcagggcgagctcgcggcgctgatggcggcc

SEQ ID NO: 26457 - DNA, 250 bp, Zea mays
tacagcagttacctttggtgcatttattggcacaaaacatcagggcacaacaactacaacaactcgtgctagcaaaccttgctacctacaacagcgacaacagttacttaatccattggcagtggctaacccattggtcgctaccttcctgcagcagcaacaacaattgctgccatacaaccagttctctttgatgaaccctgccttgcagcaacccatcgttggaggtgccatcttttagattacatat

SEQ ID NO: 26458 - DNA, 264 bp, Zea mays
aagaaatttaactctttcaagaagattgtaagatccatggggtatggcgaggatgatctccctctagtatcgttacagtctgtttccaaaggatactatggagagtgtggtaaaagaggagggtacatggagattactggcttcagtactccagtaagagagcagatctacaagatagcttcagtgaacctgtgctccaatatcactggtcaaatccttgcgagcctcgtcatgaatccaccaaaggttggagacgaatcctat

SEQ ID NO: 26459 - DNA, 216 bp, Zea mays
gtggactctaccagtaccagtaccagctgcccagctaccgcaccaacccctgtggcgtctccgctgccattccgccctactactgattcatgatatttgggaaatctcctctatccatccctctctatctatatatgtaataatgcagtaagacgacacacattatcatgtgtggtatgaccaataatatatgcatcataataaagttttggtttt

SEQ ID NO: 26460 - DNA, 261 bp, Zea mays
gcatgtggctatctcttgggggttttcaagaaaagggacctgatgattctcaccagtacaatactcatgtattaattgatgacactggaaaagttaggagctcatatcgaaaaatacatttgtttgatgttgatgtacctggcaatatggtgtacaaggaaagtcgtttcacagccgcaggtgatactattgttgctgtggatagcccttttggacggttggggcttactgtttgctatgatttgagattcccagagcttt

SEQ ID NO: 26461 - DNA, 261 bp, Zea mays
ctactatactatactctaggaagcaaggacaccaccgccatggcagccaagatgcttgcattgttcgctctcctagctctttgtgcaagcgccactagtgcgacccatattccagggcacttgccaccagtcatgccattgggtaccatgaacccatgcatgcagtactgcatgatgcaacaggggcttgccagcttgatggcgtgtccgtccctgatgctgcagcaactgttggccttaccgcttcagacgatgccagtg

SEQ ID NO: 26462 - DNA, 259 bp, Zea mays
ggcaataccccactcaaccaccgcagctaagcccgtgccagcagttcggatcctgcggcgtcggcagcgtcggcagcccgttcctgggccagtgcgtcgagttcctgaggcaccagtgcagcccggcggcgacgccctacggctcgccacagtgccaggcgctgcagcagcagtgctgccaccagatcaggcaggtggagccgctgcaccggtaccaggcgacatacggtgtggtcctgcagtccttcctgcagcagca

SEQ ID NO: 26463 - DNA, 258 bp, Zea mays
agcgtgactcagaaaccaggcttgtgattgagcaggaggtgaagaatttcctagagaacgcgtataataatgcgaagaccatccttacgaaacacaataaagagctacatgctctggccaacgcacttcttgagcacgagaccctcacaggagcccagataacgaacatattggcccaggtacgtaacaaacagcaacaagaacatactgtcgaagcaccacagagggccccagcttccccggcatcaccagctgcgg

SEQ ID NO: 26464 - DNA, 258 bp, Zea mays
gtgcgtagagaggatcgtcgaacagaacagcatgaagatggtcatcgttctcgtcgtgtgcctggctctgtcagctgccagcgcctctgcaatgcagatgccctgcccctgcgcggggctgcagggcttgtacggcgctggcgccggcctgacgacgatgatgggcgccggcgggctgtacccctacgcggagtacctgaggcagccgcagtgcagcccgctggcggcggcgccctactacgccgggtgtgggcagac

SEQ ID NO: 26465 - DNA, 259 bp, Zea mays
catcaatgtcgagaacgtggaggagaaccggcgggctctccgtgagctcctgttctgctgccctggtgccctccagtacatcagcggtgtgatcctcttcgaggagaccctctaccagaagaccaaggatggcaagccttttgtcgatgtcctcaaggagggaggcgtcctccctggcatcaaggtcgacaagggcaccattgaggttgttggcaccgacaaggagaccaccacccagggccacgatgacctcggcaag

SEQ ID NO: 26466 - DNA, 256 bp, Zea mays
gcaaaccctgctgcctacttacaacagttgcttccattcaaccaactggctgtgtcaaactctgctgcgtacctacaacagcgacaacagttacttaatccattggcagtggctaacccattggtcgctaccttcctgcagcagcaacaacaattgctgccatacaaccagttctctttgatgaaccctgccttgcagcaacccatcgttggaggtgccatcttttagattacatatgagatgtactcgacaatgg

SEQ ID NO: 26467 - DNA, 252 bp, Zea mays
ctttccaacagatgtggatatcaaaggaggagtacgatgagtctggcccggcaattgttcacaggaagtgcttctaggtttctgccaagttcgtcaagtgcttttagggttcgccaagttcatcatcgctacctagtcttaagttatgcccccttcatttcctgagatatgtgtggcagatttgcatcgttttggtatttcgtggctccatgtgtgagcatgctgtgtcctataacctggtttatgagatga

SEQ ID NO: 26468 - DNA, 255 bp, Zea mays
aggcgatcttcggcttggtcctccagtccatcctgcagcagcagccgcaaagcggccaggtcgcggggctgttggcggcgcagatagcgcagcaactgacggcgatgtgcggcctgcagcagccgactccatgcccctacgctgctgccggcggtgtcccccactgaagaaactatgtgctgtagtatagccgctggctagctagctagttgagtcatttagcggcgatgattgagtaataatgtgtcacgcatc

SEQ ID NO: 26469 - DNA, 251 bp, Zea mays
gcagcagtgctgccaccagatcaggcaggtggagccgctgcaccggtaccaggcgacatacggtgtggtcctgcagtccttcctgcagcagcagccgcagggcgagctcgcggcgctgatggcggcccaggtagcgcacagctgacggcgatgtgcggcctgcagctgcagcagccaggtccctgcccttgcaacgcagctgccggcggtgtctactactgaggaaactatgtactgtagtaataatgtaa

SEQ ID NO: 26470 - DNA, 254 bp, Zea mays
aacagttgcaacagtttctaccagcgctcagtcaactagccatggtgaaccctatcgcctacctacaacagcaacaacttctttcatctagcccgctcgctatgggcaatgcacctacatacctgcaacaacagttgttgcaacaacagttgctgcaacaaattgtaccagctcttactcagctagctgtggcaaaccctgctgcctacttgcaacaactacttccattcaaccaactgactgtgtcgaactct

SEQ ID NO: 26471 - DNA, 254 bp, Zea mays
gtggaatccagtagcaacaatagagcaacaatggcgaccaagatattttccctccttatgctccttgctctttctacatgtgttgctaacgcgacaattttccctcaatgctcacaagctcctatagcttcccttcttcccccataccttccatcaattatagcttcaatatgtgaaaacccagctcttcaaccatataggcttcaacaagcaatcgcagcaagcaacatacctttatcgcccttgttgtttca

SEQ ID NO: 26472 - DNA, 252 bp, Zea mays
ctttacaccttggttgatggctttgtcatccgcaacccatccagagcgaatccagctaacccttcaattgagcttggacctgagttcaagaaggttgccaatttccttgctcggttcaagtccatccccagcatagttgagcttgacagcttgaaggtttctggtgatgtctggtttggctctggaattacactcaagggcaaggtgacaattatcgccaagcctggagtgaagttggagattccagatgga

SEQ ID NO: 26473 - DNA, 149 bp, Zea mays
aacgaatcctaccaccttattgcagcagcccaccattggtggtgccatcttctagatttttttatgctttatactgtaataataaagttctcatactgatatgtgcaacttctcagtaataaaagattagagatctatattttaagttc
